United States Patent Application Publication US 2011/0183924 A1 - sequence listing, part 274

SEQ ID NO: 820248 - protein, 156 aa, Homo sapiens
RQPARAPFHQTLVSVGGPARGRPRGVISTPVIRTFGRGGRYYGRGYKNQAAIQGRPPYAASAEEVAKELKSKSGESKSSAMSSDGSLAENGVMAEEKPAPQMNGSTGDARAPSHSESALNNDSKTCNTNPHLNALSTDSACRREAALEAAVLNKEE

SEQ ID NO: 820249 - protein, 133 aa, Homo sapiens
MGGVTSRGNDHMLQVDECNRNPHRDGIGGGGRPPYAASAEEVAKELKSKSGESKSSAMSSDGSLAENGVMAEEKPAPQMNGSTGDARAPSHSESALNNDSKTCNTNPHLNALSTDSACRREAALEAAVLNKEE

SEQ ID NO: 820250 - protein, 1140 aa, Homo sapiens; identical to SEQ ID NO: 820236

SEQ ID NO: 820251 - protein, 658 aa, Homo sapiens
MVNRAFSLTRWVSGWFLVLSMPLQNLTLVFQIGLKNDLSVGGFVVFFETLLLTEQLLEIFFTGSMGASLAKPCACRLHVLGSSCPATACRLHPAPLQRFLAALAKACFGGNIELFVFFNGALEKARLHEWVKRQGNERQTAQQIVSHVQNKGTPPPKVWFLPPVCMAHCIRLALIRFHVKVAQSIEDHHQEVIGFCRENGFHGLVAYDSDYALCNIPYYFSAHALKLSRNGKSLTTSQYLMHEVAKQLDLNPNRFPIFAALLGNHILPDEDLASFHWSLLGPEHPLASLKVRAHQLVLPPCDVVIKAVADYVRNIQDTSDLDAIAKDVFQHSQSRTDDKVIRFKRAIGYYSATSKPMSFHPPHYLAARPGPFGMPGMVPPHVPPQMLNIPQTSLQAKPVAPQVPSPGGAPGQGPYPYSLSEPAPLTLDTSGKNLTEQNSYSNIPHEGKHTPLYERSSPINPAQSGSPNHVDSAYFPGSSTSSSSDNDEGSGGATNHISGNKIGWEKTGSHSEPQARGDPGDQTKAEGSSTASSGSQLAEGKGSQMGTVQPIPCLLSMPTRNHMDITTPPLPPVAPEVLRVAEHRHKKGLMYPYIFHVLTKGEIKIAVSIEDEANKDLPPAALLYRPVRQYVYGVLFSLAESRKKTERLAFRKNRLPPE

SEQ ID NO: 820252 - protein, 1140 aa, Homo sapiens; identical to SEQ ID NO: 820236

SEQ ID NO: 820253 - protein, 679 aa, Homo sapiens
MVNRAFSLTRWVSGWFLVLSMPLQNLTLVFQIGLKNDLSVGGFVVFFETLLLTEQLLEIFFTGSMGASLAKPCACRLHVLGSSCPATACRLHPAPLQRFLAALAKACFGGNIELFVFFNGALEKARLHEWVKRQGNERQTAQQIVSHVQNKGTPPPKVWFLPPVCMAHCIRLALIRFHVKVAQSIEDHHQEVIGFCRENGFHGLVAYDSDYALCNIPYYFSAHALKLSRNGKSLTTSQYLMHEVAKQLDLNPNRFPIFAALLGNHILPDEDLASFHWSLLGPEHPLASLKVRAHQLVLPPCDVVIKAVADYVRNIQDTSDLDAIAKDVFQHSQSRTDDKVIRFKRAIGYYSATSKPMSFHPPHYLAARPGPFGMPGMVPPHVPPQMLNIPQTSLQAKPVAPQVPSPGGAPGQGPYPYSLSEPAPLTLDTSGKNLTEQNSYSNIPHEGKHTPLYERSSPINPAQSGSPNHVDSAYFPGSSTSSSSDNDEGSGGATNHISGNKIGWEKTGSHSEPQARGDPGDQTKAEGSSTASSGSQLAEGKGSQMGTVQPIPCLLSMPTRNHMDITTPPLPPVAPEVLRVAEHRHKKGLMYPYIFHVLTKGEIKIAVSIEDEANKDLPPAALLYRPVRQYVYGVLFSLAESRKKTERLAFRKNRLPPELCTVTIHCLFSSVPRNLLCIF

SEQ ID NO: 820254 - protein, 605 aa, Homo sapiens
MVNRAFSLTRWVSGWFLVLSMPLQNLTLVFQIGLKNDLSVGGFVVFFETLLLTEQLLEIFFTGSMGASLAKPCACRLHVLGSSCPATACRLHPAPLQRFLAALAKACFGGNIELFVFFNGALEKARLHEWVKRQGNERQTAQQIVSHVQNKGTPPPKVWFLPPVCMAHCIRLALIRFHVKVAQSIEDHHQEVIGFCRENGFHGLVAYDSDYALCNIPYYFSAHALKLSRNGKSLTTSQYLMHEVAKQLDLNPNRFPIFAALLGNHILPDEDLASFHWSLLGPEHPLASLKVRAHQLVLPPCDVVIKAVADYVRNIQDTSDLDAIAKDVFQHSQSRTDDKVIRFKRAIGYYSATSKPMSFHPPHYLAARPGPFGMPGMVPPHVPPQMLNIPQTSLQAKPVAPQVPSPGGAPGQGPYPYSLSEPAPLTLDTSGKNLTEQNSYSNIPHEGKHTPLYERSSPINPAQSGSPNHVDSAYFPGSSTSSSSDNDEGSGGATNHISGNKIGWEKTGSHSEPQARGDPGDQTKAEGSSTASSGSQLAEGKGSQMGTVQPIPCLLSMPTRNHMDITTPPLPPVAPEVLRVAEHRHKKGLMYPYIFHVLTKVQHKL

SEQ ID NO: 820255 - protein, 650 aa, Homo sapiens; identical to SEQ ID NO: 820237

SEQ ID NO: 820256 - protein, 263 aa, Homo sapiens [sequence omitted]

SEQ ID NO: 820257 - protein, 231 aa, Homo sapiens
MVNRAFSLTRWVSGWFLVLSMPLQNLTLVFQIGLKNDLSVGGFVVFFETLLLTEQLLEIFFTGSMGASLAKPCACRLHVLGSSCPATACRLHPAPLQRFLAALAKACFGGNIELFVFFNGALEKARLHEWVKRQGNERQTAQQIVSHVQNKGTPPPKVWFLPPVCMAHCIRLALIRFHVKVAQSIEDHHQEVIGFCRENGFHGLVAYDSDYALCNIPYYFSAHPPRSSYSP

SEQ ID NO: 820258 - protein, 277 aa, Homo sapiens
MVNRAFSLTRWVSGWFLVLSMPLQNLTLVFQIGLKNDLSVGGFVVFFETLLLTEQLLEIFFTGSMGASLAKPCACRLHVLGSSCPATACRLHPAPLQRFLAALAKACFGGNIELFVFFNGALEKARLHEWVKRQGNERQTAQQIVSHVQNKGTPPPKVWFLPPVCMAHCIRLALIRFHVKVAQSIEDHHQEVIGFCRENGFHGLVAYDSDYALCNIPYYFSAHALKLSRNGKSLTTSQYLMHEVAKQLDLNPNRFPIFAALLGRWSSVKIFYKGVTI

SEQ ID NO: 820259 - protein, 152 aa, Homo sapiens
MFVLLFSSFCSFFLFLLAVACLLLVLFFSCVCSGLFYNPCLSFVPPVVYTVPLFVLSRGSLLSRFWFLTILLLCFLSPPLFFICVDIPLRYLCAAVLLLGISFCLLFYLDPCGAPSSSLLLFSINLFLGPLFLAKQFFFFFFFFFFFSHCKI

SEQ ID NO: 820260 - protein, 199 aa, Homo sapiens
MGASLAKPCACRLHVLGSSCPATACRLHPAPLQRFLCSQDSLFRDEQALRATCTFRHYGVFGHVICHRCKNHNREPEAAGMSTCRGTAFSRSFLLFPRSQARPASIPLSRTPQSVWAAGPEWCEPTAALERRRPDEQSDSASAPLQSAILSLLPSGAGELFPRTCFAASLRPRTTGRRRRPLWPCREQGAGEGSGGRPA

SEQ ID NO: 820261 - protein, 152 aa, Homo sapiens; identical to SEQ ID NO: 820259

SEQ ID NO: 820262 - protein, 152 aa, Homo sapiens; identical to SEQ ID NO: 820259

SEQ ID NO: 820263 - protein, 152 aa, Homo sapiens; identical to SEQ ID NO: 820259

SEQ ID NO: 820264 - protein, 152 aa, Homo sapiens; identical to SEQ ID NO: 820259

SEQ ID NO: 820265 - protein, 1780 aa, Homo sapiens [sequence omitted]

SEQ ID NO: 820266 - protein, 1820 aa, Homo sapiens
MESNFNQEGVPRPSYVFSADPIARPSEINFDGIKLDLSHEFSLVAPNTEANSFESKDYLQVCLRIRPFTQSEKELESEGCVHILDSQTVVLKEPQCILGRLSEKSSGQMAQKFSFSKVFGPATTQKEFFQGCIMQPVKDLLKGQSRLIFTYGLTNSGKTYTFQGTEENIGILPRTLNVLFDSLQERLYTKMNLKPHRSREYLRLSSEQEKEEIASKSALLRQIKEVTVHNDSDDTLYGSLTNSLNISEFEESIKDYEQANLNMANSIKFSVWVSFFEIYNEYIYDLFVPVSSKFQKRKMLRLSQDVKGYSFIKDLQWIQVSDSKEAYRLLKLGIKHQSVAFTKLNNASSRSHSIFTVKILQIEDSEMSRVIRVSELSLCDLAGSERTMKTQNEGERLRETGNINTSLLTLGKCINVLKNSEKSKFQQHVPFRESKLTHYFQSFFNGKGKICMIVNISQCYLAYDETLNVLKFSAIAQKVCVPDTLNSSQEKLFGPVKSSQDVSLDSNSNSKILNVKRATISWENSLEDLMEDEDLVEELENAEETQNVETKLLDEDLDKTLEENKAFISHEEKRKLLDLIEDLKKKLINEKKEKLTLEFKIREEVTQEFTQYWAQREADFKETLLQEREILEENAERRLAIFKDLVGKCDTREEAAKDICATKVETEETHNYVGFEDIIDSLQDNVADIKKQAEIAHLYIASLPDPQEATACLELKFNQIKAELAKTKGELIKTKEELKKRENESDSLIQELETSNKKIITQNQRIKELINIIDQKEDTINEFQNLKSHMENTFKCNDKADTSSLIINNKLICNETVEVPKDSKSKICSERKRVNENELQQDEPPAKKGSIHVSSAITEDQKKSEEVRPNIAEIEDIRVLQENNEGLRAFLLTIENELKNEKEEKAELNKQIVHFQQELSLSEKKNLTLSKEVQQIQSNYDIAIAELHVQKSKNQEQEEKIMKLSNEIETATRSITNNVSQIKLMHTKIDELRTLDSVSQISNIDLLNLRDLSNGSEEDNLPNTQLDLLGNDYLVSKQVKEYRIQEPNRENSFHSSIEAIWEECKEIVKASSKKSHQIEELEQQIEKLQAEVKGYKDENNRLKEKEHKNQDDLLKEKETLIQQLKEELQEKNVTLDVQIQHVVEGKRALSELTQGVTCYKAKIKELETILETQKVERSHSAKLEQDILEKESIILKLERNLKEFQEHLQDSVKNTKDLNVKELKLKEEITQLTNNLQDMKHLLQLKEEEEETNRQETEKLKEELSASSARTQNLKADLQRKEEDYADLKEKLTDAKKQIKQVQKEVSVMRDEDKLLRIKINELEKKKNQCSQELDMKQRTIQQLKEQLNNQKVEEAIQQYERACKDLNVKEKIIEDMRMTLEEQEQTQVEQDQVLEAKLEEVERLATELEKWKEKCNDLETKNNQRSNKEHENNTDVLGKLTNLQDELQESEQKYNADRKKWLEEKMMLITQAKEAENIRNKEMKKYAEDRERFFKQQNEMEILTAQLTEKDSDLQKWREERDQLVAALEIQLKALISSNVQKDNEIEQLKRIISETSKIETQIMDIKPKRISSADPDKLQTEPLSTSFEISRNKIEDGSVVLDSCEVSTENDQSTRFPKPELEIQFTPLQPNKMAVKHPGCTTPVTVKIPKARKRKSNEMEEDLVKCENKKNATPRTNLKFPISDDRNSSVKKEQKVAIRPSSKKTYSLRSQASIIGVNLATKKKEGTLQKFGDFLQHSPSILQSKAKKIIETMSSSKLSNVEASKENVSQPKRAKRKLYTSEISSPIDISGQVILMDQKMKESDHQIIKRRLRTKTAK

SEQ ID NO: 820267 - protein, 1031 aa, Homo sapiens
MENTFKCNDKADTSSLIINNKLICNETVEVPKDSKSKICSERKRVNENELQQDEPPAKKGSIHVSSAITEDQKKSEEVRPNIAEIEDIRVLQENNEGLRAFLLTIENELKNEKEEKAELNKQIVHFQQELSLSEKKNLTLSKEVQQIQSNYDIAIAELHVQKSKNQEQEEKIMKLSNEIETATRSITNNVSQIKLMHTKIDELRTLDSVSQISNIDLLNLRDLSNGSEEDNLPNTQLDLLGNDYLVSKQVKEYRIQEPNRENSFHSSIEAIWEECKEIVKASSKKSHQIEELEQQIEKLQAEVKGYKDENNRLKEKEHKNQDDLLKEKETLIQQLKEELQEKNVTLDVQIQHVVEGKRALSELTQGVTCYKAKIKELETILETQKVERSHSAKLEQDILEKESIILKLERNLKEFQEHLQDSVKNTKDLNVKELKLKEEITQLTNNLQDMKHLLQLKEEEEETNRQETEKLKEELSASSARTQNLKADLQRKEEDYADLKEKLTDAKKQIKQVQKEVSVMRDEDKLLRIKINELEKKKNQCSQELDMKQRTIQQLKEQLNNQKVEEAIQQYERACKDLNVKEKIIEDMRMTLEEQEQTQVEQDQVLEAKLEEVERLATELEKWKEKCNDLETKNNQRSNKEHENNTDVLGKLTNLQDELQESEQKYNADRKKWLEEKMMLITQAKEAENIRNKEMKKYAEDRERFFKQQNEMEILTAQLTEKDSDLQKWREERDQLVAALEIQLKALISSNVQKDNEIEQLKRIISETSKIETQIMDIKPKRISSADPDKLQTEPLSTSFEISRNKIEDGSVVLDSCEVSTENDQSTRFPKPELEIQFTPLQPNKMAVKHPGCTTPVTVKIPKARKRKSNEMEEDLVKCENKKNATPRTNLKFPISDDRNSSVKKEQKVAIRPSSKKTYSLRSQASIIGVNLATKKKEGTLQKFGDFLQHSPSILQSKAKKIIETMSSSKLSNVEASKENVSQPKRAKRKLYTSEISSPIDISGQVILMDQKMKESDHQIIKRRLRTKTAK

SEQ ID NO: 820268 - protein, 679 aa, Homo sapiens
MESNFNQEGVPRPSYVFSADPIARPSEINFDGIKLDLSHEFSLVAPNTEANSFESKDYLQVCLRIRPFTQSEKELESEGCVHILDSQTVVLKEPQCILGRLSEKSSGQMAQKFSFSKVFGPATTQKEFFQGCIMQPVKDLLKGQSRLIFTYGLTNSGKTYTFQGTEENIGILPRTLNVLFDSLQERLYTKMNLKPHRSREYLRLSSEQEKEEIASKSALLRQIKEVTVHNDSDDTLYGSLTNSLNISEFEESIKDYEQANLNMANSIKFSVWVSFFEIYNEYIYDLFVPVSSKFQKRKMLRLSQDVKGYSFIKDLQWIQVSDSKEAYRLLKLGIKHQSVAFTKLNNASSRSHSIFTVKILQIEDSEMSRVIRVSELSLCDLAGSERTMKTQNEGERLRETGNINTSLLTLGKCINVLKNSEKSKFQQHVPFRESKLTHYFQSFFNGKGKICMIVNISQCYLAYDETLNVLKFSAIAQKVCVPDTLNSSQEKLFGPVKSSQDVSLDSNSNSKILNVKRATISWENSLEDLMEDEDLVEELENAEETQNVETKLLDEDLDKTLEENKAFISHEEKRKLLDLIEDLKKKLINEKKEKLTLEFKIREEVTQEFTQYWAQREADFKETLLQEREILEENAERRLAIFKDLVGKCDTREEAAKDICATKVETEETHNYVGFEDII

SEQ ID NO: 820269 - protein, 1787 aa, Homo sapiens
MESNFNQEGVPRPSYVFSADPIARPSEINFDGIKLDLSHEFSLVAPNTEANSFESKDYLQVCLRIRPFTQSEKELESEGCVHILDSQTVVLKEPQCILGRLSEKSSGQMAQKFSFSKVFGPATTQKEFFQGCIMQPVKDLLKGQSRLIFTYGLTNSGKTYTFQGTEENIGILPRTLNVLFDSLQERLYTKMNLKPHRSREYLRLSSEQEKEEIASKSALLRQIKEVTVHNDSDDTLYGSLTNSLNISEFEESIKDYEQANLNMANSIKFSVWVSFFEIYNEYIYDLFVPVSSKFQKRKMLRLSQDVKGYSFIKDLQWIQVSDSKEAYRLLKLGIKHQSVAFTKLNNASSRSHSIFTVKILQIEDSEMSRVIRVSELSLCDLAGSERTMKTQNEGERLRETGNINTSLLTLGKCINVLKNSEKSKFQQHVPFRESKLTHYFQSFFNGCVPDTLNSSQEKLFGPVKSSQDVSLDSNSNSKILNVKRATISWENSLEDLMEDEDLVEELENAEETQNVETKLLDEDLDKTLEENKAFISHEEKRKLLDLIEDLKKKLINEKKEKLTLEFKIREEVTQEFTQYWAQREADFKETLLQEREILEENAERRLAIFKDLVGKCDTREEAAKDICATKVETEETHNYVGFEDIIDSLQDNVADIKKQAEIAHLYIASLPDPQEATACLELKFNQIKAELAKTKGELIKTKEELKKRENESDSLIQELETSNKKIITQNQRIKELINIIDQKEDTINEFQNLKSHMENTFKCNDKADTSSLIINNKLICNETVEVPKDSKSKICSERKRVNENELQQDEPPAKKGSIHVSSAITEDQKKSEEVRPNIAEIEDIRVLQENNEGLRAFLLTIENELKNEKEEKAELNKQIVHFQQELSLSEKKNLTLSKEVQQIQSNYDIAIAELHVQKSKNQEQEEKIMKLSNEIETATRSITNNVSQIKLMHTKIDELRTLDSVSQISNIDLLNLRDLSNGSEEDNLPNTQLDLLGNDYLVSKQVKEYRIQEPNRENSFHSSIEAIWEECKEIVKASSKKSHQIEELEQQIEKLQAEVKGYKDENNRLKEKEHKNQDDLLKEKETLIQQLKEELQEKNVTLDVQIQHVVEGKRALSELTQGVTCYKAKIKELETILETQKVERSHSAKLEQDILEKESIILKLERNLKEFQEHLQDSVKNTKDLNVKELKLKEEITQLTNNLQDMKHLLQLKEEEEETNRQETEKLKEELSASSARTQNLKADLQRKEEDYADLKEKLTDAKKQIKQVQKEVSVMRDEDKLLRIKINELEKKKNQCSQELDMKQRTIQQLKEQLNNQKVEEAIQQYERACKDLNVKEKIIEDMRMTLEEQEQTQVEQDQVLEAKLEEVERLATELEKWKEKCNDLETKNNQRSNKEHENNTDVLGKLTNLQDELQESEQKYNADRKKWLEEKMMLITQAKEAENIRNKEMKKYAEDRERFFKQQNEMEILTAQLTEKDSDLQKWREERDQLVAALEIQLKALISSNVQKDNEIEQLKRIISETSKIETQIMDIKPKRISSADPDKLQTEPLSTSFEISRNKIEDGSVVLDSCEVSTENDQSTRFPKPELEIQFTPLQPNKMAVKHPGCTTPVTVKIPKARKRKSNEMEEDLVKCENKKNATPRTNLKFPISDDRNSSVKKEQKVAIRPSSKKTYSLRSQASIIGVNLATKKKEGTLQKFGDFLQHSPSILQSKAKKIIETMSSSKLSNVEASKENVSQPKRAKRKLYTSEISSPIDISGQVILMDQKMKESDHQIIKRRLRTKTAK

SEQ ID NO: 820270 - protein, 1856 aa, Homo sapiens
LFEFENGNIAVLLAGLASQAKFAGEEVTRGNVWGRRMESNFNQEGVPRPSYVFSADPIARPSEINFDGIKLDLSHEFSLVAPNTEANSFESKDYLQVCLRIRPFTQSEKELESEGCVHILDSQTVVLKEPQCILGRLSEKSSGQMAQKFSFSKVFGPATTQKEFFQGCIMQPVKDLLKGQSRLIFTYGLTNSGKTYTFQGTEENIGILPRTLNVLFDSLQERLYTKMNLKPHRSREYLRLSSEQEKEEIASKSALLRQIKEVTVHNDSDDTLYGSLTNSLNISEFEESIKDYEQANLNMANSIKFSVWVSFFEIYNEYIYDLFVPVSSKFQKRKMLRLSQDVKGYSFIKDLQWIQVSDSKEAYRLLKLGIKHQSVAFTKLNNASSRSHSIFTVKILQIEDSEMSRVIRVSELSLCDLAGSERTMKTQNEGERLRETGNINTSLLTLGKCINVLKNSEKSKFQQHVPFRESKLTHYFQSFFNGKGKICMIVNISQCYLAYDETLNVLKFSAIAQKVCVPDTLNSSQEKLFGPVKSSQDVSLDSNSNSKILNVKRATISWENSLEDLMEDEDLVEELENAEETQNVETKLLDEDLDKTLEENKAFISHEEKRKLLDLIEDLKKKLINEKKEKLTLEFKIREEVTQEFTQYWAQREADFKETLLQEREILEENAERRLAIFKDLVGKCDTREEAAKDICATKVETEETHNYVGFEDIIDSLQDNVADIKKQAEIAHLYIASLPDPQEATACLELKFNQIKAELAKTKGELIKTKEELKKRENESDSLIQELETSNKKIITQNQRIKELINIIDQKEDTINEFQNLKSHMENTFKCNDKADTSSLIINNKLICNETVEVPKDSKSKICSERKRVNENELQQDEPPAKKGSIHVSSAITEDQKKSEEVRPNIAEIEDIRVLQENNEGLRAFLLTIENELKNEKEEKAELNKQIVHFQQELSLSEKKNLTLSKEVQQIQSNYDIAIAELHVQKSKNQEQEEKIMKLSNEIETATRSITNNVSQIKLMHTKIDELRTLDSVSQISNIDLLNLRDLSNGSEEDNLPNTQLDLLGNDYLVSKQVKEYRIQEPNRENSFHSSIEAIWEECKEIVKASSKKSHQIEELEQQIEKLQAEVKGYKDENNRLKEKEHKNQDDLLKEKETLIQQLKEELQEKNVTLDVQIQHVVEGKRALSELTQGVTCYKAKIKELETILETQKVERSHSAKLEQDILEKESIILKLERNLKEFQEHLQDSVKNTKDLNVKELKLKEEITQLTNNLQDMKHLLQLKEEEEETNRQETEKLKEELSASSARTQNLKADLQRKEEDYADLKEKLTDAKKQIKQVQKEVSVMRDEDKLLRIKINELEKKKNQCSQELDMKQRTIQQLKEQLNNQKVEEAIQQYERACKDLNVKEKIIEDMRMTLEEQEQTQVEQDQVLEAKLEEVERLATELEKWKEKCNDLETKNNQRSNKEHENNTDVLGKLTNLQDELQESEQKYNADRKKWLEEKMMLITQAKEAENIRNKEMKKYAEDRERFFKQQNEMEILTAQLTEKDSDLQKWREERDQLVAALEIQLKALISSNVQKDNEIEQLKRIISETSKIETQIMDIKPKRISSADPDKLQTEPLSTSFEISRNKIEDGSVVLDSCEVSTENDQSTRFPKPELEIQFTPLQPNKMAVKHPGCTTPVTVKIPKARKRKSNEMEEDLVKCENKKNATPRTNLKFPISDDRNSSVKKEQKVAIRPSSKKTYSLRSQASIIGVNLATKKKEGTLQKFGDFLQHSPSILQSKAKKIIETMSSSKLSNVEASKENVSQPKRAKRKLYTSEISSPIDISGQVILMDQKMKESDHQIIKRRLRTKTAK

SEQ ID NO: 820271 - protein, 1820 aa, Homo sapiens; identical to SEQ ID NO: 820266

SEQ ID NO: 820272 - protein, 1031 aa, Homo sapiens; identical to SEQ ID NO: 820267

SEQ ID NO: 820273 - protein, 767 aa, Homo sapiens
QSSNRLLTAQGSTAGEPREGGERLQAVWAPGRGSRRKPSARDMVRAWHHPRREHKNQDDLLKEKETLIQQLKEELQEKNVTLDVQIQHVVEGKRALSELTQGVTCYKAKIKELETILETQKVERSHSAKLEQDILEKESIILKLERNLKEFQEHLQDSVKNTKDLNVKELKLKEEITQLTNNLQDMKHLLQLKEEEEETNRQETEKLKEELSASSARTQNLKADLQRKEEDYADLKEKLTDAKKQIKQVQKEVSVMRDEDKLLRIKINELEKKKNQCSQELDMKQRTIQQLKEQLNNQKVEEAIQQYERACKDLNVKEKIIEDMRMTLEEQEQTQVEQDQVLEAKLEEVERLATELEKWKEKCNDLETKNNQRSNKEHENNTDVLGKLTNLQDELQESEQKYNADRKKWLEEKMMLITQAKEAENIRNKEMKKYAEDRERFFKQQNEMEILTAQLTEKDSDLQKWREERDQLVAALEIQLKALISSNVQKDNEIEQLKRIISETSKIETQIMDIKPKRISSADPDKLQTEPLSTSFEISRNKIEDGSVVLDSCEVSTENDQSTRFPKPELEIQFTPLQPNKMAVKHPGCTTPVTVKIPKARKRKSNEMEEDLVKCENKKNATPRTNLKFPISDDRNSSVKKEQKVAIRPSSKKTYSLRSQASIIGVNLATKKKEGTLQKFGDFLQHSPSILQSKAKKIIETMSSSKLSNVEASKENVSQPKRAKRKLYTSEISSPIDISGQVILMDQKMKESDHQIIKRRLRTKTAK

SEQ ID NO: 820274 - protein, 839 aa, Homo sapiens [sequence omitted]

SEQ ID NO: 820275 - protein, 712 aa, Homo sapiens
MESNFNQEGVPRPSYVFSADPIARPSEINFDGIKLDLSHEFSLVAPNTEANSFESKDYLQVCLRIRPFTQSEKELESEGCVHILDSQTVVLKEPQCILGRLSEKSSGQMAQKFSFSKVFGPATTQKEFFQGCIMQPVKDLLKGQSRLIFTYGLTNSGKTYTFQGTEENIGILPRTLNVLFDSLQERLYTKMNLKPHRSREYLRLSSEQEKEEIASKSALLRQIKEVTVHNDSDDTLYGSLTNSLNISEFEESIKDYEQANLNMANSIKFSVWVSFFEIYNEYIYDLFVPVSSKFQKRKMLRLSQDVKGYSFIKDLQWIQVSDSKEAYRLLKLGIKHQSVAFTKLNNASSRSHSIFTVKILQIEDSEMSRVIRVSELSLCDLAGSERTMKTQNEGERLRETGNINTSLLTLGKCINVLKNSEKSKFQQHVPFRESKLTHYFQSFFNGKGKICMIVNISQCYLAYDETLNVLKFSAIAQKVCVPDTLNSSQEKLFGPVKSSQDVSLDSNSNSKILNVKRATISWENSLEDLMEDEDLVEELENAEETQNVETKLLDEDLDKTLEENKAFISHEEKRKLLDLIEDLKKKLINEKKEKLTLEFKIREEVTQEFTQYWAQREADFKETLLQEREILEENAERRLAIFKDLVGKCDTREEAAKDICATKVETEEATACLELKFNQIKAELAKTKGELIKTKEELKKRENESDSLIQEL

SEQ ID NO: 820276 - protein, 664 aa, Homo sapiens
MESNFNQEGVPRPSYVFSADPIARPSEINFDGIKLDLSHEFSLVAPNTEANSFESKDYLQVCLRIRPFTQSEKELESEGCVHILDSQTVVLKEPQCILGRLSEKSSGQMAQKFSFSKVFGPATTQKEFFQGCIMQPVKDLLKGQSRLIFTYGLTNSGKTYTFQGTEENIGILPRTLNVLFDSLQERLYTKMNLKPHRSREYLRLSSEQEKEEIASKSALLRQIKEVTVHNDSDDTLYGSLTNSLNISEFEESIKDYEQANLNMANSIKFSVWVSFFEIYNEYIYDLFVPVSSKFQKRKMLRLSQDVKGYSFIKDLQWIQVSDSKEAYRLLKLGIKHQSVAFTKLNNASSRSHSIFTVKILQIEDSEMSRVIRVSELSLCDLAGSERTMKTQNEGERLRETGNINTSLLTLGKCINVLKNSEKSKFQQHVPFRESKLTHYFQSFFNGKGKICMIVNISQCYLAYDETLNVLKFSAIAQKVCVPDTLNSSQEKLFGPVKSSQDVSLDSNSNSKILNVKRATISWENSLEDLMEDEDLVEELENAEETQNVETKLLDEDLDKTLEENKAFISHEEKRKLLDLIEDLKKKLINEKKEKLTLEFKIREEVTQEFTQYWAQREADFKETLLQEREILEENAERRLAIFKDLVGKCDTREEAAKDICATKD

SEQ ID NO: 820277 - protein, 424 aa, Homo sapiens
MESNFNQEGVPRPSYVFSADPIARPSEINFDGIKLDLSHEFSLVAPNTEANSFESKDYLQVCLRIRPFTQSEKELESEGCVHILDSQTVVLKEPQCILGRLSEKSSGQMAQKFSFSKVFGPATTQKEFFQGCIMQPVKDLLKGQSRLIFTYGLTNSGKTYTFQGTEENIGILPRTLNVLFDSLQERLYTKMNLKPHRSREYLRLSSEQEKEEIASKSALLRQIKEVTVHNDSDDTLYGSLTNSLNISEFEESIKDYEQANLNMANSIKFSVWVSFFEIYNEYIYDLFVPVSSKFQKRKMLRLSQDVKGYSFIKDLQWIQVSDSKEAYRLLKLGIKHQSVAFTKLNNASSRSHSIFTVKILQIEDSEMSRVIRVSELSLCDLAGSERTMKTQNEGERLRETGNINTSLLTLGKCINVLKNSEKSK

SEQ ID NO: 820278 - protein, 336 aa, Homo sapiens
LFEFENGNIAVLLAGLASQAKFAGEEVTRGNVWGRRMESNFNQEGVPRPSYVFSADPIARPSEINFDGIKLDLSHEFSLVAPNTEANSFESKDYLQVCLRIRPFTQSEKELESEGCVHILDSQTVVLKEPQCILGRLSEKSSGQMAQKFSFSKVFGPATTQKEFFQGCIMQPVKDLLKGQSRLIFTYGLTNSGKTYTFQGTEENIGILPRTLNVLFDSLQERLYTKMNLKPHRSREYLRLSSEQEKEEIASKSALLRQIKEVTVHNDSDDTLYGSLTNSLNISEFEESIKDYEQANLNMANSIKFSVWVSFFEIYNEYIYDLFVPVSSKSKKPKEN

SEQ ID NO: 820279 - protein, 550 aa, Homo sapiens
PEGVLVEKTHSSLLCPKGKVASESVSLELPVDIVPDSTKAYVTVLGDIMGTALQNLDGLVQMPSGCGEQNMVLFAPIIYVLQYLEKAGLLTEEIRSRAVGFLEIGYQKELMYKHSNGSYSAFGERDGNGNTWLTAFVTKCFGQAQKFIFIDPKNIQDALKWMAGNQLPSGCYANVGNLLHTAMKGGVDDEVSLTAYVTAALLEMGKDVDDPMVSQGLRCLKNSATSTTNLYTQALLAYIFSLAGEMDIRNILLKQLDQQAIISGESIYWSQKPTPSSNASPWSEPAAVDVELTAYALLAQLTKPSLTQKEIAKATSIVAWLAKQRNAYGGFSSTQDTVVALQALAKYATTAYVPSEEINLVVKSTENFQRTFNIQSVNRLVFQQDTLPNVPGMYTLEASGQGCVYVQTVLRYNILPPTNMKTFSLSVEIGKARCEQPTSPRSLTLTIHTSYVGSRSSSNMAIVEVKMLSGFSPMEGTNQLLLQQPLVKKVEFGTDTLNIYLDELIKNTQTYTFTISQSVLVTNLKPATIKVYDYYLPDEQATIQYSDPCE

SEQ ID NO: 820280 - protein, 446 aa, Homo sapiens
MTAGDSYDAAVACKQLGCPTAVTAIGRVNASKGFGHIWLDSVSCQGHEPAVWQCKHHEWGNQLPSGCYANVGNLLHTAMKGGVDDEVSLTAYVTAALLEMGKDVDDPMVSQGLRCLKNSATSTTNLYTQALLAYIFSLAGEMDIRNILLKQLDQQAIISGESIYWSQKPTPSSNASPWSEPAAVDVELTAYALLAQLTKPSLTQKEIAKATSIVAWLAKQRNAYGGFSSTQDTVVALQALAKYATTAYVPSEEINLVVKSTENFQRTFNIQSVNRLVFQQDTLPNVPGMYTLEASGQGCVYVQTVLRYNILPPTNMKTFSLSVEIGKARCEQPTSPRSLTLTIHTSYVGSRSSSNMAIVEVKMLSGFSPMEGTNQLLLQQPLVKKVEFGTDTLNIYLDELIKNTQTYTFTISQSVLVTNLKPATIKVYDYYLPDEQATIQYSDPCE

SEQ ID NO: 820281 - protein, 550 aa, Homo sapiens; identical to SEQ ID NO: 820279

SEQ ID NO: 820282 - protein, 132 aa, Homo sapiens
PEGVLVEKTHSSLLCPKGKVASESVSLELPVDIVPDSTKAYVTVLGDIMGTALQNLDGLVQMPSGCGEQNMVLFAPIIYVLQYLEKAGLLTEEIRSRAVGFLEIGYQKELMYKHSNGSYSAFGERDGNGNTW

SEQ ID NO: 820283 - protein, 412 aa, Homo sapiens [sequence omitted]

SEQ ID NO: 820284 - protein, 251 aa, Homo sapiens
MDMKRRIHLELRNRTPAAVRELVLDNCKSNDGKIEGLTAEFVNLEFLSLINVGLISVSNLPKLPKLKKLELSENRIFGGLDMLAEKLPNLTHLNLSGNKLKDISTLEPLKKLECLKSLDLFNCEVTNLNDYRESVFKLLPQLTYLDGYDREDQEAPDSDAEVDGVDEEEEDEEGEDEEDEDDEDGEEEEFDEEDDEDEDVEGDEDDDEVSEEEEEFGLDEEDEDEDEDEEEEEGGKGEKRKRETDDEGEDD

SEQ ID NO: 820285 - protein, 78 aa, Homo sapiens
LEKGKESLLEKRLVAEEEEDEEEAEAGSGRSRKRSDFWKMLNEPEDQAPGGEEVPAEEQDPRPRGRSRKQKQEAAEAK

SEQ ID NO: 820286 - protein, 333 aa, Homo sapiens
MAGASPTKDDSKDSDFWKMLNEPEDQAPGGEEVPAEEQDPSPEAADSASGAPNDFQNNVQVKVIRSPADLIRFIEELKGGTKKGKPNIGQEQPVDDAAEVPQREPEKERGDPERQREMEEEEDEDEDEDEDEDERQLLGEFEKELEGILLPSDRDRLRSEVKAGMERELENIIQETEKELDPDGLKKESERDRAMLALTSTLNKLIKRLEEKQSPELVKKHKKKRVVPKKPPPSPQPTGESSQTRKSSPVCCFHPSAGSVPRGDPVPSLLRVLILSPLSGTLSSLAPASQHRHPFACLPPIHLSGKQLLEHICWFSGLLLYTQCLALCLAHNG

SEQ ID NO: 820287 - protein, 412 aa, Homo sapiens [sequence omitted]

SEQ ID NO: 820288 - protein, 412 aa, Homo sapiens [sequence omitted]

SEQ ID NO: 820289 - protein, 412 aa, Homo sapiens [sequence omitted]

SEQ ID NO: 820290 - protein, 357 aa, Homo sapiens [sequence omitted]

SEQ ID NO: 820291 - protein, 373 aa, Homo sapiens
MAYVQRQADSKQYGDKIIEELQDLGPQVWSETKSGVAPQKMAGASPTKDDSKDSDFWKMLNEPEDQAPGGEEVPAEEQDPSPEAADSASGAPNDFQNNVQVKVIRSPADLIRFIEELKGGTKKGKPNIGQEQPVDDAAEVPQREPEKERGDPERQREMEEEEDEDEDEDEDEDERQLLGEFEKELEGILLPSDRDRLRSEVKAGMERELENIIQETEKELDPDGLKKESERDRAMLALTSTLNKLIKRLEEKQSPELVKKHKKKRVVPKKPPPSPQPTGESSQTRKSSPVCCFHPSAGSVPRGDPVPSLLRVLILSPLSGTLSSLAPASQHRHPFACLPPIHLSGKQLLEHICWFSGLLLYTQCLALCLAHNG

SEQ ID NO: 820292 - protein, 397 aa, Homo sapiens
MAYVQRQADSKQYGDKIIEELQDLGPQVWSETKSGVAPQKMAGASPTKDDSKDSDFWKMLNEPEDQAPGGEEVPAEEQDPSPEAADSASGAPNDFQNNVQVKVIRSPADLIRFIEELKGGTKKGKPNIGQEQPVDDAAEVPQREPEKERGDPERQREMEEEEDEDEDEDEDEDERQLLGEFEKELEGILLPSDRDRLRSETEKELDPDGLKKESERDRAMLALTSTLNKLIKRLEEKQSPELVKKHKKKRVVPKKPPPSPQPTEEDPEHRVRVRVTKLRLGGPNQDLTVLEMKRENPQLKQIEGLVKELLEREGLTAAGKIEIKIVRPWAEGTEEGARWLTDEDTRNLKEIFFNILVPGAEEAQKERQRQKELESNYRRVWGSPGGEGTGDLDEFDF

SEQ ID NO: 820293 - protein, 354 aa, Homo sapiens
MLNEPEDQAPGGEEVPAEEQDPSPEAADSASGAPNDFQNNVQVKVIRSPADLIRFIEELKGGTKKGKPNIGQEQPVDDAAEVPQREPEKERGDPERQREMEEEEDEDEDEDEDEDERQLLGEFEKELEGILLPSDRDRLRSEVKAGMERELENIIQETEKELDPDGLKKESERDRAMLALTSTLNKLIKRLEEKQSPELVKKHKKKRVVPKKPPPSPQPTEEDPEHRVRVRVTKLRLGGPNQDLTVLEMKRENPQLKQIEGLVKELLEREGLTAAGKIEIKIVRPWAEGTEEGARWLTDEDTRNLKEIFFNILVPGAEEAQKERQRQKELESNYRRVWGSPGGEGTGDLDEFDF

SEQ ID NO: 820294 - protein, 372 aa, Homo sapiens [sequence omitted]

SEQ ID NO: 820295 - protein, 373 aa, Homo sapiens; identical to SEQ ID NO: 820291

SEQ ID NO: 820296 - protein, 354 aa, Homo sapiens; identical to SEQ ID NO: 820293

SEQ ID NO: 820297 - protein, 342 aa, Homo sapiens
MAYVQRQADSKQYGDKIIEELQDLGPQVWSETKSGVAPQKMAGASPTKDDSKDSDFWKMLNEPEDQAPGGEEVPAEEQDPSPEAADSASGAPNDFQNNVQVKVIRSPADLIRFIEELKGGTKKGKPNIGQEQPVDDAAEVPQREPEKERGDPERQREMEEEEDEDEDEDEDEDERQLLGEFEKELEGILLPSDRDRLRSETEKELDPDGLKKESERDRAMLALTSTLNKLIKRLEEKQSPELVKKHKKKRVVPKKPPPSPQPTGKIEIKIVRPWAEGTEEGARWLTDEDTRNLKEIFFNILVPGAEEAQKERQRQKELESNYRRVWGSPGGEGTGDLDEFDF

SEQ ID NO: 820298 - protein, 257 aa, Homo sapiens
MAYVQRQADSKQYGDKIIEELQDLGPQVWSETKSGVAPQKMAGASPTKDDSKDSDFWKMLNEPEDQAPGGEEVPAEEQDPSPEAADSASGAPNDFQNNVQVKVIRSPADLIRFIEELKGGTKKGKPNIGQEQPVDDAAEVPQREPEKERGDPERQREMEEEEDEDEDEDEDEDERQLLGEFEKELEGILLPSDRDRLRSEVKAGMERELENIIQETEKELDPDGLKKESERDRAMLALTSTLNKLIKRLEEKQSPEL

SEQ ID NO: 820299 - protein, 412 aa, Homo sapiens [sequence omitted]

SEQ ID NO: 820300 - protein, 412 aa, Homo sapiens [sequence omitted]

SEQ ID NO: 820301 - protein, 412 aa, Homo sapiens [sequence omitted]

SEQ ID NO: 820302 - protein, 412 aa, Homo sapiens [sequence omitted]

SEQ ID NO: 820303 - protein, 412 aa, Homo sapiens [sequence omitted]

SEQ ID NO: 820304 - protein, 412 aa, Homo sapiens [sequence omitted]

SEQ ID NO: 820305 - protein, 442 aa, Homo sapiens
MSCPHPLLRPPPSAAPQAILCHPSLQPEEYMAYVQRQADSKQYGDKIIEELQDLGPQVWSETKSGVAPQKMAGASPTKDDSKDSDFWKMLNEPEDQAPGGEEVPAEEQDPSPEAADSASGAPNDFQNNVQVKVIRSPADLIRFIEELKGGTKKGKPNIGQEQPVDDAAEVPQREPEKERGDPERQREMEEEEDEDEDEDEDEDERQLLGEFEKELEGILLPSDRDRLRSEVKAGMERELENIIQETEKELDPDGLKKESERDRAMLALTSTLNKLIKRLEEKQSPELVKKHKKKRVVPKKPPPSPQPTEEDPEHRVRVRVTKLRLGGPNQDLTVLEMKRENPQLKQIEGLVKELLEREGLTAAGKIEIKIVRPWAEGTEEGARWLTDEDTRNLKEIFFNILVPGAEEAQKERQRQKELESNYRRVWGSPGGEGTGDLDEFDF

SEQ ID NO: 820306 - protein, 372 aa, Homo sapiens [sequence omitted]

SEQ ID NO: 820307 - protein, 412 aa, Homo sapiens [sequence omitted]

SEQ ID NO: 820308 - protein, 353 aa, Homo sapiens
MAYVQRQADSKQYGDKIIEELQDLGPQVWSETKSGVAPQKMAGASPTKDDSKDSDFWKMLNEPEDQAPGGEEVPAEEQDPSPEAADSASGAPNDFQNNVQVKVIRSPADLIRFIEELKGGTKKGKPNIGQEQPVDDAAEVPQREPEKERGDPERQREMEEEEDEDEDEDEDEDERQLLGEFEKELEGILLPSDRDRLRSEVKAGMERELENIIQETEKELDPDGLKKESERDRAMLALTSTLNKLIKRLEEKQSPELVKKHKKKRVVPKKPPPSPQPTEEDPEHRVRVRVTKLRLGGPNQDLTVLEMKRENPQLKQIEGLVKELLEREGLTAAGKIEIKIVRPWAEGTEEVIF

SEQ ID NO: 820309 - protein, 318 aa, Homo sapiens
  misc_feature (315)..(315): Xaa can be any naturally occurring amino acid
MAYVQRQADSKQYGDKIIEELQDLGPQVWSETKSGVAPQKMAGASPTKDDSKDSDFWKMLNEPEDQAPGGEEVPAEEQDPSPEAADSASGAPNDFQNNVQVKVIRSPADLIRFIEELKGGTKKGKPNIGQEQPVDDAAEVPQREPEKERGDPERQREMEEEEDEDEDEDEDEDERQLLGEFEKELEGILLPSDRDRLRSEVKAGMERELENIIQETEKELDPDGLKKESERDRAMLALTSTLNKLIKRLEEKQSPELVKKHKKKRVVPKKPPPSPQPTEEDPEHRVRVRVTKLRLGGPNQDLTVLEMKRVNGPEXGIL

SEQ ID NO: 820310 - protein, 279 aa, Homo sapiens
MAYVQRQADSKQYGDKIIEELQDLGPQVWSETKSGVAPQKMAGASPTKDDSKDSDFWKMLNEPEDQAPGGEEVPAEEQDPSPEAADSASGAPNDFQNNVQVKVIRSPADLIRFIEELKGGTKKGKPNIGQEQPVDDAAEVPQREPEKERGDPERQREMEEEEDEDEDEDEDEDERQLLGEFEKELEGILLPSDRDRLRSEVKAGMERELENIIQETEKELDPDGLKKESERDRAMLALTSTLNKLIKRLEEKQSPELVKKHKKKRVVPKKLRPEKSHLK

SEQ ID NO: 820311 - protein, 224 aa, Homo sapiens
MGEHPGLSRWSEVKAGMERELENIIQETEKELDPDGLKKESERDRAMLALTSTLNKLIKRLEEKQSPELVKKHKKKRVVPKKPPPSPQPTEEDPEHRVRVRVTKLRLGGPNQDLTVLEMKRENPQLKQIEGLVKELLEREGLTAAGKIEIKIVRPWAEGTEEGARWLTDEDTRNLKEIFFNILVPGAEEAQKERQRQKELESNYRRVWGSPGGEGTGDLDEFDF

SEQ ID NO: 820312 - protein, 252 aa, Homo sapiens
MAAETLLSSLLGLLLLGLLLPASLTGGVGSLNLEELSEMRYGIEILPLPVMGGQSQSSDVVIVSSKYKQRYECRLPAGAIHFQREREEETPAYQGPGIPELLSPMRDAPCLLKTKDWWTYEFCYGRHIQQYHMEDSEIKGEVLYLGYYQSAFDWDDETAKASKQHRLKRYHSQTYGNGSKCDLNGRPREAEVRFLCDEGAGISGDYIDRVDEPLSCSYVLTIRTPRLLPPPSPPAPTQCCTAGHPLSPFPTA

SEQ ID NO: 820313 - protein, 252 aa, Homo sapiens; identical to SEQ ID NO: 820312

SEQ ID NO: 820314 - protein, 182 aa, Homo sapiens
DLLPSDHLPGALQRFLREARAPMSLPHVCALVCKVHTVRAKKGCPQSPSTTKEDPDHPVVTKLRLGGPNQDLTVLEMKRENPQLKQIEGLVKELLEREGLTAAGKIEIKIVRPWAEGTEEGARWLTDEDTRNLKEIFFNILVPGAEEAQKERQRQKELESNYRRVWGSPGGEGTGDLDEFDF

SEQ ID NO: 820315 - protein, 252 aa, Homo sapiens; identical to SEQ ID NO: 820312

SEQ ID NO: 820316 - protein, 252 aa, Homo sapiens; identical to SEQ ID NO: 820312

SEQ ID NO: 820317 - protein, 266 aa, Homo sapiens
MAAETLLSSLLGLLLLGLLLPASLTGGVGSLNLEELSEMRYGIEILPLPVMGGQSQSSDVVIVSSKYKQRYECRLPAGAIHFQREREEETPAYQGPGIPELLSPMRDAPCLLKTKDWWTYEFCYGRHIQQYHMEDSEIKGEVLYLGYYQSAFDWDDETAKASKQHRLKRYHSQTYGNGSKCDLNGRPREAEVRFLCDEGAGISGDYIDRVDEPLSCSYVLTIRTPRLLPPPSPPAPPGAGAPSDIPRRGEGQKGERNMREEREGKT

SEQ ID NO: 820318 - protein, 216 aa, Homo sapiens
MAAETLLSSLLGLLLLGLLLPASLTGGVGSLNLEELSEMRYGIEILPLPVMGGQSQSSDVVIVSSKYKQRYECRLPAGAIHFQREREEETPAYQGPGIPELLSPMRDAPCLLKTKDWWTYEFCYGRHIQQYHMEDSEIKGEVLYLGYYQSAFDWDDETAKASKQHRLKRYHSQTYGNGSKCDLNGRPREAEVRSLSLPTLSPTICASELRSLHLCC

SEQ ID NO: 820319 - protein, 105 aa, Homo sapiens
MLKSFQSANIIELLHYHQCDSRSSTKAEILKCLLNLQIQHIDARFAVLLTGNSQAHFTQLMPKLVSSRNVKVRYLMKSIRYLNGLASHGYQNHPNLLKLKPLYKM

SEQ ID NO: 820320 - protein, 1086 aa, Homo sapiens
VYPSVSEEPVENKERKGDNLQPVTLILSKENCTLEIAEEINVTSDFPFDSVIEEVSPASSPEPPVPVKETRPYQAVTPCILKLHGTQCEKSNQISQCESEDLGITEKENVFVGPTHPVGQDNFTQVQQMQVSAEMPLILTDHPGRTGRPTLPGKVTEEIVSSEHDEGLSFSGKVQCYGRELNQPASAAKCTGDFSPSPEKLVKSGNPLQPVSIENRNLDLKHLVLESSEPPFGPRNVIENKSLSDTLVSTTAPSGIVNVSVKQQTSPKSSQNHLFPGDLKTDEGIYLQVKSLTAASVDGAYSTQGCMCSVVPTLCSSSDNATLTHYVRPINAEPAFQAQEIPAGRMASLLKNGEPEAELHKETTGPGTAGPQSNTTSSLKGERKAIHTLQDVSTCETKELLNVGVSSLCAGPYQNTADTKENLSKEPLASFVSESFDTSVCGIATEHVEIENSGEGLRAEAGSETLGRDGEVGVNSDMHYELSGDSDLDLLGDCRNPRLDLEDSYTLRGSYTRKKDVPTDGYESSLNFHNNNQEDWGCSSWVPGMETSLPPGHWTAAVKKEEKCVPPYVQIRDLHGILRTYANFSITKELKDTMRTSHGLRRHPSFSANCGLPSSWTSTWQVADDLTQNTLDLEYLRFAHKLKQTIKNGDSQHSASSANVFPKESPTQISIGAFPSTKISEAPFLHPAPRSRSPLLVTVVESDPRPQGQPRRGYTASSLDSSSSWRERCSHNRDLRNSQRNHTVSFHLNKLKYNSTVKESRNDISLILNEYAEFNKVMKNSNQFIFQDKELNDVSGEATAQEMYLPFPGRSASYEDIIIDVCTNLHVKLRSVVKEACKSTFLFYLVETEDKSFFVRTKNLLRKGGHTEIEPQHFCQAFHRENDTLIIIIRNEDISSHLHQIPSLLKLKHFPSVIFAGVDSPGDVLDHTYQELFRAGGFVISDDKILEAVTLVQLKEIIKILEKLNGNGRWKWLLHYRENKKLKEDERVDSTAHKKNIMLKSFQSANIIELLHYHQCDSRSSTKAEILKCLLNLQIQHIDARFAVLLTDKPTIPREVFENNGILVTDVNNFIENIEKIAAPFRSSYW

SEQ ID NO: 820321 - protein, 1086 aa, Homo sapiens; identical to SEQ ID NO: 820320

SEQ ID NO: 820322 - protein, 1068 aa, Homo sapiens
VYPSVSEEPVENKERKGDNLQPVTLILSKENCTLEIAEEINVTSDFPFDSVIEEVSPASSPEPPVPVKETRPYQAVTPCILKLHGTQCEKSNQISQCESEDLGITEKENVFVGPTHPVGQDNFTQVQQMQVSAEMPLILTDHPGRTGRPTLPGKVTEEIVSSEHDEGLSFSGKVQCYGRELNQPASAAKCTGDFSPSPEKLVKSGNPLQPVSIENRNLDLKHLVLESSEPPFGPRNVIENKSLSDTLVSTTAPSGIVNVSVKQQTSPKSSQNHLFPGDLKTDEGIYLQVKSLTAASVDGAYSTQGCMCSVVPTLCSSSDNATLTHYVRPINAEPAFQAQEIPAGRMASLLKNGEPEAELHKETTGPGTAGPQSNTTSSLKGERKAIHTLQDVSTCETKELLNVGVSSLCAGPYQNTADTKENLSKEPLASFVSESFDTSVCGIATEHVEIENSGEGLRAEAGSETLGRDGEVGVNSDMHYELSGDSDLDLLGDCRNPRLDLEDSYTLRGSYTRKKDVPTDGYESSLNFHNNNQEDWGCSSWVPGMETSLPPGHWTAAVKKEEKCVPPYVQIRDLHGILRTYANFSITFSANCGLPSSWTSTWQVADDLTQNTLDLEYLRFAHKLKQTIKNGDSQHSASSANVFPKESPTQISIGAFPSTKISEAPFLHPAPRSRSPLLVTVVESDPRPQGQPRRGYTASSLDSSSSWRERCSHNRDLRNSQRNHTVSFHLNKLKYNSTVKESRNDISLILNEYAEFNKVMKNSNQFIFQDKELNDVSGEATAQEMYLPFPGRSASYEDIIIDVCTNLHVKLRSVVKEACKSTFLFYLVETEDKSFFVRTKNLLRKGGHTEIEPQHFCQAFHRENDTLIIIIRNEDISSHLHQIPSLLKLKHFPSVIFAGVDSPGDVLDHTYQELFRAGGFVISDDKILEAVTLVQLKEIIKILEKLNGNGRWKWLLHYRENKKLKEDERVDSTAHKKNIMLKSFQSANIIELLHYHQCDSRSSTKAEILKCLLNLQIQHIDARFAVLLTDKPTIPREVFENNGILVTDVNNFIENIEKIAAPFRSSYW

SEQ ID NO: 820323 - protein, 1086 aa, Homo sapiens; identical to SEQ ID NO: 820320

SEQ ID NO: 820324 - protein, 800 aa, Homo sapiens
VYPSVSEEPVENKERKGDNLQPVTLILSKENCTLEIAEEINVTSDFPFDSVIEEVSPASSPEPPVPVKETRPYQAVTPCILKLHGTQCEKSNQISQCESEDLGITEKENVFVGPTHPVGQDNFTQVQQMQVSAEMPLILTDHPGRTGRPTLPGKVTEEIVSSEHDEGLSFSGKVQCYGRELNQPASAAKCTGDFSPSPEKLVKSGNPLQPVSIENRNLDLKHLVLESSEPPFGPRNVIENKSLSDTLVSTTAPSGIVNVSVKQQTSPKSSQNHLFPGDLKTDEGIYLQVKSLTAASVDGAYSTQGCMCSVVPTLCSSSDNATLTHYVRPINAEPAFQAQEIPAGRMASLLKNGEPEAELHKETTGPGTAGPQSNTTSSLKGERKAIHTLQDVSTCETKELLNVGVSSLCAGPYQNTADTKENLSKEPLASFVSESFDTSVCGIATEHVEIENSGEGLRAEAGSETLGRDGEVGVNSDMHYELSGDSDLDLLGDCRNPRLDLEDSYTLRGSYTRKKDVPTDGYESSLNFHNNNQEDWGCSSWVPGMETSLPPGHWTAAVKKEEKCVPPYVQIRDLHGILRTYANFSITKELKDTMRTSHGLRRHPSFSANCGLPSSWTSTWQVADDLTQNTLDLEYLRFAHKLKQTIKNGDSQHSASSANVFPKESPTQISIGAFPSTKISEAPFLHPAPRSRSPLLVTVVESDPRPQGQPRRGYTASSLDSSSSWRERCSHNRDLRNSQRNHTVSFHLNKLKYNSNLCRLKCPCVTALKRAVVLPARSLRSENGQTASSSESLTPDPQAA

SEQ ID NO: 820325 - protein, 207 aa, Homo sapiens
MRTCERLVKEGRFVPSNPIGILTTSYCELLQNKVPLLGSSTACIVVLDRTSHRLHTANLGDSGFLVVRGGEVVHRSDEQQHYFNTPFQLSIAPPEAEGVVLSDSPDAADSTSFDVQLGDIILTATDGLFDNMPDYMILQELKKLKNSNYESIQQTARSIAEQAHELAYDPNYMSPFAQFACDNGLNVRGGKPDDITVLLSIVAEYTD

SEQ ID NO: 820326 - protein, 207 aa, Homo sapiens; identical to SEQ ID NO: 820325

SEQ ID NO: 820327 - protein, 207 aa, Homo sapiens; identical to SEQ ID NO: 820325

SEQ ID NO: 820328 - protein, 207 aa, Homo sapiens; identical to SEQ ID NO: 820325

SEQ ID NO: 820329 - protein, 60 aa, Homo sapiens
MFSVLSYGRLVARAVLGGLSQTDPRAGGGGGGDYGLVTAGCGFGKDFRKGLLKKGACYGD

SEQ ID NO: 820330 - protein, 180 aa, Homo sapiens
MAPGVARGPTPYWRLRLGGAALLLLLIPVAAAQEPPGAACSQNTNKTCEECLKNVSCLWCNTNKACLDYPVTSVLPPASLCKLSSARWGVCWVNFEALIITMSVVGGTLLLGIAICCCCCCRRKRSRKPDRSEEKAMREREERRIRQEERRAEMKTRHDEIRKKYGLFKEENPYARFENN

SEQ ID NO: 820331 - protein, 167 aa, Homo sapiens
MAPGVARGPTPYWRLRLGGAALLLLLIPVAAAQEPPGAACSQNTNKTCEECLKNVSCLWCNTNKACLDYPVTSVLPPASLCKLSSARWGVCWVNFEALIITMSVVGGTLLLGIAICCCCCCRRKRSRKPDRSEEKAMREREERRIRQEERRAEMKTRHDEIRKKYAC

SEQ ID NO: 820332 - protein, 173 aa, Homo sapiens
MAPGVARGPTPYWRLRLGGAALLLLLIPVAAAQEPPGAACSQNTNKTCEECLKNVSCLWCNTNKACLDYPVTSVLPPASLCKLSSARWGVCWVNFEALIITMSVVGGTLLLGIAICCCCCCRRKRSRKPDRSEEKAMREREERRIRQEERRAEMKTRHDEIRKKYGLFKEENP

SEQ ID NO: 820333 - protein, 159 aa, Homo sapiens
MAPGVARGPTPYWRLRLGGAALLLLLIPVAAAQEPPGAACSQNTNKTCEECLKNVSCLWCNTNKACLDYPVTSVLPPASLCKLSSARWGVCWVNFEALIITMSVVGGTLLLGIAICCCCCCRRKRSRKPDRSEEKAMREREERRIRQEERTGNRDEDKT

SEQ ID NO: 820334 - protein, 168 aa, Homo sapiens
AGLGGRPGPTVAGSAPTEAPRGSRPFGGRGSCRRGWGAGRGRAVFVFVFVLSSRCGRSSRVASGWPSPGRRDAWHLRPPLASLRPQTALLGFDPEPGSRLTTCSRSHSWSGAGRDGGRRPLQGDGAAAGVSLQPPAFTPPLPPGRSSTHSSERSHLCLRKEGVPKARL

SEQ ID NO: 820335 - protein, 105 aa, Homo sapiens
  misc_feature (93)..(93): Xaa can be any naturally occurring amino acid
  misc_feature (98)..(98): Xaa can be any naturally occurring amino acid
  misc_feature (101)..(101): Xaa can be any naturally occurring amino acid
  misc_feature (104)..(104): Xaa can be any naturally occurring amino acid
MAPGVARGPTPYWRLRLGGAALLLLLIPVAAAQEPPGAACSQNTNKTCEECLKNVSCLWCNTNKACLDYPVTSVLPPASLCKLSSARWGVCWXVNFEXLIXTMXR

SEQ ID NO: 820336 - protein, 168 aa, Homo sapiens; identical to SEQ ID NO: 820334

SEQ ID NO: 820337 - protein, 180 aa, Homo sapiens; identical to SEQ ID NO: 820330

SEQ ID NO: 820338 - protein, 180 aa, Homo sapiens; identical to SEQ ID NO: 820330

SEQ ID NO: 820339 - protein, 180 aa, Homo sapiens; identical to SEQ ID NO: 820330

SEQ ID NO: 820340 - protein, 207 aa, Homo sapiens
MAPGVARGPTPYWRLRLGGAALLLLLIPVAAAQEPPGAAGFLNTRSTCLEEGIVISRGSGRGPSFACSQNTNKTCEECLKNVSCLWCNTNKACLDYPVTSVLPPASLCKLSSARWGVCWVNFEALIITMSVVGGTLLLGIAICCCCCCRRKRSRKPDRSEEKAMREREERRIRQEERRAEMKTRHDEIRKKYGLFKEENPYARFENN

SEQ ID NO: 820341 - protein, 168 aa, Homo sapiens; identical to SEQ ID NO: 820334

SEQ ID NO: 820342 - protein, 200 aa, Homo sapiens
MAPPRRSTSGAAAVPGGDRLCWSRSCNAPLTDRATGRPWRPEWPAGRRRTGGCASVAPRCSCCSSRWPPRRSLPELCLWCNTNKACLDYPVTSVLPPASLCKLSSARWGVCWVNFEALIITMSVVGGTLLLGIAICCCCCCRRKRSRKPDRSEEKAMREREERRIRQEERRAEMKTRHDEIRKKYGLFKEENPYARFENN

SEQ ID NO: 820343 - protein, 159 aa, Homo sapiens
MGQAVSCVLGRLQPVKCTGARRVGRRGLRKQTSQECLWCNTNKACLDYPVTSVLPPASLCKLSSARWGVCWVNFEALIITMSVVGGTLLLGIAICCCCCCRRKRSRKPDRSEEKAMREREERRIRQEERRAEMKTRHDEIRKKYGLFKEENPYARFENN

SEQ ID NO: 820344 - protein, 194 aa, Homo sapiens
MAPGVARGPTPYWRLRLGGAALLLLLIPVAAAQEPPGAACSQNTNKTCEECLKNVSCLWCNTNKACLDYPVTSVLPPASLCKLSSARWGVCWVNFEALIITMSVVGGTLLLGIAICCCCCCRRKRSRKPDRSEEKAMREREERRIRQEERRAEMKTRHDEIRKKYGLFKEENPYARFELRSPAQPGDHVAIAVS

SEQ ID NO: 820345 - protein, 152 aa, Homo sapiens
MAPGVARGPTPYWRLRLGGAALLLLLIPVAAAQEPPGAACSQNTNKTCEECLKNVSCLWCNTNKACLDYPVTSVLPPASLCKLSSARWGVCWVNFEALIITMSVVGGTLLLGIAICCCCCCRRKRSRKPDRSEEKAMREREERRIRQEERPV

SEQ ID NO: 820346 - protein, 115 aa, Homo sapiens
MAPGVARGPTPYWRLRLGGAALLLLLIPVAAAQEPPGAACSQNTNKTCEECLKNVSCLWCNTNKACLDYPVTSVLPPASLCKLSSARWGVCWAPGHCHLLLLLLQEEEEPEAGQE

SEQ ID NO: 820347 - protein, 107 aa, Homo sapiens
MAPGVARGPTPYWRLRLGGAALLLLLIPVAAAQEPPGAACSQNTNKTCEECLKNVSCLWCNTNKACLDYPVTSVLPPASLCKLSSARWGVCWGLFKEENPYARFENN

SEQ ID NO: 820348 - protein, 180 aa, Homo sapiens; identical to SEQ ID NO: 820330

SEQ ID NO: 820349 - protein, 180 aa, Homo sapiens; identical to SEQ ID NO: 820330

SEQ ID NO: 820350 - protein, 180 aa, Homo sapiens; identical to SEQ ID NO: 820330

SEQ ID NO: 820351 - protein, 180 aa, Homo sapiens; identical to SEQ ID NO: 820330

SEQ ID NO: 820352 - protein, 180 aa, Homo sapiens; identical to SEQ ID NO: 820330

SEQ ID NO: 820353 - protein, 180 aa, Homo sapiens; identical to SEQ ID NO: 820330

SEQ ID NO: 820354 - protein, 180 aa, Homo sapiens; identical to SEQ ID NO: 820330

SEQ ID NO: 820355 - protein, 80 aa, Homo sapiens
PGSLCFLERDCAILAPFTRSRNPLFKPVPVHRPDERVGGSIGGGNNLELEPQEGFSEDVHVQDPPDGEMEKELDRGEGTA

SEQ ID NO: 820356 - protein, 180 aa, Homo sapiens; identical to SEQ ID NO: 820330

SEQ ID NO: 820357 - protein, 180 aa, Homo sapiens; identical to SEQ ID NO: 820330

SEQ ID NO: 820358 - protein, 180 aa, Homo sapiens
MAPGVARGPTPYWRLRLGGAALLLLLIPVAAAQEPPGAACSQNTNKTCEECLKNVSCLWCNTNKACLDYPVTSVLPPASLCKLSSARWGVCWVNFEALIITMSVVGGTLLLGIAICCCCCCRRKRSRKPDRSEEKAMREREERRIRQEERRAEMKTRHDEIRKKYGLFKEENPYARFEKL

SEQ ID NO: 820359 - protein, 179 aa, Homo sapiens
MAPGVARGPTPYWRLRLGGAALLLLLIPVAAAQEPPGAACSQNTNKTCEECLKNVSCLWCNTNKACLDYPVTSVLPPASLCKLSSARWGVCWVNFEALIITMSVVGGTLLLGIAICCCCCCRRKRSRKPDRSEEKAMREREERRIRQEERRAEMKTRHDEIRKKYENCNLKETIKLGVP

SEQ ID NO: 820360 - protein, 200 aa, Homo sapiens
MAKKTYDLLFKLLLIGDSGVGKTCVLFRFSDDAFNTTFISTIGIDFKIKTVELQGKKIKLQIWDTAGQERFHTITTSYYRGAMGIMLVYDITNGKSFENISKWLRNIDEHANEDVERMLLGNKCDMDDKRVVPKGKGEQIAREHGIRFFETSAKANINIEKAFLTLAEDILRKTPVKEPNSENVDISSGGGVTGWKSKCC

SEQ ID NO: 820361 - protein, 200 aa, Homo sapiens; identical to SEQ ID NO: 820360

SEQ ID NO: 820362 - protein, 107 aa, Homo sapiens
MPSCARAQRRTARLGREGRAGVRPCVRLRQRARRRERARGKGGSGRGGSVSWGYVTELVDLGVLLRCPRRVLAGSFRSGERLSSRPLRLLDGRAGLLARGSVPAEKP

SEQ ID NO: 820363 - protein, 200 aa, Homo sapiens; identical to SEQ ID NO: 820360

SEQ ID NO: 820364 - protein, 200 aa, Homo sapiens; identical to SEQ ID NO: 820360

SEQ ID NO: 820365 - protein, 200 aa, Homo sapiens; identical to SEQ ID NO: 820360

SEQ ID NO: 820366 - protein, 200 aa, Homo sapiens; identical to SEQ ID NO: 820360

SEQ ID NO: 820367 - protein, 172 aa, Homo sapiens
MAKKTYDLLFKLLLIGDSGVGKTCVLFRFSDDAFNTTFISTIGIDFKIKTVELQGKKIKLQIWDTAGQERFHTITTSYYRGAMGIMLVYDITNGKSFENISKWLRNIDERWGLAVLPRLVSNSRGQVILPSQPPKKLGLQPTQFEDIEDEDLYDDPLPLNKYMPMKMWKECY

SEQ ID NO: 820368 - protein, 200 aa, Homo sapiens; identical to SEQ ID NO: 820360

SEQ ID NO: 820369 - protein, 182 aa, Homo sapiens
MAKKTYDLLFKLLLIGDSGVGKTCVLFRFSDDAFNTTFISTIGIDFKIKTVELQGKKIKLQIWDTAGQERFHTITTSYYRGAMGIMLVYDITNGKSFEKMLLGNKCDMDDKRVVPKGKGEQIAREHGIRFFETSAKANINIEKAFLTLAEDILRKTPVKEPNSENVDISSGGGVTGWKSKCC

SEQ ID NO: 820370 - protein, 118 aa, Homo sapiens
MGIMLVYDITNGKSFENISKWLRNIDEHANEDVERMLLGNKCDMDDKRVVPKGKGEQIAREHGIRFFETSAKANINIEKAFLTLAEDILRKTPVKEPNSENVDISSGGGVTGWKSKCC

SEQ ID NO: 820371 - protein, 200 aa, Homo sapiens; identical to SEQ ID NO: 820360

SEQ ID NO: 820372 - protein, 200 aa, Homo sapiens; identical to SEQ ID NO: 820360

SEQ ID NO: 820373 - protein, 200 aa, Homo sapiens; identical to SEQ ID NO: 820360

SEQ ID NO: 820374 - protein, 200 aa, Homo sapiens; identical to SEQ ID NO: 820360

SEQ ID NO: 820375 - protein, 177 aa, Homo sapiens
MAKKTYDLLFKLLLIGDSGVGKTCVLFRFSDDAFNTTFISTIGIDFKIKTVELQGKKIKLQIWDTAGQERFHTITTSYYRGAMGIMLVYDITNGKSFENISKWLRNIDERWGLAVLPRLVSNSRGQVILPSQPPKKLGLQVCATTPSSINRFLKTNLLEKMLETCNNLKNSQTSHIT

SEQ ID NO: 820376 - protein, 771 aa, Homo sapiens
MTANRLAESLLALSQQEELADLPKDYLLSESEDEGDNDGERKHQKLLEAISSLDGKNRRKLAERSEASLKVSEFNVSSEGSGEKLVLADLLEPVKTSSSLATVKKQLSRVKSKKTVELPLNKEEIERIHREVAFNKTAQVLSKWDPVVLKNRQAEQLVFPLEKEEPAIAPIEHVLSGWKARTPLEQEIFNLLHKNKQPVTDPLLTPVEKASLRAMSLEEAKMRRAELQRARALQSYYEAKARREKKIKSKKYHKVVKKGKAKKALKEFEQLRKVNPAAALEELEKIEKARMMERMSLKHQNSGKWAKSKAIMAKYDLEARQAMQEQLSKNKELTQKLQVASESEEEEGGTEDVEELLVPDVVNEVQMNADGPNPWMLRSCTSDTKEAATQEDPEQLPELEAHGVSESEGEERPVAEEEILLREFEERRSLRKRSELSQDAEPAGSQETKDSGSQEVLSELRVLSQKLKENHQSRKQKASSEGTIPQVQREEPAPEEEEPLLLQRPERVQTLEELEELGKEECFQNKELPRPVLEGQQSERTPNNRPDAPKEKKKKEQMIDLQNLLTTQSPSVKSLAVPTIEELEDEEERNHRQMIKEAFAGDDVIRDFLKEKREAVEASKPKDVDLTLPGWGEWGGVGLKPSAKKRRRFLIKAPEGPPRKDKNLPNVIINEKRNIHAAAHQVRVLPYPFTHHWQFERTIQTPIGSTWNTQRAFQKLTTPKVVTKPGHIINPIKAEDVGYRSSSRSDLSVIQRNPKRITTRHKKQLKKCSVD

SEQ ID NO: 820377 - protein, 737 aa, Homo sapiens
MTANRLAESLLALSQQEELADLPKDYLLSESEDEGDNDGERKHQKLLEAISSLDGKNRRKLAERSEASLKVSEFNVSSEGSGEKLVLADLLEPVKTSSSLATVKKQLSRVKSKKTVELPLNKEEIERIHREVAFNKTAQVLSKWDPVVLKNRQAEQLVFPLEKEEPAIAPIEHVLSGWKARTPLEQEIFNLLHKNKQPVTDPLLTPVEKASLRAMSLEEAKMRRAELQRARALQSYYEAKARREKKIKSKKYHKVVKKGKAKKALKEFEQLRKVNPAAALEELEKIEKARMMERMSLKHQNSGKWAKSKAIMAKYDLEARQAMQEQLSKNKELTQKLQVASESEEEEGGTEDVEELLDPEQLPELEAHGVSESEGEERPVAEEEILLREFEERRSLRKRSELSQDAEPAGSQETKDSGSQEVLSELRVLSQKLKENHQSRKQKASSEGTIPQVQREEPAPEEEEPLLLQRPERVQTLEELEELGKEECFQNKELPRPVLEGQQSERTPNNRPDAPKEKKKKEQMIDLQNLLTTQSPSVKSLAVPTIEELEDEEERNHRQMIKEAFAGDDVIRDFLKEKREAVEASKPKDVDLTLPGWGEWGGVGLKPSAKKRRRFLIKAPEGPPRKDKNLPNVIINEKRNIHAAAHQVRVLPYPFTHHWQFERTIQTPIGSTWNTQRAFQKLTTPKVVTKPGHIINPIKAEDVGYRSSSRSDLSVIQRNPKRITTRHKKQLKKCSVD

SEQ ID NO: 820378 - protein, 760 aa, Homo sapiens
MTANRLAESLLALSQQEELADLPKDYLLSESEDEGDNDGERKHQKLLEAISSLDGKNRRKLAERSEASLKVSEFNVSSEGSGEKLVLADLLEPVKTSSSLATVKKQLSRVKSKKTVELPLNKEEIERIHREVAFNKTAQVLSKWDPVVLKNRQAEQLVFPLEKEEPAIAPIEHVLSGWKARTPLEQEIFNLLHKNKQPVTDPLLTPVEKASLRAMSLEEAKMRRAELQRARALQSYYEAKARREKKIKSKKYHKVVKKGKAKKALKEFEQLRKVNPAAALEELEKIEKARMMERMSLKHQNSGKWAKSKAIMAKYDLEARQAMQEQLSKNKELTQKLQVASESEEEEGGTEDVEELLVPDVVNEVQMNADGPNPWMLRSCTSDTKEAATQEDPEQLPELEAHGVSESEGEERPVAEEEILLREFEERRSLRKRSELSQDAEPAGSQETKDSGSQEVLSELRVLSQKLKENHQSRKQKASSEGTIPQVQREEPAPEEEEPLLLQRPERVQTLEELEELGKEECFQNKELPRPVLEGQQSERTPNNRPDAPKEKKKKEQMIDLQNLLTTQSPSVKSLAVPTIEELEDEEERNHRQMIKEAFAGDDVIRDFLKEKREAVEASKPKDVDLTLPGWGEWGGVGLKPSAKKRRRKDKNLPNVIINEKRNIHAAAHQVRVLPYPFTHHWQFERTIQTPIGSTWNTQRAFQKLTTPKVVTKPGHIINPIKAEDVGYRSSSRSDLSVIQRNPKRITTRHKKQLKKCSVD

SEQ ID NO: 820379 - protein, 420 aa, Homo sapiens
  misc_feature (365)..(365): Xaa can be any naturally occurring amino acid
  misc_feature (379)..(379): Xaa can be any naturally occurring amino acid
MTANRLAESLLALSQQEELADLPKDYLLSESEDEGDNDGERKHQKLLEAISSLDGKNRRKLAERSEASLKVSEFNVSSEGSGEKLVLADLLEPVKTSSSLATVKKQLSRVKSKKTVELPLNKEEIERIHREVAFNKTAQVLSKWDPVVLKNRQAEQLVFPLEKEEPAIAPIEHVLSGWKARTPLEQEIFNLLHKNKQPVTDPLLTPVEKASLRAMSLEEAKMRRAELQRARALQSYYEAKARREKKIKSKKYHKVVKKGKAKKALKEFEQLRKVNPAAALEERRKEERRRRRKKKNKEKKKEEGRRRRKEGEEEKEEGERKGEGKGKEGEERRTKKKERKNKKERRKKKVKEEERRKKERRGRTXKKKEEERRKKNKEXERRRRKNKKRKKKKKKRRRKEGEKGRKKEEESRKRKKEKKV

SEQ ID NO: 820380 - protein, 242 aa, Homo sapiens
TSGYFQDEECVRLDKERLAARLEGHKEGIVQTEQIRSLSEAMSVEKIAAIKAKIMAKKRSTIKTDLDDDITALKQRSFVDAEVDVTRDIVSRERVWRTRTTILQSTGKNFSKNIFAILQSVKAREEGRAPEQRPAPNAAPVDPTLRTKQPIPAASAPSEKKKKKKKKKKKKKKKKKKKRKKKKKKKRDKRRIKRRATKQEKPKKRLEKRGKKKKHRRQKRQQENEKKEKKRRKKKKKKGTQP

SEQ ID NO: 820381 - protein, 125 aa, Homo sapiens
WLVLLLLVRRGGEGGGGRGRGDKRRRRQARRQRRRPEPAEARGGKMADVLSVLRQYNIQKKEIVVKGDEVIFGEFSWPKNVKTNYVVWGTGKEGQPREYYTLDSILFLLNNVHLSHPVYVRRAAT

SEQ ID NO: 820382 - protein, 576 aa, Homo sapiens
WLVLLLLVRRGGEGGGGRGRGDKRRRRQARRQRRRPEPAEARGGKMADVLSVLRQYNIQKKEIVVKGDEVIFGEFSWPKNVKTNYVVWGTGKEGQPREYYTLDSILFLLNNVHLSHPVYVRRAATENIPVVRRPDRKDLLGYLNGEASTSASIDRSAPLEIGLQRSTQVKRAADEVLAEAKKPRIEDEECVRLDKERLAARLEGHKEGIVQTEQIRSLSEAMSVEKIAAIKAKIMAKKRSTIKTDLDDDITALKQRSFVDAEVDVTRDIVSRERVWRTRTTILQSTGKNFSKNIFAILQSVKAREEGRAPEQRPAPNAAPVDPTLRTKQPIPAAYNRYDQERFKGKEETEGFKIDTMGTYHGMTLKSVTEGASARKTQTPAAQPVPRPVSQARPPPNQKKGSRTPIIIIPAATTSLITMLNAKDLLQDLKFVPSDEKKKQGCQRENETLIQRRKDQMQPGGTAISVTVPYRVVDQPLKLMPQDWDRVVAVFVQGPAWQFKGWPWLLPDGSPVDIFAKIKAFHLKYDEVRLDPNVQKWDVTVLELSYHKRHLDRPVFLRFWETLDRYMVKHKSHLRF

SEQ ID NO: 820383 - protein, 576 aa, Homo sapiens; identical to SEQ ID NO: 820382

SEQ ID NO: 820384 - protein, 576 aa, Homo sapiens; identical to SEQ ID NO: 820382

SEQ ID NO: 820385 - protein, 484 aa, Homo sapiens
WLVLLLLVRRGGEGGGGRGRGDKRRRRQARRQRRRPEPAEARGGKMADVLSVLRQYNIQKKEIVVKGDEVIFGEFSWPKNVKTNYVVWGTGKEGQPREYYTLDSILFLLNNVHLSHPVYVRRAATENIPVVRRPDRKDLLGYLNGEASTSASIDRSAPLEIGLQRSTQVKRAADEVLAEAKKPRIEDEECVRLDKERLAARLEGHKEGIVQTEQIRSLSEAMSVEKIAAIKAKIMAKKRSTIKTDLDDDITALKQRSFVDAEVDVTRDIVSRERVWRTRTTILQSTGKNFSKNIFAILQSVKAREEGRAPEQRPAPNAAPVDPTLRTKQPIPAAYNRYDQERFKGKEETEGFKIDTMGTYHGMTLKSVTEGASARKTQTPAAQPVPRPVSQARPPPNQKKGSRTPIIIIPAATTSLITMLNAKDLLQDLKFVPSDEKKKQGCQRENETLIQRRKDQMQPGGTAISVTVPYRVVDQPLKLMPQDC

SEQ ID NO: 820386 - protein, 334 aa, Homo sapiens [sequence omitted]

SEQ ID NO: 820387 - protein, 334 aa, Homo sapiens [sequence omitted]

SEQ ID NO: 820388 - protein, 334 aa, Homo sapiens [sequence omitted]

SEQ ID NO: 820389 - protein, 334 aa, Homo sapiens [sequence omitted]

SEQ ID NO: 820390 - protein, 717 aa, Homo sapiens
MIDPDFADKPKLPENYTDETWQKLKEAVEAIQNSTSIKYNLEELYQAVENLCSYKISANLYKQLRQICEDHIKAQIHQFREDSLDSVLFLKKIDRCWQNHCRQMIMIRSIFLFLDRTYVLQNSMLPSIWDMGLELFRAHIISDQKVQNKTIDGILLLIERERNGEAIDRSLLRSLLSMLSDLQIYQDSFEQRFLEETNRLYAAEGQKLMQEREVPEYLHHVNKRLEEEADRLITYLDQTTQKSLIATVEKQLLGEHLTAILQKGLNNLLDENRIQDLSLLYQLFSRVRGGVQVLLQQWIEYIKAFGSTIVINPEKDKTMVQELLDFKDKVDHIIDICFLKNEKFINAMKEAFETFINKRPNKPAELIAKYVDSKLRAGNKEATDEELEKMLDKIMIIFRFIYGKDVFEAFYKKDLAKRLLVGKSASVDAEKSMLSKLKHECGAAFTSKLEGMFKDMELSKDIMIQFKQYMQNQNVPGNIELTVNILTMGYWPTYVPMEVHLPPEMVKLQEIFKTFYLGKHSGRKLQWQSTLGHCVLKAEFKEGKKELQVSLFQTLVLLMFNEGEEFSLEEIKQATGIEDGELRRTLQSLACGKARVLAKNPKGKDIEDGDKFICNDDFKHKLFRIKINQIQMKETVEEQASTTERVFQDRQYQIDAAIVRIMKMRKTLSHNLLVSEVYNQLKFPVKPADLKKRIESLIDRDYMERDKENPNQYNYIA

SEQ ID NO: 820391 - protein, 895 aa, Homo sapiens
MFPTGFSSPSPSAAAAAQEVRSATDGNTSTTPPTSAKKRKLNSSSSSSSNSSNEREDFDSTSSSSSTPPLQPRDSASPSTSSFCLGVSVAASSHVPIQKKLRFEDTLEFVGFDAKMAEESSSSSSSSSPTAATSQQQQLKNKSILISSVASVHHANGLAKSSTTVSSFANSKPGSAKKLVIKNFKDKPKLPENYTDETWQKLKEAVEAIQNSTSIKYNLEELYQAVENLCSYKISANLYKQLRQICEDHIKAQIHQFREDSLDSVLFLKKIDRCWQNHCRQMIMIRSIFLFLDRTYVLQNSMLPSIWDMGLELFRAHIISDQKVQNKTIDGILLLIERERNGEAIDRSLLRSLLSMLSDLQIYQDSFEQRFLEETNRLYAAEGQKLMQEREVPEYLHHVNKRLEEEADRLITYLDQTTQKSLIATVEKQLLGEHLTAILQKGLNNLLDENRIQDLSLLYQLFSRVRGGVQVLLQQWIEYIKAFGSTIVINPEKDKTMVQELLDFKDKVDHIIDICFLKNEKFINAMKEAFETFINKRPNKPAELIAKYVDSKLRAGNKEATDEELEKMLDKIMIIFRFIYGKDVFEAFYKKDLAKRLLVGKSASVDAEKSMLSKLKHECGAAFTSKLEGMFKDMELSKDIMIQFKQYMQNQNVPGNIELTVNILTMGYWPTYVPMEVHLPPEMVKLQEIFKTFYLGKHSGRKLQWQSTLGHCVLKAEFKEGKKELQVSLFQTLVLLMFNEGEEFSLEEIKQATGIEDGELRRTLQSLACGKARVLAKNPKGKDIEDGDKFICNDDFKHKLFRIKINQIQMKETVEEQASTTERVFQDRQYQIDAAIVRIMKMRKTLSHNLLVSEVYNQLKFPVKPADLKKRIESLIDRDYMERDKENPNQYNYIA

SEQ ID NO: 820392 - protein, 915 aa, Homo sapiens
PTQVLRTWGLRDLGAMKSVCPVTSGFSSPSPSAAAAAQEVRSATDGNTSTTPPTSAKKRKLNSSSSSSSNSSNEREDFDSTSSSSSTPPLQPRDSASPSTSSFCLGVSVAASSHVPIQKKLRFEDTLEFVGFDAKMAEESSSSSSSSSPTAATSQQQQLKNKSILISSVASVHHANGLAKSSTTVSSFANSKPGSAKKLVIKNFKDKPKLPENYTDETWQKLKEAVEAIQNSTSIKYNLEELYQAVENLCSYKISANLYKQLRQICEDHIKAQIHQFREDSLDSVLFLKKIDRCWQNHCRQMIMIRSIFLFLDRTYVLQNSMLPSIWDMGLELFRAHIISDQKVQNKTIDGILLLIERERNGEAIDRSLLRSLLSMLSDLQIYQDSFEQRFLEETNRLYAAEGQKLMQEREVPEYLHHVNKRLEEEADRLITYLDQTTQKSLIATVEKQLLGEHLTAILQKGLNNLLDENRIQDLSLLYQLFSRVRGGVQVLLQQWIEYIKAFGSTIVINPEKDKTMVQELLDFKDKVDHIIDICFLKNEKFINAMKEAFETFINKRPNKPAELIAKYVDSKLRAGNKEATDEELEKMLDKIMIIFRFIYGKDVFEAFYKKDLAKRLLVGKSASVDAEKSMLSKLKHECGAAFTSKLEGMFKDMELSKDIMIQFKQYMQNQNVPGNIELTVNILTMGYWPTYVPMEVHLPPEMVKLQEIFKTFYLGKHSGRKLQWQSTLGHCVLKAEFKEGKKELQVSLFQTLVLLMFNEGEEFSLEEIKQATGIEDGELRRTLQSLACGKARVLAKNPKGKDIEDGDKFICNDDFKHKLFRIKINQIQMKETVEEQASTTERVFQDRQYQIDAAIVRIMKMRKTLSHNLLVSEVYNQLKFPVKPADLKKRIESLIDRDYMERDKENPNQYNYIA

SEQ ID NO: 820393 - protein, 912 aa, Homo sapiens
MSQSSGSGDGNDDEATTSKDGGFSSPSPSAAAAAQEVRSATDGNTSTTPPTSAKKRKLNSSSSSSSNSSNEREDFDSTSSSSSTPPLQPRDSASPSTSSFCLGVSVAASSHVPIQKKLRFEDTLEFVGFDAKMAEESSSSSSSSSPTAATSQQQQLKNKSILISSVASVHHANGLAKSSTTVSSFANSKPGSAKKLVIKNFKDKPKLPENYTDETWQKLKEAVEAIQNSTSIKYNLEELYQAVENLCSYKISANLYKQLRQICEDHIKAQIHQFREDSLDSVLFLKKIDRCWQNHCRQMIMIRSIFLFLDRTYVLQNSMLPSIWDMGLELFRAHIISDQKVQNKTIDGILLLIERERNGEAIDRSLLRSLLSMLSDLQIYQDSFEQRFLEETNRLYAAEGQKLMQEREVPEYLHHVNKRLEEEADRLITYLDQTTQKSLIATVEKQLLGEHLTAILQKGLNNLLDENRIQDLSLLYQLFSRVRGGVQVLLQQWIEYIKAFGSTIVINPEKDKTMVQELLDFKDKVDHIIDICFLKNEKFINAMKEAFETFINKRPNKPAELIAKYVDSKLRAGNKEATDEELEKMLDKIMIIFRFIYGKDVFEAFYKKDLAKRLLVGKSASVDAEKSMLSKLKHECGAAFTSKLEGMFKDMELSKDIMIQFKQYMQNQNVPGNIELTVNILTMGYWPTYVPMEVHLPPEMVKLQEIFKTFYLGKHSGRKLQWQSTLGHCVLKAEFKEGKKELQVSLFQTLVLLMFNEGEEFSLEEIKQATGIEDGELRRTLQSLACGKARVLAKNPKGKDIEDGDKFICNDDFKHKLFRIKINQIQMKETVEEQASTTERVFQDRQYQIDAAIVRIMKMRKTLSHNLLVSEVYNQLKFPVKPADLKKRIESLIDRDYMERDKENPNQYNYIA

SEQ ID NO: 820394 - protein, 912 aa, Homo sapiens; identical to SEQ ID NO: 820393

SEQ ID NO: 820395 - protein, 266 aa, Homo sapiens
MFKDMELSKDIMIQFKQYMQNQNVPGNIELTVNILTMGYWPTYVPMEVHLPPEMVKLQEIFKTFYLGKHSGRKLQWQSTLGHCVLKAEFKEGKKELQVSLFQTLVLLMFNEGEEFSLEEIKQATGIEDGELRRTLQSLACGKARVLAKNPKGKDIEDGDKFICNDDFKHKLFRIKINQIQMKETVEEQASTTERVFQDRQYQIDAAIVRIMKMRKTLSHNLLVSEVYNQLKFPVKPADLKKRIESLIDRDYMERDKENPNQYNYIA

SEQ ID NO: 820396 - protein, 895 aa, Homo sapiens
MFPTGFSSPSPSAAAAAQEVRSATDGNTSTTPPTSAKKRKLNSSSSSSSNSSNEREDFDSTSSSSSTPPLQPRDSASPSTSSFCLGVSVAASSHVPIQKKLRFEDTLEFVGFDAKMAEESSSSSSSSSPTAATSQQQQLKNKSILISSVASVHHANGLAKSSTTVSSFANSKPGSAKKLVIKNFKDKPKLPENYTDETWQKLKEAVEAIQNSTSIKYNLEELYQAVENLCSYKISANLYKQLRQICEDHIKAQIHQFREDSLDSVLFLKKIDRCWQNHCRQMIMIRSIFLFLDRTYVLQNSMLPSIWDMGLELFRAHIISDQKVQNKTIDGILLLIERERNGEAIDRSLLRSLLSMLSDLQIYQDSFEQRFLEETNRLYAAEGQKLMQEREVPEYLHHVNKRLEEEADRLITYLDQTTQKSLIATVEKQLLGEHLTAILQKGLNNLLDENRIQDLSLLYQLFSRVRGGVQVLLQQWIEYIKAFGSTIVINPEKDKTMVQELLDFKDKVDHIIDICFLKNEKFINAMKEAFETFINKRPNKPAELIAKYVDSKLRAGNKEATDEELEKMLDKIMIIFRFIYGKDVFEAFYKKDLAKRLLVGKSASVDAEKSMLSKLKHECGAAFTSKLEGMFKDMELSKDIMIQFKQYMQNQNVPGNIELTVNILTMGYWPTYVPMEVHLPPEMVKLQEIFKTFYLGKHSGRKLQWQSTLGHCVLKAEFKEGKKELQVSLFQTLVLLMFNEGEEFSLEEIKQATGIEDGELRRTLQSLACGKARVLAKNPKGKDIEDGDKFICNDDFKHKLFRIKINQIQMKETVEEQASTTERVFQDRQYQIDAAIVRIMKMRKTLSHNLLVSEVYNQLKFPVKPADLKKRIESLIDRDYMERDKGVICSSQWIN

SEQ ID NO: 820397 - protein, 841 aa, Homo sapiens
MFPTGFSSPSPSAAAAAQEVRSATDGNTSTTPPTSAKKRKLNSSSSSSSNSSNEREDFDSTSSSSSTPPLQPRDSASPSTSSFCLGVSVAASSHVPIQKKLRFEDTLEFVGFDAKMAEESSSSSSSSSPTAATSQQQQLKNKSILISSVASVHHANGLAKSSTTVSSFANSKPGSAKKLVIKNFKDKPKLPENYTDETWQKLKEAVEAIQNSTSIKYNLEELYQAVENLCSYKISANLYKQLRQICEDHIKAQIHQFREDSLDSVLFLKKIDRCWQNHCRQMIMIRSIFLFLDRTYVLQNSMLPSIWDMGLELFRAHIISDQKVQNKTIDGILLLIERERNGEAIDRSLLRSLLSMLSDLQIYQDSFEQRFLEETNRLYAAEGQKLMQEREVPEYLHHVNKRLEEEADRLITYLDQTTQKSLIATVEKQLLGEHLTAILQKGLNNLLDENRIQDLSLLYQLFSRVRGGVQVLLQQWIEYIKAFGSTIVINPEKDKTMVQELLDFKDKVDHIIDICFLKNEKFINAMKEAFETFINKRPNKPAELIAKYVDSKLRAGNKEATDEELEKMLDKIMIIFRFIYGKDVFEAFYKKDLAKRLLVGKSASVDAEKSMLSKLKHECGAAFTSKLEGMFKDMELSKDIMIQFKQYMQNQNVPGNIELTVNILTMGYWPTYVPMEVHLPPEMVKLQEIFKTFYLGKHSGRKLQWQSTLGHCVLKAEFKEGKKELQVSLFQTLVLLMFNEGEEFSLEEIKQATGIEDGELRRTLQSLACGKARVLAKNPKGKDIEDGDKFICNDDFKHKLFRIKINQIQMKETVFLSLSLSPNTLELYMLIIKIYKDFYTC

SEQ ID NO: 820398 - protein, 714 aa, Homo sapiens
MGWLWIQKKLLIRFCVCRLNLFRVFQQHEFKRDASVWVSDRDLYLFRGITEGGSVPGASMLTTSRLSHYPAAKFGASMYMAIPCAYVCIQTRMHAWMDIRMHRLFFKDNSFNKVFTPYLKQVFMKKMHKSCLAGIIHEEGAGSVGQRTQDQFAIPRPKVGDSGFLFGGWIPCAVFYLVIVFLPEAAPRSRIASCDSILCMPFLGKVSGCRDAGAGRVGCAWRPVPPVGWARCSAWCWGAARASSDPRASITGGGGGGGGGAVTLCAPCAPALLAAGSAGLCTRALAAGSIGASAGGLGIAFRGTGVFLCCLGCCSGLFRRTAVACLVESEIRMMLAAETEGIAFFFPLNPEPPENIPKAKSFPNPQPDPTKPKPNSYSIGDSCLPASRESVPSKLCPTFYYLLNGNTDGAEWSLMILSRLLRTPECGSGAEELGGSALVSFNVAGLVSVAGQEYFCGYGPSLNFGGSGCRKRVCRSGRWVSSTLALFLVYADVSGSPWHCNHSSQVPTGYLECFGFVNSGVHFGCYGGREEEKRENEVFAELICMAVFSSPCLCDYVMIRRVPKQLPTIILALPQTEEVGCYSCLRRLYVIMCMLGAGREWGQGGIIQQLKCEEYRSVIVCPSEDSVVLALGQCGSEDPPVSLSASNCLSELSFGNFTPLAPWRQLDPGEGPLQGLQFPNSRQKMNPEAKVIGQVPAVLHGPAEQPVQGGVPVH

SEQ ID NO: 820399 - protein, 102 aa, Homo sapiens
PRAHGSRMPWPGGCSAAPRRTPDPSRSRRPAGAQVFMKKMHKILPGRNEFMKKGLDPWVREHRTSLPSQGRSRGTNVLKNGKKGGSEGTDSNTMPEVEDTGA

SEQ ID NO: 820400 - protein, 776 aa, Homo sapiens
MNLFRVFQQHEFKRDASVWVSDRDLYLFRGITEGGSVPGASMLTTSRLSHYPAAKFGASMYMAIPCAYVCIQTRMHAWMDIRMHRLFFKDNSFNKVFTPYLKQVFMKKMHKILPGRNEFMKKGLDPWVREHRTSLPSQGRSLVSRICSCVAHSCWILSSRGTNVLKNGKKGGSEGTDSNTMPEVEDTGAVKGNWHTLEPQEELELEACGPRRVEVPAMTKSPSHHLAIHPEPTEWRTAQRGLSHFVTAKAENKSQRSQRSSTSPTAFRITLRKWLNFDQFCNVDTMRRDLPSCTGFIIIPGGHSSWDFGHLISTFKHVIPISAVVALGILSLGENINLFSLLSSVIKLSYLKLGHFRLEAPLDIPVLRSCQVHVISVSLLTGSTSARGCLARSVCLLVSSLMPFSSPLPNPSETCTVVTLSPPGALTGCVRESMVCGTDIFVCLEVTGTRIHPWRKVAVKEASLSSAFYSHRSYSRLFECLPYSRIIVLFFFQLNVSIAIFHYCKAAHACYKNFGSVDKEKEEKATSKSYLPQRQDDHLVIIVSYIYNMYTYDFNVSVVSQYHVYVFHKTRWHLISYDEQLSRATSLVYSNCNVRVLIYIATASFVYLISYGLMFRLFPTFLHLNSINKCGFSFKKKKKKKKKKNKNKHQQKKHKKKQQTQNNKQKKRANTTKKYQTTQETRTKNTNPTRETNKKTNEQKKEEQHKKKRNHKRTDKKQTKQDKREKKNTEKKEKQKTKEKKKNNERTDNNMANQKTADKKIKNTQKKKNTQENTRT

SEQ ID NO: 820401 - protein, 103 aa, Homo sapiens
PRAHGSRMPWPGGCSAAPRRTPDPSRSRRPAGAQVFMKKMHKSCLAGIIHEEGAGSVGQRTQDQFAIPRPKSGVSDLFLCCPLLLDLVQSRDKRPEEWEERRF

SEQ ID NO: 820402 - protein, 530 aa, Homo sapiens
MPQTPCSLPARSCFPRPPPFHQSSLGWFLCIYISPVPLHIPSPHLGFSSFGLIPLRPLTVSLLQPSVPSDVEPQDLAPLVEPHSGRLSLPPNVCPVLREFRVEVLFWGLRGLGRVHLLEVEQPQVVLEVAGQRVESEVLASYRESPNFTELVRHLSVDLPEQPYLQPPLSILVIERRAFGHTVLVGSHIVPHMLRFTFRGHEDPPEEEGEMEETGDMMPKGPQGQKSLDPFLAEAGISRQLLKPPLKKLPLGGLLNQGPGLEEDIPDPEELDWGSKYYASLQELQGQHNFDEDEMDDPGDSDGVNLISMVGEIQDQGEAEVKGTVSPKKAVATLKIYNRSLEEEFNHFEDWLNVFPLYRGQGGQDGGGEEEGSGHLVGKFKGSFLIYPESEAVLFSEPQISRGIPQNRPIKLLVRVYVVKATNLAPADPNGKADPYVVVSAGRERQDTKERYIPKQLNPIFGEILELSISLPAETELTVAVFDHDLVGSDDLIGETHIDLENRFYSHHRANCGLASQYEVWVQQGPQEPF

SEQ ID NO: 820403 - protein, 516 aa, Homo sapiens
ALAAPRVKLMEDPYQRPELQFFPLRKGPWAAGELIAAFQLIELDYSGRLEPSVPSDVEPQDLAPLVEPHSGRLSLPPNVCPVLREFRVEVLFWGLRGLGRVHLLEVEQPQVVLEVAGQRVESEVLASYRESPNFTELVRHLSVDLPEQPYLQPPLSILVIERRAFGHTVLVGSHIVPHMLRFTFRGHEDPPEEEGEMEETGDMMPKGPQGQKSLDPFLAEAGISRQLLKPPLKKLPLGGLLNQGPGLEEDIPDPEELDWGSKYYASLQELQGQHNFDEDEMDDPGDSDGVNLISMVGEIQDQGEAEVKGTVSPKKAVATLKIYNRSLEEEFNHFEDWLNVFPLYRGQGGQDGGGEEEGSGHLVGKFKGSFLIYPESEAVLFSEPQISRGIPQNRPIKLLVRVYVVKATNLAPADPNGKADPYVVVSAGRERQDTKERYIPKQLNPIFGEILELSISLPAETELTVAVFDHDLVGSDDLIGETHIDLENRFYSHHRANCGLASQYEVWVQQGPQEPF

SEQ ID NO: 820404 - protein, 530 aa, Homo sapiens; identical to SEQ ID NO: 820402

SEQ ID NO: 820405 - protein, 486 aa, Homo sapiens
MPQTPCSLPARSCFPRPPPFHQSSLGWFLCIYISPVPLHIPSPHLGFSSFGLIPLRPLTVSLLQPSVPSDVEPQDLAPLVEPHSGRLSLPPNVCPVLREFRVEVLFWGLRGLGRVHLLEVEQPQVVLEVAGQRVESEVLASYRESPNFTELVRHLSVDLPEQPYLQPPLSILVIERRAFGHTVLVGSHIVPHMLRFTFRGHEDPPEEEGEMEETGDMMPKGPQGQKSLDPFLAEAGISRQLLKHNFDEDEMDDPGDSDGVNLISMVGEIQDQGEAEVKGTVSPKKAVATLKIYNRSLEEEFNHFEDWLNVFPLYRGQGGQDGGGEEEGSGHLVGKFKGSFLIYPESEAVLFSEPQISRGIPQNRPIKLLVRVYVVKATNLAPADPNGKADPYVVVSAGRERQDTKERYIPKQLNPIFGEILELSISLPAETELTVAVFDHDLVGSDDLIGETHIDLENRFYSHHRANCGLASQYEVWVQQGPQEPF

SEQ ID NO: 820406 - protein, 328 aa, Homo sapiens [sequence omitted]

SEQ ID NO: 820407 - protein, 530 aa, Homo sapiens; identical to SEQ ID NO: 820402

SEQ ID NO: 820408 - protein, 334 aa, Homo sapiens
  misc_feature (19)..(20): Xaa can be any naturally occurring amino acid
  misc_feature (23)..(23): Xaa can be any naturally occurring amino acid
FGTELGVEQAHLEERCALXXTPXKAFGRPISYELRVVIWNTEDVVLDDENPLTGEMSSDIYVKSWVKGLEHDKQETDVHFNSLTGEGNFNWRFVFRFDYLPTEREVSVWRRSGPFALEEAEFRQPAVLVLQVWDYDRISANDFLGSLELQLPDMVRGARGPELCSVQLARNGAGPRCNLFRCRRLRGWWPVVKLKEAEDVEREAQEAQAGKKKRKQRRRKGRPEDLEFTDMGGNVYILTGKVEAEFELLTVEEAEKRPVGKGRKQPEPLEKPSRPKTSFNWFVNPLKTFVFFIWRRYWRTLVLLLLVLLTVFLLLVFYTIPGQISQVIFRPLHK

SEQ ID NO: 820409 - protein, 201 aa, Homo sapiens
MPQTPCSLPARSCFPRPPPFHQSSLGWFLCIYISPVPLHIPSPHLGFSSFGLIPLRPLTVSLLQPSVPSDVEPQDLAPLVEPHSGRLSLPPNVCPVLREFRVEVLFWGLRGLGRVHLLEVEQPQVVLEVAGQRVESEVLASYRESPNFTELVRHLSLQQVTDSSCSSPPFGQRLQGHLSVCGSLLSIIQGSHQDFVEEVAL

SEQ ID NO: 820410 - protein, 313 aa, Homo sapiens
MPQTPCSLPARSCFPRPPPFHQSSLGWFLCIYISPVPLHIPSPHLGFSSFGLIPLRPLTVSLLQPSVPSDVEPQDLAPLVEPHSGRLSLPPNVCPVLREFRVEVLFWGLRGLGRVHLLEVEQPQVVLEVAGQRVESEVLASYRESPNFTELVRHLSVDLPEQPYLQPPLSILVIERRAFGHTVLVGSHIVPHMLRFTFRGHEDPPEEEGEMEETGDMMPKGPQGQKSLDPFLAEAGISRQLLKPPLKKLPLGGLLNQGPGLEEDIPDPEELDWGSKYYASLQELQGQRWGLYLLSRLVSNSWVQVIFPPQPPQ

SEQ ID NO: 820411 - protein, 118 aa, Homo sapiens
EEWVLHVAPALTLTHPGPSWVKGLEHDKQETDVHFNSLTGEGNFNWRFVFRFDYLPTEREVSVWRRSGPFALEEAEFRQPAVLVLQVWDYDRISANDFLGITMLSLPHPQPLPPALTS

SEQ ID NO: 820412 - protein, 81 aa, Homo sapiens
VAWGGGERPGTRTWRWSADASLSQGKTKELGEQSASTSSRFDQPFFSEQETYHTAREDTRRRHLFTHQEERPHKNPIMMAL

SEQ ID NO: 820413 - protein, 639 aa, Homo sapiens
MLLRKRYRHRPCRLQFLLLLLMLGCVLMMVAMLHPPHHTLHQTVTAQASKHSPEARYRLDFGESQDWVLEAEDEGEEYSPLEGLPPFISLREDQLLVAVALPQARRNQSQGRRGGSYRLIKQPRRQDKEAPKRDWGADEDGEVSEEEELTPFSLDPRGLQEALSARIPLQRALPEVRHPLCLQQHPQDSLPTASVILCFHDEAWSTLLRTVHSILDTVPRAFLKEIILVDDLSQQGQLKSALSEYVARLEGVKLLRSNKRLGAIRARMLGATRATGDVLVFMDAHCECHPGWLEPLLSRIAGDRSRVVSPVIDVIDWKTFQYYPSKDLQRGVLDWKLDFHWEPLPEHVRKALQSPISPIRSPVVPGEVVAMDRHYFQNTGAYDSLMSLRGGENLELSFKAWLCGGSVEILPCSRVGHIYQNQDSHSPLDQEATLRNRVRIAETWLGSFKETFYKHSPEAFSLSKAEKPDCMERLQLQRRLGCRTFHWFLANVYPELYPSEPRPSFSGKLHNTGLGLCADCQAEGDILGCPMVLAPCSDSRQQQYLQHTSRKEIHFGSPQHLCFAVRQEQVILQNCTEEGLAIHQQHWDFQENGMIVHILSGKCMEAVVQENNKDLYLRPCDGKARQQWRFDQINAVDER

SEQ ID NO: 820414 - protein, 169 aa, Homo sapiens
MERLQLQRRLGCRTFHWFLANVYPELYPSEPRPSFSGKLHNTGLGLCADCQAEGDILGCPMVLAPCSDSRQQQYLQHTSRKEIHFGSPQHLCFAVRQEQVILQNCTEEGLAIHQQHWDFQENGMIVHILSGKCMEAVVQENNKDLYLRPCDGKARQQWRFDQINAVDER

SEQ ID NO: 820415 - protein, 372 aa, Homo sapiens
MLGATRATGDVLVFMDAHCECHPGWLEPLLSRIAGDRSRVVSPVIDVIDWKTFQYYPSKDLQRGVLDWKLDFHWEPLPEHVRKALQSPISPIRSPVVPGEVVAMDRHYFQNTGAYDSLMSLRGGENLELSFKAWLCGGSVEILPCSRVGHIYQNQDSHSPLDQEATLRNRVRIAETWLGSFKETFYKHSPEAFSLSKAEKPDCMERLQLQRRLGCRTFHWFLANVYPELYPSEPRPSFSGKLHNTGLGLCADCQAEGDILGCPMVLAPCSDSRQQQYLQHTSRKEIHFGSPQHLCFAVRQEQVILQNCTEEGLAIHQQHWDFQENGMIVHILSGKCMEAVVQENNKDLYLRPCDGKARQQWRFDQINAVDER

SEQ ID NO: 820416 - protein, 639 aa, Homo sapiens; identical to SEQ ID NO: 820413

SEQ ID NO: 820417 - protein, 600 aa, Homo sapiens
MLLRKRYRHRPCRLQFLLLLLMLGCVLMMVAMLHPPHHTLHQTVTAQASKHSPEARYRLDFGESQDWVLEAEDEGEEYSPLEGLPPFISLREDQLLVAVALPQARRNQSQGRRGGSYRLIKQPRRQDKEAPKRDWGADEDGEVSEEEELTPFSLDPRGLQEALSARIPLQRALPEVRHPLCLQQHPQDSLPTASVILCFHDEAWSTLLRTVHSILDTVPRAFLKEIILVDDLSQQGQLKSALSEYVARLEGVKLLRSNKRLGAIRARMLGATRATGDVLVFMDAHCECHPGWLEPLLSRIAGDRSRVVSPVIDVIDWKTFQYYPSKDLQRGVLDWKLDFHWEPLPEHVRKALQSPISPIRSPVVPGEVVAMDRHYFQNTGAYDSLMSLRGGENLELSFKAWLCGGSVEILPCSRVGHIYQNQDSHSPLDQEATLRNRVRIAETWLGSFKETFYKHSPEAFSLSKAEKPDCMERLQLQRRLGCRTFHWFLANVYPELYPSEPRPSFSGKLHNTGLGLCADCQAEGDILGCPMVLAPCSDSRQQQYLQHTSRKEIHFGSPQHLCFAVRQEQVILQNCTEEGLAIHQQHWDFQEFCRLHRKHG

SEQ ID NO: 820418 - protein, 360 aa, Homo sapiens
MRRDERDAKAMRSLQPPDGAGSPPESLRNGYVKSCVSPLRQDPPRGFFFHLCRFCNVELRPPPASPQQPRRCSPFCRARLSLGALAAFVLALLLGAEPESWAAGAAWLRTLLSVCSHSLSPLFSIACAFFFLTCFLTRTKRGPGPGRSCGSWWLLALPACCYLGDFLVWQWWSWPWGDGDAGSAAPHTPPEAAAGRLLLVLSCVGLLLTLAHPLRLRHCVLVLLLASFVWWVSFTSLGSLPSALRPLLSGLVGGAGCLLALGLDHFFQIREAPLHPRLSSAAEEKVPVIRPRRRSSCVSLGETAASYYGSCKIFRRPSLPCISREQMILWDWDLKQWCILDVYSRPNPSIAFRFPIQGQG

SEQ ID NO: 820419 - protein, 1112 aa, Homo sapiens
MRRDERDAKAMRSLQPPDGAGSPPESLRNGYVKSCVSPLRQDPPRGFFFHLCRFCNVELRPPPASPQQPRRCSPFCRARLSLGALAAFVLALLLGAEPESWAAGAAWLRTLLSVCSHSLSPLFSIACAFFFLTCFLTRTKRGPGPGRSCGSWWLLALPACCYLGDFLVWQWWSWPWGDGDAGSAAPHTPPEAAAGRLLLVLSCVGLLLTLAHPLRLRHCVLVLLLASFVWWVSFTSLGSLPSALRPLLSGLVGGAGCLLALGLDHFFQIREAPLHPRLSSAAEEKVPVIRPRRRSSCVSLGETAASYYGSCKIFRRPSLPCISREQMILWDWDLKQWYKPHYQNSGGGNGVDLSVLNEARNMVSDLLTDPSLPPQVISSLRSISSLMGAFSGSCRPKINPLTPFPGFYPCSEIEDPAEKGDRKLNKGLNRNSLPTPQLRRSSGTSGLLPVEQSSRWDRNNGKRPHQEFGISSQGCYLNGPFNSNLLTIPKQRSSSVSLTHHVGLRRAGVLSSLSPVNSSNHGPVSTGSLTNRSPIEFPDTADFLNKPSVILQRSLGNAPNTPDFYQQLRNSDSNLCNSCGHQMLKYVSTSESDGTDCCSGKSGEEENIFSKESFKLMETQQEEETEKKDSRKLFQEGDKWLTEEAQSEQQTNIEQEVSLDLILVEEYDSLIEKMSNWNFPIFELVEKMGEKSGRILSQVMYTLFQDTGLLEIFKIPTQQFMNYFRALENGYRDIPYHNRIHATDVLHAVWYLTTRPVPGLQQIHNGCGTGNETDSDGRINHGRIAYISSKSCSNPDESYGCLSSNIPALELMALYVAAAMHDYDHPGRTNAFLVATNAPQAVLYNDRSVLENHHAASAWNLYLSRPEYNFLLHLDHVEFKRFRFLVIEAILATDLKKHFDFLAEFNAKANDVNSNGIEWSNENDRLLVCQVCIKLADINGPAKVRDLHLKWTEGIVNEFYEQGDEEANLGLPISPFMDRSSPQLAKLQESFITHIVGPLCNSYDAAGLLPGQWLEAEEDNDTESGDDEDGEELDTEDEEMENNLNPKPPRRKSRRRIFCQLMHHLTENHKIWKEIVEEEEKCKADGNKLQVENSSLPQADEIQVIEEADEEE

SEQ ID NO: 820420 - protein, 1112 aa, Homo sapiens; identical to SEQ ID NO: 820419

SEQ ID NO: 820421 - protein, 379 aa, Homo sapiens
MGYARKVGWVTAGLVIGAGACYCIYRLTRGRKQNKEKMAEGGSGDVDDAGDCSGARYNDWSDDDDDSNESKSIVWYPPWARIGTEAGTRARARARARATRARRAVQKRASPNSDDTVLSPQELQKVLCLVEMSEKPYILEAALIALGNNAAYAFNRDIIRDLGGLPIVAKILNTRDPIVKEKALIVLNNLSVNAENQRRLKVYMNQVCDDTITSRLNSSVQLAGLRLLTNMTVTNEYQHMLANSISDFFRLFSAGNEETKLQVLKLLLNLAENPAMTRELLRAQVPSSLGSLFNKKENKEVILKLLVIFENINDNFKWEENEPTQNQFGEGSLFFFLKEFQVCADKVLGIESHHDFLVKVKVGKFMAKLAEHMFPKSQE

SEQ ID NO: 820422 - protein, 379 aa, Homo sapiens; identical to SEQ ID NO: 820421

SEQ ID NO: 820423 - protein, 379 aa, Homo sapiens; identical to SEQ ID NO: 820421

SEQ ID NO: 820424 - protein, 379 aa, Homo sapiens; identical to SEQ ID NO: 820421

SEQ ID NO: 820425 - protein, 379 aa, Homo sapiens; identical to SEQ ID NO: 820421

SEQ ID NO: 820426 - protein, 379 aa, Homo sapiens; identical to SEQ ID NO: 820421

SEQ ID NO: 820427 - protein, 379 aa, Homo sapiens; identical to SEQ ID NO: 820421

SEQ ID NO: 820428 - protein, 379 aa, Homo sapiens; identical to SEQ ID NO: 820421

SEQ ID NO: 820429 - protein, 379 aa, Homo sapiens; identical to SEQ ID NO: 820421

SEQ ID NO: 820430 - protein, 379 aa, Homo sapiens; identical to SEQ ID NO: 820421

SEQ ID NO: 820431 - protein, 379 aa, Homo sapiens; identical to SEQ ID NO: 820421

SEQ ID NO: 820432 - protein, 379 aa, Homo sapiens; identical to SEQ ID NO: 820421

SEQ ID NO: 820433 - protein, 379 aa, Homo sapiens; identical to SEQ ID NO: 820421

SEQ ID NO: 820434 - protein, 327 aa, Homo sapiens
MGYARKVGWVTAGLVIGAGACYCIYRLTRGRKQNKEKMAEGGSGDVDDAGDCSGARYNDWSDDDDDSNESKSIVWYPPWARIGTEAGTRARARARARATRARRAVQKRASPNSDDTVLSPQELQKVLCLVEMSEKPYILEAALIALGNNAAYAFNRDIIRDLGGLPIVAKILNTRDPIVKEKALIVLNNLSVNAENQRRLKVYMNQVCDDTITSRLNSSVQLAGLRLLTNMTVTNEYQHMLANSISDFFRLFSAGNEETKLQVLKLLLNLAENPAMTRELLRAQVPSSLGSLFNKKENKEVILKLLVIFENINDNFKWEEIFRLKMR

SEQ ID NO: 820435 - protein, 76 aa, Homo sapiens
FETLLDPPGCLNSALPEGGPACGGGKKEEEKEIVPNPCRSVPGRFHKVGVLEGVGPRPSRVLRRLRRLSHSPPAFQ

SEQ ID NO: 820436 - protein, 1848 aa, Homo sapiens
DHTASQNAQDLIGIPHLGVSGSSTKWHSELSPTEGPHSAGSSTPGFLSPMAELSHPSPPPPALGSLLQLPDGSPSWSMLEVASGPASTQQIKAGVPGRVHNGVSLPTFKNTETATHEAEPPLFQTAESGAIEMTSRKLASATANDSANPLHLSAAPENSRGPALSAEHTSSLVPSLHITTLGQEQAILSGAVPASPSTGTADFPSILTFLQPTENHASPSPVPEMPTLPAEGSDGSPPATRDLLLSSKVPNLLSTSWTFPRWKKDSVTAILGKNEEANVTIPLQAFPRKEVLSLHTVNGFVSDFSTGSVSSPIITAPRTNPLPSGPPLPSILSIQATQTVFPSLGFSSTKPEAYAAAVDHSGLPASASKQVRASPSSMDVYDSLTIGDMKKPATTDVFWSSLSAETGSLSTESIISGLQQQTNYDLNGHTISTTSWETHLAPTAPPNGLTSAADAIKSQDFKDTAGHSVTAEGFSIQDLVLGTSIEQPVQQSDMTMVGSHIDLWPTSNNNHSRDFQTAEVAYYSPTTRHSVSHPQLQLPNQPAHPLLLTSPGPTSTGSLQEMLSDGTDTGSEISSDINSSPERNASTPFQNILGYHSAAESSISTSVFPRTSSRVLRASQHPKKWTADTVSSKVQPTAAAAVTLFLRKSSPPALSAALVAKGTSSSPLAVASGPAKSSSMTTLAKNVTNKAASGPKRTPGAVHTAFPFTPTYMYARTGHTTSTHTAMQGNMDTASGLLSTTYLPRKPQAMHTGLPNPTNLEMPRASTPRPLTVTAALTSITASVKATRLPPLRAENTDAVLPAASAAVVTTGKMASNLECQMSSKLLVKTVLFLTQRRVQISESLKFSIAKGLTQALRKAFHQNDVSAHVDILEYSHNVTVGYYATKGKLVYLPAVVIEMLGVYGVSNVTADLKQHTPHLQSVAVLASPWNPQPAGYFQLKTVLQFVSQADNIQSCKFAQTMEQRLQKAFQDAERKVLNTKSNLTIQIVSTSNASQAVTLVYVVGNQSTFLNGTVASSLLSQLSAELVGFYLTYPPLTIAEPLEYPNLDISETTRDYWVITVLQGVDNSLVGLHNQSFARVMEQRLAQLFMMSQQQGRRFKRATTLGSYTVQMVKMQRVPGPKDPAELTYYTLYNGKPLLGTAAAKILSTIDSQRMALTLHHVVLLQADPVVKNPPNNLWIIAAVLAPIAVVTVIIIIITAVLCRKNKNDFKPDTMINLPQRAKPVQGFDYAKQHLGQQGADEEVIPVTQETVVLPLPIRDAPQERDVAQDGSTIKTAKSTETRKSRSPSENGSVISNESGKPSSGRRSPQNVMAQQKVTKEEARKRNVPASDEEEGAVLFDNSSKVAAEPFDTSSGSVQLIAIKPTALPMVPPTSDRSQESSAVLNGEVNKALKQKSDIEHYRNKLRLKAKRKGYYDFPAVETSKGLTERKKMYEKAPKEMEHVLDPDSELCAPFTESKNRQQMKNSVYRSRQSLNSPSPGETEMDLLVTRERPRRGIRNSGYDTEPEIIEETNIDRVPEPRGYSRSRQVKGHSETSTLSSQPSIDEVRQQMHMLLEEAFSLASAGHAGQSRHQEAYGSAQHLPYSEVVTSAPGTMTRPRAGVQWVPTYRPEMYQYSLPRPAYRFSQLPEMVMGSPPPPVPPRTGPVAVASLRRSTSDIGSKTRMAESTGPEPAQLHDSASFTQMSRGPVSVTQLDQSALNYSGNTVPAVFAIPAANRPGFTGYFIPTPPSSYRNQAWMSYAGENELPSQWADSVPLPGYIEAYPRSRYPQSSPSRLPRQYSQPANLHPSLEQAPAPSTAASQQSLAENDPSDAPLTNISTAALVKAIREEVAKLAKKQTDMFEFQV

SEQ ID NO: 820437 - protein, 1854 aa, Homo sapiens
DHTASQNAQDLIGIPHLGVSGSSTKWHSELSPTEGPHSAGSSTPGFLSPMAELSHPSPPPPALGSLLQLPDGSPSWSMLEVASGPASTQQIKAGVPGRVHNGVSLPTFKNTETATHEAEPPLFQTAESGAIEMTSRKLASATANDSANPLHLSAAPENSRGPALSAEHTSSLVPSLHITTLGQEQAILSGAVPASPSTGTADFPSILTFLQPTENHASPSPVPEMPTLPAEGSDGSPPATRDLLLSSKVPNLLSTSWTFPRWKKDSVTAILGKNEEANVTIPLQAFPRKEVLSLHTVNGFVSDFSTGSVSSPIITAPRTNPLPSGPPLPSILSIQATQTVFPSLGFSSTKPEAYAAAVDHSGLPASASKQVRASPSSMDVYDSLTIGDMKKPATTDVFWSSLSAETGSLSTESIISGLQQQTNYDLNGHTISTTSWETHLAPTAPPNGLTSAADAIKSQDFKDTAGHSVTAEGFSIQDLVLGTSIEQPVQQSDMTMVGSHIDLWPTSNNNHSRDFQTAEVAYYSPTTRHSVSHPQLQLPNQPAHPLLLTSPGPTSTGSLQEMLSDGTDTGSEISSDINSSPERNASTPFQNILGYHSAAESSISTSVFPRTSSRVLRASQHPKKWTGAATNAADTVSSKVQPTAAAAVTLFLRKSSPPALSAALVAKGTSSSPLAVASGPAKSSSMTTLAKNVTNKAASGPKRTPGAVHTAFPFTPTYMYARTGHTTSTHTAMQGNMDTASGLLSTTYLPRKPQAMHTGLPNPTNLEMPRASTPRPLTVTAALTSITASVKATRLPPLRAENTDAVLPAASAAVVTTGKMASNLECQMSSKLLVKTVLFLTQRRVQISESLKFSIAKGLTQALRKAFHQNDVSAHVDILEYSHNVTVGYYATKGKLVYLPAVVIEMLGVYGVSNVTADLKQHTPHLQSVAVLASPWNPQPAGYFQLKTVLQFVSQADNIQSCKFAQTMEQRLQKAFQDAERKVLNTKSNLTIQIVSTSNASQAVTLVYVVGNQSTFLNGTVASSLLSQLSAELVGFYLTYPPLTIAEPLEYPNLDISETTRDYWVITVLQGVDNSLVGLHNQSFARVMEQRLAQLFMMSQQQGRRFKRATTLGSYTVQMVKMQRVPGPKDPAELTYYTLYNGKPLLGTAAAKILSTIDSQRMALTLHHVVLLQADPVVKNPPNNLWIIAAVLAPIAVVTVIIIIITAVLCRKNKNDFKPDTMINLPQRAKPVQGFDYAKQHLGQQGADEEVIPVTQETVVLPLPIRDAPQERDVAQDGSTIKTAKSTETRKSRSPSENGSVISNESGKPSSGRRSPQNVMAQQKVTKEEARKRNVPASDEEEGAVLFDNSSKVAAEPFDTSSGSVQLIAIKPTALPMVPPTSDRSQESSAVLNGEVNKALKQKSDIEHYRNKLRLKAKRKGYYDFPAVETSKGLTERKKMYEKAPKEMEHVLDPDSELCAPFTESKNRQQMKNSVYRSRQSLNSPSPGETEMDLLVTRERPRRGIRNSGYDTEPEIIEETNIDRVPEPRGYSRSRQVKGHSETSTLSSQPSIDEVRQQMHMLLEEAFSLASAGHAGQSRHQEAYGSAQHLPYSEVVTSAPGTMTRPRAGVQWVPTYRPEMYQYSLPRPAYRFSQLPEMVMGSPPPPVPPRTGPVAVASLRRSTSDIGSKTRMAESTGPEPAQLHDSASFTQMSRGPVSVTQLDQSALNYSGNTVPAVFAIPAANRPGFTGYFIPTPPSSYRNQAWMSYAGENELPSQWADSVPLPGYIEAYPRSRYPQSSPSRLPRQYSQPANLHPSLEQAPAPSTAASQQSLAENDPSDAPLTNISTAALVKAIREEVAKLAKKQTDMFEFQV

SEQ ID NO: 820438 - protein, 1124 aa, Homo sapiens
GRSPGGRLRAGPPRPPAGPPPLPPCPQPGSGGGGGSGSRRRSIMPRRKQQAPRRAAAYVSEELKAAALVDEGLDPEEHTADGEPSAKYMCPEKELARACPSYQNSPAAEFSCHEMDSESHISETSDRMADFESGSIKNEEETKEVTVPLEDTTVSDSLEQMKAVYNNFLSNSYWSNLNLNLHQPSSEKNNGSSSSSSSSSSSCGSGSFDWHQSAMAKTLQQVSQSRMLPEPSLFSTVQLYRQSSKLYGSIFTGASKFRCKDCSAAYDTLVELTVHMNETGHYRDDNHETDNNNPKRWSKPRKRSLLEMEGKEDAQKVLKCMYCGHSFESLQDLSVHMIKTKHYQKVPLKEPVTPVAAKIIPATRKKASLELELPSSPDSTGGTPKATISDTNDALQKNSNPYITPNNRYGHQNGASYAWHFEARKSQILKCMECGSSHDTLQELTAHMMVTGHFIKVTNSAMKKGKPIVETPVTPTITTLLDEKVQSVPLAATTFTSPSNTPASISPKLNVEVKKEVDKEKAVTDEKPKQKDKPGEEEEKCDISSKYHYLTENDLEESPKGGLDILKSLENTVTSAINKAQNGTPSWGGYPSIHAAYQLPNMMKLSLGSSGKSTPLKPMFGNSEIVSPTKNQTLVSPPSSQTSPMPKTNFHAMEELVKKVTEKVAKVEEKMKEPDGKLSPPKRATPSPCSSEVGEPIKMEASSDGGFRSQENSPSPPRDGCKDGSPLAEPVENGKELVKPLASSLSGSTAIITDHPPEQPFVNPLSALQSVMNIHLGKAAKPSLPALDPMSMLFKMSNSLAEKAAVATPPPLQSKKADHLDRYFYHVNNDQPIDLTKGKSDKGCSLGSVLLSPTSTAPATSSSTVTTAKTSAVVSFMSNSPLRENALSDISDMLKNLTESHTSKSSTPSSISEKSDIDGATLEEAEESTPAQKRKGRQSNWNPQHLLILQAQFAASLRQTSEGKYIMSDLSPQERMHISRFTGLSMTTISHWLANVKYQLRRTGGTKFLKNLDTGHPVFFCNDCASQIRTPSTYISHLESHLGFRLRDLSKLSTEQINSQIAQTKSPSEKMVTSSPEEDLGTSYQCKLCNRTFASKHAVKLHLSKTHGKSPEDHLLYVSELEKQ

SEQ ID NO: 820439 - protein, 127 aa, Homo sapiens
RPLSGGEAESRPASPPRGPAAPPSLSSARQRRRRRQWQSPEKHHAEEEAAGAPARSRQEHQLGGGSQHVVGGERAALVSSHYPCVPVEPKTPGKEANPRAPKPPFPKRIESQSPRNGALSGGPRWRR

SEQ ID NO: 820440 - protein, 1124 aa, Homo sapiens; identical to SEQ ID NO: 820438

SEQ ID NO: 820441 - protein, 474 aa, Homo sapiens
SRGDWLRHAPPLAPPGGRLRGGDGGVVPPYKNGGGGGGTAHSVPLPRGCRGRAAPAGACPRQGPASVASSSIAQFPQPEHPLKMAEESSCTRDCMSFSVLNWDQVSRLHEVLTEVVPIHGRGNFPTLEITLKDIVQTVRSRLEEAGIKVHDVRLNGSAAGHVLVKDNGLGCKDLDLIFHVALPTEAEFQLVRDVVLCSLLNFLPEGVNKLKISPVTLKEAYVQKLVKVCTDTDRWSLISLSNKNGKNVELKFVDSIRRQFEFSVDSFQIILDSLLFFYDCSNNPISEHFHPTVIGESMYGDFEEAFDHLQNRLIATKNPEEIRGGGLLKYSNLLVRDFRPTDQEEIKTLERYMCSRFFIDFPDILEQQRKLETYLQNHFAEEERSKYDYLMILRRVVNESTVCLMGHERRQTLNLISLLALRVLAEQNIIPSATNVTCYYQPAPYVSDGNFSNYYVAHPPVTYSQPYPTWLPCN

SEQ ID NO: 820442 - protein, 474 aa, Homo sapiens; identical to SEQ ID NO: 820441

SEQ ID NO: 820443 - protein, 263 aa, Homo sapiens [sequence omitted]

SEQ ID NO: 820444 - protein, 263 aa, Homo sapiens [sequence omitted]

SEQ ID NO: 820445 - protein, 263 aa, Homo sapiens [sequence omitted]

SEQ ID NO: 820446 - protein, 263 aa, Homo sapiens [sequence omitted]

SEQ ID NO: 820447 - protein, 507 aa, Homo sapiens
MRIPVDPSTSRRFSPPSSSLQPGKMSDVSPVVAAQQQQQQQQQQQQQQQQQQQQQQQEAAAAAAAAAAAAAAAAAVPRLRPPHDNRTMVEIIADHPAELVRTDSPNFLCSVLPSHWRCNKTLPVAFKVVALGEVPDGTVVTVMAGNDENYSAELRNASAVMKNQVARFNDLRFVGRSGRGKSFTLTITVFTNPPQVATYHRAIKVTVDGPREPRRHRQKLDDSKPSLFSDRLSDLGRIPHPSMRVGVPPQNPRPSLNSAPSPFNPQGQSQITDPRQAQSSPPWSYDQSYPSYLSQMTSPSIHSTTPLSSTRGTGLPAITDVPRRISDDDTATSDFCLWPSTLSKKSQAGASELGPFSDPRQFPSISSLTESRFSNPRMHYPATFTYTPPVTSGMSLGMSATTHYHTYLPPPYPGSSQSQSGPFQTSSTPYLYYGTSSGSYQFPMVPGGDRSPSRMLPPCTTTSNGSTLLNPNLPNQNDGVDADGSHSSSPTVLNSSGRMDESVWRPY

SEQ ID NO: 820448 - protein, 485 aa, Homo sapiens
MRIPVDPSTSRRFSPPSSSLQPGKMSDVSPVVAAQQQQQQQQQQQQQQQQQQQQQQQEAAAAAAAAAAAAAAAAAVPRLRPPHDNRTMVEIIADHPAELVRTDSPNFLCSVLPSHWRCNKTLPVAFKVVALGEVPDGTVVTVMAGNDENYSAELRNASAVMKNQVARFNDLRFVGRSGRGKSFTLTITVFTNPPQVATYHRAIKVTVDGPREPRRHRQKLDDSKPSLFSDRLSDLGRIPHPSMRVGVPPQNPRPSLNSAPSPFNPQGQSQITDPRQAQSSPPWSYDQSYPSYLSQMTSPSIHSTTPLSSTRGTGLPAITDVPRRISGASELGPFSDPRQFPSISSLTESRFSNPRMHYPATFTYTPPVTSGMSLGMSATTHYHTYLPPPYPGSSQSQSGPFQTSSTPYLYYGTSSGSYQFPMVPGGDRSPSRMLPPCTTTSNGSTLLNPNLPNQNDGVDADGSHSSSPTVLNSSGRMDESVWRPY

SEQ ID NO: 820449 - protein, 1524 aa, Homo sapiens
MPLLHRKPFVRQKPPADLRPDEEVFYCKVTNEIFRHYDDFFERTILCNSLVWSCAVTGRPGLTYQEALESEKKARQNLQSFPEPLIIPVLYLTSLTHRSRLHEICDDIFAYVKDRYFVEETVEVIRNNGARLQCRILEVLPPSHQNGFANGHVNSVDGETIIISDSDDSETQSCSFQNGKKKDAIDPLLFKYKVQPTKKELHESAIVKATQISRRKHLFSRDKLKLFLKQHCEPQDGVIKIKASSLSTYKIAEQDFSYFFPDDPPTFIFSPANRRRGRPPKRIHISQEDNVANKQTLASYRSKATKERDKLLKQEEMKSLAFEKAKLKREKADALEAKKKEKEDKEKKREELKKIVEEERLKKKEEKERLKVEREKEREKLREEKRKYVEYLKQWSKPREDMECDDLKELPEPTPVKTRLPPEIFGDALMVLEFLNAFGELFDLQDEFPDGVTLEVLEEALVGNDSEGPLCELLFFFLTAIFQAIAEEEEEVAKEQLTDADTKGCSLKSLDLDSCTLSEILRLHILASGADVTSANAKYRYQKRGGFDATDDACMELRLSNPSLVKKLSSTSVYDLTPGEKMKILHALCGKLLTLVSTRDFIEDYVDILRQAKQEFRELKAEQHRKEREEAAARIRKRKEEKLKEQEQKMKEKQEKLKEDEQRNSTADISIGEEEREDFDTSIESKDTEQKELDQDMVTEDEDDPGSHKRGRRGKRGQNGFKEFTRQEQINCVTREPLTADEEEALKQEHQRKEKELLEKIQSAIACTNIFPLGRDRMYRRYWIFPSIPGLFIEEDYSGLTEDMLLPRPSSFQNNVQSQDPQVSTKTGEPLMSESTSNIDQGPRDHSVQLPKPVHKPNRWCFYSSCEQLDQLIEALNSRGHRESALKETLLQEKSRICAQLARFSEEKFHFSDKPQPDSKPTYSRGRSSNAYDPSQMCAEKQLELRLRDFLLDIEDRIYQGTLGAIKVTDRHIWRSALESGRYELLSEENKENGIIKTVNEDVEEMEIDEQTKVIVKDRLLGIKTETPSTVSTNASTPQSVSSVVHYLAMALFQIEQGIERRFLKAPLDASDSGRSYKTVLDRWRESLLSSASLSQVFLHLSTLDRSVIWSKSILNARCKICRKKGDAENMVLCDGCDRGHHTYCVRPKLKTVPEGDWFCPECRPKQRSRRLSSRQRPSLESDEDVEDSMGGEDDEVDGDEEEGQSEEEEYEVEQDEDDSQEEEEVSLPKRGRPQVRLPVKTRGKLSSSFSSRGQQQEPGRYPSRSQQSTPKTTVSSKTGRSLRKINSAPPTETKSLRIASRSTRHSHGPLQADVFVELLSPRRKRRGRKSANNTPENSPNFPNFRVIATKSSEQSRSVNIASKLSLQESESKRRCRKRQSPEPSPVTLGRRSSGRQGGVHELSAFEQLVVELVRHDDSWPFLKLVSKIQVPDYYDIIKKPIALNIIREKVNKCEYKLASEFIDDIELMFSNCFEYNPRNTSEAKAGTRLQAFFHIQAQKLGLHVTPSNVDQVSTPPAAKKSRI

SEQ ID NO: 820450 - protein, 1556 aa, Homo sapiens
MPLLHRKPFVRQKPPADLRPDEEVFYCKVTNEIFRHYDDFFERTILCNSLVWSCAVTGRPGLTYQEALESEKKARQNLQSFPEPLIIPVLYLTSLTHRSRLHEICDDIFAYVKDRYFVEETVEVIRNNGARLQCRILEVLPPSHQNGFANGHVNSVDGETIIISDSDDSETQSCSFQNGKKKDAIDPLLFKYKVQPTKKELHESAIVKATQISRRKHLFSRDKLKLFLKQHCEPQDGVIKIKASSLSTYKIAEQDFSYFFPDDPPTFIFSPANRRRGRPPKRIHISQEDNVANKQTLASYRSKATKERDKLLKQEEMKSLAFEKAKLKREKADALEAKKKEKEDKEKKREELKKIVEEERLKKKEEKERLKVEREKEREKLREEKRKYVEYLKQWSKPREDMECDDLKELPEPTPVKTRLPPEIFGDALMVLEFLNAFGELFDLQDEFPDGVTLEVLEEALVGNDSEGPLCELLFFFLTAIFQAIAEEEEEVAKEQLTDADTKDLTEALDEDADPTKSALSAVASLAAAWPQLHQGCSLKSLDLDSCTLSEILRLHILASGADVTSANAKYRYQKRGGFDATDDACMELRLSNPSLVKKLSSTSVYDLTPGEKMKILHALCGKLLTLVSTRDFIEDYVDILRQAKQEFRELKAEQHRKEREEAAARIRKRKEEKLKEQEQKMKEKQEKLKEDEQRNSTADISIGEEEREDFDTSIESKDTEQKELDQDMVTEDEDDPGSHKRGRRGKRGQNGFKEFTRQEQINCVTREPLTADEEEALKQEHQRKEKELLEKIQSAIACTNIFPLGRDRMYRRYWIFPSIPGLFIEEDYSGLTEDMLLPRPSSFQNNVQSQDPQVSTKTGEPLMSESTSNIDQGPRDHSVQLPKPVHKPNRWCFYSSCEQLDQLIEALNSRGHRESALKETLLQEKSRICAQLARFSEEKFHFSDKPQPDSKPTYSRGRSSNAYDPSQMCAEKQLELRLRDFLLDIEDRIYQGTLGAIKVTDRHIWRSALESGRYELLSEENKENGIIKTVNEDVEEMEIDEQTKVIVKDRLLGIKTETPSTVSTNASTPQSVSSVVHYLAMALFQIEQGIERRFLKAPLDASDSGRSYKTVLDRWRESLLSSASLSQVFLHLSTLDRSVIWSKSILNARCKICRKKGDAENMVLCDGCDRGHHTYCVRPKLKTVPEGDWFCPECRPKQRSRRLSSRQRPSLESDEDVEDSMGGEDDEVDGDEEEGQSEEEEYEVEQDEDDSQEEEEVSLPKRGRPQVRLPVKTRGKLSSSFSSRGQQQEPGRYPSRSQQSTPKTTVSSKTGRSLRKINSAPPTETKSLRIASRSTRHSHGPLQADVFVELLSPRRKRRGRKSANNTPENSPNFPNFRVIATKSSEQSRSVNIASKLSLQESESKRRCRKRQSPEPSPVTLGRRSSGRQGGVHELSAFEQLVVELVRHDDSWPFLKLVSKIQVPDYYDIIKKPIALNIIREKVNKCEYKLASEFIDDIELMFSNCFEYNPRNTSEAKAGTRLQAFFHIQAQKLGLHVTPSNVDQVSTPPAAKKSRI

SEQ ID NO: 820451 - protein, 1556 aa, Homo sapiens; identical to SEQ ID NO: 820450

SEQ ID NO: 820452 - protein, 1240 aa, Homo sapiens [sequence omitted]

SEQ ID NO: 820453 - protein, 1530 aa, Homo sapiens
MGFCFCFCFLISDFFERTILCNSLVWSCAVTGRPGLTYQEALESEKKARQNLQSFPEPLIIPVLYLTSLTHRSRLHEICDDIFAYVKDRYFVEETVEVIRNNGARLQCRILEVLPPSHQNGFANGHVNSVDGETIIISDSDDSETQSCSFQNGKKKDAIDPLLFKYKVQPTKKELHESAIVKATQISRRKHLFSRDKLKLFLKQHCEPQDGVIKIKASSLSTYKIAEQDFSYFFPDDPPTFIFSPANRRRGRPPKRIHISQEDNVANKQTLASYRSKATKERDKLLKQEEMKSLAFEKAKLKREKADALEAKKKEKEDKEKKREELKKIVEEERLKKKEEKERLKVEREKEREKLREEKRKYVEYLKQWSKPREDMECDDLKELPEPTPVKTRLPPEIFGDALMVLEFLNAFGELFDLQDEFPDGVTLEVLEEALVGNDSEGPLCELLFFFLTAIFQAIAEEEEEVAKEQLTDADTKDLTEALDEDADPTKSALSAVASLAAAWPQLHQGCSLKSLDLDSCTLSEILRLHILASGADVTSANAKYRYQKRGGFDATDDACMELRLSNPSLVKKLSSTSVYDLTPGEKMKILHALCGKLLTLVSTRDFIEDYVDILRQAKQEFRELKAEQHRKEREEAAARIRKRKEEKLKEQEQKMKEKQEKLKEDEQRNSTADISIGEEEREDFDTSIESKDTEQKELDQDMVTEDEDDPGSHKRGRRGKRGQNGFKEFTRQEQINCVTREPLTADEEEALKQEHQRKEKELLEKIQSAIACTNIFPLGRDRMYRRYWIFPSIPGLFIEEDYSGLTEDMLLPRPSSFQNNVQSQDPQVSTKTGEPLMSESTSNIDQGPRDHSVQLPKPVHKPNRWCFYSSCEQLDQLIEALNSRGHRESALKETLLQEKSRICAQLARFSEEKFHFSDKPQPDSKPTYSRGRSSNAYDPSQMCAEKQLELRLRDFLLDIEDRIYQGTLGAIKVTDRHIWRSALESGRYELLSEENKENGIIKTVNEDVEEMEIDEQTKVIVKDRLLGIKTETPSTVSTNASTPQSVSSVVHYLAMALFQIEQGIERRFLKAPLDASDSGRSYKTVLDRWRESLLSSASLSQVFLHLSTLDRSVIWSKSILNARCKICRKKGDAENMVLCDGCDRGHHTYCVRPKLKTVPEGDWFCPECRPKQRSRRLSSRQRPSLESDEDVEDSMGGEDDEVDGDEEEGQSEEEEYEVEQDEDDSQEEEEVSLPKRGRPQVRLPVKTRGKLSSSFSSRGQQQEPGRYPSRSQQSTPKTTVSSKTGRSLRKINSAPPTETKSLRIASRSTRHSHGPLQADVFVELLSPRRKRRGRKSANNTPENSPNFPNFRVIATKSSEQSRSVNIASKLSLQESESKRRCRKRQSPEPSPVTLGRRSSGRQGGVHELSAFEQLVVELVRHDDSWPFLKLVSKIQVPDYYDIIKKPIALNIIREKVNKCEYKLASEFIDDIELMFSNCFEYNPRNTSEAKAGTRLQAFFHIQAQKLGLHVTPSNVDQVSTPPAAKKSRI

SEQ ID NO: 820454 - protein, 1322 aa, Homo sapiens
VTREPLTADEEEALKQEHQRKEKELLEKIQSAIACTNIFPLGRDLPYRVHISQEDNVANKQTLASYRSKATKERDKLLKQEEMKSLAFEKAKLKREKADALEAKKKEKEDKEKKREELKKIVEEERLKKKEEKERLKVEREKEREKLREEKRKYVEYLKQWSKPREDMECDDLKELPEPTPVKTRLPPEIFGDALMVLEFLNAFGELFDLQDEFPDGVTLEVLEEALVGNDSEGPLCELLFFFLTAIFQAIAEEEEEVAKEQLTDADTKDLTEALDEDADPTKSALSAVASLAAAWPQLHQGCSLKSLDLDSCTLSEILRLHILASGADVTSANAKYRYQKRGGFDATDDACMELRLSNPSLVKKLSSTSVYDLTPGEKMKILHALCGKLLTLVSTRDFIEDYVDILRQAKQEFRELKAEQHRKEREEAAARIRKRKEEKLKEQEQKMKEKQEKLKEDEQRNSTADISIGEEEREDFDTSIESKDTEQKELDQDMVTEDEDDPGSHKRGRRGKRGQNGFKEFTRQEQINCVTREPLTADEEEALKQEHQRKEKELLEKIQSAIACTNIFPLGRDRMYRRYWIFPSIPGLFIEEDYSGLTEDMLLPRPSSFQNNVQSQDPQVSTKTGEPLMSESTSNIDQGPRDHSVQLPKPVHKPNRWCFYSSCEQLDQLIEALNSRGHRESALKETLLQEKSRICAQLARFSEEKFHFSDKPQPDSKPTYSRGRSSNAYDPSQMCAEKQLELRLRDFLLDIEDRIYQGTLGAIKVTDRHIWRSALESGRYELLSEENKENGIIKTVNEDVEEMEIDEQTKVIVKDRLLGIKTETPSTVSTNASTPQSVSSVVHYLAMALFQIEQGIERRFLKAPLDASDSGRSYKTVLDRWRESLLSSASLSQVFLHLSTLDRSVIWSKSILNARCKICRKKGDAENMVLCDGCDRGHHTYCVRPKLKTVPEGDWFCPECRPKQRSRRLSSRQRPSLESDEDVEDSMGGEDDEVDGDEEEGQSEEEEYEVEQDEDDSQEEEEVSLPKRGRPQVRLPVKTRGKLSSSFSSRGQQQEPGRYPSRSQQSTPKTTVSSKTGRSLRKINSAPPTETKSLRIASRSTRHSHGPLQADVFVELLSPRRKRRGRKSANNTPENSPNFPNFRVIATKSSEQSRSVNIASKLSLQESESKRRCRKRQSPEPSPVTLGRRSSGRQGGVHELSAFEQLVVELVRHDDSWPFLKLVSKIQVPDYYDIIKKPIALNIIREKVNKCEYKLASEFIDDIELMFSNCFEYNPRNTSEAKAGTRLQAFFHIQAQKLGLHVTPSNVDQVSTPPAAKKSRI

SEQ ID NO: 820455 - protein, 1155 aa, Homo sapiens [sequence omitted]

SEQ ID NO: 820456 - protein, 1030 aa, Homo sapiens [sequence omitted]

SEQ ID NO: 820457 - protein, 1485 aa, Homo sapiens
MPLLHRKPFVRQKPPADLRPDEEVFYCKVTNEIFRHYDDFFERTILCNSLVWSCAVTGRPGLTYQEALESEKKARQNLQSFPEPLIIPVLYLTSLTHRSRLHEICDDIFAYVKDRYFVEETVEVIRNNGARLQCRILEVLPPSHQNGFANGHVNSVDGETIIISDSDDSETQSCSFQNGKKKDAIDPLLFKYKVQPTKKELHESAIVKATQISRRKHLFSRDKLKLFLKQHCEPQDGVIKIKASSLSTYKIAEQDFSYFFPDDPPTFIFSPANRRRGRPPKRIHISQEDNVANKQTLASYRSKATKERDKLLKQEEMKSLAFEKAKLKREKADALEAKKKEKEDKEKKREELKKIVEEERLKKKEEKERLKVEREKEREKLREEKRKYVEYLKQWSKPREDMECDDLKELPEPTPVKTRLPPEIFGDALMVLEFLNAFGELFDLQDEFPDGVTLEVLEEALVGNDSEGPLCELLFFFLTAIFQAIAEEEEEVAKEQLTDADTKDLTEALDEDADPTKSALSAVASLAAAWPQLHQGCSLKSLDLDSCTLSEILRLHILASGADVTSANAKYRYQKRGGFDATDDACMELRLSNPSLVKKLSSTSVYDLTPGEKMKILHALCGKLLTLVSTRDFIEDYVDILRQAKQEFRELKAEQHRKEREEAAARIRKRKEEKLKEQEQKMKEKQEKLKEDEQRNSTADISIGEEEREDFDTSIESKDTEQKELDQDMVTEDEDDPGSHKRGRRGKRGQNGFKEFTRQEQINCVTREPLTADEEEALKQEHQRKEKELLEKIQSAIACTNIFPLGRDRMYRRYWIFPSIPGLFIEEDYSGLTEDMLLPRPSSFQNNVQSQDPQVSTKTGEPLMSESTSNIDQGPRDHSVQLPKPVHKPNRWCFYSSCEQLDQLIEALNSRGHRESALKETLLQEKSRICAQLARFSEEKFHFSDKPQPDSKPTYSRGRSSNAYDPSQMCAEKQLELRLRDFLLDIEDRIYQGTLGAIKVTDRHIWRSALESGRYELLSEENKENGIIKTVNEDVEEMEIDEQTKVIVKDRLLGIKTETPSTVSTNASTPQSVSSVVHYLAMALFQIEQGIERRFLKAPLDASDSGRSYKTVLDRWRESLLSSASLSQVFLHLSTLDRSVIWSKSILNARCKICRKKGDAENMVLCDGCDRGHHTYCVRPKLKTVPEGDWFCPECRPKQRSRRLSSRQRPSLESDEDVEDSMGGEDDEVDGDEEEGQSEEEEYEVEQDEDDSQEEEEVSLPKRGRPQVRLPVKTRGKLSSSFSSRGQQQEPGRYPSRSQQSTPKTTVSSKTGRSLRKINSAPPTETKSLRIASRSTRHSHGPLQADVFVELLSPRRKRRGRKSANNTPENSPNFPNFRVIATKSSEQSRSVNIASKLSLQESESKRRCRKRQSPEPSPVTLGRRSSGRQGGVHELSAFEQLVVELVRHDDSWPFLKLVSKIQVITRLDKMYSCILSDLVHVITLK

SEQ ID NO: 820458 - protein, 1399 aa, Homo sapiens
MPLLHRKPFVRQKPPADLRPDEEVFYCKVTNEIFRHYDDFFERTILCNSLVWSCAVTGRPGLTYQEALESEKKARQNLQSFPEPLIIPVLYLTSLTHRSRLHEICDDIFAYVKDRYFVEETVEVIRNNGARLQCRILEVLPPSHQNGFANGHVNSVDGETIIISDSDDSETQSCSFQNGKKKDAIDPLLFKYKVQPTKKELHESAIVKATQISRRKHLFSRDKLKLFLKQHCEPQDGVIKIKASSLSTYKIAEQDFSYFFPDDPPTFIFSPANRRRGRPPKRIHISQEDNVANKQTLASYRSKATKERDKLLKQEEMKSLAFEKAKLKREKADALEAKKKEKEDKEKKREELKKIVEEERLKKKEEKERLKVEREKEREKLREEKRKYVEYLKQWSKPREDMECDDLKELPEPTPVKTRLPPEIFGDALMVLEFLNAFGELFDLQDEFPDGVTLEVLEEALVGNDSEGPLCELLFFFLTAIFQAIAEEEEEVAKEQLTDADTKDLTEALDEDADPTKSALSAVASLAAAWPQLHQGCSLKSLDLDSCTLSEILRLHILASGADVTSANAKYRYQKRGGFDATDDACMELRLSNPSLVKKLSSTSVYDLTPGEKMKILHALCGKLLTLVSTRDFIEDYVDILRQAKQEFRELKAEQHRKEREEAAARIRKRKEEKLKEQEQKMKEKQEKLKEDEQRNSTADISIGEEEREDFDTSIESKDTEQKELDQDMVTEDEDDPGSHKRGRRGKRGQNGFKEFTRQEQINCVTREPLTADEEEALKQEHQRKEKELLEKIQSAIACTNIFPLGRDRMYRRYWIFPSIPGLFIEEDYSGLTEDMLLPRPSSFQNNVQSQDPQVSTKTGEPLMSESTSNIDQGPRDHSVQLPKPVHKPNRWCFYSSCEQLDQLIEALNSRGHRESALKETLLQEKSRICAQLARFSEEKFHFSDKPQPDSKPTYSRGRSSNAYDPSQMCAEKQLELRLRDFLLDIEDRIYQGTLGAIKVTDRHIWRSALESGRYELLSEENKENGIIKTVNEDVEEMEIDEQTKVIVKDRLLGIKTETPSTVSTNASTPQSVSSVVHYLAMALFQIEQGIERRFLKAPLDASDSGRSYKTVLDRWRESLLSSASLSQVFLHLSTLDRSVIWSKSILNARCKICRKKGDAENMVLCDGCDRGHHTYCVRPKLKTVPEGDWFCPECRPKQRSRRLSSRQRPSLESDEDVEDSMGGEDDEVDGDEEEGQSEEEEYEVEQDEDDSQEEEEVSLPKRGRPQVRLPVKTRGKLSSSFSSRGQQQEPGRYPSRSQQSTPKTTVSSKTGRSLRKINSAPPTETKSLRIASRSTRHSHGPLQADVFVELLSPRRKRRGRKSANNTPENSPNFPNFNAIPIKLPIDFLHRTGKTTKVI

SEQ ID NO: 820459 - protein, 604 aa, Homo sapiens
SASISQIHHIPLPPYGEVAFEIGLKDSRFGVGQLGNGNTDPDGTKTLVTDRHIWRSALESGRYELLSEENKENGIIKTVNEDVEEMEIDEQTKVIVKDRLLGIKTETPSTVSTNASTPQSVSSVVHYLAMALFQIEQGIERRFLKAPLDASDSGRSYKTVLDRWRESLLSSASLSQVFLHLSTLDRSVIWSKSILNARCKICRKKGDAENMVLCDGCDRGHHTYCVRPKLKTVPEGDWFCPECRPKQRSRRLSSRQRPSLESDEDVEDSMGGEDDEVDGDEEEGQSEEEEYEVEQDEDDSQEEEEVSLPKRGRPQVRLPVKTRGKLSSSFSSRGQQQEPGRYPSRSQQSTPKTTVSSKTGRSLRKINSAPPTETKSLRIASRSTRHSHGPLQADVFVELLSPRRKRRGRKSANNTPENSPNFPNFRVIATKSSEQSRSVNIASKLSLQESESKRRCRKRQSPEPSPVTLGRRSSGRQGGVHELSAFEQLVVELVRHDDSWPFLKLVSKIQVPDYYDIIKKPIALNIIREKVNKCEYKLASEFIDDIELMFSNCFEYNPRNTSEAKAGTRLQAFFHIQAQKLGLHVTPSNVDQVSTPPAAKKSRI

SEQ ID NO: 820460 - protein, 1273 aa, Homo sapiens
MPLLHRKPFVRQKPPADLRPDEEVFYCKVTNEIFRHYDDFFERTILCNSLVWSCAVTGRPGLTYQEALESEKKARQNLQSFPEPLIIPVLYLTSLTHRSRLHEICDDIFAYVKDRYFVEETVEVIRNNGARLQCRILEVLPPSHQNGFANGHVNSVDGETIIISDSDDSETQSCSFQNGKKKDAIDPLLFKYKVQPTKKELHESAIVKATQISRRKHLFSRDKLKLFLKQHCEPQDGVIKIKASSLSTYKIAEQDFSYFFPDDPPTFIFSPANRRRGRPPKRIHISQEDNVANKQTLASYRSKATKERDKLLKQEEMKSLAFEKAKLKREKADALEAKKKEKEDKEKKREELKKIVEEERLKKKEEKERLKVEREKEREKLREEKRKYVEYLKQWSKPREDMECDDLKELPEPTPVKTRLPPEIFGDALMVLEFLNAFGELFDLQDEFPDGVTLEVLEEALVGNDSEGPLCELLFFFLTAIFQAIAEEEEEVAKEQLTDADTKDLTEALDEDADPTKSALSAVASLAAAWPQLHQGCSLKSLDLDSCTLSEILRLHILASGADVTSANAKYRYQKRGGFDATDDACMELRLSNPSLVKKLSSTSVYDLTPGEKMKILHALCGKLLTLVSTRDFIEDYVDILRQAKQEFRELKAEQHRKEREEAAARIRKRKEEKLKEQEQKMKEKQEKLKEDEQRNSTADISIGEEEREDFDTSIESKDTEQKELDQDMVTEDEDDPGSHKRGRRGKRGQNGFKEFTRQEQINCVTREPLTADEEEALKQEHQRKEKELLEKIQSAIACTNIFPLGRDRMYRRYWIFPSIPGLFIEEDYSGLTEDMLLPRPSSFQNNVQSQDPQVSTKTGEPLMSESTSNIDQGPRDHSVQLPKPVHKPNRWCFYSSCEQLDQLIEALNSRGHRESALKETLLQEKSRICAQLARFSEEKFHFSDKPQPDSKPTYSRGRSSNAYDPSQMCAEKQLELRLRDFLLDIEDRIYQGTLGAIKVTDRHIWRSALESGRYELLSEENKENGIIKTVNEDVEEMEIDEQTKVIVKDRLLGIKTETPSTVSTNASTPQSVSSVVHYLAMALFQIEQGIERRFLKAPLDASDSGRSYKTVLDRWRESLLSSASLSQVFLHLSTLDRSVIWSKSILNARCKICRKKGDAENMVLCDGCDRGHHTYCVRPKLKTVPEGDWFLDVSQVENTRHYLQHQRLLFCRDPNHIHGVQSFLKLPPVVNVINLVGAREAQVVIIVHAGDAKAVFLLCRGALDKLVKYVKI

SEQ ID NO: 820461 - protein, 1122 aa, Homo sapiens
MPLLHRKPFVRQKPPADLRPDEEVFYCKVTNEIFRHYDDFFERTILCNSLVWSCAVTGRPGLTYQEALESEKKARQNLQSFPEPLIIPVLYLTSLTHRSRLHEICDDIFAYVKDRYFVEETVEVIRNNGARLQCRILEVLPPSHQNGFANGHVNSVDGETIIISDSDDSETQSCSFQNGKKKDAIDPLLFKYKVQPTKKELHESAIVKATQISRRKHLFSRDKLKLFLKQHCEPQDGVIKIKASSLSTYKIAEQDFSYFFPDDPPTFIFSPANRRRGRPPKRIHISQEDNVANKQTLASYRSKATKERDKLLKQEEMKSLAFEKAKLKREKADALEAKKKEKEDKEKKREELKKIVEEERLKKKEEKERLKVEREKEREKLREEKRKYVEYLKQWSKPREDMECDDLKELPEPTPVKTRLPPEIFGDALMVLEFLNAFGELFDLQDEFPDGVTLEVLEEALVGNDSEGPLCELLFFFLTAIFQAIAEEEEEVAKEQLTDADTKDLTEALDEDADPTKSALSAVASLAAAWPQLHQGCSLKSLDLDSCTLSEILRLHILASGADVTSANAKYRYQKRGGFDATDDACMELRLSNPSLVKKLSSTSVYDLTPGEKMKILHALCGKLLTLVSTRDFIEDYVDILRQAKQEFRELKAEQHRKEREEAAARIRKRKEEKLKEQEQKMKEKQEKLKEDEQRNSTADISIGEEEREDFDTSIESKDTEQKELDQDMVTEDEDDPGSHKRGRRGKRGQNGFKEFTRQEQINCVTREPLTADEEEALKQEHQRKEKELLEKIQSAIACTNIFPLGRDRMYRRYWIFPSIPGLFIEEDYSGLTEDMLLPRPSSFQNNVQSQDPQVSTKTGEPLMSESTSNIDQGPRDHSVQLPKPVHKPNRWCFYSSCEQLDQLIEALNSRGHRESALKETLLQEKSRICAQLARFSEEKFHFSDKPQPDSKPTYSRGRSSNAYDPSQMCAEKQLELRLRDFLLDIEDRIYQGTLGAIKVTDRHIWRSALESGRYELLSEENKENGIIKTVNEDVEEMEIDEQTKVIVKDRLLGIKTETPSTVSTNASTPQSVSSVVHYLAMALFQIEQGIERRFLKAPLGKYLFLFQNISCVISNFELAFN

SEQ ID NO: 820462 - protein, 811 aa, Homo sapiens
MPLLHRKPFVRQKPPADLRPDEEVFYCKVTNEIFRHYDDFFERTILCNSLVWSCAVTGRPGLTYQEALESEKKARQNLQSFPEPLIIPVLYLTSLTHRSRLHEICDDIFAYVKDRYFVEETVEVIRNNGARLQCRILEVLPPSHQNGFANGHVNSVDGETIIISDSDDSETQSCSFQNGKKKDAIDPLLFKYKVQPTKKELHESAIVKATQISRRKHLFSRDKLKLFLKQHCEPQDGVIKIKASSLSTYKIAEQDFSYFFPDDPPTFIFSPANRRRGRPPKRIHISQEDNVANKQTLASYRSKATKERDKLLKQEEMKSLAFEKAKLKREKADALEAKKKEKEDKEKKREELKKIVEEERLKKKEEKERLKVEREKEREKLREEKRKYVEYLKQWSKPREDMECDDLKELPEPTPVKTRLPPEIFGDALMVLEFLNAFGELFDLQDEFPDGVTLEVLEEALVGNDSEGPLCELLFFFLTAIFQAIAEEEEEVAKEQLTDADTKDLTEALDEDADPTKSALSAVASLAAAWPQLHQGCSLKSLDLDSCTLSEILRLHILASGADVTSANAKYRYQKRGGFDATDDACMELRLSNPSLVKKLSSTSVYDLTPGEKMKILHALCGKLLTLVSTRDFIEDYVDILRQAKQEFRELKAEQHRKEREEAAARIRKRKEEKLKEQEQKMKEKQEKLKEDEQRNSTADISIGEEEREDFDTSIESKDTEQKELDQDMVTEDEDDPGSHKRGRREGEGRLVEGRTRGSVSLSQPSCNAWCFLNNKSPFHLSMAESPVREPVGRRRARDWNLHFGTELVEG

SEQ ID NO: 820463 - protein, 680 aa, Homo sapiens
MPLLHRKPFVRQKPPADLRPDEEVFYCKVTNEIFRHYDDFFERTILCNSLVWSCAVTGRPGLTYQEALESEKKARQNLQSFPEPLIIPVLYLTSLTHRSRLHEICDDIFAYVKDRYFVEETVEVIRNNGARLQCRILEVLPPSHQNGFANGHVNSVDGETIIISDSDDSETQSCSFQNGKKKDAIDPLLFKYKVQPTKKELHESAIVKATQISRRKHLFSRDKLKLFLKQHCEPQDGVIKIKASSLSTYKIAEQDFSYFFPDDPPTFIFSPANRRRGRPPKRIHISQEDNVANKQTLASYRSKATKERDKLLKQEEMKSLAFEKAKLKREKADALEAKKKEKEDKEKKREELKKIVEEERLKKKEEKERLKVEREKEREKLREEKRKYVEYLKQWSKPREDMECDDLKELPEPTPVKTRLPPEIFGDALMVLEFLNAFGELFDLQDEFPDGVTLEVLEEALVGNDSEGPLCELLFFFLTAIFQAIAEEEEEVAKEQLTDADTKDLTEALDEDADPTKSALSAVASLAAAWPQLHQGCSLKSLDLDSCTLSEILRLHILASGADVTSANAKYRYQKRGGFDATDDACMELRLSNPSLVKKLSSTSVYDLTPGEKMKILHALCGKLLTLVSTRDFIEDYVDILRQAKQEFRELKAEQHRKEREEAAARIRKRKEEKLKEQSY

SEQ ID NO: 820464 - protein, 358 aa, Homo sapiens
MPLLHRKPFVRQKPPADLRPDEEVFYCKVTNEIFRHYDDFFERTILCNSLVWSCAVTGRPGLTYQEALESEKKARQNLQSFPEPLIIPVLYLTSLTHRSRLHEICDDIFAYVKDRYFVEETVEVIRNNGARLQCRILEVLPPSHQNGFANGHVNSVDGETIIISDSDDSETQSCSFQNGKKKDAIDPLLFKYKVQPTKKELHESAIVKATQISRRKHLFSRDKLKLFLKQHCEPQDGVIKIKASSLSTYKIAEQDFSYFFPDDPPTFIFSPANRRRGRPPKRIHISQEDNVANKQTLASYRSKATKERDKLLKQEEMKSLAFEKAKLKREKADALEAKKKENIIKRTEDFLCRTELRY

SEQ ID NO: 820465 - protein, 156 aa, Homo sapiens
MLVAAAAERNKDPILHVLRQYLDPAQRGVRVLEVASGSGQHAAHFARAFPLAEWQPSDVDQRCLDSIAATTQAQGLTNVKAPLHLDVTWGWEHWGGILPQSLDLLLCINMAHVSPLRCTEGLFRAAGHLLKPRALLITYGALCHQWEDLPPEQRGL

SEQ ID NO: 820466 - protein, 205 aa, Homo sapiens
MLVAAAAERNKDPILHVLRQYLDPAQRGVRVLEVASGSGQHAAHFARAFPLAEWQPSDVDQRCLDSIAATTQAQGLTNVKAPLHLDVTWGWEHWGGILPQSLDLLLCINMAHVSPLRCTEGLFRAAGHLLKPRALLITYGEPRMGASGHSPPGGPGKGQWPAPGEDGGHASQQQMPDLPEKLSPSFTPAHLHPCRRLCEARTLPP

SEQ ID NO: 820467 - protein, 107 aa, Homo sapiens
MLVAAAAERNKDPILHVLRQYLDPAQRGVRVLEVASGSGQHAAHFARAFPLAEWQPSDVDQRCLDRNPEWGLRDTALLEDLGKASGLLLERMVDMPANNKCLIFRKN

SEQ ID NO: 820468 - protein, 107 aa, Homo sapiens; identical to SEQ ID NO: 820467

SEQ ID NO: 820469 - protein, 127 aa, Homo sapiens
MLVAAAAERNKDPILHVLRQYLDPAQRGVRVLEVASGSGQHAAHFARAFPLAEWQPSDVDQRCLDRGSSEQQDTCSNPGPCSSPTGNPEWGLRDTALLEDLGKASGLLLERMVDMPANNKCLIFRKN

SEQ ID NO: 820470 - protein, 156 aa, Homo sapiens; identical to SEQ ID NO: 820465

SEQ ID NO: 820471 - protein, 156 aa, Homo sapiens; identical to SEQ ID NO: 820465

SEQ ID NO: 820472 - protein, 205 aa, Homo sapiens; identical to SEQ ID NO: 820466

SEQ ID NO: 820473 - protein, 161 aa, Homo sapiens [sequence omitted]

SEQ ID NO: 820474 - protein, 191 aa, Homo sapiens
MLVAAAAERNKDPILHVLRQYLDPAQRGVRVLEVASGSGQHAAHFARAFPLAEWQPSDVDQRCLDSIAATTQAQGLTNVKAPLHLDVTWGWEHWGGILPQSLDLLLCINMAHVSPLRCTEGLFRAAGHLLKPRALLITYGGGGALSFSKPQPASLSQALWEIPRPWSSGLCPHAHALCHQWEDLPPEQRGL

SEQ ID NO: 820475 - protein, 283 aa, Homo sapiens
PASCPRRDPRRVRGGELLLPRCWWRRPRSGTRIPSCTCCGSTWIRPSVASASSRWPRAPASTQRTSRGPSPWPSGSRRTWTSAAWTGAAPGAATSIGAAVRGLKSPRPAAPEEKDAARALRVRGGSLGVPPGQALAVRPPRLRKWVDLGVPLPSRFGLRSSTCPPASPKKFCGGVGKAGAQDSAPTQAFASCSIAATTQAQGLTNVKAPLHLDVTWGWEHWGGILPQSLDLLLCINMAHVSPLRCTEGLFRAAGHLLKPRALLITYGALCHQWEDLPPEQRGL

SEQ ID NO: 820476 - protein, 156 aa, Homo sapiens; identical to SEQ ID NO: 820465

SEQ ID NO: 820477 - protein, 236 aa, Homo sapiens
MLVAAAAERNKDPILHVLRQYLDPAQRGVRVLEVASGSGQHAAHFARAFPLAEWQPSDVDQRCLDSIAATTQAQGLTNVKAPLHLDVTWGWEHWGGILPQSLDLLLCINMAHVSPLRCTEVCGEPSMGVCRGTTHPAWGQLEMPDLPPSQSGGSSEQQDTCSNPGPCSSPTGPYAINGKISPQSNVDFDLMLRCRNPEWGLRDTALLEDLGKASGLLLERMVDMPANNKCLIFRKN

SEQ ID NO: 820478 - protein, 290 aa, Homo sapiens
PASCPRRDPRRVRGGELLLPRCWWRRPRSGTRIPSCTCCGSTWIRPSVASASSRWPRAPASTQRTSRGPSPWPSGSRRTWTSAAWTGAAPGAATSIGAAVRGLKSPRPAAPEEKDAARALRVRGGSLGVPPGQALAVRPPRLRKWVDLGVPLPSRFGLRSSTCPPASPKKFCGGVGKAGAQDSAPTQAFASCSIAATTQAQGLTNVKAPLHLDVTWGWEHWGGILPQSLDLLLCINMAHVSPLRCTEVCGEPSMGVCRGTTHPAWGQLGCQICPHHSRGEGLQPPPSQSG

SEQ ID NO: 820479 - protein, 318 aa, Homo sapiens
PASCPRRDPRRVRGGELLLPRCWWRRPRSGTRIPSCTCCGSTWIRPSVASASSRWPRAPASTQRTSRGPSPWPSGSRRTWTSAAWTGAAPGAATSIGAAVRGLKSPRPAAPEEKDAARALRVRGGSLGVPPGQALAVRPPRLRKWVDLGVPLPSRFGLRSSTCPPASPKKFCGGVGKAGAQDSAPTQAFASCSIAATTQAQGLTNVKAPLHLDVTWGWEHWGGILPQSLDLLLCINMAHVSPLRCTEGLFRAAGHLLKPRALLITYGGGGALSFSKPQPASLSQALWEIPRPWSSGLCPHAHALCHQWEDLPPEQRGL

SEQ ID NO: 820480 - protein, 196 aa, Homo sapiens
MLVAAAAERNKDPILHVLRQYLDPAQRGVRVLEVASGSGQHAAHFARAFPLAEWQPSDVDQRCLDSIAATTQAQGLTNVKAPLHLDVTWGWEHWGGILPQSLDLLLCINMAHVSPLRCTEGLFRAAGHLLKPRALLITYGSPQSNVDFDLMLRCRNPEWGLRDTALLEDLGKASGLLLERMVDMPANNKCLIFRKN

SEQ ID NO: 820481 - protein, 194 aa, Homo sapiens
MLVAAAAERNKDPILHVLRQYLDPAQRGVRVLEVASGHSPPGGPGKGQWPAPGEDGGHASQQQMPDLPEKLSPSFSGQHAAHFARAFPLAEWQPSDVDQRCLDSIAATTQAQGLTNVKAPLHLDVTWGWEHWGGILPQSLDLLLCINMAHVSPLRCTEGLFRAAGHLLKPRALLITYGALCHQWEDLPPEQRGL

SEQ ID NO: 820482 - protein, 150 aa, Homo sapiens
MLVAAAAERNKDPILHVLRQYLDPAQRGVRVLEVASGSGQHAAHFARAFPLAEWQPSDVDQRCLDRGSSEQQDTCSNPGPCSSPTGPYAINGKISPQSNVDFDLMLRCRNPEWGLRDTALLEDLGKASGLLLERMVDMPANNKCLIFRKN

SEQ ID NO: 820483 - protein, 185 aa, Homo sapiens
MLVAAAAERNKDPILHVLRQYLDPAQRGVRVLEVASGSGQHAAHFARAFPLAEWQPSDVDQRCLDRGSSEQQDTCSNPGPCSSPTGEGVPFHSPNPSLQVCPRLSGKYPDLGPVGCVPMPTPYAINGKISPQSNVDFDLMLRCRNPEWGLRDTALLEDLGKASGLLLERMVDMPANNKCLIFRKN

SEQ ID NO: 820484 - protein, 107 aa, Homo sapiens
PGLVPPTRPAPRPRRGVVAAAMLVAAAAERNKDPILHVLRQYLDPAQRGVRVLEVASGSGQHAAHFARAFPLAEWQPSDVDQRCLDRGSSEQQDTCSNPGPCSSPTG

SEQ ID NO: 820485 - protein, 178 aa, Homo sapiens
MLVAAAAERNKDPILHVLRQYLDPAQRGVRVLEVASGSGQHAAHFARAFPLAEWQPSDVDQRCLDSIAATTQAQGLTNVKAPLHLDVTWGWEHWGGILPQSLDLLLCINMAHVSPLRCTEVCGEPSMGVCRGTTHPAWGQLGCQICPHHSRGTQNGGFGTQPSWRTWERPVACSWRGW

SEQ ID NO: 820486 - protein, 185 aa, Homo sapiens
MLVAAAAERNKDPILHVLRQYLDPAQRGVRVLEVASGSGQHAAHFARAFPLAEWQPSDVDQRCLDSIAATTQAQGLTNVKAPLHLDVTWGWEHWGGILPQSLDLLLCINMAHVSPLRCTEEPRMGASGHSPPGGPGKGQWPAPGEDGGHASQQQMPDLPEKLSPSFTPAHLHPCRRLCEARTLPP

SEQ ID NO: 820487 - protein, 290 aa, Homo sapiens; identical to SEQ ID NO: 820478

SEQ ID NO: 820488 - protein, 131 aa, Homo sapiens
ISHRPGQVRRNSPRHCQARKAQLHLGPARMWHKKVDGHRGSSTKFIVSQEGPPMGKHLTRRLWTWDVPYAINGKISPQSNVDFDLMLRCRNPEWGLRDTALLEDLGKASGLLLERMVDMPANNKCLIFRKN

SEQ ID NO: 820489 - protein, 400 aa, Homo sapiens
PASCPRRDPRRVRGGELLLPRCWWRRPRSGTRIPSCTCCGSTWIRPSVASASSRWPRAPASTQRTSRGPSPWPSGSRRTWTSAAWTGAAPGAATSIGAAVRGLKSPRPAAPEEKDAARALRVRGGSLGVPPGQALAVRPPRLRKWVDLGVPLPSRFGLRSSTCPPASPKKFCGGVGKAGAQDSAPTQAFASCSIAATTQAQGLTNVKAPLHLDVTWGWEHWGGILPQSLDLLLCINMAHVSPLRCTEEPRMGASGHSPPGGPGKGQWPAPGEDGGHASQQQMPDLPAVAGPCTRTRPRTEYSVAVQTAVKQSDGEYLVSGWSETVEFCTGDYAKEHLAQLQEKAEQIAGRMLRFSVFYRNHHKEYFQHARTHCGNMLQPYLKDNSGSHGSPTSGMLHGLV

SEQ ID NO: 820490 - protein, 135 aa, Homo sapiens
MLVAAAAERNKDPILHVLRQYLDPAQRGVRVLEVASGSGQHAAHFARAFPLAEWQPSDVDQRCLDSIAATTQAQGLTNVKAPLHLDVTWGWEHWGGILPQSLDLLLCINMAHVSPLRCTEVDMPANNKCLIFRKN

SEQ ID NO: 820491 - protein, 127 aa, Homo sapiens; identical to SEQ ID NO: 820469

SEQ ID NO: 820492 - protein, 136 aa, Homo sapiens
FNTVKGSPTGVVSLGSGDPRFTHWLGQPPRKKKVWPPNNPLLLYVTNAFYGFRGLKTNKGIAPGASLSSMARVSFARSLLMICLWDAPWMRLCGWSQAFPVHRRAWGKFVPLAGSLAVTRFKPNVDDSKEYFSKHN

SEQ ID NO: 820493 - protein, 106 aa, Homo sapiens
MASGNARIGKPAPDFKATAVVDGAFKEVKLSDYKGKYVVLFFYPLDFTFVCPTEIIAFSNRAEDFRKLGCEVLGVSVDSQFTHLGLDQHPPEKREAWAPWEHPPAC

SEQ ID NO: 820494 - protein, 106 aa, Homo sapiens; identical to SEQ ID NO: 820493

SEQ ID NO: 820495 - protein, 106 aa, Homo sapiens; identical to SEQ ID NO: 820493

SEQ ID NO: 820496 - protein, 106 aa, Homo sapiens; identical to SEQ ID NO: 820493

SEQ ID NO: 820497 - protein, 106 aa, Homo sapiens; identical to SEQ ID NO: 820493

SEQ ID NO: 820498 - protein, 265 aa, Homo sapiens
MNTRSAPGGRTPFRLLWPDPDFSAGRLCFPSAIVASFVLAGETEATALQRRPDRPTSRPLLVRASLSPSGLGACDTALRPTRSWGAGGSGWVTRALVRRAGLRQPPGLVDRVPGRVRVSAVASAVLTQSSGPSTQRDLGLGGQSVFPGALTGRGSQLSVMASGNARIGKPAPDFKATAVVDGAFKEVKLSDYKGKYVVLFFYPLDFTFVCPTEIIAFSNRAEDFRKLGCEVLGVSVDSQFTHLGLDQHPPEKREAWAPWEHPPAC

SEQ ID NO: 820499 - protein, 106 aa, Homo sapiens; identical to SEQ ID NO: 820493

SEQ ID NO: 820500 - protein, 129 aa, Homo sapiens
MNTRSAPGGRTPFRLLWPDPDFSAGRLCFPSAIVASFVLAGETEATALQRRPDRPTSRPLLVRASLSPSGLGACDTALRPTRSWGAGGSGWVTRALVRRAGLRQPPGLVDRVPGRVRVSAVASAVLTQS

SEQ ID NO: 820501 - protein, 91 aa, Homo sapiens
PHTGLEVTNKVLGKGEGMRRPWPSPPGPILWSWRGRSGLIIAFSNRAEDFRKLGCEVLGVSVDSQFTHLGLDQHPPEKREAWAPWEHPPAC

SEQ ID NO: 820502 - protein, 106 aa, Homo sapiens; identical to SEQ ID NO: 820493

SEQ ID NO: 820503 - protein, 106 aa, Homo sapiens; identical to SEQ ID NO: 820493

SEQ ID NO: 820504 - protein, 106 aa, Homo sapiens; identical to SEQ ID NO: 820493

SEQ ID NO: 820505 - protein, 129 aa, Homo sapiens; identical to SEQ ID NO: 820500

SEQ ID NO: 820506 - protein, 106 aa, Homo sapiens; identical to SEQ ID NO: 820493

SEQ ID NO: 820507 - protein, 106 aa, Homo sapiens; identical to SEQ ID NO: 820493

SEQ ID NO: 820508 - protein, 106 aa, Homo sapiens; identical to SEQ ID NO: 820493

SEQ ID NO: 820509 - protein, 106 aa, Homo sapiens; identical to SEQ ID NO: 820493

SEQ ID NO: 820510 - protein, 106 aa, Homo sapiens; identical to SEQ ID NO: 820493

SEQ ID NO: 820511 - protein, 106 aa, Homo sapiens; identical to SEQ ID NO: 820493

SEQ ID NO: 820512 - protein, 106 aa, Homo sapiens; identical to SEQ ID NO: 820493

SEQ ID NO: 820513 - protein, 123 aa, Homo sapiens
MASGNARIGKPAPDFKATAVVDGAFKEVKLSDYKGKYVVLFFYPLDFTFVCPTEIIAFSNRAEDFRKLGCEVLGVSVDSQFTHLGLGMSRGQRGRLQLSSHPQVLAVWLRGHCSTSGTCVSPS

SEQ ID NO: 820514 - protein, 106 aa, Homo sapiens; identical to SEQ ID NO: 820493

SEQ ID NO: 820515 - protein, 129 aa, Homo sapiens; identical to SEQ ID NO: 820500

SEQ ID NO: 820516 - protein, 186 aa, Homo sapiens
  misc_feature (50)..(50): Xaa can be any naturally occurring amino acid
MRIKEHMLPTGTAKTETHRTAGETRTQREENRENTAQSYICGCHPHRAIXAHANKQTGDGASQDERTEDAGRREGARSGTEVGQCDKQEERARADVTRTRRQRQDRRRESEHRREERRRRERQRERKQKKERERATTNAGDGERRDAQREEAPTRRREEQQTRAGRRRAQTEKKTGGGRNGQKRQT

SEQ ID NO: 820517 - protein, 243 aa, Homo sapiens
MAHCNLKFLGSRDPPASASRVAGTTAFQRAVQNAPCPLLFHRGTPAISVCVLPHPADLAEGCSRCQEDPSLIVGSTRGWLRFLPHPITEACTHLPPGHSLTRVEITSATEGLTPCHFKMGTFQAHICHQLFMDGHKKLLNPIPVTWPTKNAAPARTNTDSDSHNKRQDLQKNRHTQHARRAQIVNRGRIKAQPQEEQPTRKQRKKTERGKKPGETHGLRSHLSLGYVAPDDGEDNKRGARAES

SEQ ID NO: 820518 - protein, 506 aa, Homo sapiens
MGAYKYIQELWRKKQSDVMRFLLRVRCWQYRQLSALHRAPRPTRPDKARRLGYKAKQGYVIYRIRVRRGGRKRPVPKGATYGKPVHHGVNQLKFARSLQSVAEERAGRHCGALRVLNSYWVGEDSTYKFFEVILIDPFHKAIRRNPDTQWITKPVHKHREMRGLTSAGRKSRGLGKGHKFHHTIGGSRRAAWRRRNTLQLHRYRYYEVKFVKFILNKQFRTVKKKKKKLETSSLISPRTLTLAPEPGAASRLIGGPRGRPPQRTTPGFPPGSAVETLPSPFLTPSPSFPPSFPPVAVSSGAAAPGGAPGTAMGSRASTLLRDEELEEIKKETGFSHSQITRLYSRFTSLDKGENGTLSREDFQRIPELAINPLGDRIINAFFPEGEDQVNFRGFMRTLAHFRPIEDNEKSKDVNGPEPLNSRSNKLHFAFRLYDLDKDEKISRDELLQVLRMMVGVNISDEQLGSIADRTIQEADQDGDSAISFTEFVKVLEKVDVEQKMSIRFLH

SEQ ID NO: 820519 - protein, 636 aa, Homo sapiens
MAHLMMFRDVAVDFSQEEWECLDLEQRDLYRDVMLENYSTWSHWVFAFISQKRFSLLEKGKEPWKILRDETRGPCPDMQSRCQTKKLLPKNGIFEREIAQLEIMRICKNHSLDCLCFRGDWEGNTQFQTLQDNQEECFKQVIRTCEKRPTFNQHTVFNLHQRLNTGDKLNEFKELGKAFISGSDHTQHQLIHTSEKFCGDKECGNTFLPDSEVIQYQTVHTVKKTYECKECGKSFSLRSSLTGHKRIHTGEKPFKCKDCGKAFRFHSQLSVHKRIHTGEKSYECKECGKAFSCGSDLTRHQRIHTGEKPYECNECRKAFSQRSHLIKHQRIHTGEKPYECKECGKAFTRGSHLTQHQRIHTGEKSHECKECGKAFIRGSNLAQHQNVHVGRKPYKCEKCGKAYIWSSHLARHQRIHTGRKPYECKQCGKTFTWASYLAQHEKIHNERKSYECKECGKTFLHGSEFNRHQKIHTGERNYECKECGKTFFRGSELNRHQKIHTGKRPYECEECGKAFLWGSQLTRHQRMHTGEEPYVCKECGKSFIWGSQLTRHKKIHTDAEPYGCKKSSHIFSHHSYFTEQKIHNSANLCEWTDYGNTFSHESNFAQHQNIYTFEKSYEFKDFEKAFSSSSHFISLL

SEQ ID NO: 820520 - protein, 135 aa, Homo sapiens
FTGMWRNQIWLLPLLSWCKKHLAAIKVLFFAVIWYEFATEVNSRSREDFQRIPELAINPLGDRIINAFFPEGEDQVNFRGFMRTLAHFRPIEDNEKSKDVNGPEPLNSRSNKLHFAFRLYDLDKDEKISRDELLQ

SEQ ID NO: 820521 - protein, 231 aa, Homo sapiens
MLLHPFYMFFASFPPSFPPVAVSSGAAAPGGAPGTAMGSRASTLLRDEELEEIKKETGFSHSQITRLYSRFTSLDKGENGTLSREDFQRIPELAINPLGDRIINAFFPEGEDQVNFRGFMRTLAHFRPIEDNEKSKDVNGPEPLNSRSNKLHFAFRLYDLDKDEKISRDELLQVLRMMVGVNISDEQLGSIADRTIQEADQDGDSAISFTEFVKVLEKVDVEQKMSIRFLH

SEQ ID NO: 820522 - protein, 204 aa, Homo sapiens [sequence omitted]

SEQ ID NO: 820523 - protein, 231 aa, Homo sapiens; identical to SEQ ID NO: 820521

SEQ ID NO: 820524 - protein, 204 aa, Homo sapiens [sequence omitted]

SEQ ID NO: 820525 - protein, 231 aa, Homo sapiens; identical to SEQ ID NO: 820521

SEQ ID NO: 820526 - protein, 231 aa, Homo sapiens; identical to SEQ ID NO: 820521

SEQ ID NO: 820527 - protein, 231 aa, Homo sapiens; identical to SEQ ID NO: 820521

SEQ ID NO: 820528 - protein, 231 aa, Homo sapiens; identical to SEQ ID NO: 820521

SEQ ID NO: 820529 - protein, 448 aa, Homo sapiens
MGAYKYIQELWRKKQSDVMRFLLRVRCWQYRQLSALHRAPRPTRPDKARRLGYKAKQGYVIYRIRVRRGGRKRPVPKGATYGKPVHHGVNQLKFARSLQSVAEERAGRHCGALRVLNSYWVGEDSTYKFFEVILIDPFHKAIRRNPDTQWITKPVHKHREMRGLTSAGRKSRGLGKGHKFHHTIGGSRRAAWRRRNTLQLHRYRYYEVKFVKFILNKQFRTVKKKKKKLETSSLISPRTLTLAPEPGAASRLIGGPRGRPPQRTTPGFPPGSAVETLPSPFLTPSPSFPPSFPPVAVSSGAAAPGGAPGTAMGSRASTLLRDEELEEIKKETGFSHSQITRLYSRFTSLDKGENGTLSREDFQRIPELAINPLGDRIINAFFPEGEDQVNFRGFMRTLAHFRPIEDNEKSKDVNGPEPLNSRSNKLHFAFRLYDLDKDEKISRDELLQ

SEQ ID NO: 820530 - protein, 466 aa, Homo sapiens
MGAYKYIQELWRKKQSDVMRFLLRVRCWQYRQLSALHRAPRPTRPDKARRLGYKAKQGYVIYRIRVRRGGRKRPVPKGATYGKPVHHGVNQLKFARSLQSVAEERAGRHCGALRVLNSYWVGEDSTYKFFEVILIDPFHKAIRRNPDTQWITKPVHKHREMRGLTSAGRKSRGLGKGHKFHHTIGGSRRAAWRRRNTLQLHRYRYYEVKFVKFILNKQFRTVKKKKKKLETSSLISPRTLTLAPEPGAASRLIGGPRGRPPQRTTPGFPPGSAVETLPSPFLTPSPSFPPSFPPVAVSSGAAAPGGAPGTAMGSRASTLLRDEELEEIKKETGFSHSQITRLYSRFTSLDKGENGTLSREDFQRIPELAINPLGDRIINAFFPEGEDQVKMQIFVKTLTGKTITLEVEPSDTIENVKAKIQDKEGIPPGQQRLIFAGKQLEDGRTLSDYNIQKESTLHLVLRLRGG

SEQ ID NO: 820531 - protein, 445 aa, Homo sapiens
MSELTKELMELVWGTKSSPGLSDTIFCRWTQGFVFSESEGSALEQFEGGPCAVIAPVQAFLLKKLLFSSEKSSWRDCSEEEQKELLCHTLCDILESACCDHSGSYCLVSWLRGKTTEETASISGSPAESSCQVEHSSALAVEELGFERFHALIQKRSFRSLPELKDAVLDQYSMWGNKFGVLLFLYSVLLTKGIENIKNEIEDASEPLIDPVYGHGSQSLINLLLTGHAVSNVWDGDRECSGMKLLGIHEQAAVGFLTLMEALRYCKVGSYLKSPKFPIWIVGSETHLTVFFAKDMALVAPEAPSEQARRVFQTYDPEDNGFIPDSLLEDVMKALDLVSDPEYINLMKNKLDPEGLGIILLGPFLQEFFPDQGSSGPESFTVYHYNGLKQSNYNEKVMYVEGTAVVMGFEDPMLQTDDTPIKRCLQTKWPYIELLWTTDRSPSLN

SEQ ID NO: 820532 - protein, 272 aa, Homo sapiens
MWGNKFGVLLFLYSVLLTKGIENIKNEIEDASEPLIDPVYGHGSQSLINLLLTGHAVSNVWDGDRECSGMKLLGIHEQAAVGFLTLMEALRYCKVGSYLKSPKFPIWIVGSETHLTVFFAKDMALVAPEAPSEQARRVFQTYDPEDNGFIPDSLLEDVMKALDLVSDPEYINLMKNKLDPEGLGIILLGPFLQEFFPDQGSSGPESFTVYHYNGLKQSNYNEKVMYVEGTAVVMGFEDPMLQTDDTPIKRCLQTKWPYIELLWTTDRSPSLN

SEQ ID NO: 820533 - protein, 476 aa, Homo sapiens
MSELTKELMELVWGTKSSPGLSDTIFCRWTQGFVFSESEGSALEQFEGGPCAVIAPVQAFLLKKLLFSSEKSSWRDCSEEEQKELLCHTLCDILESACCDHSGSYCLVSWLRGKTTEETASISGSPAESSCQVEHSSALAVEELGFERFHALIQRPLYSLNNCILLKNLLMPDSSPKSMKRFPAKKRSFRSLPELKDAVLDQYSMWGNKFGVLLFLYSVLLTKGIENIKNEIEDASEPLIDPVYGHGSQSLINLLLTGHAVSNVWDGDRECSGMKLLGIHEQAAVGFLTLMEALRYCKVGSYLKSPKFPIWIVGSETHLTVFFAKDMALVAPEAPSEQARRVFQTYDPEDNGFIPDSLLEDVMKALDLVSDPEYINLMKNKLDPEGLGIILLGPFLQEFFPDQGSSGPESFTVYHYNGLKQSNYNEKVMYVEGTAVVMGFEDPMLQTDDTPIKRCLQTKWPYIELLWTTDRSPSLN

SEQ ID NO: 820534 - protein, 260 aa, Homo sapiens
MSELTKELMELVWGTKSSPGLSDTIFCRWTQGFVFSESEGSALEQFEGGPCAVIAPVQAFLLKKLLFSSEKSSWRDCSEEEQKELLCHTLCDILESACCDHSGSYCLVSWLRGKTTEETASISGSPAESSCQVEHSSALAVEELGFERFHALIQKRSFRSLPELKDAVLDQYSMWGNKFGVLLFLYSVLLTKGIENIKNEIEDASEPLIDPVYGHGSQSLINLLLTGHAVSNVWDGDRECSGMSWFLLEISKIPYLDCWQ

SEQ ID NO: 820535 - protein, 445 aa, Homo sapiens; identical to SEQ ID NO: 820531

SEQ ID NO: 820536 - protein, 445 aa, Homo sapiens; identical to SEQ ID NO: 820531

SEQ ID NO: 820537 - protein, 103 aa, Homo sapiens
FVSRLVPHHSYRSVGIILLGPFLQEFFPDQGSSGPESFTVYHYNGLKQSNYNEKVMYVEGTAVVMGFEDPMLQTDDTPIKRCLQTKWPYIELLWTTDRSPSLN

SEQ ID NO: 820538 - protein, 151 aa, Homo sapiens
GCRFGFSGRIPRSQPFPMADPEELQVSSPPPPLPLLPPLQTPLQHLPRAASEFGLASSEQEQRPTVDQLEEVELQIGDGSSGPESFTVYHYNGLKQSNYNEKVMYVEGTAVVMGFEDPMLQTDDTPIKRCLQTKWPYIELLWTTDRSPSLN

SEQ ID NO: 820539 - protein, 342 aa, Homo sapiens
MSELTKELMELVWGTKSSPGLSDTIFCRWTQGFVFSESEGSALEQFEGGPCAVIAPVQAFLLKKLLFSSEKSSWRDCSEEEQKELLCHTLCDILESACCDHSGSYCLVSWLRGKTTEETASISGSPAESSCQVEHSSALAVEELGFERFHALIQKRSFRSLPELKDAVLDQYSMWGNKFGVLLFLYSVLLTKGIENIKNEIEDASEPLIDPVYGHGSQSLINLLLTGHAVSNVWDGDRECSGMKLLGIHEQAAVGFLTLMEALRYCKVGSYLKSPKFPIWIVGSETHLTVFFAKDMALVAPEAPSEQARRVFQTYDPEDNGFIPDSLLEDVMKALDLVSDPE

SEQ ID NO: 820540 - protein, 180 aa, Homo sapiens
MSELTKELMELVWGTKSSPGLSDTIFCRWTQGFVFSESEGSALEQFEGGPCAVIAPVQAFLLKKLLFSSEKSSWRDCSEEEQKELLCHTLCDILESACCDHSGSYCLVSWLRGKTTEETASISGSPAESSCQVEHSCKIYFYFLKFFSCSFVLMNLLNILKKKLLKIFITCILFQLKLNY

SEQ ID NO: 820541 - protein, 773 aa, Homo sapiens
GGRRCRGAGTRLIRCLRVVVSAAPRMRRCNSGSGPPPSLLLLLLWLLAVPGANAAPRSALYSPSDPLTLLQADTVRGAVLGSRSAWAVEFFASWCGHCIAFAPTWKALAEDVKAWRPALYLAALDCAEETNSAVCRDFNIPGFPTVRFFKAFTKNGSGAVFPVAGADVQTLRERLIDALESHHDTWPPACPPLEPAKLEEIDGFFARNNEEYLALIFEKGGSYLGREVALDLSQHKGVAVRRVLNTEANVVRKFGVTDFPSCYLLFRNGSVSRVPVLMESRSFYTAYLQRLSGLTREAAQTTVAPTTANKIAPTVWKLADRSKIYMADLESALHYILRIEVGRFPVLEGQRLVALKKFVAVLAKYFPGRPLVQNFLHSVNEWLKRQKRNKIPYSFFKTALDDRKEGAVLAKKVNWIGCQGSEPHFRGFPCSLWVLFHFLTVQAARQNVDHSQEAAKAKEVLPAIRGYVHYFFGCRDCASHFEQMAAASMHRVGSPNAAVLWLWSSHNRVNARLAGAPSEDPQFPKVQWPPRELCSACHNERLDVPVWDVEATLNFLKAHFSPSNIILDFPAAGSAARRDVQNVAAAPELAMGALELESRNSTLDPGKPEMMKSPTNTTPHVPAEGPSEASRPPKLHPGLRAAPGQEPPEHMAELQRNEQEQPLGQWHLSKRDTGAALLAESRAEKNRLWGPLEVRRVGRSSKQLVDIPEGQLEARAGRGRGQWLQVLGGGFSYLDISLCVGLYSLSFMGLLAMYTYFQAKIRALKGHAGHPAA

SEQ ID NO: 820542 - protein, 773 aa, Homo sapiens; identical to SEQ ID NO: 820541

SEQ ID NO: 820543 - protein, 773 aa, Homo sapiens; identical to SEQ ID NO: 820541

SEQ ID NO: 820544 - protein, 652 aa, Homo sapiens
GGRRCRGAGTRLIRCLRVVVSAAPRMRRCNSGSGPPPSLLLLLLWLLAVPGANAAPRSALYSPSDPLTLLQADTVRGAVLGSRSAWAVEFFASWCGHCIAFAPTWKALAEDVKAWRPALYLAALDCAEETNSAVCRDFNIPGFPTVRFFKAFTKNGSGAVFPVAGADVQTLRERLIDALESHHDTWPPACPPLEPAKLEEIDGFFARNNEEYLALIFEKGGSYLGREVALDLSQHKGVAVRRVLNTEANVVRKFGVTDFPSCYLLFRNGSVSRVPVLMESRSFYTAYLQRLSGLTREAAQTTVAPTTANKIAPTVWKLADRSKIYMADLESALHYILRIEVGRFPVLEGQRLVALKKFVAVLAKYFPGRPLVQNFLHSVNEWLKRQKRNKIPYSFFKTALDDRKEGAVLAKKVNWIGCQGSEPHFRGFPCSLWVLFHFLTVQAARQNVDHSQEAAKAKEVLPAIRGYVHYFFGCRDCASHFEQMAAASMHRVGSPNAAVLWLWSSHNRVNARLAGAPSEDPQFPKVQWPPRELCSACHNERLDVPVWDVEATLNFLKAHFSPSNIILDFPAAGSAARRDVQNVAAAPELAMGALELESRNSTLDPGKPEMMKSPTNTTPHVPAEGPSLFEVLPHSHWSLSLSCLVLALNWGK

SEQ ID NO: 820545 - protein, 773 aa, Homo sapiens; identical to SEQ ID NO: 820541

SEQ ID NO: 820546 - protein, 773 aa, Homo sapiens; identical to SEQ ID NO: 820541

SEQ ID NO: 820547 - protein, 773 aa, Homo sapiens; identical to SEQ ID NO: 820541

SEQ ID NO: 820548 - protein, 773 aa, Homo sapiens; identical to SEQ ID NO: 820541

SEQ ID NO: 820549 - protein, 779 aa, Homo sapiens
GGRRCRGAGTRLIRCLRVVVSAAPRMRRCNSGSGPPPSLLLLLLWLLAVPGANAAPRSALYSPSDPLTLLQADTVRGAVLGSRSAWAVEFFASWCGHCIAFAPTWKALAEDVKAWRPALYLAALDCAEETNSAVCRDFNIPGFPTVRFFKAFTKNGSGAVFPVAGADVQTLRERLIDALESHHDTWPPACPPLEPAKLEEIDGFFARNNEEYLALIFEKGGSYLGREVALDLSQHKGVAVRRVLNTEANVVRKFGVTDFPSCYLLFRNGSVSRVPVLMESRSFYTAYLQRLSGLTREAAQTTVAPTTANKIAPTVWKLADRSKIYMADLESALHYILRIEVGRFPVLEGQRLVALKKFVAVLAKYFPGRPLVQNFLHSVNEWLKRQKRNKIPYSFFKTALDDRKEGAVLAKKVNWIGCQGSEPHFRGFPCSLWVLFHFLTVQAARQNVDHSQEAAKAKEVLPAIRGYVHYFFGCRDCASHFEQMAAASMHRVGSPNAAVLWLWSFATCGLLLAFCLVSDRAGPPACARVPWSYHSCHELCSACHNERLDVPVWDVEATLNFLKAHFSPSNIILDFPAAGSAARRDVQNVAAAPELAMGALELESRNSTLDPGKPEMMKSPTNTTPHVPAEGPSEASRPPKLHPGLRAAPGQEPPEHMAELQRNEQEQPLGQWHLSKRDTGAALLAESRAEKNRLWGPLEVRRVGRSSKQLVDIPEGQLEARAGRGRGQWLQVLGGGFSYLDISLCVGLYSLSFMGLLAMYTYFQAKIRALKGHAGHPAA

SEQ ID NO: 820550 - protein, 648 aa, Homo sapiens
MAEETNSAVCRDFNIPGFPTVRFFKAFTKNGSGAVFPVAGADVQTLRERLIDALESHHDTWPPACPPLEPAKLEEIDGFFARNNEEYLALIFEKGGSYLGREVALDLSQHKGVAVRRVLNTEANVVRKFGVTDFPSCYLLFRNGSVSRVPVLMESRSFYTAYLQRLSGLTREAAQTTVAPTTANKIAPTVWKLADRSKIYMADLESALHYILRIEVGRFPVLEGQRLVALKKFVAVLAKYFPGRPLVQNFLHSVNEWLKRQKRNKIPYSFFKTALDDRKEGAVLAKKVNWIGCQGSEPHFRGFPCSLWVLFHFLTVQAARQNVDHSQEAAKAKEVLPAIRGYVHYFFGCRDCASHFEQMAAASMHRVGSPNAAVLWLWSSHNRVNARLAGAPSEDPQFPKVQWPPRELCSACHNERLDVPVWDVEATLNFLKAHFSPSNIILDFPAAGSAARRDVQNVAAAPELAMGALELESRNSTLDPGKPEMMKSPTNTTPHVPAEGPSEASRPPKLHPGLRAAPGQEPPEHMAELQRNEQEQPLGQWHLSKRDTGAALLAESRAEKNRLWGPLEVRRVGRSSKQLVDIPEGQLEARAGRGRGQWLQVLGGGFSYLDISLCVGLYSLSFMGLLAMYTYFQAKIRALKGHAGHPAA

SEQ ID NO: 820551 - protein, 723 aa, Homo sapiens
  misc_feature (20)..(20): Xaa can be any naturally occurring amino acid
AEVLKIPEAGLVNVTSQEAXKQRSSSPRGYVHYFFGCLDCASHFEQMAAASMHRVGSPNAAVLWLWSSHNRVNARLAGAPSEDPQFPKVQWPPRELLFFKAFTKNGSGAVFPVAGADVQTLRERLIDALESHHDTWPPACPPLEPAKLEEIDGFFARNNEEYLALIFEKGGSYLGREVALDLSQHKGVAVRRVLNTEANVVRKFGVTDFPSCYLLFRNGSVSRVPVLMESRSFYTAYLQRLSGLTREAAQTTVAPTTANKIAPTVWKLADRSKIYMADLESALHYILRIEVGRFPVLEGQRLVALKKFVAVLAKYFPGRPLVQNFLHSVNEWLKRQKRNKIPYSFFKTALDDRKEGAVLAKKVNWIGCQGSEPHFRGFPCSLWVLFHFLTVQAARQNVDHSQEAAKAKEVLPAIRGYVHYFFGCRDCASHFEQMAAASMHRVGSPNAAVLWLWSSHNRVNARLAGAPSEDPQFPKVQWPPRELCSACHNERLDVPVWDVEATLNFLKAHFSPSNIILDFPAAGSAARRDVQNVAAAPELAMGALELESRNSTLDPGKPEMMKSPTNTTPHVPAEGPSEASRPPKLHPGLRAAPGQEPPEHMAELQRNEQEQPLGQWHLSKRDTGAALLAESRAEKNRLWGPLEVRRVGRSSKQLVDIPEGQLEARAGRGRGQWLQVLGGGFSYLDISLCVGLYSLSFMGLLAMYTYFQAKIRALKGHAGHPAA

SEQ ID NO: 820552 - protein, 496 aa, Homo sapiens
MESRSFYTAYLQRLSGLTREAAQTTVAPTTANKIAPTVWKLADRSKIYMADLESALHYILRIEVGRFPVLEGQRLVALKKFVAVLAKYFPGRPLVQNFLHSVNEWLKRQKRNKIPYSFFKTALDDRKEGAVLAKKVNWIGCQGSEPHFRGFPCSLWVLFHFLTVQAARQNVDHSQEAAKAKEVLPAIRGYVHYFFGCRDCASHFEQMAAASMHRVGSPNAAVLWLWSSHNRVNARLAGAPSEDPQFPKVQWPPRELCSACHNERLDVPVWDVEATLNFLKAHFSPSNIILDFPAAGSAARRDVQNVAAAPELAMGALELESRNSTLDPGKPEMMKSPTNTTPHVPAEGPSEASRPPKLHPGLRAAPGQEPPEHMAELQRNEQEQPLGQWHLSKRDTGAALLAESRAEKNRLWGPLEVRRVGRSSKQLVDIPEGQLEARAGRGRGQWLQVLGGGFSYLDISLCVGLYSLSFMGLLAMYTYFQAKIRALKGHAGHPAA

SEQ ID NO: 820553 - protein, 773 aa, Homo sapiens; identical to SEQ ID NO: 820541

SEQ ID NO: 820554 - protein, 773 aa, Homo sapiens; identical to SEQ ID NO: 820541

SEQ ID NO: 820555 - protein, 773 aa, Homo sapiens; identical to SEQ ID NO: 820541

SEQ ID NO: 820556 - protein, 773 aa, Homo sapiens; identical to SEQ ID NO: 820541

SEQ ID NO: 820557 - protein, 644 aa, Homo sapiens
GGRRCRGAGTRLIRCLRVVVSAAPRMRRCNSGSGPPPSLLLLLLWLLAVPGANAAPRSALYSPSDPLTLLQADTVRGAVLGSRSAWAVEFFASWCGHCIAFAPTWKALAEDVKAWRPALYLAALDCAEETNSAVCRDFNIPGFPTVRFFKAFTKNGSGAVFPVAGADVQTLRERLIDALESHHDTWPPACPPLEPAKLEEIDGFFARNNEEYLALIFEKGGSYLGREVALDLSQHKGVAVRRVLNTEANVVRKFGVTDFPSCYLLFRNGSVSRVPVLMESRSFYTAYLQRLSGLTREAAQTTVAPTTANKIAPTVWKLADRSKIYMADLESALHYILRIEVGRFPVLEGQRLVALKKFVAVLAKYFPGRPLVQNFLHSVNEWLKRQKRNKIPYSFFKTALDDRKEGAVLAKKVNWIGCQGSEPHFRGFPCSLWVLFHFLTVQAARQNVDHSQEAAKAKEVLPAIRGYVHYFFGCRDCASHFEQMAAASMHRVGSPNAAVLWLWSSHNRVNARLAGAPSEDPQFPKVQWPPRELCSACHNERLDVPVWDVEATLNFLKAHFSPSNIILDFPAAGSAARRDVQNVAAAPELAMGALELESRNSTLDPGKPEMMKSPTNTTPHVPAEGPSGFRVGFGSFWKSCWSPR

SEQ ID NO: 820558 - protein, 773 aa, Homo sapiens; identical to SEQ ID NO: 820541

SEQ ID NO: 820559 - protein, 773 aa, Homo sapiens; identical to SEQ ID NO: 820541

SEQ ID NO: 820560 - protein, 654 aa, Homo sapiens
GGRRCRGAGTRLIRCLRVVVSAAPRMRRCNSGSGPPPSLLLLLLWLLAVPGANAAPRSALYSPSDPLTLLQADTVRGAVLGSRSAWAVEFFASWCGHCIAFAPTWKALAEDVKAWRPALYLAALDCAEETNSAVCRDFNIPGFPTVRFFKAFTKNGSGAVFPVAGADVQTLRERLIDALESHHDTWPPACPPLEPAKLEEIDGFFARNNEEYLALIFEKGGSYLGREVALDLSQHKGVAVRRVLNTEANVVRKFGVTDFPSCYLLFRNGSVSRVPVLMESRSFYTAYLQRLSGLTREAAQTTVAPTTANKIAPTVWKLADRSKIYMADLESALHYILRIEVGRFPVLEGQRLVALKKFVAVLAKYFPGRPLVQNFLHSVNEWLKRQKRNKIPYSFFKTALDDRKEGAVLAKKVNWIGCQGSEPHFRGFPCSLWVLFHFLTVQAARQNVDHSQEAAKAKEVLPAIRGYVHYFFGCRDCASHFEQMAAASMHRVGSPNAAVLWLWSSHNRVNARLAGAPSEDPQFPKVQWPPRELCSACHNERLDVPVWDVEATLNFLKAHFSPSNIILDFPAAGSAARRDVQNVAAAPELAMGALELESRNSTLDPGKPEMMKSPTNTTPHVPAEGPSEASRPPKLHPGRRRWLLSLPPIELCSL

SEQ ID NO: 820561 - protein, 328 aa, Homo sapiens
QSSRGSLAYAKAKEVLPAIRGYVHYFFGCRDCASHFEQMAAASMHRVGSPNAAVLWLWSSHNRVNARLAGAPSEDPQFPKVQWPPRELCSACHNERLDVPVWDVEATLNFLKAHFSPSNIILDFPAAGSAARRDVQNVAAAPELAMGALELESRNSTLDPGKPEMMKSPTNTTPHVPAEGPSEASRPPKLHPGLRAAPGQEPPEHMAELQRNEQEQPLGQWHLSKRDTGAALLAESRAEKNRLWGPLEVRRVGRSSKQLVDIPEGQLEARAGRGRGQWLQVLGGGFSYLDISLCVGLYSLSFMGLLAMYTYFQAKIRALKGHAGHPAA

SEQ ID NO: 820562 - protein, 773 aa, Homo sapiens; identical to SEQ ID NO: 820541

SEQ ID NO: 820563 - protein, 207 aa, Homo sapiens
QSSRGSLAYAKAKEVLPAIRGYVHYFFGCRDCASHFEQMAAASMHRVGSPNAAVLWLWSSHNRVNARLAGAPSEDPQFPKVQWPPRELCSACHNERLDVPVWDVEATLNFLKAHFSPSNIILDFPAAGSAARRDVQNVAAAPELAMGALELESRNSTLDPGKPEMMKSPTNTTPHVPAEGPSLFEVLPHSHWSLSLSCLVLALNWGK

SEQ ID NO: 820564 - protein, 731 aa, Homo sapiens
GGRRCRGAGTRLIRCLRVVVSAAPRMRRCNSGSGPPPSLLLLLLWLLAVPGANAAPRSALYSPSDPLTLLQADTVRGAVLGSRSAWAVEFFASWCGHCIAFAPTWKALAEDVKAWRPALYLAALDCAEETNSAVCRDFNIPGFPTVRFFKAFTKNGSGAVFPVAGADVQTLRERLIDALESHHDTWPPACPPLEPAKLEEIDGFFARNNEEYLALIFEKGGSYLGREVALDLSQHKGVAVRRVLNTEANVVRKFGVTDFPSCYLLFRNGSVSRVPVLMESRSFYTAYLQRLSGLTREAAQTTVAPTTANKIAPTVWKLADRSKIYMADLESALHYILRIEVGRFPVLEGQRLVALKKFVAVLAKYFPGRPLVQNFLHSVNEWLKRQKRNKIPYSFFKTALDDRKEGAVLAKKVNWIGCQGSEPHFRGFPCSLWVLFHFLTVQAARQNVDHSQEAAKAKEVLPAIRGYVHYFFGCRDCASHFEQMAAASMHRVGSPNAAVLWLWSSHNRVNARLAGAPSEDPQFPKVQWPPRELCSACHNERLDVPVWDVEATLNFLKAHFSPSNIILDFPAAGSAARRDVQNVAAAPELAMGALELESRNSTLDPGKPEMMKSPTNTTPHVPAEGPSEASRPPKLHPGLRAAPGQEPPEHMAELQRNEQEQPLGQWHLSKRDTGAALLAESRAEKNRLWGPLEVRRVGRSSKQLVDIPWPVSPQSPPSSPVFGHLPVPEHW

SEQ ID NO: 820565 - protein, 532 aa, Homo sapiens
GGRRCRGAGTRLIRCLRVVVSAAPRMRRCNSGSGPPPSLLLLLLWLLAVPGANAAPRSALYSPSDPLTLLQADTVRGAVLGSRSAWAVEFFASWCGHCIAFAPTWKALAEDVKAWRPALYLAALDCAEETNSAVCRDFNIPGFPTVRFFKAFTKNGSGAVFPVAGADVQTLRERLIDALESHHDTWPPACPPLEPAKLEEIDGFFARNNEEYLALIFEKGGSYLGREVALDLSQHKGVAVRRVLNTEANVVRKFGVTDFPSCYLLFRNGSVSRVPVLMESRSFYTAYLQRLSGLTREAAQTTVAPTTANKIAPTVWKLADRSKIYMADLESALHYILRIEVGRFPVLEGQRLVALKKFVAVLAKYFPGRPLVQNFLHSVNEWLKRQKRNKIPYSFFKTALDDRKEGAVLAKKVNWIGCQGSEPHFRGFPCSLWVLFHFLTVQAARQNVDHSQEAAKAKEVLPAIRGYVHYFFGCRDCASHFEQMAAASMHRVGSPNAAVLWLWSSHNRVNARLAGAPSEDPQFPKVQWPPRP

SEQ ID NO: 820566 - protein, 561 aa, Homo sapiens
GGRRCRGAGTRLIRCLRVVVSAAPRMRRCNSGSGPPPSLLLLLLWLLAVPGANAAPRSALYSPSDPLTLLQADTVRGAVLGSRSAWAVEFFASWCGHCIAFAPTWKALAEDVKAWRPALYLAALDCAEETNSAVCRDFNIPGFPTVRFFKAFTKNGSGAVFPVAGADVQTLRERLIDALESHHDTWPPACPPLEPAKLEEIDGFFARNNEEYLALIFEKGGSYLGREVALDLSQHKGVAVRRVLNTEANVVRKFGVTDFPSCYLLFRNGSVSRVPVLMESRSFYTAYLQRLSGLTREAAQTTVAPTTANKIAPTVWKLADRSKIYMADLESALHYILRIEVGRFPVLEGQRLVALKKFVAVLAKYFPGRPLVQNFLHSVNEWLKRQKRNKIPYSFFKTALDDRKEGAVLAKKVNWIGCQGSEPHFRGFPCSLWVLFHFLTVQAARQNVDHSQEAAKAKEVLPAIRGYVHYFFGCRDCASHFEQMAAASMHRVGSPNAAVLWLWSSHNRVNARLAGAPRTTTRTQRPPSTAQINLELYASYVYLSMSYYCDRDEGSSRTPHQ

SEQ ID NO: 820567 - protein, 117 aa, Homo sapiens [sequence omitted]

SEQ ID NO: 820568 - protein, 303 aa, Homo sapiens
GGRRCRGAGTRLIRCLRVVVSAAPRMRRCNSGSGPPPSLLLLLLWLLAVPGANAAPRSALYSPSDPLTLLQADTVRGAVLGSRSAWAVEFFASWCGHCIAFAPTWKALAEDVKAWRPALYLAALDCAEETNSAVCRDFNIPGFPTVRFFKAFTKNGSGAVFPVAGADVQTLRERLIDALESHHDTWPPACPPLEPAKLEEIDGFFARNNEEYLALIFEKGGSYLGREVALDLSQHKGVAVRRVLNTEANVVRKFGVTDFPSCYLLFRNGSVSRVPVLMESRSFYTAYMSWGCLYSHLAISVHS

SEQ ID NO: 820569 - protein, 106 aa, Homo sapiens [sequence omitted]

SEQ ID NO: 820570 - protein, 503 aa, Homo sapiens
MVLEMLNPIHYNITSIVPEAMPAATMPVLLLTGLFLLVWNYEGTSSIPGPGYCMGIGPLISHGRFLWMGIGSACNYYNRVYGEFMRVWISGEETLIISKSSSMFHIMKHNHYSSRFGSKLGLQCIGMHEKGIIFNNNPELWKTTRPFFMKALSGPGLVRMVTVCAESLKTHLDRLEEVTNESGYVDVLTLLRRVMLDTSNTLFLRIPLDESAIVVKIQGYFDAWQALLIKPDIFFKISWLYKKYEKSVKDLKDAIEVLIAEKRRRISTEEKLEECMDFATELILAEKRGDLTRENVNQCILEMLIAAPDTMSVSLFFMLFLIAKHPNVEEAIIKEIQTVIGERDIKIDDIQKLKVMENFIYESMRYQPVVDLVMRKALEDDVIDGYPVKKGTNIILNIGRMHRLEFFPKPNEFTLENFAKNVPYRYFQPFGFGPRGCAGKYIAMVMMKAILVTLLRRFHVKTLQGQCVESIQKIHDLSLHPDETKNMLEMIFTPRNSDRCLEH

SEQ ID NO: 820571 - protein, 503 aa, Homo sapiens; identical to SEQ ID NO: 820570

SEQ ID NO: 820572 - protein, 503 aa, Homo sapiens; identical to SEQ ID NO: 820570

SEQ ID NO: 820573 - protein, 503 aa, Homo sapiens; identical to SEQ ID NO: 820570

SEQ ID NO: 820574 - protein, 503 aa, Homo sapiens; identical to SEQ ID NO: 820570

SEQ ID NO: 820575 - protein, 503 aa, Homo sapiens; identical to SEQ ID NO: 820570

SEQ ID NO: 820576 - protein, 503 aa, Homo sapiens; identical to SEQ ID NO: 820570

SEQ ID NO: 820577 - protein, 503 aa, Homo sapiens; identical to SEQ ID NO: 820570

SEQ ID NO: 820578 - protein, 503 aa, Homo sapiens; identical to SEQ ID NO: 820570

SEQ ID NO: 820579 - protein, 503 aa, Homo sapiens; identical to SEQ ID NO: 820570

SEQ ID NO: 820580 - protein, 503 aa, Homo sapiens; identical to SEQ ID NO: 820570

SEQ ID NO: 820581 - protein, 503 aa, Homo sapiens; identical to SEQ ID NO: 820570

SEQ ID NO: 820582 - protein, 503 aa, Homo sapiens; identical to SEQ ID NO: 820570

SEQ ID NO: 820583 - protein, 503 aa, Homo sapiens; identical to SEQ ID NO: 820570

SEQ ID NO: 820584 - protein, 503 aa, Homo sapiens; identical to SEQ ID NO: 820570

SEQ ID NO: 820585 - protein, 503 aa, Homo sapiens; identical to SEQ ID NO: 820570

SEQ ID NO: 820586 - protein, 503 aa, Homo sapiens; identical to SEQ ID NO: 820570

SEQ ID NO: 820587 - protein, 503 aa, Homo sapiens; identical to SEQ ID NO: 820570

SEQ ID NO: 820588 - protein, 532 aa, Homo sapiens
MVLEMLNPIHYNITSIVPEAMPAATMPVLLLTGLFLLVWNYEGTSSIPGPGYCMGIGPLISHGRFLWMGIGSACNYYNRVYGEFMRVWISGEETLIISKSSSMFHIMKHNHYSSRFGSKLGLQCIGMHEKGIIFNNNPELWKTTRPFFMKALSGPGLVRMVTVCAESLKTHLDRLEEVTNESGYVDVLTLLRRVMLDTSNTLFLRIPLDESAIVVKIQGYFDAWQALLIKPDIFFKISWLYKKYEKSVQVIQLWKIYEYNWIGFFPLCLCCFSWPLSKDLKDAIEVLIAEKRRRISTEEKLEECMDFATELILAEKRGDLTRENVNQCILEMLIAAPDTMSVSLFFMLFLIAKHPNVEEAIIKEIQTVIGERDIKIDDIQKLKVMENFIYESMRYQPVVDLVMRKALEDDVIDGYPVKKGTNIILNIGRMHRLEFFPKPNEFTLENFAKNVPYRYFQPFGFGPRGCAGKYIAMVMMKAILVTLLRRFHVKTLQGQCVESIQKIHDLSLHPDETKNMLEMIFTPRNSDRCLEH

SEQ ID NO: 820589 - protein, 383 aa, Homo sapiens
QRRSGIKENSRVPQTLENVVVDNRLALDYLQLDKVGSCAVINKTCCTYIEHLDRLEEVTNESGYVDVLTLLRRVMLDTSNTLFLRIPLDESAIVVKIQGYFDAWQALLIKPDIFFKISWLYKKYEKSVKDLKDAIEVLIAEKRRRISTEEKLEECMDFATELILAEKRGDLTRENVNQCILEMLIAAPDTMSVSLFFMLFLIAKHPNVEEAIIKEIQTVIGERDIKIDDIQKLKVMENFIYESMRYQPVVDLVMRKALEDDVIDGYPVKKGTNIILNIGRMHRLEFFPKPNEFTLENFAKNVPYRYFQPFGFGPRGCAGKYIAMVMMKAILVTLLRRFHVKTLQGQCVESIQKIHDLSLHPDETKNMLEMIFTPRNSDRCLEH

SEQ ID NO: 820590 - protein, 444 aa, Homo sapiens
MVLEMLNPIHYNITSIVPEAMPAATMPVLLLTGLFLLVWNYEGTSSIPGPGYCMGIGPLISHGRFLWMGIGSACNYYNRVYGEFMRVWISGEETLIISKSSSMFHIMKHNHYSSRFGSKLGLQCIGMHEKGIIFNNNPELWKTTRPFFMKESAIVVKIQGYFDAWQALLIKPDIFFKISWLYKKYEKSVKDLKDAIEVLIAEKRRRISTEEKLEECMDFATELILAEKRGDLTRENVNQCILEMLIAAPDTMSVSLFFMLFLIAKHPNVEEAIIKEIQTVIGERDIKIDDIQKLKVMENFIYESMRYQPVVDLVMRKALEDDVIDGYPVKKGTNIILNIGRMHRLEFFPKPNEFTLENFAKNVPYRYFQPFGFGPRGCAGKYIAMVMMKAILVTLLRRFHVKTLQGQCVESIQKIHDLSLHPDETKNMLEMIFTPRNSDRCLEH

SEQ ID NO: 820591 - protein, 308 aa, Homo sapiens
FQSSGLLLNMMPLDKSAIVVKIQGYFDAWQALLIKPDIFFKISWLYKKYEKSVKDLKDAIEVLIAEKRRRISTEEKLEECMDFATELILAEKRGDLTRENVNQCILEMLIAAPDTMSVSLFFMLFLIAKHPNVEEAIIKEIQTVIGERDIKIDDIQKLKVMENFIYESMRYQPVVDLVMRKALEDDVIDGYPVKKGTNIILNIGRMHRLEFFPKPNEFTLENFAKNVPYRYFQPFGFGPRGCAGKYIAMVMMKAILVTLLRRFHVKTLQGQCVESIQKIHDLSLHPDETKNMLEMIFTPRNSDRCLEH

SEQ ID NO: 820592 - protein, 503 aa, Homo sapiens; identical to SEQ ID NO: 820570

SEQ ID NO: 820593 - protein, 503 aa, Homo sapiens; identical to SEQ ID NO: 820570

SEQ ID NO: 820594 - protein, 503 aa, Homo sapiens; identical to SEQ ID NO: 820570

SEQ ID NO: 820595 - protein, 503 aa, Homo sapiens; identical to SEQ ID NO: 820570

SEQ ID NO: 820596 - protein, 170 aa, Homo sapiens
LRMMKAILVTRSETIPREDIAKDSVLRAYRRYTTCPCNVFMRKALEDDVIDGYPVKKGTNIILNIGRMHRLEFFPKPNEFTLENFAKNVPYRYFQPFGFGPRGCAGKYIAMVMMKAILVTLLRRFHVKTLQGQCVESIQKIHDLSLHPDETKNMLEMIFTPRNSDRCLEH

SEQ ID NO: 820597 - protein, 503 aa, Homo sapiens; identical to SEQ ID NO: 820570

SEQ ID NO: 820598 - protein, 426 aa, Homo sapiens
MVLEMLNPIHYNITSIVPEAMPAATMPVLLLTGLFLLVWNYEGTSSIPGPGYCMGIGPLISHGRFLWMGIGSACNYYNRVYGEFMRVWISGEETLIISKSSSMFHIMKHNHYSSRFGSKLGLQCIGMHEKGIIFNNNPELWKTTRPFFMKALSGPGLVRMVTVCAESLKTHLDRLEEVTNESGYVDVLTLLRRVMLDTSNTLFLRIPLDESAIVVKIQGYFDAWQALLIKPDIFFKISWLYKKYEKSVKDLKDAIEVLIAEKRRRISTEEKLEECMDFATELILAEKRGDLTRENVNQCILEMLIAAPDTMSVSLFFMLFLIAKHPNVEEAIIKEIQTVIGERDIKIDDIQKLKVMENFIYESMRYQPVVDLVMRKALEDDVIDGYPVKKGTNIILNIGRMHRLEFFPKPNEFTLENFAKNVRALP

SEQ ID NO: 820599 - protein, 347 aa, Homo sapiens
MVLEMLNPIHYNITSIVPEAMPAATMPVLLLTGLFLLVWNYEGTSSIPGPGYCMGIGPLISHGRFLWMGIGSACNYYNRVYGEFMRVWISGEETLIISKSSSMFHIMKHNHYSSRFGSKLGLQCIGMHEKGIIFNNNPELWKTTRPFFMKALSGPGLVRMVTVCAESLKTHLDRLEEVTNESGYVDVLTLLRRVMLDTSNTLFLRIPLDESAIVVKIQGYFDAWQALLIKPDIFFKISWLYKKYEKSVKDLKDAIEVLIAEKRRRISTEEKLEECMDFATELILAEKRGDLTRENVNQCILEMLIAAPDTMSVSLFFMLFLIAKHPNVEEAIIKEIQTVIGKNLSNK

SEQ ID NO: 820600 - protein, 218 aa, Homo sapiens
MVLEMLNPIHYNITSIVPEAMPAATMPVLLLTGLFLLVWNYEGTSSIPGPGYCMGIGPLISHGRFLWMGIGSACNYYNRVYGEFMRVWISGEETLIISKSSSMFHIMKHNHYSSRFGSKLGLQCIGMHEKGIIFNNNPELWKTTRPFFMKALSGPGLVRMVTVCAESLKTHLDRLEEVTNESGYVDVLTLLRRVMLDTSNTLFLRIPLDGTEIFTLTS

SEQ ID NO: 820601 - protein, 218 aa, Homo sapiens; identical to SEQ ID NO: 820600

SEQ ID NO: 820602 - protein, 288 aa, Homo sapiens
MVLEMLNPIHYNITSIVPEAMPAATMPVLLLTGLFLLVWNYEGTSSIPGPGYCMGIGPLISHGRFLWMGIGSACNYYNRVYGEFMRVWISGEETLIISKSSSMFHIMKHNHYSSRFGSKLGLQCIGMHEKGIIFNNNPELWKTTRPFFMKESAIVVKIQGYFDAWQALLIKPDIFFKISWLYKKYEKSVKDLKDAIEVLIAEKRRRISTEEKLEECMDFATELILAEKRGDLTRENVNQCILEMLIAAPDTMSVSLFFMLFLIAKHPNVEEAIIKEIQTVIGKNLSNK

SEQ ID NO: 820603 - protein, 103 aa, Homo sapiens
MVLEMLNPIHYNITSIVPEAMPAATMPVLLLTGLFLLVWNYEGTSSIPGPGYCMGIGPLISHGRFLWMGIGSACNYYNRVYGEFMRVWISGEETLIISKRVCS

SEQ ID NO: 820604 - protein, 117 aa, Homo sapiens
MVLEMLNPIHYNITSIVPEAMPAATMPVLLLTGLFLLVWNYEGTSSIPGPGYCMGIGPPIYTPQQNYFEIVIDPEVKAKNDKSKRKQYFHDLGVGKDLLKRTQKTTNRRKNLKIASL

SEQ ID NO: 820605 - protein, 120 aa, Homo sapiens
TVLSTQSGHYGRGSFWRAEHVEANRKVKKNLSYQDGRSCARDLPDVAYVSLNLTEPSTCGIRHSFQVDSVGTELEDTQLVPAAWCVGENPLHLVAEVFCVDDCCRGVRAEGKHCLSVFLK

SEQ ID NO: 820606 - protein, 49 aa, Homo sapiens
MSKLSKNRQYFDFFSSKDLKDAIEVLIAEKRRRISTEEKLEECMDFATE

SEQ ID NO: 820607 - protein, 982 aa, Homo sapiens [sequence omitted]

SEQ ID NO: 820608 - protein, 770 aa, Homo sapiens
MANSMNGRNPGGRGGNPRKGRILGIIDAIQDAVGPPKQAAADRRTVEKTWKLMDKVVRLCQNPKLQLKNSPPYILDILPDTYQHLRLILSKYDDNQKLAQLSENEYFKIYIDSLMKKSKRAIRLFKEGKERMYEEQSQDRRNLTKLSLIFSHMLAEIKAIFPNGQFQGDNFRITKADAAEFWRKFFGDKTIVPWKVFRQCLHEVHQISSSLEAMALKSTIDLTCNDYISVFEFDIFTRLFQPWGSILRNWNFLAVTHPGYMAFLTYDEVKARLQKYSTKPGSYIFRLSCTRLGQWAIGYVTGDGNILQTIPHNKPLFQALIDGSREGFYLYPDGRSYNPDLTGLCEPTPHDHIKVTQEQYELYCEMGSTFQLCKICAENDKDVKIEPCGHLMCTSCLTAWQESDGQGCPFCRCEIKGTEPIIVDPFDPRDEGSRCCSIIDPFGMPMLDLDDDDDREESLMMNRLANVRKCTDRQNSPVTSPGSSPLAQRRKPQPDPLQIPHLSLPPVPPRLDLIQKGIVRSPCGSPTGSPKSSPCMVRKQDKPLPAPPPPLRDPPPPPPERPPPIPPDNRLSRHIHHVESVPSRDPPMPLEAWCPRDVFGTNQLVGCRLLGEGSPKPGITASSNVNGRHSRVGSDPVLMRKHRRHDLPLEGAKVFSNGHLGSEEYDVPPRLSPPPPVTTLLPSIKCTGPLANSLSEKTRDPVEEDDDEYKIPSSHPVSLNSQPSHCHNVKPPVRSCDNGHCMLNGTHGPSSEKKSNIPDLSIYLKGTYRI

SEQ ID NO: 820609 - protein, 810 aa, Homo sapiens [sequence omitted]

SEQ ID NO: 820610 - protein, 982 aa, Homo sapiens [sequence omitted]

SEQ ID NO: 820611 - protein, 1012 aa, Homo sapiens
LNATARTAYYLNRARGKSVCAFVLTKLKFQMANSMNGRNPGGRGGNPRKGRILGIIDAIQDAVGPPKQAAADRRTVEKTWKLMDKVVRLCQNPKLQLKNSPPYILDILPDTYQHLRLILSKYDDNQKLAQLSENEYFKIYIDSLMKKSKRAIRLFKEGKERMYEEQSQDRRNLTKLSLIFSHMLAEIKAIFPNGQFQGDNFRITKADAAEFWRKFFGDKTIVPWKVFRQCLHEVHQISSSLEAMALKSTIDLTCNDYISVFEFDIFTRLFQPWGSILRNWNFLAVTHPGYMAFLTYDEVKARLQKYSTKPGSYIFRLSCTRLGQWAIGYVTGDGNILQTIPHNKPLFQALIDGSREGFYLYPDGRSYNPDLTGLCEPTPHDHIKVTQEQYELYCEMGSTFQLCKICAENDKDVKIEPCGHLMCTSCLTAWQESDGQGCPFCRCEIKGTEPIIVDPFDPRDEGSRCCSIIDPFGMPMLDLDDDDDREESLMMNRLANVRKCTDRQNSPVTSPGSSPLAQRRKPQPDPLQIPHLSLPPVPPRLDLIQKGIVRSPCGSPTGSPKSSPCMVRKQDKPLPAPPPPLRDPPPPPPERPPPIPPDNRLSRHIHHVESVPSRDPPMPLEAWCPRDVFGTNQLVGCRLLGEGSPKPGITASSNVNGRHSRVGSDPVLMRKHRRHDLPLEGAKVFSNGHLGSEEYDVPPRLSPPPPVTTLLPSIKCTGPLANSLSEKTRDPVEEDDDEYKIPSSHPVSLNSQPSHCHNVKPPVRSCDNGHCMLNGTHGPSSEKKSNIPDLSIYLKGDVFDSASDPVPLPPARPPTRDNPKHGSSLNRTPSDYDLLIPPLGEDAFDALPPSLPPPPPPARHSLIEHSKPPGSSSRPSSGQDLFLLPSDPFVDLASGQVPLPPARRLPGENVKTNRTSQDYDQLPSCSDGSQAPARPPKPRPRRTAPEIHHRKPHGPEAALENVDAKIAKLMGEGYAFEEVKRALEIAQNNVEVARSILREFAFPPPVSPRLNL

SEQ ID NO: 820612 - protein, 938 aa, Homo sapiens
MANSMNGRNPGGRGGNPRKGRILGIIDAIQDAVGPPKQAAADRRTVEKTWKLMDKVVRLCQNPKLQLKNSPPYILDILPDTYQHLRLILSKYDDNQKLAQLSENEYFKIYIDSLMKKSKRAIRLFKEGKERMYEEQSQDRRNLTKLSLIFSHMLAEIKAIFPNGQFQGDNFRITKADAAEFWRKFFGDKTIVPWKVFRQCLHEVHQISSSLEAMALKSTIDLTCNDYISVFEFDIFTRLFQPWGSILRNWNFLAVTHPGYMAFLTYDEVKARLQKYSTKPGSYIFRLSCTRLGQWAIGYVTGDGNILQTIPHNKPLFQALIDGSREGFYLYPDGRSYNPDLTGLCEPTPHDHIKVTQEQYELYCEMGSTFQLCKICAENDKDVKIEPCGHLMCTSCLTAWQESDGQGCPFCRCEIKGTEPIIVDPFDPRDEGSRCCSIIDPFGMPMLDLDDDDDREESLMMNRLANVRKCTDRQNSPVTSPGSSPLAQRRKPQPDPLQIPHLSLPPVPPRLDLIQKGIVRSPCGSPTGSPKSSPCMVRKQDKPLPAPPPPLRDPPPPPPERPPPIPPDNRLSRHIHHVESVPSRDPPMPLEAWCPRDVFGTNQLVGCRLLGEGSPKPGITASSNVNGRHSRVGSDPVLMRKHRRHDLPLEGAKVFSNGHLGSEEYDVPPRLSPPPPVTTLLPSIKCTGPLANSLSEKTRDPVEEDDDEYKIPSSHPVSLNSQPSHCHNVKPPVRSCDNGHCMLNGTHGPSSEKKSNIPDLSIYLKGEDAFDALPPSLPPPPPPARHSLIEHSKPPGSSSRPSSGQDLFLLPSDPFVDLASGQVPLPPARRLPGENVKTNRTSQDYDQLPSCSDGSQAPARPPKPRPRRTAPEIHHRKPHGPEAALENVDAKIAKLMGEGYAFEEVKRALEIAQNNVEVARSILREFAFPPPVSPRLNL

SEQ ID NO: 820613 - protein, 241 aa, Homo sapiens [sequence omitted]

SEQ ID NO: 820614 - protein, 222 aa, Homo sapiens
MLLLRTAYYLNRARGKSVCAFVLTKLKFQMANSMNGRNPGGRGGNPRKGRILGIIDAIQDAVGPPKQAAADRRTVEKTWKLMDKVVRLCQNPKLQLKNSPPYILDILPDTYQHLRLILSKYDDNQKLAQLSENEYFKIYIDSLMKKSKRAIRLFKEGKERMYEEQSQDRRNLTKLSLIFSHMLAEIKAIFPNGQFQGDNFRITKADAAEFWRKFFGDKPPGL

SEQ ID NO: 820615 - protein, 226 aa, Homo sapiens
MLLLRTAYYLNRARGKSVCAFVLTKLKFQMANSMNGRNPGGRGGNPRKGRILGIIDAIQDAVGPPKQAAADRRTVEKTWKLMDKVVRLCQNPKLQLKNSPPYILDILPDTYQHLRLILSKYDDNQKLAQLSENEYFKIYIDSLMKKSKRAIRLFKEGKERMYEEQSQDRRNLTKLSLIFSHMLAEIKAIFPNGQFQGDNFRITKADAAEFWRKFFGDKHFPHCLGD

SEQ ID NO: 820616 - protein, 141 aa, Homo sapiens
STSALAWAWLLNPSLEFTTPSAPPRPTALTQPPQPESPEFDFLTMNQKMLKPHRTPPAPVTEEMLQRCKYSHMEPPLGGLRFFSTQYKDEFPFKYQGPAALRLKNPQEGFVPLGTPHQRGCREKIDPLVPQPPMYLCPSQQ

SEQ ID NO: 820617 - protein, 125 aa, Homo sapiens
SQSYSNASSRPPWARTTALQSGEFDFLTMNQKMLKPHRTPPAPVTEEMLQRCKYSHMEPPLGGLRFFSTQYKDEFPFKYQGPAALRLKNPQEGFVPLGTPHQRGCREKIDPLVPQPPMYLCPSQQ

SEQ ID NO: 820618 - protein, 625 aa, Homo sapiens
GSAWRGRWAEGAAGGAGGRGASCGPGGSRRPARARRAGQGRGAPGLAPEAAGTSTPEMRRSVLVRNPGHKGLRPVYEELDSDSEDLDPNPEDLDPVSEDPEPDPEDLNTVPEDVDPSYEDLEPVSEDLDPDAEAPGSEPQDPDPMSSSFDLDPDVIGPVPLILDPNSDTLSPGDPKVDPISSGLTATPQVLATSPAVLPAPASPPRPFSCPDCGRAFRRSSGLSQHRRTHSGEKPYRCPDCGKSFSHGATLAQHRGIHTGARPYQCAACGKAFGWRSTLLKHRSSHSGEKPHHCPVCGKAFGHGSLLAQHLRTHGGPRPHKCPVCAKGFGQGSALLKHLRTHTGERPYPCPQCGKAFGQSSALLQHQRTHTAERPYRCPHCGKAFGQSSNLQHHLRIHTGERPYACPHCSKAFGQSSALLQHLHVHSGERPYRCQLCGKAFGQASSLTKHKRVHEGAAAAAAAAAAAAAAAAAGLGLGPGLSPASMMRPGQVSLLGPDAVSVLGSGLGLSPGTSSGRNPDPGSGPGTLPDPSSKPLPGSRSTPSPTPVESSDPKAGHDAGPDLVPSPDLDPVPSPDPDPVPSPDPNPVSCPDPCSPTRGTVSPALPTGESPEWVQEQGALLGPDG

SEQ ID NO: 820619 - protein, 534 aa, Homo sapiens
NEIRARYEARVFAEDLNTVPEDVDPSYEDLEPVSEDLDPDAEAPGSEPQDPDPMSSSFDLDPDVIGPVPLILDPNSDTLSPGDPKVDPISSGLTATPQVLATSPAVLPAPASPPRPFSCPDCGRAFRRSSGLSQHRRTHSGEKPYRCPDCGKSFSHGATLAQHRGIHTGARPYQCAACGKAFGWRSTLLKHRSSHSGEKPHHCPVCGKAFGHGSLLAQHLRTHGGPRPHKCPVCAKGFGQGSALLKHLRTHTGERPYPCPQCGKAFGQSSALLQHQRTHTAERPYRCPHCGKAFGQSSNLQHHLRIHTGERPYACPHCSKAFGQSSALLQHLHVHSGERPYRCQLCGKAFGQASSLTKHKRVHEGAAAAAAAAAAAAAAAAAGLGLGPGLSPASMMRPGQVSLLGPDAVSVLGSGLGLSPGTSSGRNPDPGSGPGTLPDPSSKPLPGSRSTPSPTPVESSDPKAGHDAGPDLVPSPDLDPVPSPDPDPVPSPDPNPVSCPDPCSPTRGTVSPALPTGESPEWVQEQGALLGPDG

SEQ ID NO: 820620 - protein, 625 aa, Homo sapiens; identical to SEQ ID NO: 820618

SEQ ID NO: 820621 - protein, 617 aa, Homo sapiens
GSAWRGRWAEGAAGGAGGRGASCGPGGSRRPARARRAGQGRGAPGLAPEAAGTSTPEMRRSVLVRNPGHKGLRPVYEELDSDSEDLDPNPEDLDPVSEDPEPDPEDLNTVPEDVDPSYEDLEPVSEDLDPDAEAPGSEPQDPDPMSSSFDLDPDVIGPVPLILDPNSDTLSPGDPKVDPISSGLTATPQVLATSPAVLPAPASPPRPFSCPDCGRAFRRSSGLSQHRRTHSGEKPYRCPDCGKSFSHGATLAQHRGIHTGARPYQCAACGKAFGWRSTLLKHRSSHSGEKPHHCPVCGKAFGHGSLLAQHLRTHGGPRPHKCPVCAKGFGQGSALLKHLRTHTGERPYPCPQCGKAFGQSSALLQHQRTHTAERPYRCPHCGKAFGQSSNLQHHLRIHTGERPYACPHCSKAFGQSSALLQHLHVHSGERPYRCQLCGKAFGQASSLTKHKRVHEGAAAAAAAAAAAAAAAAAGLGLGPGLSPASMMRPGQVSLLGPDAVSVLGSGLGLSPGTSSGRNPDPGSGPGTLPDPSSKPLPGSRSTPSPTPVESSDPKAGHDAGPDLVPSPDPDPVPSPDPNPVSCPDPCSPTRGTVSPALPTGESPEWVQEQGALLGPDG

SEQ ID NO: 820622 - protein, 305 aa, Homo sapiens
  misc_feature (6)..(6): Xaa can be any naturally occurring amino acid
  misc_feature (19)..(19): Xaa can be any naturally occurring amino acid
  misc_feature (31)..(31): Xaa can be any naturally occurring amino acid
LLKHLXRTRRKGPRGGPPXKTPGCYPPGPPXGCGKAFGQSSALLQHQRTHTAERPYRCPHCGKAFGQSSNLQHHLRIHTGERPYACPHCSKAFGQSSALLQHLHVHSGERPYRCQLCGKAFGQASSLTKHKRVHEGAAAAAAAAAAAAAAAAAGLGLGPGLSPASMMRPGQVSLLGPDAVSVLGSGLGLSPGTSSGRNPDPGSGPGTLPDPSSKPLPGSRSTPSPTPVESSDPKAGHDAGPDLVPSPDLDPVPSPDPDPVPSPDPNPVSCPDPCSPTRGTVSPALPTGESPEWVQEQGALLGPDG

SEQ ID NO: 820623 - protein, 200 aa, Homo sapiens
GSAWRGRWAEGAAGGAGGRGASCGPGGSRRPARARRAGQGRGAPGLAPEAAGTSTPEMRRSVLVRNPGHKGLRPVYEELDSDSEDLDPNPEDLDPVSEDPEPDPEDLNTVPEDVDPSYEDLEPVSEDLDPDAEAPGSEPQDPDPMSSSFDLDPDVIGPVPLILDPNSDTLSPGDPKVDPISSGLTATPQVLPQPYSCGIF

SEQ ID NO: 820624 - protein, 261 aa, Homo sapiens
EPKLLKRFFKTTMGSDYCPSEWRQVQKAPNLHLQQSNLPRGTGEFDFLTMNQKMLKPHRTPPAPVTEEMLQRVIIPKLVKTVTDAKKQTSTKTSSNTQNICWFVVQERMSSVASGLAPEAAGTSTPEMRRSVLVRNPGHKGLRPVYEELDSDSEDLDPNPEDLDPVSEDPEPDPEDLNTVPEDVDPSYEDLEPVSEDLDPDAEAPGSEPQDPDPMSSSFDLDPDVIGPVPLILDPNSDTLSPGDPKVDPISSGLHMAQKRE

SEQ ID NO: 820625 - protein, 146 aa, Homo sapiens
EPKLLKRFFKTTMGSDYCPSEWRQVQKAPNLHLQQSNLPRGTGEFDFLTMNQKMLKPHRTPPAPVTEEMLQRCKYSHMEPPLGGLRFFSTQYKDEFPFKYQGPAALRLKNPQEGFVPLGTPHQRGCREKIDPLVPQPPMYLCPSQQ

SEQ ID NO: 820626 - protein, 394 aa, Homo sapiens
MNTNSKEVLSLGVQVPEAWEELLTMKVEAKSHLQWQESRLKRSNPLAREIFRRHFRQLCYQETPGPREALTRLQELCYQWLRPHVSTKEQILDLLVLEQFLSILPKELQGWVREHCPESGEEAVILLEDLERELDEPQHEMVAHRHRQEVLCKEMVPLAEQTPLTLQSQPKEPQLTCDSAQKCHSIGETDEVTKTEDRELVLRKDCPKIVEPHGKMFNEQTWEVSQQDPSHGEVGEHKDRIERQWGNLLGEGQHKCDECGKSFTQSSGLIRHQRIHTGERPYECNECGKAFSRSSGLFNHRGIHNIQKRYHCKECGKVFSQSAGLIQHQRIHKGEKPYQCSQCSKSYSRRSFLIEHQRSHTGERPHQCIECGKSFNRHCNLIRHQKIHTVAELV

SEQ ID NO: 820627 - protein, 224 aa, Homo sapiens
MNTNSKEVLSLGVQVPEAWEELLTMKVEAKSHLQWQESRLKRSNPLAREIFRRHFRQLCYQETPGPREALTRLQELCYQWLRPHVSTKEQILDLLVLEQFLSILPKELQGWVREHCPESGEEAVILLEDLERELDEPQHEMVAHRHRQEVLCKEMVPLAEQTPLTLQSQPKEPQLTCDSAQKCHSIGETGEGQHLFDVERIPPGQAKTNNKPRAGKTGDPKTPY

SEQ ID NO: 820628 - protein, 227 aa, Homo sapiens
MNTNSKEVLSLGVQVPEAWEELLTMKVEAKSHLQWQESRLKRSNPLAREIFRRHFRQLCYQETPGPREALTRLQELCYQWLRPHVSTKEQILDLLVLEQFLSILPKELQGWVREHCPESGEEAVILLEDLERELDEPQHEMVAHRHRQEVLCKEMVPLAEQTPLTLQSQPKEPQLTCDSAQKCHSIGETDFSLSTTLEAFWTSDAWYMRKAFRDRCGAQLQRMDFKV

SEQ ID NO: 820629 - protein, 215 aa, Homo sapiens
CLCSVRLRGEVGIFVPCPAIVRAALLATPGRQAPPRFVLKHSSSWRVPFKLFKVKMNTNSKEVLSLGVQVPEAWEELLTMKVEAKSHLQWQESRLKRSNPLAREIFRRHFRQLCYQETPGPREALTRLQELCYQWLRPHVSTKEQILDLLVLEQFLSILPKELQGWVREHCPESGEEAVILLEDLERELDEPQHESNLVFLSPDGGPQTQTRSPL

SEQ ID NO: 820630 - protein, 423 aa, Homo sapiens
MNTNSKEVLSLGVQVPEAWEELLTMKVEAKSHLQWQESRLKRSNPLAREIFRRHFRQLCYQETPGPREALTRLQELCYQWLRPHVSTKEQILDLLVLEQFLSILPKELQGWVREHCPESGEEAVILLEDLERELDEPQHEMVAHRHRQEVLCKEMVPLAEQTPLTLQSQPKEPQLTCDSAQKCHSIGETDTFLFSKPVVIPQLKGGGETWPNNRGVLRDEVTKTEDRELVLRKDCPKIVEPHGKMFNEQTWEVSQQDPSHGEVGEHKDRIERQWGNLLGEGQHKCDECGKSFTQSSGLIRHQRIHTGERPYECNECGKAFSRSSGLFNHRGIHNIQKRYHCKECGKVFSQSAGLIQHQRIHKGEKPYQCSQCSKSYSRRSFLIEHQRSHTGERPHQCIECGKSFNRHCNLIRHQKIHTVAELV

SEQ ID NO: 820631 - protein, 449 aa, Homo sapiens
CLCSVRLRGEVGIFVPCPAIVRAALLATPGRQAPPRFVLKHSSSWRVPFKLFKVKMNTNSKEVLSLGVQVPEAWEELLTMKVEAKSHLQWQESRLKRSNPLAREIFRRHFRQLCYQETPGPREALTRLQELCYQWLRPHVSTKEQILDLLVLEQFLSILPKELQGWVREHCPESGEEAVILLEDLERELDEPQHEMVAHRHRQEVLCKEMVPLAEQTPLTLQSQPKEPQLTCDSAQKCHSIGETDEVTKTEDRELVLRKDCPKIVEPHGKMFNEQTWEVSQQDPSHGEVGEHKDRIERQWGNLLGEGQHKCDECGKSFTQSSGLIRHQRIHTGERPYECNECGKAFSRSSGLFNHRGIHNIQKRYHCKECGKVFSQSAGLIQHQRIHKGEKPYQCSQCSKSYSRRSFLIEHQRSHTGERPHQCIECGKSFNRHCNLIRHQKIHTVAELV

SEQ ID NO: 820632 - protein, 179 aa, Homo sapiens [sequence omitted]

SEQ ID NO: 820633 - protein, 253 aa, Homo sapiens
MNTNSKEVLSLGVQVPEAWEELLTMKVEAKSHLQWQESRLKRSNPLAREIFRRHFRQLCYQETPGPREALTRLQELCYQWLRPHVSTKEQILDLLVLEQFLSILPKELQGWVREHCPESGEEAVILLEDLERELDEPQHEMVAHRHRQEVLCKEMVPLAEQTPLTLQSQPKEPQLTCDSAQKCHSIGETDEVTKTEDRELVLRKDCPKIVEPHGKMFNEQTGLGLGYEQVFQITTQVVWGRLRLENASFFLSP

SEQ ID NO: 820634 - protein, 75 aa, Homo sapiens
MSKSESPKEPEQLRKLFIGGLSFETTEQTNARIRTRNESPLSERADIPVEETENEFYMSKIHSALDGVDAKEKET

SEQ ID NO: 820635 - protein, 320 aa, Homo sapiens
MSKSESPKEPEQLRKLFIGGLSFETTDESLRSHFEQWGTLTDCVVMRDPNTKRSRGFGFVTYATVEEVDAAMNARPHKVDGRVVEPKRAVSREDSQRPGAHLTVKKIFVGGIKEDTEEHHLRDYFEQYGKIEVIEIMTDRGSGKKRGFAFVTFDDHDSVDKIVIQKYHTVNGHNCEVRKALSKQEMASASSSQRGRSGSGNFGGGRGGGFGGNDNFGRGGNFSGRGGFGGSRGGGGYGGSGDGYNGFGNDGSNFGGGGSYNDFGNYNNQSSNFGPMKGGNFGGRSSGPYGGGGQYFAKPRNQGGYGGSSSSSSYGSGRRF

SEQ ID NO: 820636 - protein, 320 aa, Homo sapiens; identical to SEQ ID NO: 820635

SEQ ID NO: 820637 - protein, 298 aa, Homo sapiens
MTSLTQRSSGLVQRRTEASRNAADKERAAGGGAGSSEDDAQSRRDEQDDDDKGDSKETRLTLMEEVLLLGLKDREGYTSFWNDCISSGLRGCMLIELALRGRLQLEACGMRRKSLLTRKVICKSDAPTGDVLLDEALKHVKETQPPETVQNWIELLSGETWNPLKLHYQLRNVRERLAKNLVEKGVLTTEKQNFLLFDMTTHPLTNNNIKQRLIKKVQEAVLDKWVNDPHRMDRRLLALIYLAHASDVLENAFAPLLDEQYDLATKRVRQLLDLDPEVECLKANTNEVLWAVVAAFTK

SEQ ID NO: 820638 - protein, 298 aa, Homo sapiens; identical to SEQ ID NO: 820637

SEQ ID NO: 820639 - protein, 384 aa, Homo sapiens
VSRGRHIGKAPPPPPPWSSGCFGDCGHRQEGAPLLPRRRPASPLRPDLFPHDCPRPCCRRTSPRRPDLTRKPGSEAARGGGGRPGRSCDPLGPARRLGGSHDLADPAQLRPGAAAHRGLPQRRRQGAGGGDEQDDDDKGDSKETRLTLMEEVLLLGLKDREGYTSFWNDCISSGLRGCMLIELALRGRLQLEACGMRRKSLLTRKVICKSDAPTGDVLLDEALKHVKETQPPETVQNWIELLSGETWNPLKLHYQLRNVRERLAKNLVEKGVLTTEKQNFLLFDMTTHPLTNNNIKQRLIKKVQEAVLDKWVNDPHRMDRRLLALIYLAHASDVLENAFAPLLDEQYDLATKRVRQLLDLDPEVECLKANTNEVLWAVVAAFTK

SEQ ID NO: 820640 - protein, 280 aa, Homo sapiens
MTSLTQRSSGLVQRRTEASRNAADKERAAGGGAGSSEDDAQSRRDEQDDDDKGDSKETRLTLMEEVLLLGLKDREGYTSFWNDCISSGLRGCMLIELALRGRLQLEACGMRRKSLLTRKVICKSDAPTGDVLLDEALKHVKETQPPETVQNWIELLSGETWNPLKLHYQLRNVRERLAKNLVEHPLTNNNIKQRLIKKVQEAVLDKWVNDPHRMDRRLLALIYLAHASDVLENAFAPLLDEQYDLATKRVRQLLDLDPEVECLKANTNEVLWAVVAAFTK

SEQ ID NO: 820641 - protein, 298 aa, Homo sapiens; identical to SEQ ID NO: 820637

SEQ ID NO: 820642 - protein, 298 aa, Homo sapiens; identical to SEQ ID NO: 820637

SEQ ID NO: 820643 - protein, 298 aa, Homo sapiens; identical to SEQ ID NO: 820637

SEQ ID NO: 820644 - protein, 254 aa, Homo sapiens
MTSLTQRSSGLVQRRTEASRNAADKERAAGGGAGSSEDDAQSRRDEQDDDDKGDSKETRLTLMEEVLLLGLKDREVICKSDAPTGDVLLDEALKHVKETQPPETVQNWIELLSGETWNPLKLHYQLRNVRERLAKNLVEKGVLTTEKQNFLLFDMTTHPLTNNNIKQRLIKKVQEAVLDKWVNDPHRMDRRLLALIYLAHASDVLENAFAPLLDEQYDLATKRVRQLLDLDPEVECLKANTNEVLWAVVAAFTK

SEQ ID NO: 820645 - protein, 182 aa, Homo sapiens
MSTSSSSSWDNLLESLSLSTVWNWIQASFLGETSAPQQTSLGLLDNLAPAVQIILRISFLILLGIGIYALWKRSIQSIQKTLLFVITLYKLYKKGSHIFEALLANPEGSGLRIQDNNNLFLSLGLQEKILKKLKTVENKMKNLEGIIVAQKPATKRDCSSEPYCSCSDCQSPLSTSGFTSPI

SEQ ID NO: 820646 - protein, 182 aa, Homo sapiens; identical to SEQ ID NO: 820645

SEQ ID NO: 820647 - protein, 176 aa, Homo sapiens
MSAGGASVPPPPNPAVSFPPPRVTLPAGPDILRTYSGAFVCLEILFGGLVWILVASSNVPLPLLQGWVMFVSVTAFFFSLLFLGMFLSGMVAQIDANWNFLDFAYHFTVFVFYFGAFLLEAAATSLHDLHCNTTITGQPLLSDNQYNINVAASIFAFMTTACYGCSLGLALRRWRP

SEQ ID NO: 820648 - protein, 176 aa, Homo sapiens; identical to SEQ ID NO: 820647

SEQ ID NO: 820649 - protein, 159 aa, Homo sapiens
MSAGGASVPPPPNPAVSFPPPRVTLPAGPDILRTYSGAFVCLEILFGGLVWILVASSNVPLPLLQGWVMFVSVTAFFFSLLFLGMFLSGMVAQIDANWNFLDFAYHFTVFVFYFGAFLLEAAATSLHDLHCNTTITGQPLLSDNQYNINVAASVSIHIQ

SEQ ID NO: 820650 - protein, 108 aa, Homo sapiens
MFVSVTAFFFSLLFLGMFLSGMVAQIDANWNFLDFAYHFTVFVFYFGAFLLEAAATSLHDLHCNTTITGQPLLSDNQYNINVAASIFAFMTTACYGCSLGLALRRWRP

SEQ ID NO: 820651 - protein, 176 aa, Homo sapiens; identical to SEQ ID NO: 820647

SEQ ID NO: 820652 - protein, 1218 aa, Homo sapiens
MWWSLSSLFLPTEVVLSQGYALLHFHSCSEINSSLAAREENVATFRGSEYLCYDLSQNPIQSSSDEITLSFKTWQRNGLILHTGKSADYVNLALKDGAVSLVINLGSGAFEAIVEPVNGKFNDNAWHDVKVTRNLRQVTISVDGILTTTGYTQEDYTMLGSDDFFYVGGSPSTADLPGSPVSNNFMGCLKEVVYKNNDIRLELSRLARIADTKMKIYGEVVFKCENVATLDPINFETPEAYISLPKWNTKRMGSISFDFRTTEPNGLILFTHGKPQERKDARSQKNTKVDFFAVELLDGNLYLLLDMGSGTIKVKATQKKANDGEWYHVDIQRDGRSGTISVNSRRTPFTASGESEILDLEGDMYLGGLPENRAGLILPTELWTAMLNYGYVGCIRDLFIDGRSKNIRQLAEMQNAAGVKSSCSRMSAKQCDSYPCKNNAVCKDGWNRFICDCTGTGYWGRTCEREASILSYDGSMYMKIIMPMVMHTEAEDVSFRFMSQRAYGLLVATTSRDSADTLRLELDGGRVKLMVNLDCIRINCNSSKGPETLYAGQKLNDNEWHTVRVVRRGKSLKLTVDDDVAEGTMVGDHTRLEFHNIETGIMTEKRYISVVPSSFIGHLQSLMFNGLLYIDLCKNGDIDYCELKARFGLRNIIADPVTFKTKSSYLSLATLQAYTSMHLFFQFKTTSPDGFILFNSGDGNDFIAVELVKGYIHYVFDLGNGPNVIKGNSDRPLNDNQWHNVVITRDNSNTHSLKVDTKVVTQVINGAKNLDLKGDLYMAGLAQGMYSNLPKLVASRDGFQGCLASVDLNGRLPDLINDALHRSGQIKRGCEGPSTTCQEDSCANQGVCMQQWEGFTCDCSMTSYSGNQCNDPGATYIFGKSGGLILYTWPANDRPSTRSDRLAVGFSTTVKDGILVRIDSAPGLGDFLQLHIEQGKIGVVFNIGTVDISIKEERTPVNDGKYHVVRFTRNGGNATLQVDNWPVNEHYPTGRQLTIFNTQAQIAIGGKDKGRLFQGQLSGLYYDGLKVLNMAAENNPNIKINGSVRLVGEVPSILGTTQTTSMPPEMSTTVMETTTTMATTTTRKNRSTASIQPTSDDLVSSAECSSDDEDFVECEPSTANPTEPGIRRVPGASEVIRESSSTTGMVVGIVAAAALCILILLYAMYKYRNRDEGSYQVDETRNYISNSAQSNGTLMKEKQQSSKSGHKKQKNKDREYYV

SEQ ID NO: 820653 - protein, 477 aa, Homo sapiens
MFIHWPVVRLQEMALPPFQMVKQKIPFKYNRPVEEWLQEKGRQLTIFNTQAQIAIGGKDKGRLFQGQLSGLYYDGLKVLNMAAENNPNIKINGSVRLVGEVPSILGTTQTTSMPPEMSTTVMETTTTMATTTTRKNRSTASIQPTSDDLVSSAECSSDDEDFVECEPSTGGELVIPLLVEDPLATPPIATRAPSITLPPTFRPLLTIIETTKDSLSMTSEAGLPCLSDQGSDGCDDDGLVISGYGSGETFDSNLPPTDDEDFYTTFSLVTDKSLSTSIFEGGYKAHAPKWESKDFRPNKVSETSRTTTTSLSPELIRFTASSSSGMVPKLPAGKMNNRDLKPQPDIVLLPLPTAYELDSTKLKSPLITSPMFRNVPTANPTEPGIRRVPGASEVIRESSSTTGMVVGIVAAAALCILILLYAMYKYRNRDEGSYQVDETRNYISNSAQSNGTLMKEKQQSSKSGHKKQKNKDREYYV

SEQ ID NO: 820654 - protein, 261 aa, Homo sapiens
MTSEAGLPCLSDQGSDGCDDDGLVISGYGSGETFDSNLPPTDDEDFYTTFSLVTDKSLSTSIFEGGYKAHAPKWESKDFRPNKVSETSRTTTTSLSPELIRFTASSSSGMVPKLPAGKMNNRDLKPQPDIVLLPLPTAYELDSTKLKSPLITSPMFRNVPTANPTEPGIRRVPGASEVIRESSSTTGMVVGIVAAAALCILILLYAMYKYRNRDEGSYQVDETRNYISNSAQSNGTLMKEKQQSSKSGHKKQKNKDREYYV

SEQ ID NO: 820655 - protein, 549 aa, Homo sapiens
RRGAARSWRGRSEQISRALAARRSPARPPPGAASRGVSRARARVAAVPASGSRSRRRPSAAERTPSPSAAAMATTVTCTRFTDEYQLYEDIGKGAFSVVRRCVKLCTGHEYAAKIINTKKLSARDHQKLEREARICRLLKHSNIVRLHDSISEEGFHYLVFDLVTGGELFEDIVAREYYSEADASHCIQQILEAVLHCHQMGVVHRDLKPENLLLASKCKGAAVKLADFGLAIEVQGDQQAWFGFAGTPGYLSPEVLRKEAYGKPVDIWACGVILYILLVGYPPFWDEDQHKLYQQIKAGAYDFPSPEWDTVTPEAKNLINQMLTINPAKRITAHEALKHPWVCQRSTVASMMHRQETVECLKKFNARRKLKGAILTTMLATRNFSAKSLLNKKADGVKESSDSANTTIEDEDAKARKQEIIKTTEQLIEAVNNGDFEAYAKICDPGLTSFEPEALGNLVEGMDFHRFYFENLLAKNSKPIHTTILNPHVHVIGEDAACIAYIRLTQYIDGQGRPRTSQSEETRVWHRRDGKWQNVHFHCSGAPVAPLQ

SEQ ID NO: 820656 - protein, 613 aa, Homo sapiens
RRGAARSWRGRSEQISRALAARRSPARPPPGAASRGVSRARARVAAVPASGSRSRRRPSAAERTPSPSAAAMATTVTCTRFTDEYQLYEDIGKGAFSVVRRCVKLCTGHEYAAKIINTKKLSARDHQKLEREARICRLLKHSNIVRLHDSISEEGFHYLVFDLVTGGELFEDIVAREYYSEADASHCIQQILEAVLHCHQMGVVHRDLKPENLLLASKCKGAAVKLADFGLAIEVQGDQQAWFGFAGTPGYLSPEVLRKEAYGKPVDIWACGVILYILLVGYPPFWDEDQHKLYQQIKAGAYDFPSPEWDTVTPEAKNLINQMLTINPAKRITAHEALKHPWVCQRSTVASMMHRQETVECLKKFNARRKLKGAILTTMLATRNFSVGRQTTAPATMSTAASGTTMGLVEQAKSLLNKKADGVKPQTNSTKNSAAATSPKGTLPPAALEPQTTVIHNPVDGIKESSDSANTTIEDEDAKARKQEIIKTTEQLIEAVNNGDFEAYAKICDPGLTSFEPEALGNLVEGMDFHRFYFENLLAKNSKPIHTTILNPHVHVIGEDAACIAYIRLTQYIDGQGRPRTSQSEETRVWHRRDGKWQNVHFHCSGAPVAPLQ

SEQ ID NO: 820657 - protein, 588 aa, Homo sapiens
RRGAARSWRGRSEQISRALAARRSPARPPPGAASRGVSRARARVAAVPASGSRSRRRPSAAERTPSPSAAAMATTVTCTRFTDEYQLYEDIGKGAFSVVRRCVKLCTGHEYAAKIINTKKLSARDHQKLEREARICRLLKHSNIVRLHDSISEEGFHYLVFDLVTGGELFEDIVAREYYSEADASHCIQQILEAVLHCHQMGVVHRDLKPENLLLASKCKGAAVKLADFGLAIEVQGDQQAWFGFAGTPGYLSPEVLRKEAYGKPVDIWACGVILYILLVGYPPFWDEDQHKLYQQIKAGAYDFPSPEWDTVTPEAKNLINQMLTINPAKRITAHEALKHPWVCQRSTVASMMHRQETVECLKKFNARRKLKGAILTTMLATRNFSAKSLLNKKADGVKPQTNSTKNSAAATSPKGTLPPAALEPQTTVIHNPVDGIKESSDSANTTIEDEDAKARKQEIIKTTEQLIEAVNNGDFEAYAKICDPGLTSFEPEALGNLVEGMDFHRFYFENLLAKNSKPIHTTILNPHVHVIGEDAACIAYIRLTQYIDGQGRPRTSQSEETRVWHRRDGKWQNVHFHCSGAPVAPLQ

SEQ ID NO: 820658 - protein, 573 aa, Homo sapiens
RRGAARSWRGRSEQISRALAARRSPARPPPGAASRGVSRARARVAAVPASGSRSRRRPSAAERTPSPSAAAMATTVTCTRFTDEYQLYEDIGKGAFSVVRRCVKLCTGHEYAAKIINTKKLSARDHQKLEREARICRLLKHSNIVRLHDSISEEGFHYLVFDLVTGGELFEDIVAREYYSEADASHCIQQILEAVLHCHQMGVVHRDLKPENLLLASKCKGAAVKLADFGLAIEVQGDQQAWFGFAGTPGYLSPEVLRKEAYGKPVDIWACGVILYILLVGYPPFWDEDQHKLYQQIKAGAYDFPSPEWDTVTPEAKNLINQMLTINPAKRITAHEALKHPWVCQRSTVASMMHRQETVECLKKFNARRKLKGAILTTMLATRNFSAKSLLNKKADGVKPQTNSTKNSAAATSPKGTLPPAALESSDSANTTIEDEDAKARKQEIIKTTEQLIEAVNNGDFEAYAKICDPGLTSFEPEALGNLVEGMDFHRFYFENLLAKNSKPIHTTILNPHVHVIGEDAACIAYIRLTQYIDGQGRPRTSQSEETRVWHRRDGKWQNVHFHCSGAPVAPLQ

SEQ ID NO: 820659 - protein, 613 aa, Homo sapiens; identical to SEQ ID NO: 820656

SEQ ID NO: 820660 - protein, 737 aa, Homo sapiens
RRGAARSWRGRSEQISRALAARRSPARPPPGAASRGVSRARARVAAVPASGSRSRRRPSAAERTPSPSAAAMATTVTCTRFTDEYQLYEDIGKGAFSVVRRCVKLCTGHEYAAKIINTKKLSARDHQKLEREARICRLLKHSNIVRLHDSISEEGFHYLVFDLVTGGELFEDIVAREYYSEADASHCIQQILEAVLHCHQMGVVHRDLKPENLLLASKCKGAAVKLADFGLAIEVQGDQQAWFGFAGTPGYLSPEVLRKEAYGKPVDIWACGVILYILLVGYPPFWDEDQHKLYQQIKAGAYDFPSPEWDTVTPEAKNLINQMLTINPAKRITAHEALKHPWVCQRSTVASMMHRQETVECLKKFNARRKLKGAILTTMLATRNFSVGRQTTAPATMSTAASGTTMGLVEQAKSLLNKKADGVKPQTNSTKNSAAATSPKGTLPPAALEPQTTVIHNPVDGIKESSDSANTTIEDEDAKAPRVPDILSSVRRGSGAPEAEGPLPCPSPAPFSPLPAPSPRISDILNSVRRGSGTPEAEGPLSAGPPPCLSPALLGPLSSPSPRISDILNSVRRGSGTPEAEGPSPVGPPPCPSPTIPGPLPTPSRKQEIIKTTEQLIEAVNNGDFEAYAKICDPGLTSFEPEALGNLVEGMDFHRFYFENLLAKNSKPIHTTILNPHVHVIGEDAACIAYIRLTQYIDGQGRPRTSQSEETRVWHRRDGKWQNVHFHCSGAPVAPLQ

SEQ ID NO: 820661 - protein, 558 aa, Homo sapiens
RRGAARSWRGRSEQISRALAARRSPARPPPGAASRGVSRARARVAAVPASGSRSRRRPSAAERTPSPSAAAMATTVTCTRFTDEYQLYEDIGKGAFSVVRRCVKLCTGHEYAAKIINTKKLSARDHQKLEREARICRLLKHSNIVRLHDSISEEGFHYLVFDLVTGGELFEDIVAREYYSEADASHCIQQILEAVLHCHQMGVVHRDLKPENLLLASKCKGAAVKLADFGLAIEVQGDQQAWFGFAGTPGYLSPEVLRKEAYGKPVDIWACGVILYILLVGYPPFWDEDQHKLYQQIKAGAYDFPSPEWDTVTPEAKNLINQMLTINPAKRITAHEALKHPWVCQRSTVASMMHRQETVECLKKFNARRKLKGAILTTMLATRNFSVGRQTTAPATMSTAASGTTMGLVEQAKSLLNKKADGVKEPQTTVIHNPVDGIKESSDSANTTIEDEDAKARKQEIIKTTEQLIEAVNNGDFEAYALLAKNSKPIHTTILNPHVHVIGEDAACIAYIRLTQYIDGQGRPRTSQSEETRVWHRRDGKWQNVHFHCSGAPVAPLQ

SEQ ID NO: 820662 - protein, 521 aa, Homo sapiens
RRGAARSWRGRSEQISRALAARRSPARPPPGAASRGVSRARARVAAVPASGSRSRRRPSAAERTPSPSAAAMATTVTCTRFTDEYQLYEDIGKGAFSVVRRCVKLCTGHEYAAKIINTKKLSARDHQKLEREARICRLLKHSNIVRLHDSISEEGFHYLVFDLVTGGELFEDIVAREYYSEADASHCIQQILEAVLHCHQMGVVHRDLKPENLLLASKCKGAAVKLADFGLAIEVQGDQQAWFGFAGTPGYLSPEVLRKEAYGKPVDIWACGVILYILLVGYPPFWDEDQHKLYQQIKAGAYDFPSPEWDTVTPEAKNLINQMLTINPAKRITAHEALKHPWVCQRSTVASMMHRQETVECLKKFNARRKLKGAILTTMLATRNFSARKQEIIKTTEQLIEAVNNGDFEAYAKICDPGLTSFEPEALGNLVEGMDFHRFYFENHLLAKNSKPIHTTILNPHVHVIGEDAACIAYIRLTQYIDGQGRPRTSQSEETRVWHRRDGKWQNVHFHCSGAPVAPLQ

SEQ ID NO: 820663 - protein, 507 aa, Homo sapiens
GCVHYVHSSVLCESEEVGSSKWPACARGAFSVVRRCVKLCTGHEYAAKIINTKKLSARDHQKLEREARICRLLKHSNIVRLHDSISEEGFHYLVFDLVTGGELFEDIVAREYYSEADASHCIQQILEAVLHCHQMGVVHRDLKPENLLLASKCKGAAVKLADFGLAIEVQGDQQAWFGFAGTPGYLSPEVLRKEAYGKPVDIWACGVILYILLVGYPPFWDEDQHKLYQQIKAGAYDFPSPEWDTVTPEAKNLINQMLTINPAKRITAHEALKHPWVCQRSTVASMMHRQETVECLKKFNARRKLKGAILTTMLATRNFSAKSLLNKKADGVKPQTNSTKNSAAATSPKGTLPPAALESSDSANTTIEDEDAKARKQEIIKTTEQLIEAVNNGDFEAYAKICDPGLTSFEPEALGNLVEGMDFHRFYFENLLAKNSKPIHTTILNPHVHVIGEDAACIAYIRLTQYIDGQGRPRTSQSEETRVWHRRDGKWQNVHFHCSGAPVAPLQ

SEQ ID NO: 820664 - protein, 413 aa, Homo sapiens
MGVVHRDLKPENLLLASKCKGAAVKLADFGLAIEVQGDQQAWFGFAGTPGYLSPEVLRKEAYGKPVDIWACGVILYILLVGYPPFWDEDQHKLYQQIKAGAYDFPSPEWDTVTPEAKNLINQMLTINPAKRITAHEALKHPWVCQRSTVASMMHRQETVECLKKFNARRKLKGAILTTMLATRNFSVGRQTTAPATMSTAASGTTMGLVEQAKSLLNKKADGVKPQTNSTKNSAAATSPKGTLPPAALEPQTTVIHNPVDGIKESSDSANTTIEDEDAKARKQEIIKTTEQLIEAVNNGDFEAYAKICDPGLTSFEPEALGNLVEGMDFHRFYFENLLAKNSKPIHTTILNPHVHVIGEDAACIAYIRLTQYIDGQGRPRTSQSEETRVWHRRDGKWQNVHFHCSGAPVAPLQ

SEQ ID NO: 820665 - protein, 613 aa, Homo sapiens; identical to SEQ ID NO: 820656

SEQ ID NO: 820666 - protein, 140 aa, Homo sapiens
MAGQWLARKQEIIKTTEQLIEAVNNGDFEAYAKICDPGLTSFEPEALGNLVEGMDFHRFYFENLLAKNSKPIHTTILNPHVHVIGEDAACIAYIRLTQYIDGQGRPRTSQSEETRVWHRRDGKWQNVHFHCSGAPVAPLQ

SEQ ID NO: 820667 - protein, 613 aa, Homo sapiens; identical to SEQ ID NO: 820656

SEQ ID NO: 820668 - protein, 613 aa, Homo sapiens; identical to SEQ ID NO: 820656

SEQ ID NO: 820669 - protein, 109 aa, Homo sapiens
NNQEETNSLDYEKTEQTLIKNKISKRYNLKKPLLAKNSKPIHTTILNPHVHVIGEDAACIAYIRLTQYIDGQGRPRTSQSEETRVWHRRDGKWQNVHFHCSGAPVAPLQ

SEQ ID NO: 820670 - protein, 588 aa, Homo sapiens; identical to SEQ ID NO: 820657

SEQ ID NO: 820671 - protein, 397 aa, Homo sapiens
RRGAARSWRGRSEQISRALAARRSPARPPPGAASRGVSRARARVAAVPASGSRSRRRPSAAERTPSPSAAAMATTVTCTRFTDEYQLYEDIGKGAFSVVRRCVKLCTGHEYAAKIINTKKLSARDHQKLEREARICRLLKHSNIVRLHDSISEEGFHYLVFDLVTGGELFEDIVAREYYSEADASHCIQQILEAVLHCHQMGVVHRDLKPENLLLASKCKGAAVKLADFGLAIEVQGDQQAWFGFAGTPGYLSPEVLRKEAYGKPVDIWACGVILYILLVGYPPFWDEDQHKLYQQIKAGAYDFPSPEWDTVTPEAKNLINQMLTINPAKRITAHEALKHPWVCQRSTVASMMHRQETVECLKKFNARRKLKGAILTTMLATRNFSAAKSLLNKKAG

SEQ ID NO: 820672 - protein, 83 aa, Homo sapiens
LLNKKADGVKVRLQPGPVVPGSPEPAASPPRPGAPALESPSPHALRDTGQGMASEGLLPPKSSSSLSPQPQTNSTKNSAAATS

SEQ ID NO: 820673 - protein, 239 aa, Homo sapiens
MSYTPGVGGDPAQLAQRISSNIQKITQCSVEIQRTLNQLGTPQDSPELRQQLQQKQQYTNQLAKETDKYIKEFGSLPTTPSEQRQRKIQKDRLVAEFTTSLTNFQKVQRQAAEREKEFVARVRASSRVSGSFPEDSSKERNLVSWESQTQPQVQVQDEEITEDDLRLIHERESSIRQLEADIMDINEIFKDLGMMIHEQGDVIDSIEANVENAEVHVQQANQQLSRAADYQKKDSCMLM

SEQ ID NO: 820674 - protein, 168 aa, Homo sapiens
MSYTPGVGGDPAQLAQRISSNIQKITQCSVEIQRTLNQLGTPQDSPELRQQLQQKQQYTNQLAKETDKYIKEFGSLPTTPSEQRQRKIQKDRLVAEFTTSLTNFQKVQRQAAEREKEFVARVRASSRVSGSFPEDSQRQEIPEDDSVLFHGRENLLSEQLESLYYGLH

SEQ ID NO: 820675 - protein, 103 aa, Homo sapiens
NLSILNLSILNPLSLISYLNLSILNLSILNLSILNLSILNLSILNLSILNLSILNLSILNLSILNLSSLIRGRWVTAVGGVGGSRGGPGDCLENCTASDEISE

SEQ ID NO: 820676 - protein, 261 aa, Homo sapiens
MSYTPGVGGDPAQLAQRISSNIQKITQCSVEIQRTLNQLGTPQDSPELRQQLQQKQQYTNQLAKETDKYIKEFGSLPTTPSEQRQRKIQKDRLVAEFTTSLTNFQKVQRQAAEREKEFVARVRASSRVSGSFPEDSSKERNLVSWESQTQPQVQVQDEEITEDDLRLIHERESSIRQLEADIMDINEIFKDLGMMIHEQGDVIDSIEANVENAEVHVQQANQQLSRAADYQRKSRKTLCIIILILVIGVAIISLIIWGLNH

SEQ ID NO: 820677 - protein, 261 aa, Homo sapiens; identical to SEQ ID NO: 820676

SEQ ID NO: 820678 - protein, 240 aa, Homo sapiens
MSYTPGVGGDPAQLAQRISSNIQKITQCSVEIQRTLNQLGTPQDSPELRQQLQQKQQYTNQLAKETDKYIKEFGSLPTTPSEQRQRKIQKDRLVAEFTTSLTNFQKVQRQAAEREKEFVARVRASSRVSGSFPEDSSKERNLVSWESQTQPQVQVQDEEITEDDLRLIHERESSIRQLEADIMDINEIFKDLGMMIHEQGDVIDSIEANVENAEVHVQQANQQLSRAADYQRLSVSSYGD

SEQ ID NO: 820679 - protein, 261 aa, Homo sapiens; identical to SEQ ID NO: 820676

SEQ ID NO: 820680 - protein, 222 aa, Homo sapiens
ARVDPAASTRCEKQQKQQYTNQLAKETDKYIKEFGSLPTTPSEQRQRKIQKDRLVAEFTTSLTNFQKVQRQAAEREKEFVARVRASSRVSGSFPEDSSKERNLVSWESQTQPQVQVQDEEITEDDLRLIHERESSIRQLEADIMDINEIFKDLGMMIHEQGDVIDSIEANVENAEVHVQQANQQLSRAADYQRKSRKTLCIIILILVIGVAIISLIIWGLNH

SEQ ID NO: 820681 - protein, 234 aa, Homo sapiens
ETDKYTAASVATVASIQVNLEVSKLQQKQQYTNQLAKETDKYIKEFGSLPTTPSEQRQRKIQKDRLVAEFTTSLTNFQKVQRQAAEREKEFVARVRASSRVSGSFPEDSSKERNLVSWESQTQPQVQVQDEEITEDDLRLIHERESSIRQLEADIMDINEIFKDLGMMIHEQGDVIDSIEANVENAEVHVQQANQQLSRAADYQRKSRKTLCIIILILVIGVAIISLIIWGLNH

SEQ ID NO: 820682 - protein, 206 aa, Homo sapiens
MVILTHMNVNYVQFKVVRMSAHQPQLNSRQRKIQKDRLVAEFTTSLTNFQKVQRQAAEREKEFVARVRASSRVSGSFPEDSSKERNLVSWESQTQPQVQVQDEEITEDDLRLIHERESSIRQLEADIMDINEIFKDLGMMIHEQGDVIDSIEANVENAEVHVQQANQQLSRAADYQRKSRKTLCIIILILVIGVAIISLIIWGLNH

SEQ ID NO: 820683 - protein, 220 aa, Homo sapiens
  misc_feature (15)..(15): Xaa can be any naturally occurring amino acid
  misc_feature (23)..(23): Xaa can be any naturally occurring amino acid
ARRPGRLDTVREDHXRPADNPVXPRKRLVTKGLDLCPPPPEQRQRKIQKDRLVAEFTTSLTNFQKVQRQAAEREKEFVARVRASSRVSGSFPEDSSKERNLVSWESQTQPQVQVQDEEITEDDLRLIHERESSIRQLEADIMDINEIFKDLGMMIHEQGDVIDSIEANVENAEVHVQQANQQLSRAADYQRKSRKTLCIIILILVIGVAIISLIIWGLNH

SEQ ID NO: 820684 - protein, 261 aa, Homo sapiens; identical to SEQ ID NO: 820676

SEQ ID NO: 820685 - protein, 261 aa, Homo sapiens; identical to SEQ ID NO: 820676

SEQ ID NO: 820686 - protein, 261 aa, Homo sapiens; identical to SEQ ID NO: 820676

SEQ ID NO: 820687 - protein, 261 aa, Homo sapiens; identical to SEQ ID NO: 820676

SEQ ID NO: 820688 - protein, 239 aa, Homo sapiens; identical to SEQ ID NO: 820673

SEQ ID NO: 820689 - protein, 163 aa, Homo sapiens
MSYTPGVGGDPAQLAQRISSNIQKITQCSVEIQRTLNQLGTPQDSPELRQQLQQKQQYTNQLAKETDKYIKEFGSLPTTPSEQRQRKIQKDRLVAEFTTSLTNFQKVQRQAAEREKEFVARVRASSRVSGSFPEDSSKERNLVSWESQTQPQVQVQDEEITEE

SEQ ID NO: 820690 - protein, 186 aa, Homo sapiens
MDTFSTKSLALQAQKKLLSKMASKAVVAVLVDDTSSEVLDELYRATREFTRSRKEAQKMLKNLVKVALKLGLLLRGDQLGGEELALLRRFRHRARCLAMTAVSFHQVDFTFDRRVLAAGLLECRDLLHQAVGPHLTAKSHGRINHVFGHLADCDFLAALYGPAEPYRSHLRRICEGLGRMLDEGSL

SEQ ID NO: 820691 - protein, 186 aa, Homo sapiens; identical to SEQ ID NO: 820690

SEQ ID NO: 820692 - protein, 186 aa, Homo sapiens; identical to SEQ ID NO: 820690

SEQ ID NO: 820693 - protein, 101 aa, Homo sapiens
KQTTQEPQKERPCRWEGAAHSLQSSLASALHDAQDRPFAPMALYMDRPVNEPCTMDFSKGFKKKFFYNKKQKKRVAELALSLSSTSDDEPPLLPFPFLFLP

SEQ ID NO: 820694 - protein, 435 aa, Homo sapiens
CPQYWTRARRCGWRTRAGLWGNETEGGGGGSGSGGDSVGLTPPPLPGSSLSPLSLTMKRRTDPECTAPIKKQKKRVAELALSLSSTSDDEPPSSVSHGAKASTTSLSGSDSETEGKQHSSDSFDDAFKADSLVEGTSSRYSMYNSVSQKLMAKMGFREGEGLGKYSQGRKDIVEASSQKGRRGLGLTLRGFDQELNVDWRDEPEPSACEQVSWFPECTTEIPDTQEMSDWMVVGKRKMIIEDETEFCGEELLHSVLQCKKPLVKDREAELLYFADVCAGPGGFSEYVLWRKKWHAKGFGMTLKGPNDFKLEDFYSASSELFEPYYGEGGIDGDGDITRPENISAFRNFVLDNTDRKGVHFLMADGGFSVEGQENLQEILSKQLLLCQFLMALSIVRTGGHFICKTFDLFTPFSVGLVYLLYCCFERVCMKTFSSA

SEQ ID NO: 820695 - protein, 891 aa, Homo sapiens
CPQYWTRARRCGWRTRAGLWGNETEGGGGGSGSGGDSVGLTPPPLPGSSLSPLSLTMKRRTDPECTAPIKKQKKRVAELALSLSSTSDDEPPSSVSHGAKASTTSLSGSDSETEGKQHSSDSFDDAFKADSLVEGTSSRYSMYNSVSQKLMAKMGFREGEGLGKYSQGRKDIVEASSQKGRRGLGLTLRGFDQELNVDWRDEPEPSACEQVSWFPECTTEIPDTQEMSDWMVVGKRKMIIEDETEFCGEELLHSVLQCKSVFDVLDGEEMRRARTRANPYEMIRGVFFLNRAAMKMANMDFVFDRMFTNPRDSYGKPLVKDREAELLYFADVCAGPGGFSEYVLWRKKWHAKGFGMTLKGPNDFKLEDFYSASSELFEPYYGEGGIDGDGDITRPENISAFRNFVLDNTDRKGVHFLMADGGFSVEGQENLQEILSKQLLLCQFLMALSIVRTGGHFICKTFDLFTPFSVGLVYLLYCCFERVCLFKPITSRPANSERYVVCKGLKVGIDDVRDYLFAVNIKLNQLRNTDSDVNLVVPLEVIKGDHEFTDYMIRSNESHCSLQIKALAKIHAFVQDTTLSEPRQAEIRKECLRLWGIPDQARVAPSSSDPKSKFFELIQGTEIDIFSYKPTLLTSKTLEKIRPVFDYRCMVSGSEQKFLIGLGKSQIYTWDGRQSDRWIKLDLKTELPRDTLLSVEIVHELKGEGKAQRKISAIHILDVLVLNGTDVREQHFNQRIQLAEKFVKAVSKPSRPDMNPIRVKEVYRLEEMEKIFVRLEMKIIKGSSGTPKLSYTGRDDRHFVPMGLYIVRTVNEPWTMGFSKSFKKKFFYNKKTKDSTFDLPADSIAPFHICYYGRLFWEWGDGIRVHDSQKPQDQDKLSKEDVLSFIQMHRA

SEQ ID NO: 820696 - protein, 876 aa, Homo sapiens
MGRGSTLSAEQPCLSSARREDRPFAPMDLYMERPENEPWTMDFSKGFKKKFFYTKKQKKRVAELALSLSSTSDDEPPSSVSHGAKASTTSLSGSDSETEGKQHSSDSFDDAFKADSLVEGTSSRYSMYNSVSQKLMAKMGFREGEGLGKYSQGRKDIVEASSQKGRRGLGLTLRGFDQELNVDWRDEPEPSACEQVSWFPECTTEIPDTQEMSDWMVVGKRKMIIEDETEFCGEELLHSVLQCKSVFDVLDGEEMRRARTRANPYEMIRGVFFLNRAAMKMANMDFVFDRMFTNPRDSYGKPLVKDREAELLYFADVCAGPGGFSEYVLWRKKWHAKGFGMTLKGPNDFKLEDFYSASSELFEPYYGEGGIDGDGDITRPENISAFRNFVLDNTDRKGVHFLMADGGFSVEGQENLQEILSKQLLLCQFLMALSIVRTGGHFICKTFDLFTPFSVGLVYLLYCCFERVCLFKPITSRPANSERYVVCKGLKVGIDDVRDYLFAVNIKLNQLRNTDSDVNLVVPLEVIKGDHEFTDYMIRSNESHCSLQIKALAKIHAFVQDTTLSEPRQAEIRKECLRLWGIPDQARVAPSSSDPKSKFFELIQGTEIDIFSYKPTLLTSKTLEKIRPVFDYRCMVSGSEQKFLIGLGKSQIYTWDGRQSDRWIKLDLKTELPRDTLLSVEIVHELKGEGKAQRKISAIHILDVLVLNGTDVREQHFNQRIQLAEKFVKAVSKPSRPDMNPIRVKEVYRLEEMEKIFVRLEMKIIKGSSGTPKLSYTGRDDRHFVPMGLYIVRTVNEPWTMGFSKSFKKKFFYNKKTKDSTFDLPADSIAPFHICYYGRLFWEWGDGIRVHDSQKPQDQDKLSKEDVLSFIQMHRA

SEQ ID NO: 820697 - protein, 764 aa, Homo sapiens
CPQYWTRARRCGWRTRAGLWGNETEGGGGGSGSGGDSVGLTPPPLPGSSLSPLSLTMKRRTDPECTAPIKKQKKRVAELALSLSSTSDDEPPSSVSHGAKASTTSLSGSDSETEGKQHSSDSFDDAFKADSLVEGTSSRYSMYNSVSQKLMAKMGFREGEGLGKYSQGRKDIVEASSQKGRRGLGLTLRGFDQELNVDWRDEPEPSACEQVSWFPECTTEIPDTQEMSDWMVVGKRKMIIEDETEFCGEELLHSVLQCKSVFDVLDGEEMRRARTRANPYEMIRGVFFLNRAAMKMANMDFVFDRMFTNPRDSYGKPLVKDREAELLYFADVCAGPGGFSEYVLWRKKWHAKGFGMTLKGPNDFKLEDFYSASSELFEPYYGEGGIDGDGDITRPENISAFRNFVLDNTDRKGVHFLMADGGFSVEGQENLQEILSKQLLLCQFLMALSIVRTGGHFICKTFDLFTPFSVGLVYLLYCCFERVCLFKPITSRPANSERYVVCKGLKVGIDDVRDYLFAVNIKLNQLRNTDSDVNLVVPLEVIKGDHEFTDYMIRSNESHCSLQIKALAKIHAFVQDTTLSEPRQAEIRKECLRLWGIPDQARVAPSSSDPKSKFFELIQGTEIDIFSYKPTLLTSKTLEKIRPVFDYRCMVSGSEQKFLIGLGKSQIYTWDGRQSDRWIKLDLKTELPRDTLLSVEIVHELKGEGKAQRKISAIHILDVLVLNGTDVREQHFNQRSDLGPRVGRVGVGQGSLGGQRPPEVWPLI

SEQ ID NO: 820698 - protein, 342 aa, Homo sapiens
MQIIFFSSSHCSLQIKALAKIHAFVQDTTLSEPRQAEIRKECLRLWGIPDQARVAPSSSDPKSKFFELIQGTEIDIFSYKPTLLTSKTLEKIRPVFDYRCMVSGSEQKFLIGLGKSQIYTWDGRQSDRWIKLDLKTELPRDTLLSVEIVHELKGEGKAQRKISAIHILDVLVLNGTDVREQHFNQRIQLAEKFVKAVSKPSRPDMNPIRVKEVYRLEEMEKIFVRLEMKIIKGSSGTPKLSYTGRDDRHFVPMGLYIVRTVNEPWTMGFSKSFKKKFFYNKKTKDSTFDLPADSIAPFHICYYGRLFWEWGDGIRVHDSQKPQDQDKLSKEDVLSFIQMHRA

SEQ ID NO: 820699 - protein, 891 aa, Homo sapiens; identical to SEQ ID NO: 820695

SEQ ID NO: 820700 - protein, 178 aa, Homo sapiens
ASYSKTIGLGSEAWVCQHFNQRIQLAEKFVKAVSKPSRPDMNPIRVKEVYRLEEMEKIFVRLEMKIIKGSSGTPKLSYTGRDDRHFVPMGLYIVRTVNEPWTMGFSKSFKKKFFYNKKTKDSTFDLPADSIAPFHICYYGRLFWEWGDGIRVHDSQKPQDQDKLSKEDVLSFIQMHRA

SEQ ID NO: 820701 - protein, 882 aa, Homo sapiens
CPQYWTRARRCGWRTRAGLWGNETEGGGGGSGSGGDSVGLTPPPLPGSSLSPLSLTMKRRTDPECTAPIKKQKKRVAELALSLSSTSDDEPPSSVSHGAKASTTSLSGSDSETEGKQHSSDSFDDAFKADSLVEGTSSRYSMYNSVSQKLMAKMGFREGEGLGKYSQGRKDIVEASSQKGRRGLGLTLRGFDQELNVDWRDEPEPSACEQVSWFPECTTEIPDTQEMSDWMVVGKRKMIIEDETEFCGEELLHSVLQCKSVFDVLDGEEMRRARTRANPYEMIRGVFFLNRAAMKMANMDFVFDRMFTNPRDSYGKPLVKDREAELLYFADVCAGPGGFSEYVLWRKKWHAKGFGMTLKGPNDFKLEDFYSASSELFEPYYGEGGIDGDGDITRPENISAFRNFVLDNTDRKGVHFLMADGGFSVEGQENLQEILSKQLLLCQFLMALSIVRTGGHFICKTFDLFTPFSVGLVYLLYCCFERVCLFKPITSRPANSERYVVCKGLKVGIDDVRDYLFAVNIKLNQLRNTDSDVNLVVPLEVIKGDHEFTDYMIRSNESHCSLQIKALAKIHAFVQDTTLSEPRQAEIRKECLRLWGIPDQARVAPSSSDPKSKFFELIQGTEIDIFSYKPTLLTSKTLEKIRPVFDYRCMVSGSEQKFLIGLGKSQIYTWDGRQSDRWIKLDLKTELPRDTLLSVEIVHELKGEGKAQRKISAIHILDVLVLNGTDVREQHFNQRIQLAEKFVKAVSKPSRPDMNPIRVKEVYRLEEMEKIFVRLEMKIIKGSSGTPKLSYTGRDDRHFVPMGLYIVRTVNEPWTMGFSKSFKKKFFYNKKTKDSTFDLPYYPFPSFFFPNRRYNLLLFVVKWSLPFPLSWPTTQRGGGAGQ

SEQ ID NO: 820702 - protein, 859 aa, Homo sapiens
CPQYWTRARRCGWRTRAGLWGNETEGGGGGSGSGGDSVGLTPPPLPGSSLSPLSLTMKRRTDPECTAPIKKQKKRVAELALSLSSTSDDEPPSSVSHGAKASTTSLSGSDSETEGKQHSSDSFDDAFKADSLVEGTSSRYSMYNSVSQKLMAKMGFREGEGLGKYSQGRKDIVEASSQKGRRGLGLTLRGFDQELNVDWRDEPEPSACEQVSWFPECTTEIPDTQEMSDWMVVGKRKMIIEDETEFCGEELLHSVLQCKSVFDVLDGEEMRRARTRANPYEMIRGVFFLNRAAMKMANMDFVFDRMFTNPRDSYGKPLVKDREAELLYFADVCAGPGGFSEYVLWRKKWHAKGFGMTLKGPNDFKLEDFYSASSELFEPYYGEGGIDGDGDITRPENISAFRNFVLDNTDRKGVHFLMADGGFSVEGQENLQEILSKQLLLCQFLMALSIVRTGGHFICKTFDLFTPFSVGLVYLLYCCFERVCLFKPITSRPANSERYVVCKGLKVGIDDVRDYLFAVNIKLNQLRNTDSDVNLVVPLEVIKGDHEFTDYMIRSNESHCSLQIKALAKIHAFVQDTTLSEPRQAEIRKECLRLWGIPDQARVAPSSSDPKSKFFELIQGTEIDIFSYKPTLLTSKTLEKIRPVFDYRCMVSGSEQKFLIGLGKSQIYTWDGRQSDRWIKLDLKTELPRDTLLSVEIVHELKGEGKAQRKISAIHILDVLVLNGTDVREQHFNQRIQLAEKFVKAVSKPSRPDMNPIRVKEVYRLEEMEKIFVRLEMKIIKGSSGTPKLSYTGRDDRHFVPMGLYIVRTVNEPWTMGFSKSFKKKFFYNKKTKDSTFDLPADSIAPFHLPSLACLSKMD

SEQ ID NO: 820703 - protein, 217 aa, Homo sapiens
CPQYWTRARRCGWRTRAGLWGNETEGGGGGSGSGGDSVGLTPPPLPGSSLSPLSLTMKRRTDPECTAPIKKQKKRVAELALSLSSTSDDEPPSSVSHGAKASTTSLSGSDSETEGKQHSSDSFDDAFKADSLVEGTSSRYSMYNSVSQKLMAKMGFREGEGLGKYSQGRKDIVEASSQKGRRGLGLTLRGFDQELNVDWRDEPEVSVKVRRRWKSHL

SEQ ID NO: 820704 - protein, 68 aa, Homo sapiens
GFSVEGQENLQEILSKQLLLCQFLMALSIVRTGDTSSAVSSPQDPLRGPIGQEHVQGVGGEVKKICLY

SEQ ID NO: 820705 - protein, 2317 aa, Homo sapiens
GGAQRPRWRRLQLRRRAPSLRLGRPRVRAVAVAAAARTMYRSSARSSVSSHRPKDDGGGGPRSGRSSGSSSGPARRSSPPPPPSGSSSRTPARRPRSPSGHRGRRASPSPPRGRRVSPSPPRARRGSPSPPRGRRLFPPGPAGFRGSSRGESRADYARDGRGDHPGDSGSRRRSPGLCSDSLEKSLRITVGNDHFCVSTPERRRLSDRLGSPVDNLEDMDRDDLTDDSVFTRSSQCSRGLERYISQEEGPLSPFLGQLDEDYRTKETFLHRSDYSPHISCHDELLRGTERNREKLKGYSIRSEERSREAKRPRYDDTVKINSMGGDHPSFTSGTRNYRQRRRSPSPRFLDPEFRELDLARRKREEEEERSRSLSQELVGVDGGGTGCSIPGLSGVLTASEPGYSLHRPEEVSVMPKKSILKKRIEVDIMEPSMQLESFSSSTSSSQDHPLYSGHPSLPLSGAIAAFASEIENKGTMVETALKEPQGNLYQWGPLPGIPKDNSPLREKFGSFLCHKDNLDLKAEGPERHTDFLLPHERASQDGSGFSRILSMLADSTSTQEKRRRSFPDIEDEEKFLYGDEEEDLKAESVPKPLGSSESEVMRQKASSLPSSAPAVKLESLEETNPEYAKIHDLLKTIGLDIGVAEISQLAARTQERLHGKKPSLRSSADRRSSVDRYFSADHCSSVDHRFSADRCSSVDHCFSADRRSSDPHRLESREAHHSNTHSPEVSHPHPPSPVDPYLLTKNSPPFLKSDHPVGHISGPEVVGSGFQSSVAVRCMLPSAPSAPIRLPHTAALSQFHMPRASQFAAARIPPNYQGPAIPPASFDAYRHYMAYAASRWPMYPTSQPSNHPVPEPHRIMPITKQATRSRPNLRVIPTVTPDKPKQKESLRGSIPAAQVPVQVSIPSLIRYNPEKISDEKNRASQKQKVIEEREKLKNDREARQKKMYYLRTELERLHKQQGEMLRKKRREKDGHKDPLLVEVSRLQDNIMKDIAELRQEAEEAEKKQSELDKVAQILGINIFDKSQKSLSDSREPTEKPGKAEKSKSPEKVSSFSNSSSNKESKVNNEKFRTKSPKPAESPQSATKQLDQPTAAYEYYDAGNHWCKDCNTICGTMFDFFTHMHNKKHTQTLDPYNRPWASKTQSEAKQDAIKRTDKITVPAKGSEFLVPISGFYCQLCEEFLGDPISGEQHVKGHQHNEKYKKYVDENPLYEERRNLDRQAGLAVVLETERRRQSELKRKLSEKPKEEKKEKKAKAVKEVKEDDKVSEKLEDQLSEGRNSPEKAENKRNTGIKLQLKEEVKKESPTSSSFGKFSWKKPEKEEEKSSLVTPSISKEEILESSKDKEDGKTEAGKAKPIKIKLSGKTVVAHTSPWMPVVTTSTQTKIGPNLPIPSTVLRKSCSATMSKPAPLNTFLSIKSSGTTAKPLPVVKESSADLLLPPDIISKAFGGEEVILKGSPEEKVVLAEKSEPSHLPEQILPPPPPPPPPPPPPPPVIPHPAAPSAAQANAILAPVKSNPVVSQTLSPGFVGPNILNPVLPVAIMASAQPAAIPSDETAPGVSESDRDQTLFSVLVRPPPPLSSVFSEQAKKLEKRNSCLATANAKDLYDIFYSSGGKGAPETKGAPETKLSGGPLANGENSNLSRTKSSDTSSTSPLNSSASQEELHQDEGLVAAPIVSNSEKPIAKTLVALGKWSVVEHVGPKSTGSTYGFLQPLTRLCQSRPYETITPKTDTLAIWTSSSFQSDTSRDISPEKSELDLGEPGPPGVEPPPQLLDIQCKESQKLVEIHLRESVNQDKESQELRKSEDCRESEIETNTELKERVKELSEGIVDEGASTSIGPHSIDDSNLNHGNRYMWEGEVKQPNLLMIDKEAEQSNKLMTGSETPSKVVIKLSPQACSFTKAKLDSFLSEARSLLNPQDTPVKISAPELLLHSPARSAMCLTGSPQEQGVSVVSEEGLENSAPESASRTSRYRSLKLKRERSKDFQVKKIYELAVWDENKKRPETWESPEKPKTEALELQDVHPELTVTIESKALEDFEATDLKVEELTALGNLGDMPVDFCTTRVSPAHRSPTVLCQKVCEENSVSPIGCNSSDPADFEPIPSFSGFPLDSPKTLVLDFETEGERNSPNPRSVRIPSPNILKTGLTENVDRGLGGLEGTHQALDLLAGGMMPEEVKESSQLDKQESLGLELKTINSAGLGPSPCLPDLVDFVTRTSGVQKDKLCSPLSEPGDPSKCSSLELGPLQLEISNASTTEVAILQVDDDSGDPLNLVKAPVSRSPPREQVIEDNMVPQGMPEQETTVGAIQDHTESSVHN

SEQ ID NO: 820706 - protein, 103 aa, Homo sapiens
MRSFVLRAPSLPKAPSQPLSSWISPLLLMSIMMLAITGAKTATPSVGPCLISSLICTIRSTHRGNSKSLQISKRKDCSRHFCPQKGRDRNHRGHGNDGCPCGQ

SEQ ID NO: 820707 - protein, 2472 aa, Homo sapiens
GGAQRPRWRRLQLRRRAPSLRLGRPRVRAVAVAAAARTMYRSSARSSVSSHRPKDDGGGGPRSGRSSGSSSGPARRSSPPPPPSGSSSRTPARRPRSPSGHRGRRASPSPPRGRRVSPSPPRARRGSPSPPRGRRLFPPGPAGFRGSSRGESRADYARDGRGDHPGDSGSRRRSPGLCSDSLEKSLRITVGNDHFCVSTPERRRLSDRLGSPVDNLEDMDRDDLTDDSVFTRSSQCSRGLERYISQEEGPLSPFLGQLDEDYRTKETFLHRSDYSPHISCHDELLRGTERNREKLKGYSIRSEERSREAKRPRYDDTVKINSMGGDHPSFTSGTRNYRQRRRSPSPRFLDPEFRELDLARRKREEEEERSRSLSQELVGVDGGGTGCSIPGLSGVLTASEPGYSLHRPEEVSVMPKKSILKKRIEVDIMEPSMQLESFSSSTSSSQDHPLYSGHPSLPLSGAIAAFASEIENKGTMVETALKEPQGNLYQWGPLPGIPKDNSPLREKFGSFLCHKDNLDLKAEGPERHTDFLLPHERASQDGSGFSRILSMLADSTSTQEKRRRSFPDIEDEEKFLYGDEEEDLKAESVPKPLGSSESEVMRQKASSLPSSAPAVKLESLEETNPEYAKIHDLLKTIGLDIGVAEISQLAARTQERLHGKKPSLRSSADRRSSVDRYFSADHCSSVDHRFSADRCSSVDHCFSADRRSSDPHRLESREAHHSNTHSPEVSHPHPPSPVDPYLLTKNSPPFLKSDHPVGHISGPEVVGSGFQSSVAVRCMLPSAPSAPIRLPHTAALSQFHMPRASQFAAARIPPNYQGPAIPPASFDAYRHYMAYAASRWPMYPTSQPSNHPVPEPHRIMPITKQATRSRPNLRVIPTVTPDKPKQKESLRGSIPAAQVPVQVSIPSLIRYNPEKISDEKNRASQKQKVIEEREKLKNDREARQKKMYYLRTELERLHKQQGEMLRKKRREKDGHKDPLLVEVSRLQDNIMKDIAELRQEAEEAEKKQSELDKVAQILGINIFDKSQKSLSDSREPTEKPGKAEKSKSPEKVSSFSNSSSNKESKVNNEKFRTKSPKPAESPQSATKQLDQPTAAYEYYDAGNHWCKDCNTICGTMFDFFTHMHNKKHTQVGILLSVIFTPTLTLFKLLYPYLHCKAGKGNILIWQEPQSEEPRDTNKGDTIPRAQSRGLGCNYNTMTSVSEVSASFDSLSTRFFCFILPFSGTCSNMCLPFPQVISIKTVGRGGGGGSWGLLVPWSYYGGKKREKWVIELLVLLCEHLLPLTNRHWIPTTDLGLQRPRVEAKQDAIKRTDKITVPAKGSEFLVPISGFYCQLCEEFLGDPISGEQHVKGHQHNEKYKKYVDENPLYEERRNLDRQAGLAVVLETERRRQSELKRKLSEKPKEEKKEKKAKAVKEVKEDDKVSEKLEDQLSEGRNSPEKAENKRNTGIKLQLKEEVKKESPTSSSFGKFSWKKPEKEEEKSSLVTPSISKEEILESSKDKEDGKTEAGKAKPIKIKLSGKTVVAHTSPWMPVVTTSTQTKIGPNLPIPSTVLRKSCSATMSKPAPLNTFLSIKSSGTTAKPLPVVKESSADLLLPPDIISKAFGGEEVILKGSPEEKVVLAEKSEPSHLPEQILPPPPPPPPPPPPPPPVIPHPAAPSAAQANAILAPVKSNPVVSQTLSPGFVGPNILNPVLPVAIMASAQPAAIPSDETAPGVSESDRDQTLFSVLVRPPPPLSSVFSEQAKKLEKRNSCLATANAKDLYDIFYSSGGKGAPETKGAPETKLSGGPLANGENSNLSRTKSSDTSSTSPLNSSASQEELHQDEGLVAAPIVSNSEKPIAKTLVALGKWSVVEHVGPKSTGSTYGFLQPLTRLCQSRPYETITPKTDTLAIWTSSSFQSDTSRDISPEKSELDLGEPGPPGVEPPPQLLDIQCKESQKLVEIHLRESVNQDKESQELRKSEDCRESEIETNTELKERVKELSEGIVDEGASTSIGPHSIDDSNLNHGNRYMWEGEVKQPNLLMIDKEAEQSNKLMTGSETPSKVVIKLSPQACSFTKAKLDSFLSEARSLLNPQDTPVKISAPELLLHSPARSAMCLTGSPQEQGVSVVSEEGLENSAPESASRTSRYRSLKLKRERSKDFQVKKIYELAVWDENKKRPETWESPEKPKTEALELQDVHPELTVTIESKALEDFEATDLKVEELTALGNLGDMPVDFCTTRVSPAHRSPTVLCQKVCEENSVSPIGCNSSDPADFEPIPSFSGFPLDSPKTLVLDFETEGERNSPNPRSVRIPSPNILKTGLTENVDRGLGGLEGTHQALDLLAGGMMPEEVKESSQLDKQESLGLELKTINSAGLGPSPCLPDLVDFVTRTSGVQKDKLCSPLSEPGDPSKCSSLELGPLQLEISNASTTEVAILQVDDDSGDPLNLVKAPVSRSPPREQVIEDNMVPQGMPEQETTVGAIQDHTESSVHN

SEQ ID NO: 820708 - protein, 1155 aa, Homo sapiens
GGAQRPRWRRLQLRRRAPSLRLGRPRVRAVAVAAAARTMYRSSARSSVSSHRPKDDGGGGPRSGRSSGSSSGPARRSSPPPPPSGSSSRTPARRPRSPSGHRGRRASPSPPRGRRVSPSPPRARRGSPSPPRGRRLFPPGPAGFRGSSRGESRADYARDGRGDHPGDSGSRRRSPGLCSDSLEKSLRITVGNDHFCVSTPERRRLSDRLGSPVDNLEDMDRDDLTDDSVFTRSSQCSRGLERYISQEEGPLSPFLGQLDEDYRTKETFLHRSDYSPHISCHDELLRGTERNREKLKGYSIRSEERSREAKRPRYDDTVKINSMGGDHPSFTSGTRNYRQRRRSPSPRFLDPEFRELDLARRKREEEEERSRSLSQELVGVDGGGTGCSIPGLSGVLTASEPGYSLHRPEEVSVMPKKSILKKRIEVDIMEPSMQLESFSSSTSSSQDHPLYSGHPSLPLSGAIAAFASEIENKGTMVETALKEPQGNLYQWGPLPGIPKDNSPLREKFGSFLCHKDNLDLKAEGPERHTDFLLPHERASQDGSGFSRILSMLADSTSTQEKRRRSFPDIEDEEKFLYGDEEEDLKAESVPKPLGSSESEVMRQKASSLPSSAPAVKLESLEETNPEYAKIHDLLKTIGLDIGVAEISQLAARTQERLHGKKPSLRSSADRRSSVDRYFSADHCSSVDHRFSADRCSSVDHCFSADRRSSDPHRLESREAHHSNTHSPEVSHPHPPSPVDPYLLTKNSPPFLKSDHPVGHISGPEVVGSGFQSSVAVRCMLPSAPSAPIRLPHTAALSQFHMPRASQFAAARIPPNYQGPAIPPASFDAYRHYMAYAASRWPMYPTSQPSNHPVPEPHRIMPITKQATRSRPNLRVIPTVTPDKPKQKESLRGSIPAAQVPVQVSIPSLIRYNPEKISDEKNRASQKQKVIEEREKLKNDREARQKKMYYLRTELERLHKQQGEMLRKKRREKDGHKDPLLVEVSRLQDNIMKDIAELRQEAEEAEKKQSELDKVAQILGINIFDKSQKSLSDSREPTEKPGKAEKSKSPEKVSSFSNSSSNKESKVNNEKFRTKSPKPAESPQSATKQLDQPTAAYEYYDAGNHWCKDCNTICGTMFDFFTHMHNKKHTQGQFQKSSDFQKEGLQQTFLPPERQG

SEQ ID NO: 820709 - protein, 970 aa, Homo sapiens
RRRAAAEVAAAAAAAARSEPASRAPPGQSCRRGRRCKEQCTASSARSSVSSHRPKDDGGGGPRSGRSSGSSSGPARRSSPPPPPSGSSSRTPARRPRSPSGHRGRRASPSPPRGRRVSPSPPRARRGSPSPPRGRRLFPPGPAGFRGSSRGESRADYARDGRGDHPGDSGSRRRSPGLCSDSLEKSLRITVGNDHFCVSTPERRRLSDRLGSPVDNLEDMDRDDLTDDSVFTRSSQCSRGLERYISQEEGPLSPFLGQLDEDYRTKETFLHRSDYSPHISCHDELLRGTERNREKLKGYSIRSEERSREAKRPRYDDTVKINSMGGDHPSFTSGTRNYRQRRRSPSPRFLDPEFRELDLARRKREEEEERSRSLSQELVGVDGGGTGCSIPGLSGVLTASEPGYSLHRPEEVSVMPKKSILKKRIEVDIMEPSMQLESFSSSTSSSQDHPLYSGHPSLPLSGAIAAFASEIENKGTMVETALKEPQGNLYQWGPLPGIPKDNSPLREKFGSFLCHKDNLDLKAEGPERHTDFLLPHERASQDGSGFSRILSMLADSTSTQEKRRRSFPDIEDEEKFLYGDEEEDLKAESVPKPLGSSESEVMRQKASSLPSSAPAVKLESLEETNPEYAKIHDLLKTIGLDIGVAEISQLAARTQERLHGKKPSLRSSADRRSSVDRYFSADHCSSVDHRFSADRCSSVDHCFSADRRSSDPHRLESREAHHSNTHSPEVSHPHPPSPVDPYLLTKNSPPFLKSDHPVGHISGPEVVGSGFQSSVAVRCMLPSAPSAPIRLPHTAALSQFHMPRASQFAAARIPPNYQGPAIPPASFDAYRHYMAYAASRWPMYPTSQPSNHPVPEPHRIMPITKQATRSRPNLRVIPTVTPDKPKQKESLRGSIPAAQVPVQVSIPSLIRYNPEKISDEKNRASQKQKVIEEREKLKNDHKSTRRKKLQTRLNIRKNKLLDIPSLRTVA

SEQ ID NO: 820710 - protein, 474 aa, Homo sapiens
GGAQRPRWRRLQLRRRAPSLRLGRPRVRAVAVAAAARTMYRSSARSSVSSHRPKDDGGGGPRSGRSSGSSSGPARRSSPPPPPSGSSSRTPARRPRSPSGHRGRRASPSPPRGRRVSPSPPRARRGSPSPPRGRRLFPPGPAGFRGSSRGESRADYARDGRGDHPGDSGSRRRSPGLCSDSLEKSLRITVGNDHFCVSTPERRRLSDRLGSPVDNLEDMDRDDLTDDSVFTRSSQCSRGLERYISQEEGPLSPFLGQLDEDYRTKETFLHRSDYSPHISCHDELLRGTERNREKLKGYSIRSEERSREAKRPRYDDTVKINSMGGDHPSFTSGTRNYRQRRRSPSPRFLDPEFRELDLARRKREEEEERSRSLSQELVGVDGGGTGCSIPGLSGVLTASEPGYSLHRPEEVSVMPKKSILKKRIEVDIMEPSMQVSAAFLVGPLASLPNILKPAYFPVGYVPNGIFVICAGPTL

SEQ ID NO: 820711 - protein, 84 aa, Homo sapiens
PITKQATRSRPNLRVIPTVTPDKPKQKESLRGSIPAAQVPVQVSIPSLIRYNPEKISDEKNRASQKQKVNISFGYPVPEFSVLP

SEQ ID NO: 820712 - protein, 125 aa, Homo sapiens
GRRASPSPPRGRRVSPSPPRARRGSPSPPRGRRLFPPGPAGFRGSSRGESRADYARDGRGDHPGDSGSRVIPPLVQDSLHPPVPSPGIPVSRNARGLQTRVLSAKPPANSLGDAEPGGFCQTRER

SEQ ID NO: 820713 - protein, 126 aa, Homo sapiens
MPEPAKSAPAPKKGSKKAVTKAQKKDGKKRKRSRKESYSVYVYKVLKQVHPDTGISSKAMGIMNSFVNDIFERIAGEASRLAHYNKRSTITSREIQTAVRLLLPGELAKHAVSEGTKAVTKYTSAK

SEQ ID NO: 820714 - protein, 126 aa, Homo sapiens; identical to SEQ ID NO: 820713

SEQ ID NO: 820715 - protein, 126 aa, Homo sapiens; identical to SEQ ID NO: 820713

SEQ ID NO: 820716 - protein, 126 aa, Homo sapiens; identical to SEQ ID NO: 820713

SEQ ID NO: 820717 - protein, 126 aa, Homo sapiens; identical to SEQ ID NO: 820713

SEQ ID NO: 820718 - protein, 131 aa, Homo sapiens
MPEPAKSAPAPKKGSKKAVTKAQKKDGKKRKRSRKESYSVYVYKVLKQVHPDTGISSKAMGIMNSFVNDIFERIAGEASRWPLDLIQIPKRIIYKLISVSLVHSFSLIIIYCSSKNCLHYPSPLLPLRKSI

SEQ ID NO: 820719 - protein, 105 aa, Homo sapiens
PTRDGVQGVASLPSHASLGFGQASLHTKHEPQGGLEEGVSGSSASPGSDLVVVIAQVASKALLSVHSIRTSHLSTPIASGLVPPPSVMSSFTQAAHLRFTFQHLL

SEQ ID NO: 820720 - protein, 717 aa, Homo sapiens
MASSSDSEDDSFMAVDQEETVLEGTMDQDEEPHPVLEAEETRHNRSMSELPEEVLEYILSFLSPYQEHKTAALVCKQWYRLIKGVAHQCYHGFMKAVQEGNIQWESRTYPYPGTPITQRFSHSACYYDANQSMYVFGGCTQSSCNAAFNDLWRLDLNSKEWIRPLASGSYPSPKAGATLVVYKDLLVLFGGWTRPSPYPLHQPERFFDEIHTYSPSKNWWNCIVTTHGPPPMAGHSSCVIDDKMIVFGGSLGSRQMSNDVWVLDLEQWAWSKPNISGPSPHPRGGQSQIVIDDATILILGGCGGPNALFKDAWLLHMHSGPWAWQPLKVENEEHGAPELWCHPACRVGQCVVVFSQAPSGRAPLSPSLNSRPSPISATPPALVPETREYRSQSPVRSMDEAPCVNGRWGTLRPRAQRQTPSGSREGSLSPARGDGSPILNGGSLSPGTAAVGGSSLDSPVQAISPSTPSAPEGYDLKIGLSLAPRRGSLPDQKDLRLGSIDLNWDLKPASSSNPMDGMDNRTVGGSMRHPPEQTNGVHTPPHVASALAGAVSPGALRRSLEAIKAMSSKGPSASAALSPPLGSSPGSPGSQSLSSGETVPIPRPGPAQGDGHSLPPIARRLGHHPPQSLNVGKPLYQSMNCKPMQMYVLDIKDTKEKGRVKWKVFNSSSVVGPPETSLHTVVQGRGELIIFGGLMDKKQNVKYYPKTNALYFVRAKR

SEQ ID NO: 820721 - protein, 717 aa, Homo sapiens; identical to SEQ ID NO: 820720

SEQ ID NO: 820722 - protein, 739 aa, Homo sapiens
WRLDLNSKEWIRPLASAVEWNVMASSSDSEDDSFMAVDQEETVLEGTMDQDEEPHPVLEAEETRHNRSMSELPEEVLEYILSFLSPYQEHKTAALVCKQWYRLIKGVAHQCYHGFMKAVQEGNIQWESRTYPYPGTPITQRFSHSACYYDANQSMYVFGGCTQSSCNAAFNDLWRLDLNSKEWIRPLASGSYPSPKAGATLVVYKDLLVLFGGWTRPSPYPLHQPERFFDEIHTYSPSKNWWNCIVTTHGPPPMAGHSSCVIDDKMIVFGGSLGSRQMSNDVWVLDLEQWAWSKPNISGPSPHPRGGQSQIVIDDATILILGGCGGPNALFKDAWLLHMHSGPWAWQPLKVENEEHGAPELWCHPACRVGQCVVVFSQAPSGRAPLSPSLNSRPSPISATPPALVPETREYRSQSPVRSMDEAPCVNGRWGTLRPRAQRQTPSGSREGSLSPARGDGSPILNGGSLSPGTAAVGGSSLDSPVQAISPSTPSAPEGYDLKIGLSLAPRRGSLPDQKDLRLGSIDLNWDLKPASSSNPMDGMDNRTVGGSMRHPPEQTNGVHTPPHVASALAGAVSPGALRRSLEAIKAMSSKGPSASAALSPPLGSSPGSPGSQSLSSGETVPIPRPGPAQGDGHSLPPIARRLGHHPPQSLNVGKPLYQSMNCKPMQMYVLDIKDTKEKGRVKWKVFNSSSVVGPPETSLHTVVQGRGELIIFGGLMDKKQNVKYYPKTNALYFVRAKR

SEQ ID NO: 820723 - protein, 663 aa, Homo sapiens
MIKTGNRHSFNNLMDKLSVWTEGFALSVLGVAHQCYHGFMKAVQEGNIQWESRTYPYPGTPITQRFSHSACYYDANQSMYVFGGCTQSSCNAAFNDLWRLDLNSKEWIRPLASGSYPSPKAGATLVVYKDLLVLFGGWTRPSPYPLHQPERFFDEIHTYSPSKNWWNCIVTTHGPPPMAGHSSCVIDDKMIVFGGSLGSRQMSNDVWVLDLEQWAWSKPNISGPSPHPRGGQSQIVIDDATILILGGCGGPNALFKDAWLLHMHSGPWAWQPLKVENEEHGAPELWCHPACRVGQCVVVFSQAPSGRAPLSPSLNSRPSPISATPPALVPETREYRSQSPVRSMDEAPCVNGRWGTLRPRAQRQTPSGSREGSLSPARGDGSPILNGGSLSPGTAAVGGSSLDSPVQAISPSTPSAPEGYDLKIGLSLAPRRGSLPDQKDLRLGSIDLNWDLKPASSSNPMDGMDNRTVGGSMRHPPEQTNGVHTPPHVASALAGAVSPGALRRSLEAIKAMSSKGPSASAALSPPLGSSPGSPGSQSLSSGETVPIPRPGPAQGDGHSLPPIARRLGHHPPQSLNVGKPLYQSMNCKPMQMYVLDIKDTKEKGRVKWKVFNSSSVVGPPETSLHTVVQGRGELIIFGGLMDKKQNVKYYPKTNALYFVRAKR

SEQ ID NO: 820724 - protein, 758 aa, Homo sapiens
MASSSDSEDDSFMAVDQEETVLEGTMDQDEEPHPVLEAEETRHNRSMSELPEEVLEYILSFLSPYQEHKTAALVCKQWYRLIKDGTSLHHPGWSSVAQSQLIATSTSWVQGILLLPPPKYAGITGVAHQCYHGFMKAVQEGNIQWESRTYPYPGTPITQRFSHSACYYDANQSMYVFGGCTQSSCNAAFNDLWRLDLNSKEWIRPLASGSYPSPKAGATLVVYKDLLVLFGGWTRPSPYPLHQPERFFDEIHTYSPSKNWWNCIVTTHGPPPMAGHSSCVIDDKMIVFGGSLGSRQMSNDVWVLDLEQWAWSKPNISGPSPHPRGGQSQIVIDDATILILGGCGGPNALFKDAWLLHMHSGPWAWQPLKVENEEHGAPELWCHPACRVGQCVVVFSQAPSGRAPLSPSLNSRPSPISATPPALVPETREYRSQSPVRSMDEAPCVNGRWGTLRPRAQRQTPSGSREGSLSPARGDGSPILNGGSLSPGTAAVGGSSLDSPVQAISPSTPSAPEGYDLKIGLSLAPRRGSLPDQKDLRLGSIDLNWDLKPASSSNPMDGMDNRTVGGSMRHPPEQTNGVHTPPHVASALAGAVSPGALRRSLEAIKAMSSKGPSASAALSPPLGSSPGSPGSQSLSSGETVPIPRPGPAQGDGHSLPPIARRLGHHPPQSLNVGKPLYQSMNCKPMQMYVLDIKDTKEKGRVKWKVFNSSSVVGPPETSLHTVVQGRGELIIFGGLMDKKQNVKYYPKTNALYFVRAKR

SEQ ID NO: 820725 - protein, 678 aa, Homo sapiens
MASSSDSEDDSFMAVDQEETVLEGTMDQDEEPHPVLEAEETRHNRSMSELPEEVLEYILSFLSPYQEHKTAALVCKQWYRLIKGACYYDANQSMYVFGGCTQSSCNAAFNDLWRLDLNSKEWIRPLASGSYPSPKAGATLVVYKDLLVLFGGWTRPSPYPLHQPERFFDEIHTYSPSKNWWNCIVTTHGPPPMAGHSSCVIDDKMIVFGGSLGSRQMSNDVWVLDLEQWAWSKPNISGPSPHPRGGQSQIVIDDATILILGGCGGPNALFKDAWLLHMHSGPWAWQPLKVENEEHGAPELWCHPACRVGQCVVVFSQAPSGRAPLSPSLNSRPSPISATPPALVPETREYRSQSPVRSMDEAPCVNGRWGTLRPRAQRQTPSGSREGSLSPARGDGSPILNGGSLSPGTAAVGGSSLDSPVQAISPSTPSAPEGYDLKIGLSLAPRRGSLPDQKDLRLGSIDLNWDLKPASSSNPMDGMDNRTVGGSMRHPPEQTNGVHTPPHVASALAGAVSPGALRRSLEAIKAMSSKGPSASAALSPPLGSSPGSPGSQSLSSGETVPIPRPGPAQGDGHSLPPIARRLGHHPPQSLNVGKPLYQSMNCKPMQMYVLDIKDTKEKGRVKWKVFNSSSVVGPPETSLHTVVQGRGELIIFGGLMDKKQNVKYYPKTNALYFVRAKR

SEQ ID NO: 820726 - protein, 717 aa, Homo sapiens; identical to SEQ ID NO: 820720

SEQ ID NO: 820727 - protein, 717 aa, Homo sapiens; identical to SEQ ID NO: 820720

SEQ ID NO: 820728 - protein, 717 aa, Homo sapiens; identical to SEQ ID NO: 820720

SEQ ID NO: 820729 - protein, 435 aa, Homo sapiens [sequence omitted]

SEQ ID NO: 820730 - protein, 435 aa, Homo sapiens [sequence omitted]

SEQ ID NO: 820731 - protein, 524 aa, Homo sapiens
MASSSDSEDDSFMAVDQEETVLEGTMDQDEEPHPVLEAEETRHNRSMSELPEEVLEYILSFLSPYQEHKTAALVCKQWYRLIKGVAHQCYHGFMKAVQEGNIQWESRTYPYPGTPITQRFSHSACYYDANQSMYVFGGCTQSSCNAAFNDLWRLDLNSKEWIRPLASGSYPSPKAGATLVVYKDLLVLFGGWTRPSPYPLHQPERFFDEIHTYSPSKNWWNCIVTTHGPPPMAGHSSCVIDDKMIVFGGSLGSRQMSNDVWVLDLEQWAWSKPNISGPSPHPRGGQSQIVIDDATILILGGCGGPNALFKDAWLLHMHSGPWAWQPLKVENEEHGAPELWCHPACRVGQCVVVFSQAPSGRAPLSPSLNSRPSPISATPPALVPETREYRSQSPVRSMDEAPCVNGRWGTLRPRAQRQTPSGSREGSLSPARGDGSPILNGGSLSPGTAAVGGSSLDSPVQAISPSTPSAPEGYDLKIGLSLAPRRGSLPDQKDLRLGSIVPKCWQTPIPEYELQAHADVRAGH

SEQ ID NO: 820732 - protein, 717 aa, Homo sapiens; identical to SEQ ID NO: 820720

SEQ ID NO: 820733 - protein, 717 aa, Homo sapiens; identical to SEQ ID NO: 820720

SEQ ID NO: 820734 - protein, 122 aa, Homo sapiens
PTRDGVQGVASLPSHASLGFGQASLHTKHEPQGGLEEGVSGSSASPGSDLVVVIAQVASKALLSVHSIRTSHLSTPIASGLVPPPSVMSSFTQAAHLRFTFQHLLNSCFSLPLNGPQLLLLA

SEQ ID NO: 820735 - protein, 546 aa, Homo sapiens
MTKVCREISPVRKRHGGRRAGGKDTLVSVPRSVQDSGQGGREKLELVLSNLQADVLELLLEFVYTGSLVIDSANAKTLLEAASKFQFHTFCKVCVSFLEKQLTASNCLGVLAMAEAMQCSELYHMAKAFALQIFPEVAAQEEILSISKDDFIAYVSNDSLNTKAEELVYETVIKWIKKDPATRTQYAAELLAVVRLPFIHPSYLLNVVDNEELIKSSEACRDLVNEAKRYHMLPHARQEMQTPRTRPRLSAGVAEVIVLVGGRQMVGMTQRSLVAVTCWNPQNNKWYPLASLPFYDREFFSVVSAGDNIYLSGGMESGVTLADVWCYMSLLDNWNLVSRMTVPRCRHNSLVYDGKIYTLGGLGVAGNVDHVERYDTITNQWEAVAPLPKAVHSAAATVCGGKIYVFGGVNEAGRAAGVLQSYVPQTNTWSFIESPMIDNKYAPAVTLNGFVFILGGAYARATTIYDPEKGNIKAGPNMNHSRQFCSAVVLDGKIYATGGIVSSEGPALGNMEAYEPTTNTWTLLPHMPCPVFRHGCVVIKKYIQSG

SEQ ID NO: 820736 - protein, 676 aa, Homo sapiens
MPGHYSLPQPPSQPLSSVVVNMPAQALYASPQPLAVSTLPGVGQVARPGPTAVGNGHMAGPLLPPPPPAQPSATLPSGAPATNGPPTTDSAHGLQMLRTIGVGKYEFTDPGHPREMLKELNQQRRAKAFTDLKIVVEGREFEVHQNVLASCSLYFKDLIQRSVQDSGQGGREKLELVLSNLQADVLELLLEFVYTGSLVIDSANAKTLLEAASKFQFHTFCKVCVSFLEKQLTASNCLGVLAMAEAMQCSELYHMAKAFALQIFPEVAAQEEILSISKDDFIAYVSNDSLNTKAEELVYETVIKWIKKDPATRTQYAAELLAVVRLPFIHPSYLLNVVDNEELIKSSEACRDLVNEAKRYHMLPHARQEMQTPRTRPRLSAGVAEVIVLVGGRQMVGMTQRSLVAVTCWNPQNNKWYPLASLPFYDREFFSVVSAGDNIYLSGGMESGVTLADVWCYMSLLDNWNLVSRMTVPRCRHNSLVYDGKIYTLGGLGVAGNVDHVERYDTITNQWEAVAPLPKAVHSAAATVCGGKIYVFGGVNEAGRAAGVLQSYVPQTNTWSFIESPMIDNKYAPAVTLNGFVFILGGAYARATTIYDPEKGNIKAGPNMNHSRQFCSAVVLDGKIYATGGIVSSEGPALGNMEAYEPTTNTWTLLPHMPCPVFRHGCVVIKKYIQSG

SEQ ID NO: 820737 - protein, 228 aa, Homo sapiens
MPGHYSLPQPPSQPLSSVVVNMPAQALYASPQPLAVSTLPGVGQVARPGPTAVGNGHMAGPLLPPPPPAQPSATLPSGAPATNGPPTTDSAHGLQMLRTIGVGKYEFTDPGHPRGKSCCHVPPHGPASAPPCAVTATPPGQGVLHASSFTGLPNPEAAVEPPPAQDNWPEMGEGGGRCGGRDKQSGKMRRGKKRKEGRACKAQSPSPSSPSPGHSHLQPPRPGQAAKG

SEQ ID NO: 820738 - protein, 165 aa, Homo sapiens
GRGRCCRSRRRRRRLDESRAAPLIAAQADRQEDRLPSPGHPPWAAGTRRRRRRRRNEGRRRRAGTRGGGPGSVSSGQDPSGPSHRYPPALSALHQPSCAHPRPRALCASGRGRSRAPETIWLPGDAHALLSVGGHRGFRILGTNPELARDGRRKVRALFPCEKPP

SEQ ID NO: 820739 - protein, 625 aa, Homo sapiens
SEAITSLVASSASAVTTKAPGISKGDSQSQGLATSIRWGQTPINQSTPWDTDEPPSKQMRESDNPGTGPWVTTVAAGNQPTLIAHSYGVAQPPTFSPAVNVQAPVIGVTPSLPPHVGPQLPLMPGHYSLPQPPSQPLSSVVVNMPAQALYASPQPLAVSTLPGVGQVARPGPTAVGNGHMAGPLLPPPPPAQPSATLPSGAPATNGPPTTDSAHGLQMLRTIGVGKYEFTDPGHPREMLKELNQQRRAKAFTDLKIVVEGREFEVHQNVLASCSLYFKDLIQRSVQDSGQGGREKLELVLSNLQADVLELLLEFVYTGSLVIDSANAKTLLEAASKFQFHTFCKVCVSFLEKQLTASNCLGVLAMAEAMQCSELYHMAKAFALQIFPEVAAQEEILSISKDDFIAYVSNDSLNTKAEELVYETVIKWIKKDPATRTQYAAELLAVVRLPFIHPSYLLNVVDNEELIKSSEACRDLVNEAKRYHMLPHARQEMQTPRTRPRLSAGVAEVIVLVGGRQMVGMTQRSLVAVTCWNPQNNKWYPLASLPFYDREFFSVVSAGDNIYLSGGMESGVTLADVWCYMSLLDNWNLVSRMTVPRCRHNSLVYDGKIYTLGGLGVAGNVDHVER

SEQ ID NO: 820740 - protein, 256 aa, Homo sapiens
CTDAAIGRKSPLMFQRKAERASLDETPGGLECLIAVPPTAGVISGYAGHAEGEEQMAVAALACDLCPAQGPSWPWALFLLSCRYDTITNQWEAVAPLPKAVHSAAATVCGGKIYVFGGVNEAGRAAGVLQSYVPQTNTWSFIESPMIDNKYAPAVTLNGFVFILGGAYARATTIYDPEKGNIKAGPNMNHSRQFCSAVVLDGKIYATGGIVSSEGPALGNMEAYEPTTNTWTLLPHMPCPVFRHGCVVIKKYIQSG

SEQ ID NO: 820741 - protein, 372 aa, Homo sapiens
SEAITSLVASSASAVTTKAPGISKGDSQSQGLATSIRWGQTPINQSTPWDTDEPPSKQMRESDNPGTGPWVTTVAAGNQPTLIAHSYGVAQPPTFSPAVNVQAPVIGVTPSLPPHVGPQLPLMPGHYSLPQPPSQPLSSVVVNMPAQALYASPQPLAVSTLPGVGQVARPGPTAVGNGHMAGPLLPPPPPAQPSATLPSGAPATNGPPTTDSAHGLQMLRTIGVGKYEFTDPGHPREMLKELNQQRRAKAFTDLKIVVEGREFEVHQNVLASCSLYFKDLIQRSVQDSGQGGREKLELVLSNLQADVLELLLEFVYTGSLVIDSANAKTLLEAASKFQFHTFCKVCVSFLGEPGGHICRLGGRVQMGGVGLQ

SEQ ID NO: 820742 - protein, 337 aa, Homo sapiens
MADAAPQLGKRKRELDVEEAHAASTEEKEAGVGNGTCAPVRLPFSGFRLQKVLRESARDKIIFLHGKVNEASGDGDGEDAVVILEKTPFQVEQVAQLLTGSPELQLQFSNDIYSTYHLFPPRQLNDVKTTVVYPATEKHLQKYLRQDLRLIRETGDDYRNITLPHLESQSLSIQWVYNILDKKAEADRIVFENPDPSDGFVLIPDLKWNQQQLDDLYLIAICHRRGIRSLRDLTPEHLPLLRNILHQGQEAILQRYRMKGDHLRVYLHYLPSYYHLHVHFTALGFEAPGSGVERAHLLAEVIENLECDPRHYQQRTLTFALRADDPLLKLLQEAQQS

SEQ ID NO: 820743 - protein, 168 aa, Homo sapiens
MFACSWVYNILDKKAEADRIVFENPDPSDGFVLIPDLKWNQQQLDDLYLIAICHRRGIRSLRDLTPEHLPLLRNILHQGQEAILQRYRMKGDHLRVYLHYLPSYYHLHVHFTALGFEAPGSGVERAHLLAEVIENLECDPRHYQQRTLTFALRADDPLLKLLQEAQQS

SEQ ID NO: 820744 - protein, 179 aa, Homo sapiens
ERGVGGYILSQPAAASWVYNILDKKAEADRIVFENPDPSDGFVLIPDLKWNQQQLDDLYLIAICHRRGIRSLRDLTPEHLPLLRNILHQGQEAILQRYRMKGDHLRVYLHYLPSYYHLHVHFTALGFEAPGSGVERAHLLAEVIENLECDPRHYQQRTLTFALRADDPLLKLLQEAQQS

SEQ ID NO: 820745 - protein, 117 aa, Homo sapiens
GRVGLSPYRLGDLTPEHLPLLRNILHQGQEAILQRYRMKGDHLRVYLHYLPSYYHLHVHFTALGFEAPGSGVERAHLLAEVIENLECDPRHYQQRTLTFALRADDPLLKLLQEAQQS

SEQ ID NO: 820746 - protein, 344 aa, Homo sapiens
YRLGSEAWVRAAPQLGKRKRELDVEEAHAASTEEKEAGVGNGTCAPVRLPFSGFRLQKVLRESARDKIIFLHGKVNEASGDGDGEDAVVILEKTPFQVEQVAQLLTGSPELQLQFSNDIYSTYHLFPPRQLNDVKTTVVYPATEKHLQKYLRQDLRLIRETGDDYRNITLPHLESQSLSIQWVYNILDKKAEADRIVFENPDPSDGFVLIPDLKWNQQQLDDLYLIAICHRRGIRSLRDLTPEHLPLLRNILHQGQEAILQRYRMKGDHLRVYLHYLPSYYHLHVHFTALGFEAPGSGVERAHLLAEVIENLECDPRHYQQRTLTFALRADDPLLKLLQEAQQS

SEQ ID NO: 820747 - protein, 328 aa, Homo sapiens
YRLGSEAWVRAAPQLGKRKRELDVEEAHAASTEEKEAGVGNGTCAPVRLPFSGFRLQKVNEASGDGDGEDAVVILEKTPFQVEQVAQLLTGSPELQLQFSNDIYSTYHLFPPRQLNDVKTTVVYPATEKHLQKYLRQDLRLIRETGDDYRNITLPHLESQSLSIQWVYNILDKKAEADRIVFENPDPSDGFVLIPDLKWNQQQLDDLYLIAICHRRGIRSLRDLTPEHLPLLRNILHQGQEAILQRYRMKGDHLRVYLHYLPSYYHLHVHFTALGFEAPGSGVERAHLLAEVIENLECDPRHYQQRTLTFALRADDPLLKLLQEAQQS

SEQ ID NO: 820748 - protein, 418 aa, Homo sapiens
MADAAPQLGKRKRELDVEEAHAASTEEKEAGVGNGTCAPVRLPFSGFRLQKVLRESARDKIIFLHGKVNEASGDGDGEDAVVILEKTPFQVEQVAQLLTGSPELQLQFSNDIYSTYHLFPPRQLNGDTLAMSGDILGCHNLGRVLTNIPTEATGMQLNILQCTGQPLQQNYPGQNVSGAEIEKPWIKHHSTYVVFTVCQTFFKNFTDVKTTVVYPATEKHLQKYLRQDLRLIRETGDDYRNITLPHLESQSLSIQWVYNILDKKAEADRIVFENPDPSDGFVLIPDLKWNQQQLDDLYLIAICHRRGIRSLRDLTPEHLPLLRNILHQGQEAILQRYRMKGDHLRVYLHYLPSYYHLHVHFTALGFEAPGSGVERAHLLAEVIENLECDPRHYQQRTLTFALRADDPLLKLLQEAQQS

SEQ ID NO: 820749 - protein, 264 aa, Homo sapiens
MQLNILQCTGQPLQQNYPGQNVSGAEIEKPWIKHHSTYVVFTVCQTFFKNFTDVKTTVVYPATEKHLQKYLRQDLRLIRETGDDYRNITLPHLESQSLSIQWVYNILDKKAEADRIVFENPDPSDGFVLIPDLKWNQQQLDDLYLIAICHRRGIRSLRDLTPEHLPLLRNILHQGQEAILQRYRMKGDHLRVYLHYLPSYYHLHVHFTALGFEAPGSGVERAHLLAEVIENLECDPRHYQQRTLTFALRADDPLLKLLQEAQQS

SEQ ID NO: 820750 - protein, 249 aa, Homo sapiens
LLSDLEDPTSHGWLHHSLQFSNDIYSTYHLFPPRQLNDVKTTVVYPATEKHLQKYLRQDLRLIRETGDDYRNITLPHLESQSLSIQWVYNILDKKAEADRIVFENPDPSDGFVLIPDLKWNQQQLDDLYLIAICHRRGIRSLRDLTPEHLPLLRNILHQGQEAILQRYRMKGDHLRVYLHYLPSYYHLHVHFTALGFEAPGSGVERAHLLAEVIENLECDPRHYQQRTLTFALRADDPLLKLLQEAQQS

SEQ ID NO: 820751 - protein, 337 aa, Homo sapiens; identical to SEQ ID NO: 820742

SEQ ID NO: 820752 - protein, 180 aa, Homo sapiens
  misc_feature (14)..(14): Xaa can be any naturally occurring amino acid
QNTATPGGGSAPTXTLSWVYNILDKKAEADRIVFENPDPSDGFVLIPDLKWNQQQLDDLYLIAICHRRGIRSLRDLTPEHLPLLRNILHQGQEAILQRYRMKGDHLRVYLHYLPSYYHLHVHFTALGFEAPGSGVERAHLLAEVIENLECDPRHYQQRTLTFALRADDPLLKLLQEAQQS

SEQ ID NO: 820753 - protein, 154 aa, Homo sapiens
MADAAPQLGKRKRELDVEEAHAASTEEKEAGVGNGTCAPVRLPFSGFRLQKVLRESARDKIIFLHGKVNEASGDGDGEDAVVILEKTPFQVEQVAQLLTGSPELQLQFSNDIYSTYHLFPPRQLNDVKTSTPATWSTPASRTPSSWSGGSCTDS

SEQ ID NO: 820754 - protein, 38 aa, Homo sapiens
MGLNPSHAVLVLLSTGSRAPPGPTLKQPRLLEEGPDER

SEQ ID NO: 820755 - protein, 633 aa, Homo sapiens
PQNLGSRRRHPPPQPASAAAGPAPAPASAAAARPRPPAPRASRGRRLHASQCSPRPACNPARPPQLCPLQLQPRAAPPRPDTSSPACSSRMAAAKAEMQLMSPLQISDPFGSFPHSPTMDNYPKLEEMMLLSNGAPQFLGAAGAPEGSGSNSSSSSSGGGGGGGGGSNSSSSSSTFNPQADTGEQPYEHLTAESFPDISLNNEKVLVETSYPSQTTRLPPITYTGRFSLEPAPNSGNTLWPEPLFSLVSGLVSMTNPPASSSSAPSPAASSASASQSPPLSCAVPSNDSSPIYSAAPTFPTPNTDIFPEPQSQAFPGSAGTALQYPPPAYPAAKGGFQVPMIPDYLFPQQQGDLGLGTPDQKPFQGLESRTQQPSLTPLSTIKAFATQSGSQDLKALNTSYQSQLIKPSRMRKYPNRPSKTPPHERPYACPVESCDRRFSRSDELTRHIRIHTGQKPFQCRICMRNFSRSDHLTTHIRTHTGEKPFACDICGRKFARSDERKRHTKIHLRQKDKKADKSVVASSATSSLSSYPSPVATSYPSPVTTSYPSPATTSYPSPVPTSFSSPGSSTYPSPVHSGFPSPSVATTYSSVPPAFPAQVSSFPSSAVTNSFSASTGLSDMTATFSPRTIEIC

SEQ ID NO: 820756 - protein, 633 aa, Homo sapiens; identical to SEQ ID NO: 820755

SEQ ID NO: 820757 - protein, 291 aa, Homo sapiens
PQNLGSRRRHPPPQPASAAAGPAPAPASAAAARPRPPAPRASRGRRLHASQCSPRPACNPARPPQLCPLQLQPRAAPPRPDTSSPACSSRMAAAKAEMQLMSPLQISDPFGSFPHSPTMDNYPKLEEMMLLSNGAPQFLGAAGAPEGSGSNSSSSSSGGGGGGGGGSNSSSSSSTFNPQADTGEQPYEHLTAESFPDISLNNEKVLVETSYPSQTTRLPPITYTGRFSLEPAPNSGNTLWPEPLFSLVSGLVSMTNPPASSSSAPSPSTPPHQATPAQVPSLDAERSHSSS

SEQ ID NO: 820758 - protein, 380 aa, Homo sapiens
MTNPPASSSSAPSPAASSASASQSPPLSCAVPSNDSSPIYSAAPTFPTPNTDIFPEPQSQAFPGSAGTALQYPPPAYPAAKGGFQVPMIPDYLFPQQQGDLGLGTPDQKPFQGLESRTQQPSLTPLSTIKAFATQSGSQDLKALNTSYQSQLIKPSRMRKYPNRPSKTPPHERPYACPVESCDRRFSRSDELTRHIRIHTGQKPFQCRICMRNFSRSDHLTTHIRTHTGEKPFACDICGRKFARSDERKRHTKIHLRQKDKKADKSVVASSATSSLSSYPSPVATSYPSPVTTSYPSPATTSYPSPVPTSFSSPGSSTYPSPVHSGFPSPSVATTYSSVPPAFPAQVSSFPSSAVTNSFSASTGLSDMTATFSPRTIEIC

SEQ ID NO: 820759 - protein, 435 aa, Homo sapiens
IEGWDSSSRTGCNHDGRISFDEYWTLIGGITGPSAKLIHEQEQQSSSKRPLWPHLPGTGLMPRPGALPRAASSASASQSPPLSCAVPSNDSSPIYSAAPTFPTPNTDIFPEPQSQAFPGSAGTALQYPPPAYPAAKGGFQVPMIPDYLFPQQQGDLGLGTPDQKPFQGLESRTQQPSLTPLSTIKAFATQSGSQDLKALNTSYQSQLIKPSRMRKYPNRPSKTPPHERPYACPVESCDRRFSRSDELTRHIRIHTGQKPFQCRICMRNFSRSDHLTTHIRTHTGEKPFACDICGRKFARSDERKRHTKIHLRQKDKKADKSVVASSATSSLSSYPSPVATSYPSPVTTSYPSPATTSYPSPVPTSFSSPGSSTYPSPVHSGFPSPSVATTYSSVPPAFPAQVSSFPSSAVTNSFSASTGLSDMTATFSPRTIEIC

SEQ ID NO: 820760 - protein, 307 aa, Homo sapiens
  misc_feature (49)..(49): Xaa can be any naturally occurring amino acid
ETESRCPPGWSAVASSRLTAGSAPRVHAILLPHPPEELGVQAPARVAKXLIVDRGVSEGCWVRLSQDLKALNTSYQSQLIKPSRMRKYPNRPSKTPPHERPYACPVESCDRRFSRSDELTRHIRIHTGQKPFQCRICMRNFSRSDHLTTHIRTHTGEKPFACDICGRKFARSDERKRHTKIHLRQKDKKADKSVVASSATSSLSSYPSPVATSYPSPVTTSYPSPATTSYPSPVPTSFSSPGSSTYPSPVHSGFPSPSVATTYSSVPPAFPAQVSSFPSSAVTNSFSASTGLSDMTATFSPRTIEIC

SEQ ID NO: 820761 - protein, 147 aa, Homo sapiens
MIELGTVRSSESDERKRHTKIHLRQKDKKADKSVVASSATSSLSSYPSPVATSYPSPVTTSYPSPATTSYPSPVPTSFSSPGSSTYPSPVHSGFPSPSVATTYSSVPPAFPAQVSSFPSSAVTNSFSASTGLSDMTATFSPRTIEIC

SEQ ID NO: 820762 - protein, 633 aa, Homo sapiens; identical to SEQ ID NO: 820755

SEQ ID NO: 820763 - protein, 633 aa, Homo sapiens; identical to SEQ ID NO: 820755

SEQ ID NO: 820764 - protein, 633 aa, Homo sapiens; identical to SEQ ID NO: 820755

SEQ ID NO: 820765 - protein, 633 aa, Homo sapiens; identical to SEQ ID NO: 820755

SEQ ID NO: 820766 - protein, 633 aa, Homo sapiens; identical to SEQ ID NO: 820755

SEQ ID NO: 820767 - protein, 633 aa, Homo sapiens; identical to SEQ ID NO: 820755

SEQ ID NO: 820768 - protein, 633 aa, Homo sapiens; identical to SEQ ID NO: 820755

SEQ ID NO: 820769 - protein, 633 aa, Homo sapiens; identical to SEQ ID NO: 820755

SEQ ID NO: 820770 - protein, 633 aa, Homo sapiens; identical to SEQ ID NO: 820755

SEQ ID NO: 820771 - protein, 633 aa, Homo sapiens; identical to SEQ ID NO: 820755

SEQ ID NO: 820772 - protein, 621 aa, Homo sapiens
PQNLGSRRRHPPPQPASAAAGPAPAPASAAAARPRPPAPRASRGRRLHASQCSPRPACNPARPPQLCPLQLQPRAAPPRPDTSSPACSSRMAAAKAEMQLMSPLQISDPFGSFPHSPTMDNYPKLEEMMLLSNGAPQFLGAAGAPEGSGSNSSSSSSGGGGGGGGGSNSSSSSSTFNPQADTGEQPYEHLTAESFPDISLNNEKVLVETSYPSQTTRLPPITYTGRFSLEPAPNSGNTLWPEPLFSLVSGLVSMTNPPASSSSAPSPAASSASASQSPPLSCAVPSNDSSPIYSAAPTFPTPNTDIFPEPQSQAFPGSAGTALQYPPPAYPAAKGGFQVPMIPDYLFPQQQGDLGLGTPDQKPFQGLESRTQQPSLTPLSTIKAFATQSGSQDLKALNTSYQSQLIKPSRMRKYPNRPSKTPPHERPYACPVESCDRRFSRSDELTRHIRIHTGQKPFQCRICMRNFSRSDHLTTHIRTHTGEKPFACDICGRKFARSDERKRHTKIHLRQKDKKADKSVVASSATSSLSSYPSPVATSYPSPVTTSYPSPATTSYPSPVPTSFSSPGSSTYPSPVHSGFPSPSVATTYSSVPPAFPAQVSSFPSSAVTNSFSAHGVRANC

SEQ ID NO: 820773 - protein, 553 aa, Homo sapiens
PQNLGSRRRHPPPQPASAAAGPAPAPASAAAARPRPPAPRASRGRRLHASQCSPRPACNPARPPQLCPLQLQPRAAPPRPDTSSPACSSRMAAAKAEMQLMSPLQISDPFGSFPHSPTMDNYPKLEEMMLLSNGAPQFLGAAGAPEGSGSNSSSSSSGGGGGGGGGSNSSSSSSTFNPQADTGEQPYEHLTAESFPDISLNNEKVLVETSYPSQTTRLPPITYTGRFSLEPAPNSGNTLWPEPLFSLVSGLVSMTNPPASSSSAPSPAASSASASQSPPLSCAVPSNDSSPIYSAAPTFPTPNTDIFPEPQSQAFPGSAGTALQYPPPAYPAAKGGFQVPMIPDYLFPQQQGDLGLGTPDQKPFQGLESRTQQPSLTPLSTIKAFATQSGSQDLKALNTSYQSQLIKPSRMRKYPNRPSKTPPHERPYACPVESCDRRFSRSDELTRHIRIHTGQKPFQCRICMRNFSRSDHLTTHIRTHTGEKPFACDICGRKFARSDERKRHTKIHLRQKDKKADKSVVASSATSSLSSYPSPVATSYPSWPEMGSSRSPQ

SEQ ID NO: 820774 - protein, 565 aa, Homo sapiens
PQNLGSRRRHPPPQPASAAAGPAPAPASAAAARPRPPAPRASRGRRLHASQCSPRPACNPARPPQLCPLQLQPRAAPPRPDTSSPACSSRMAAAKAEMQLMSPLQISDPFGSFPHSPTMDNYPKLEEMMLLSNGAPQFLGAAGAPEGSGSNSSSSSSGGGGGGGGGSNSSSSSSTFNPQADTGEQPYEHLTAESFPDISLNNEKVLVETSYPSQTTRLPPITYTGRFSLEPAPNSGNTLWPEPLFSLVSGLVSMTNPPASSSSAPSPAASSASASQSPPLSCAVPSNDSSPIYSAAPTFPTPNTDIFPEPQSQAFPGSAGTALQYPPPAYPAAKGGFQVPMIPDYLFPQQQGDLGLGTPDQKPFQGLESRTQQPSLTPLSTIKAFATQSGSQDLKALNTSYQSQLIKPSRMRKYPNRPSKTPPHERPYACPVESCDRRFSRSDELTRHIRIHTGQKPFQCRICMRNFSRSDHLTTHIRTHTGEKPFACDICGRKFARSDERKRHTKIHLRQKDKKADKSVVASSATSSLSSYPSPVATSYPSPVTTSYPSPACLAPPSERAALLS

SEQ ID NO: 820775 - protein, 548 aa, Homo sapiens
PQNLGSRRRHPPPQPASAAAGPAPAPASAAAARPRPPAPRASRGRRLHASQCSPRPACNPARPPQLCPLQLQPRAAPPRPDTSSPACSSRMAAAKAEMQLMSPLQISDPFGSFPHSPTMDNYPKLEEMMLLSNGAPQFLGAAGAPEGSGSNSSSSSSGGGGGGGGGSNSSSSSSTFNPQADTGEQPYEHLTAESFPDISLNNEKVLVETSYPSQTTRLPPITYTGRFSLEPAPNSGNTLWPEPLFSLVSGLVSMTNPPASSSSAPSPAASSASASQSPPLSCAVPSNDSSPIYSAAPTFPTPNTDIFPEPQSQAFPGSAGTALQYPPPAYPAAKGGFQVPMIPDYLFPQQQGDLGLGTPDQKPFQGLESRTQQPSLTPLSTIKAFATQSGSQDLKALNTSYQSQLIKPSRMRKYPNRPSKTPPHERPYACPVESCDRRFSRSDELTRHIRIHTGQKPFQCRICMRNFSRSDHLTTHIRTHTGEKPFACDICGRKFARSDERKRHTKIHLRQKDKKADKSVVASSATSSLSSYPSCLRFVLACDRPGLR

SEQ ID NO: 820776 - protein, 269 aa, Homo sapiens
PQNLGSRRRHPPPQPASAAAGPAPAPASAAAARPRPPAPRASRGRRLHASQCSPRPACNPARPPQLCPLQLQPRAAPPRPDTSSPACSSRMAAAKAEMQLMSPLQISDPFGSFPHSPTMDNYPKLEEMMLLSNGAPQFLGAAGAPEGSGSNSSSSSSGGGGGGGGGSNSSSSSSTFNPQADTGEQPYEHLTAESFPDISLNNEKVLVETSYPSQTTRLPPITYTGRFSLEPAPNSGNTLWPEPLLPLADAYVFRYMPSTPQPPLVAPID

SEQ ID NO: 820777 - protein, 83 aa, Homo sapiens
FNAFFKILCFELGVMNNSFVDLCPQNTVSFFSLQVVTYDGASTIVDWFMPLYDHGVFGNGCGKWCTWRAWFFVGILSYNWIRL

SEQ ID NO: 820778 - protein, 1544 aa, Homo sapiens
RHGRQHRVPVLFRLAPESFGSARRWTHERVPPWSLTTAEQTATEGRNSEPSSGPRQETYRQERQTHHGLHQCREPAPENHPRLARSVTELSKEFQEAGEPITDDSTSLHKFSYKLEYLLQFDQKEKATLLGNKKDYWDYFCACLAKVKGANDGIRFVKSISELRTSLGKGRAFIRYSLVHQRLADTLQQCFMNTKVTSDWYYARSPFLQPKLSSDIVGQLYELTEVQFDLASRGFDLDAAWPTFARRTLTTGSSAYLWKPPSRSSSMSSLVSSYLQTQEMVSNFDLNSPLNNEALEGFDEMRLELDQLEVREKQLQERMQQLDRENQELRAAVSQQGEQLQTERERGRTAAEDNVRLTCLVAELQKQWEVTQATQNTVKELQTCLQALELGAAEKEEDYHTALRRLESMLQPLAQELEATRDSLDKKNQHLASFPGWLAMAQQKADTASDTKGRQEPIPSDAAQEMQELGEKLQALERERTKVEEVNRQQSAQLEQLVKELQLKEDARASLERLVKEMAPLQEELSGKGQEADQLWRRLQELLAHTSSWEEELAELRREKKQQQEEKELLEQEVRSLTRQLQFLETQLAQVSQHVSDLEEQKKQLIQDKDHLSQQVGMLERLAGPPGPELPVAGEKNEALVPVNSSLQEAWGKPEEEQRGLQEAQLDDTKVQEGSQEEELRQANRELEKELQNVVGRNQLLEGKLQALQADYQALQQRESAIQGSLASLEAEQASIRHLGDQMEASLLAVRKAKEAMKAQMAEKEAILQSKEGECQQLREEVEQCQQLAEARHRELRALESQCQQQTQLIEVLTAEKGQQGVGPPTDNEARELAAQLALSQAQLEVHQGEVQRLQAQVVDLQAKMRAALDDQDKVQSQLSMAEAVLREHKTLVQQLKEQNEALNRAHVQELLQCSEREGALQEERADEAQQREEELRALQEELSQAKCSSEEAQLEHAELQEQLHRANTDTAELGIQVCALTVEKERVEEALACAVQELQDAKEAASREREGLERQVAGLQQEKESLQEKLKAAKAAAGSLPGLQAQLAQAEQRAQSLQEAAHQELNTLKFQLSAEIMDYQSRLKNAGEECKSLRGQLEEQGRQLQAAEEAVEKLKATQADMGEKLSCTSNHLAECQAAMLRKDKEGAALREDLERTQKELEKATTKIQEYYNKLCQEVTNRERNDQKMLADLDDLNRTKKYLEERLIELLRDKDALWQKSDALEFQQKLSAEERWLGDTEANHCLDCKREFSWMVRRHHCRICGRIFCYYCCNNYVLSKHGGKKERCCRACFQKLSEGPGSPDSSGSGTSQGEPSPALSPASPGPQATGGQGANTDYRPPDDAVFDIITDEELCQIQESGSSLPETPTETDSLDPNAAEQDTTSTSLTPEDTEDMPVGQDSEICLLKSGELMIKVPLTVDEIASFGEGSRELFVRSSTYSLIPITVAEAGLTISWVFSSDPKSISFSVVFQEAEDTPLDQCKVLIPTTRCNSHKENIQGQLKVRTPGIYMLIFDNTFSRFVSKKVFYHLTVDRPVIYDGSDFL

SEQ ID NO: 820779 - protein, 1544 aa, Homo sapiens; identical to SEQ ID NO: 820778

SEQ ID NO: 820780 - protein, 915 aa, Homo sapiens
RHGRQHRVPVLFRLAPESFGSARRWTHERVPPWSLTTAEQTATEGRNSEPSSGPRQETYRQERQTHHGLHQCREPAPENHPRLARSVTELSKEFQEAGEPITDDSTSLHKFSYKLEYLLQFDQKEKATLLGNKKDYWDYFCACLAKVKGANDGIRFVKSISELRTSLGKGRAFIRYSLVHQRLADTLQQCFMNTKVTSDWYYARSPFLQPKLSSDIVGQLYELTEVQFDLASRGFDLDAAWPTFARRTLTTGSSAYLWKPPSRSSSMSSLVSSYLQTQEMVSNFDLNSPLNNEALEGFDEMRLELDQLEVREKQLQERMQQLDRENQELRAAVSQQGEQLQTERERGRTAAEDNVRLTCLVAELQKQWEVTQATQNTVKELQTCLQALELGAAEKEEDYHTALRRLESMLQPLAQELEATRDSLDKKNQHLASFPGWLAMAQQKADTASDTKGRQEPIPSDAAQEMQELGEKLQALERERTKVEEVNRQQSAQLEQLVKELQLKEDARASLERLVKEMAPLQEELSGAQKELEKATTKIQEYYNKLCQEVTNRERNDQKMLADLDDLNRTKKYLEERLIELLRDKDALWQKSDALEFQQKLSAEERWLGDTEANHCLDCKREFSWMVRRHHCRICGRIFCYYCCNNYVLSKHGGKKERCCRACFQKLSEGPGSPDSSGSGTSQGEPSPALSPASPGPQATGGQGANTDYRPPDDAVFDIITDEELCQIQESGSSLPETPTETDSLDPNAAEQDTTSTSLTPEDTEDMPVGQDSEICLLKSGELMIKVPLTVDEIASFGEGSRELFVRSSTYSLIPITVAEAGLTISWVFSSDPKSISFSVVFQEAEDTPLDQCKVLIPTTRCNSHKENIQGQLKVRTPGIYMLIFDNTFSRFVSKKVFYHLTVDRPVIYDGSDFL

SEQ ID NO: 820781 - protein, 1072 aa, Homo sapiens
YRGIITKGLSDRRKDPLGDAQLEQLVKELQLKEDARASLERLVKEMAPLQEELSGKGQEADQLWRRLQELLAHTSSWEEELAELRREKKQQQEEKELLEQEVRSLTRQLQFLETQLAQVSQHVSDLEEQKKQLIQDKDHLSQQVGMLERLAGPPGPELPVAGEKNEALVPVNSSLQEAWGKPEEEQRGLQEAQLDDTKVQEGSQEEELRQANRELEKELQNVVGRNQLLEGKLQALQADYQALQQRESAIQGSLASLEAEQASIRHLGDQMEASLLAVRKAKEAMKAQMAEKEAILQSKEGECQQLREEVEQCQQLAEARHRELRALESQCQQQTQLIEVLTAEKGQQGVGPPTDNEARELAAQLALSQAQLEVHQGEVQRLQAQVVDLQAKMRAALDDQDKVQSQLSMAEAVLREHKTLVQQLKEQNEALNRAHVQELLQCSEREGALQEERADEAQQREEELRALQEELSQAKCSSEEAQLEHAELQEQLHRANTDTAELGIQVCALTVEKERVEEALACAVQELQDAKEAASREREGLERQVAGLQQEKESLQEKLKAAKAAAGSLPGLQAQLAQAEQRAQSLQEAAHQELNTLKFQLSAEIMDYQSRLKNAGEECKSLRGQLEEQGRQLQAAEEAVEKLKATQADMGEKLSCTSNHLAECQAAMLRKDKEGAALREDLERTQKELEKATTKIQEYYNKLCQEVTNRERNDQKMLADLDDLNRTKKYLEERLIELLRDKDALWQKSDALEFQQKLSAEERWLGDTEANHCLDCKREFSWMVRRHHCRICGRIFCYYCCNNYVLSKHGGKKERCCRACFQKLSEGPGSPDSSGSGTSQGEPSPALSPASPGPQATGGQGANTDYRPPDDAVFDIITDEELCQIQESGSSLPETPTETDSLDPNAAEQDTTSTSLTPEDTEDMPVGQDSEICLLKSGELMIKVPLTVDEIASFGEGSRELFVRSSTYSLIPITVAEAGLTISWVFSSDPKSISFSVVFQEAEDTPLDQCKVLIPTTRCNSHKENIQGQLKVRTPGIYMLIFDNTFSRFVSKKVFYHLTVDRPVIYDGSDFL

SEQ ID NO: 820782 - protein, 910 aa, Homo sapiens
RFRVLQLCFLGAAFGLGQLLLQLPVGLQEAQLDDTKVQEGSQEEELRQANRELEKELQNVVGRNQLLEGKLQALQADYQALQQRESAIQGSLASLEAEQASIRHLGDQMEASLLAVRKAKEAMKAQMAEKEAILQSKEGECQQLREEVEQCQQLAEARHRELRALESQCQQQTQLIEVLTAEKGQQGVGPPTDNEARELAAQLALSQAQLEVHQGEVQRLQAQVVDLQAKMRAALDDQDKVQSQLSMAEAVLREHKTLVQQLKEQNEALNRAHVQELLQCSEREGALQEERADEAQQREEELRALQEELSQAKCSSEEAQLEHAELQEQLHRANTDTAELGIQVCALTVEKERVEEALACAVQELQDAKEAASREREGLERQVAGLQQEKESLQEKLKAAKAAAGSLPGLQAQLAQAEQRAQSLQEAAHQELNTLKFQLSAEIMDYQSRLKNAGEECKSLRGQLEEQGRQLQAAEEAVEKLKATQADMGEKLSCTSNHLAECQAAMLRKDKEGAALREDLERTQKELEKATTKIQEYYNKLCQEVTNRERNDQKMLADLDDLNRTKKYLEERLIELLRDKDALWQKSDALEFQQKLSAEERWLGDTEANHCLDCKREFSWMVRRHHCRICGRIFCYYCCNNYVLSKHGGKKERCCRACFQKLSEGPGSPDSSGSGTSQGEPSPALSPASPGPQATGGQGANTDYRPPDDAVFDIITDEELCQIQESGSSLPETPTETDSLDPNAAEQDTTSTSLTPEDTEDMPVGQDSEICLLKSGELMIKVPLTVDEIASFGEGSRELFVRSSTYSLIPITVAEAGLTISWVFSSDPKSISFSVVFQEAEDTPLDQCKVLIPTTRCNSHKENIQGQLKVRTPGIYMLIFDNTFSRFVSKKVFYHLTVDRPVIYDGSDFL

SEQ ID NO: 820783 - protein, 502 aa, Homo sapiens
RHGRQHRVPVLFRLAPESFGSARRWTHERVPPWSLTTAEQTATEGRNSEPSSGPRQETYRQERQTHHGLHQCREPAPENHPRLARSVTELSKEFQEAGEPITDDSTSLHKFSYKLEYLLQFDQKEKATLLGNKKDYWDYFCACLAKVKGANDGIRFVKSISELRTSLGKGRAFIRYSLVHQRLADTLQQCFMNTKVTSDWYYARSPFLQPKLSSDIVGQLYELTEVQFDLASRGFDLDAAWPTFARRTLTTGSSAYLWKPPSRSSSMSSLVSSYLQTQEMVSNFDLNSPLNNEALEGFDEMRLELDQLEVREKQLQERMQQLDRENQELRAAVSQQGEQLQTERERGRTAAEDNVRLTCLVAELQKQWEVTQATQNTVKELQTCLQALELGAAEKEEDYHTALRRLESMLQPLAQELEATRDSLDKKNQHLASFPGWLAMLISLNNSYVFISIPDAFFIMPLKPLTTFKNMPTSVRFTYPQTRRHVWHKVLSSRSKWTLQSA

SEQ ID NO: 820784 - protein, 1544 aa, Homo sapiens; identical to SEQ ID NO: 820778

SEQ ID NO: 820785 - protein, 501 aa, Homo sapiens
RHGRQHRVPVLFRLAPESFGSARRWTHERVPPWSLTTAEQTATEGRNSEPSSGPRQETYRQERQTHHGLHQCREPAPENHPRLARSVTELSKEFQEAGEPITDDSTSLHKFSYKLEYLLQFDQKEKATLLGNKKDYWDYFCACLAKVKGANDGIRFVKSISELRTSLGKGRAFIRYSLVHQRLADTLQQCFMNTKVTSDWYYARSPFLQPKLSSDIVGQLYELTEVQFDLASRGFDLDAAWPTFARRTLTTGSSAYLWKPPSRSSSMSSLVSSYLQTQEMVSNFDLNSPLNNEALEGFDEMRLELDQLEVREKQLQERMQQLDRENQELRAAVSQQGEQLQTERERGRTAAEDNVRLTCLVAELQKQWEVTQATQNTVKELQTCLQALELGAAEKEEDYHTALRRLESMLQPLAQELEATRDSLDKKNQHLASFPGWLAMGPACWRLSWVHWPCPVNPRAVTPSGTPGKRRYTAIMRVGARGPPGDPDQLLQSCSCPSLPQ

SEQ ID NO: 820786 - protein, 803 aa, Homo sapiens
MTTAKEPSASGKSVQQQEQELVGSNPPQRNWKGIAIALLVILVICSLIVTSVILLTPAEDNSLSQKKKVTVEDLFSEDFKIHDPEAKWISDTEFIYREQKGTVRLWNVETNTSTVLIEGKKIESLRAIRYEISPDREYALFSYNVEPIYQHSYTGYYVLSKIPHGDPQSLDPPEVSNAKLQYAGWGPKGQQLIFIFENNIYYCAHVGKQAIRVVSTGKEGVIYNGLSDWLYEEEILKTHIAHWWSPDGTRLAYAAINDSRVPIMELPTYTGSIYPTVKPYHYPKAGSENPSISLHVIGLNGPTHDLEMMPPDDPRMREYYITMVKWATSTKVAVTWLNRAQNVSILTLCDATTGVCTKKHEDESEAWLHRQNEEPVFSKDGRKFFFIRAIPQGGRGKFYHITVSSSQPNSSNDNIQSITSGDWDVTKILAYDEKGNKIYFLSTEDLPRRRQLYSANTVGNFNRQCLSCDLVENCTYFSASFSHSMDFFLLKCEGPGVPMVTVHNTTDKKKMFDLETNEHVKKAINDRQMPKVEYRDIEIDDYNLPMQILKPATFTDTTHYPLLLVVDGTPGSQSVAEKFEVSWETVMVSSHGAVVVKCDGRGSGFQGTKLLHEVRRRLGLLEEKDQMEAVRTMLKEQYIDRTRVAVFGKDYGGYLSTYILPAKGENQGQTFTCGSALSPITDFKLYASAFSERYLGLHGLDNRAYEMTKVAHRVSALEEQQFLIIHPTADEKIHFQHTAELITQLIRGKANYSLQIYPDESHYFTSSSLKQHLYRSIINFFVECFRIQDKLPTVTAKEDEEED

SEQ ID NO: 820787 - protein, 803 aa, Homo sapiens; identical to SEQ ID NO: 820786

SEQ ID NO: 820788 - protein, 912 aa, Homo sapiens
RWACLLLLLLPPHRLFFFNLERGGEWEPERKQNIKKPQRQPAGARCPMASLYQRFTGKINTSRSFPAPPEASHLLGGQGPEEDGGAGAKPLGPRAQAAAPRERGGGGGGAGGRPRFQYQARSDGDEEDELVGSNPPQRNWKGIAIALLVILVICSLIVTSVILLTPAEDNSLSQKKKVTVEDLFSEDFKIHDPEAKWISDTEFIYREQKGTVRLWNVETNTSTVLIEGKKIESLRAIRYEISPDREYALFSYNVEPIYQHSYTGYYVLSKIPHGDPQSLDPPEVSNAKLQYAGWGPKGQQLIFIFENNIYYCAHVGKQAIRVVSTGKEGVIYNGLSDWLYEEEILKTHIAHWWSPDGTRLAYAAINDSRVPIMELPTYTGSIYPTVKPYHYPKAGSENPSISLHVIGLNGPTHDLEMMPPDDPRMREYYITMVKWATSTKVAVTWLNRAQNVSILTLCDATTGVCTKKHEDESEAWLHRQNEEPVFSKDGRKFFFIRAIPQGGRGKFYHITVSSSQPNSSNDNIQSITSGDWDVTKILAYDEKGNKIYFLSTEDLPRRRQLYSANTVGNFNRQCLSCDLVENCTYFSASFSHSMDFFLLKCEGPGVPMVTVHNTTDKKKMFDLETNEHVKKAINDRQMPKVEYRDIEIDDYNLPMQILKPATFTDTTHYPLLLVVDGTPGSQSVAEKFEVSWETVMVSSHGAVVVKCDGRGSGFQGTKLLHEVRRRLGLLEEKDQMEAVRTMLKEQYIDRTRVAVFGKDYGGYLSTYILPAKGENQGQTFTCGSALSPITDFKLYASAFSERYLGLHGLDNRAYEMTKVAHRVSALEEQQFLIIHPTADEKIHFQHTAELITQLIRGKANYSLQIYPDESHYFTSSSLKQHLYRSIINFFVECFRIQDKLPTVTAKEDEEED

SEQ ID NO: 820789 - protein, 801 aa, Homo sapiens
MKEKAMIKTAKMQGNVMELVGSNPPQRNWKGIAIALLVILVICSLIVTSVILLTPAEDNSLSQKKKVTVEDLFSEDFKIHDPEAKWISDTEFIYREQKGTVRLWNVETNTSTVLIEGKKIESLRAIRYEISPDREYALFSYNVEPIYQHSYTGYYVLSKIPHGDPQSLDPPEVSNAKLQYAGWGPKGQQLIFIFENNIYYCAHVGKQAIRVVSTGKEGVIYNGLSDWLYEEEILKTHIAHWWSPDGTRLAYAAINDSRVPIMELPTYTGSIYPTVKPYHYPKAGSENPSISLHVIGLNGPTHDLEMMPPDDPRMREYYITMVKWATSTKVAVTWLNRAQNVSILTLCDATTGVCTKKHEDESEAWLHRQNEEPVFSKDGRKFFFIRAIPQGGRGKFYHITVSSSQPNSSNDNIQSITSGDWDVTKILAYDEKGNKIYFLSTEDLPRRRQLYSANTVGNFNRQCLSCDLVENCTYFSASFSHSMDFFLLKCEGPGVPMVTVHNTTDKKKMFDLETNEHVKKAINDRQMPKVEYRDIEIDDYNLPMQILKPATFTDTTHYPLLLVVDGTPGSQSVAEKFEVSWETVMVSSHGAVVVKCDGRGSGFQGTKLLHEVRRRLGLLEEKDQMEAVRTMLKEQYIDRTRVAVFGKDYGGYLSTYILPAKGENQGQTFTCGSALSPITDFKLYASAFSERYLGLHGLDNRAYEMTKVAHRVSALEEQQFLIIHPTADEKIHFQHTAELITQLIRGKANYSLQIYPDESHYFTSSSLKQHLYRSIINFFVECFRIQDKLPTVTAKEDEEED

SEQ ID NO: 820790 - protein, 107 aa, Homo sapiens
PTTDIRGSGRLRAWGWLGSLKEDVASQERSRQKGQRALPTERMAAPVTWCPKQLEDEEPCWGRDTGVCSCCHVCVFQPNSSNDNIQSITSGDWDVTKILAYDEKGNK

SEQ ID NO: 820791 - protein, 90 aa, Homo sapiens
MTGRPLRVPRQCRFFISQISEARRLAVSPLAPAPGSRVVSRAGVGGPLASVVRGSCQAAHAVFGVSREYYITMVKWATSTKVAVTWLNRA

SEQ ID NO: 820792 - protein, 268 aa, Homo sapiens
GRSQAGPEAGQPLPGSGKRSSCCHCSSGACSMGPLPRTVELFYDVLSPYSWLGFEILCRYQNIWNINLQLRPSLITGIMKDSGNKPPGLLPRKGLYMANDLKLLRHHLQIPIHFPKDFLSVMLEKGSLSAMRFLTAVNLEHPEMLEKASRELWMRVWSRNEDITEPQSILAAAEKAGMSAEQAQGLLEKIATPKVKNQLKETTEAACRYGAFGLPITVAHVDGQTHMLFGSDRMEAAGAPAGREVDGPYTSSRECQTLRLPGGSKLFV

SEQ ID NO: 820793 - protein, 227 aa, Homo sapiens
GRSQAGPEAGQPLPGSGKRSSCCHCSSGACSMGPLPRTVELFYDVLSPYSWLGFEILCRYQNIWNINLQLRPSLITGIMKDSGNKPPGLLPRKGLYMANDLKLLRHHLQIPIHFPKDFLSVMLEKGSLSAMRFLTAVNLEHPEMLEKASRELWMRVWSRVSVGLWESSGRTLDDFLTFPRHVFRVMILPPPGGSTVLPVTPLSPHRLPAVFSSSQNEDITEPQSILA

SEQ ID NO: 820794 - protein, 237 aa, Homo sapiens
MGPLPRTVELFYDVLSPYSWLGFEILCRYQNIWNINLQLRPSLITGIMKDSGNKPPGLLPRKGLYMANDLKLLRHHLQIPIHFPKDFLSVMLEKGSLSAMRFLTAVNLEHPEMLEKASRELWMRVWSRNEDITEPQSILAAAEKAGMSAEQAQGLLEKIATPKVKNQLKETTEAACRYGAFGLPITVAHVDGQTHMLFGSDRMEAAGAPAGREVDGPYTSSRECQTLRLPGGSKLFV

SEQ ID NO: 820795 - protein, 190 aa, Homo sapiens
MKDSGNKPPGLLPRKGLYMANDLKLLRHHLQIPIHFPKDFLSVMLEKGSLSAMRFLTAVNLEHPEMLEKASRELWMRVWSRNEDITEPQSILAAAEKAGMSAEQAQGLLEKIATPKVKNQLKETTEAACRYGAFGLPITVAHVDGQTHMLFGSDRMEAAGAPAGREVDGPYTSSRECQTLRLPGGSKLFV

SEQ ID NO: 820796 - protein, 257 aa, Homo sapiens
MDTATVYYTGRLLNYVGVATICEKELLLPLLFRSLQHGAPAAHRILCRYQNIWNINLQLRPSLITGIMKDSGNKPPGLLPRKGLYMANDLKLLRHHLQIPIHFPKDFLSVMLEKGSLSAMRFLTAVNLEHPEMLEKASRELWMRVWSRNEDITEPQSILAAAEKAGMSAEQAQGLLEKIATPKVKNQLKETTEAACRYGAFGLPITVAHVDGQTHMLFGSDRMEAAGAPAGREVDGPYTSSRECQTLRLPGGSKLFV

SEQ ID NO: 820797 - protein, 190 aa, Homo sapiens; identical to SEQ ID NO: 820795

SEQ ID NO: 820798 - protein, 235 aa, Homo sapiens
HHCTPAWATRAKQQEKKKEAALCPKPTSRSPNLGPLGLFSLSVPNLLLAGNKPPGLLPRKGLYMANDLKLLRHHLQIPIHFPKDFLSVMLEKGSLSAMRFLTAVNLEHPEMLEKASRELWMRVWSRNEDITEPQSILAAAEKAGMSAEQAQGLLEKIATPKVKNQLKETTEAACRYGAFGLPITVAHVDGQTHMLFGSDRMEAAGAPAGREVDGPYTSSRECQTLRLPGGSKLFV

SEQ ID NO: 820799 - protein, 191 aa, Homo sapiens
MRTRMMAGRIVQRQDKGLYMANDLKLLRHHLQIPIHFPKDFLSVMLEKGSLSAMRFLTAVNLEHPEMLEKASRELWMRVWSRNEDITEPQSILAAAEKAGMSAEQAQGLLEKIATPKVKNQLKETTEAACRYGAFGLPITVAHVDGQTHMLFGSDRMEAAGAPAGREVDGPYTSSRECQTLRLPGGSKLFV

SEQ ID NO: 820800 - protein, 324 aa, Homo sapiens
GRSQAGPEAGQPLPGSGKRSSCCHCSSGACSMGPLPRTVELFYDVLSPYSWLGFEILCRYQNIWNINLQLRPSLITGIMKDSGNKPPGLLPRKGLYMANDLKLLRHHLQIPIHFPKDFLSVMLEKGSLSAMRFLTAVNLEHPEMLEKASRELWMRVWSRVSVGLWESSGRTLDDFLTFPRHVFRVMILPPPGGSTVLPVTPLSPHRLPAVFSSSQNEDITEPQSILAAAEKAGMSAEQAQGLLEKIATPKVKNQLKETTEAACRYGAFGLPITVAHVDGQTHMLFGSDRMEAAGAPAGREVDGPYTSSRECQTLRLPGGSKLFV

SEQ ID NO: 820801 - protein, 268 aa, Homo sapiens; identical to SEQ ID NO: 820792

SEQ ID NO: 820802 - protein, 138 aa, Homo sapiens
MRFLTAVNLEHPEMLEKASRELWMRVWSRNEDITEPQSILAAAEKAGMSAEQAQGLLEKIATPKVKNQLKETTEAACRYGAFGLPITVAHVDGQTHMLFGSDRMEAAGAPAGREVDGPYTSSRECQTLRLPGGSKLFV

SEQ ID NO: 820803 - protein, 268 aa, Homo sapiens; identical to SEQ ID NO: 820792

SEQ ID NO: 820804 - protein, 194 aa, Homo sapiens
MRFLTAVNLEHPEMLEKASRELWMRVWSRVSVGLWESSGRTLDDFLTFPRHVFRVMILPPPGGSTVLPVTPLSPHRLPAVFSSSQNEDITEPQSILAAAEKAGMSAEQAQGLLEKIATPKVKNQLKETTEAACRYGAFGLPITVAHVDGQTHMLFGSDRMEAAGAPAGREVDGPYTSSRECQTLRLPGGSKLFV

SEQ ID NO: 820805 - protein, 181 aa, Homo sapiens
MLEKASRELWMRVWSRVSVGLWESSGRTLDDFLTFPRHVFRVMILPPPGGSTVLPVTPLSPHRLPAVFSSSQNEDITEPQSILAAAEKAGMSAEQAQGLLEKIATPKVKNQLKETTEAACRYGAFGLPITVAHVDGQTHMLFGSDRMEAAGAPAGREVDGPYTSSRECQTLRLPGGSKLFV

SEQ ID NO: 820806 - protein, 138 aa, Homo sapiens; identical to SEQ ID NO: 820802

SEQ ID NO: 820807 - protein, 256 aa, Homo sapiens
GRSQAGPEAGQPLPGSGKRSSCCHCSSGACSMGPLPRTVELFYDVLSPYSWLGFEILCRYQNIWNINLQLRPSLITGIMKDSGNKPPGLLPRKGLYMANDLKLLRHHLQIPIHFPKDFLSVMLEKGSLSAMRFLTAVNLEHPEMLEKASRELWMRVWSRAAEKAGMSAEQAQGLLEKIATPKVKNQLKETTEAACRYGAFGLPITVAHVDGQTHMLFGSDRMEAAGAPAGREVDGPYTSSRECQTLRLPGGSKLFV

SEQ ID NO: 820808 - protein, 270 aa, Homo sapiens
  misc_feature (158)..(158): Xaa can be any naturally occurring amino acid
MGPLPRTVELFYDVLSPYSWLGFEILCRYQNIWNINLQLRPSLITGIMKDSGNKPPGLLPRKGLYMANDFKKAFPPLEKEPNPNSSQGISPNSNFPKGIPVSVMLENRTVVSVPLVGARFFILLHAARDTWTHPEYAGESVPGAVDCASGQGMNDISXPGKGPPGQRKPIPGLAAEKAGMSAEQAQGLLEKIATPKVKNQLKETTEAACRYGAFGLPITVAHVDGQTHMLFGSDRMEAAGAPAGREVDGPYTSSRECQTLRLPGGSKLFV

SEQ ID NO: 820809 - protein, 119 aa, Homo sapiens
MGWWVTCDSGVPTDFAPQSILAAAEKAGMSAEQAQGLLEKIATPKVKNQLKETTEAACRYGAFGLPITVAHVDGQTHMLFGSDRMEAAGAPAGREVDGPYTSSRECQTLRLPGGSKLFV

SEQ ID NO: 820810 - protein, 227 aa, Homo sapiens
GRSQAGPEAGQPLPGSGKRSSCCHCSSGACSMGPLPRTVELFYDVLSPYSWLGFEILCRYQNIWNINLQLRPSLITGIMKDSGNKPPGLLPRKGLYMANDLKLLRHHLQIPIHFPKDFLSVMLEKGSLSAMRFLTAVNLEHPEMLEKASRELWMRVWSRNEDITEPQSILAAAEKAGMSAEQAQGLLEKIATPKVKNQLKETTEAACRYGVSSSLCVFPAPILKMET

SEQ ID NO: 820811 - protein, 249 aa, Homo sapiens
GRSQAGPEAGQPLPGSGKRSSCCHCSSGACSMGPLPRTVELFYDVLSPYSWLGFEILCRYQNIWNINLQLRPSLITGIMKDSGNKPPGLLPRKGLYMANDLKLLRHHLQIPIHFPKDFLSVMLEKGSLSAMRFLTAVNLEHPEMLEKASRELWMRVWSRNEDITEPQSILAAAEKAGMSAEQAQGLLEKIAAFGLPITVAHVDGQTHMLFGSDRMEAAGAPAGREVDGPYTSSRECQTLRLPGGSKLFV

SEQ ID NO: 820812 - protein, 283 aa, Homo sapiens
GRSQAGPEAGQPLPGSGKRSSCCHCSSGACSMGPLPRTVELFYDVLSPYSWLGFEILCRYQNIWNINLQLRPSLITGIMKDSGNKPPGLLPRKGLYMANDLKLLRHHLQIPIHFPKDFLSVMLEKGSLSAMRFLTAVNLEHPEMLEKASRELWMRVWSRVSVGLWESSGRTLDDFLTFPRHVFRVMILPPPGGSTVLPVTPLSPHRLPAVFSSSQNEDITEPQSILAAAEKAGMSAEQAQGLLEKIATPKVKNQLKETTEAACRYGVSSSLCVFPAPILKMET

SEQ ID NO: 820813 - protein, 227 aa, Homo sapiens; identical to SEQ ID NO: 820810

SEQ ID NO: 820814 - protein, 227 aa, Homo sapiens; identical to SEQ ID NO: 820810

SEQ ID NO: 820815 - protein, 227 aa, Homo sapiens; identical to SEQ ID NO: 820810

SEQ ID NO: 820816 - protein, 227 aa, Homo sapiens; identical to SEQ ID NO: 820810

SEQ ID NO: 820817 - protein, 182 aa, Homo sapiens
GRSQAGPEAGQPLPGSGKRSSCCHCSSGACSMGPLPRTVELFYDVLSPYSWLGFEILCRYQNIWNINLQLRPSLITGIMKDSGNKPPGLLPRKGLYMANDLKLLRHHLQIPIHFPKDFLSVMLEKGSLSAMRFLTAVNLEHPEMLEKASRELWMRVWSRNEDITEPQSILAVSVLAPPQLHS

SEQ ID NO: 820818 - protein, 238 aa, Homo sapiens
GRSQAGPEAGQPLPGSGKRSSCCHCSSGACSMGPLPRTVELFYDVLSPYSWLGFEILCRYQNIWNINLQLRPSLITGIMKDSGNKPPGLLPRKGLYMANDLKLLRHHLQIPIHFPKDFLSVMLEKGSLSAMRFLTAVNLEHPEMLEKASRELWMRVWSRVSVGLWESSGRTLDDFLTFPRHVFRVMILPPPGGSTVLPVTPLSPHRLPAVFSSSQNEDITEPQSILAVSVLAPPQLHS

SEQ ID NO: 820819 - protein, 73 aa, Homo sapiens
SGHGDRVLYRQVTELVGVATSEKRSSCCHCSSGACSMGPLPRTVELFYDVLSPYSWLGFEVTLGGVASAVSGE

SEQ ID NO: 820820 - protein, 2011 aa, Homo sapiens
MWILALSLFQSFANVFSEDLHSSLYFVNASLQEVVFASTTGTLVPCPAAGIPPVTLRWYLATGEEIYDVPGIRHVHPNGTLQIFPFPPSSFSTLIHDNTYYCTAENPSGKIRSQDVHIKAVLREPYTVRVEDQKTMRGNVAVFKCIIPSSVEAYITVVSWEKDTVSLVSGSRFLITSTGALYIKDVQNEDGLYNYRCITRHRYTGETRQSNSARLFVSDPANSAPSILDGFDHRKAMAGQRVELPCKALGHPEPDYRWLKDNMPLELSGRFQKTVTGLLIENIRPSDSGSYVCEVSNRYGTAKVIGRLYVKQPLKATISPRKVKSSVGSQVSLSCSVTGTEDQELSWYRNGEILNPGKNVRITGINHENLIMDHMVKSDGGAYQCFVRKDKLSAQDYVQVVLEDGTPKIISAFSEKVVSPAEPVSLMCNVKGTPLPTITWTLDDDPILKGGSHRISQMITSEGNVVSYLNISSSQVRDGGVYRCTANNSAGVVLYQARINVRGPASIRPMKNITAIAGRDTYIHCRVIGYPYYSIKWYKNSNLLPFNHRQVAFENNGTLKLSDVQKEVDEGEYTCNVLVQPQLSTSQSVHVTVKVPPFIQPFEFPRFSIGQRVFIPCVVVSGDLPITITWQKDGRPIPGSLGVTIDNIDFTSSLRISNLSLMHNGNYTCIARNEAAAVEHQSQLIVRVPPKFVVQPRDQDGIYGKAVILNCSAEGYPVPTIVWKFSKGAGVPQFQPIALNGRIQVLSNGSLLIKHVVEEDSGYYLCKVSNDVGADVSKSMYLTVKIPAMITSYPNTTLATQGQKKEMSCTAHGEKPIIVRWEKEDRIINPEMARYLVSTKEVGEEVISTLQILPTVREDSGFFSCHAINSYGEDRGIIQLTVQEPPDPPEIEIKDVKARTITLRWTMGFDGNSPITGYDIECKNKSDSWDSAQRTKDVSPQLNSATIIDIHPSSTYSIRMYAKNRIGKSEPSNELTITADEAAPDGPPQEVHLEPISSQSIRVTWKAPKKHLQNGIIRGYQIGYREYSTGGNFQFNIISVDTSGDSEVYTLDNLNKFTQYGLVVQACNRAGTGPSSQEIITTTLEDVPSYPPENVQAIATSPESISISWSTLSKEALNGILQGFRVIYWANLMDGELGEIKNITTTQPSLELDGLEKYTNYSIQVLAFTRAGDGVRSEQIFTRTKEDVPGPPAGVKAAAASASMVFVSWLPPLKLNGIIRKYTVFCSHPYPTVISEFEASPDSFSYRIPNLSRNRQYSVWVVAVTSAGRGNSSEIITVEPLAKAPARILTFSGTVTTPWMKDIVLPCKAVGDPSPAVKWMKDSNGTPSLVTIDGRRSIFSNGSFIIRTVKAEDSGYYSCIANNNWGSDEIILNLQVQVPPDQPRLTVSKTTSSSITLSWLPGDNGGSSIRGYILQYSEDNSEQWGSFPISPSERSYRLENLKCGTWYKFTLTAQNGVGPGRISEIIEAKTLGKEPQFSKEQELFASINTTRVRLNLIGWNDGGCPITSFTLEYRPFGTTVWTTAQRTSLSKSYILYDLQEATWYELQMRVCNSAGCAEKQANFATLNTGSTIPPLIKSVVQNEEGLTTNEGLKMLVTISCILVGVLLLFVLLLVVRRRRREQRLKRLRDAKSLAEMLMSKNTRTSDTLSKQQQTLRMHIDIPRAQLLIEERDTMETIDDRSTVLLTDADFGEAAKQKSLTVTHTVHYQSVSQATGPLVDVSDARPGTNPTTRRNAKAGPTARNRYASQWTLNRPHPTISAHTLTTDWRLPTPRAAGSVDKESDSYSVSPSQDTDRARSSMVSTESASSTYEELARAYEHAKMEEQLRHAKFTITECFISDTSSEQLTAGTNEYTDSLTSSTPSESGICRFTASPPKPQDGGRVMNMAVPKAHRPGDLIHLPPYLRMDFLLNRGGPGTSRDLSLGQACLEPQKSRTLKRPTVLEPIPMEAASSASSTREGQSWQPGAVATLPQREGAELGQAAKMSSSQESLLDSRGHLKGNNPYAKSYTLV

SEQ ID NO: 820821 - protein, 1952 aa, Homo sapiens
MWILALSLFQSFANVFSEDLHSSLYFVNASLQEVVFASTTGTLVPCPAAGIPPVTLRWYLATGEEIYDVPGIRHVHPNGTLQIFPFPPSSFSTLIHDNTYYCTAENPSGKIRSQDVHIKAVLREPYTVRVEDQKTMRGNVAVFKCIIPSSVEAYITVVSWEKDTVSLVSGSRFLITSTGALYIKDVQNEDGLYNYRCITRHRYTGETRQSNSARLFVSDPANSAPSILDGFDHRKAMAGQRVELPCKALGHPEPDYRWLKDNMPLELSGRFQKTVTGLLIENIRPSDSGSYVCEVSNRYGTAKVIGRLYVKQPLKATISPRKVKSSVGSQVSLSCSVTGTEDQELSWYRNGEILNPGKNVRITGINHENLIMDHMVKSDGGAYQCFVRKDKLSAQDYVQVVLEDGTPKIISAFSEKVVSPAEPVSLMCNVKGTPLPTITWTLDDDPILKGGSHRISQMITSEGNVVSYLNISSSQVRDGGVYRCTANNSAGVVLYQARINVRGPASIRPMKNITAIAGRDTYIHCRVIGYPYYSIKWYKNSNLLPFNHRQVAFENNGTLKLSDVQKEVDEGEYTCNVLVQPQLSTSQSVHVTVKVPPFIQPFEFPRFSIGQRVFIPCVVVSGDLPITITWQKDGRPIPGSLGVTIDNIDFTSSLRISNLSLMHNGNYTCIARNEAAAVEHQSQLIVRVPPKFVVQPRDQDGIYGKAVILNCSAEGYPVPTIVWKFSKGAGVPQFQPIALNGRIQVLSNGSLLIKHVVEEDSGYYLCKVSNDVGADVSKSMYLTVKIPAMITSYPNTTLATQGQKKEMSCTAHGEKPIIVRWEKEDRIINPEMARYLVSTKEVGEEVISTLQILPTVREDSGFFSCHAINSYGEDRGIIQLTVQEPPDPPEIEIKDVKARTITLRWTMGFDGNSPITGYDIECKNKSDSWDSAQRTKDVSPQLNSATIIDIHPSSTYSIRMYAKNRIGKSEPSNELTITADEAAPDGPPQEVHLEPISSQSIRVTWKAPKKHLQNGIIRGYQIGYREYSTGGNFQFNIISVDTSGDSEVYTLDNLNKFTQYGLVVQACNRAGTGPSSQEIITTTLEDVPSYPPENVQAIATSPESISISWSTLSKEALNGILQGFRVIYWANLMDGELGEIKNITTTQPSLELDGLEKYTNYSIQVLAFTRAGDGVRSEQIFTRTKEDVPGPPAGVKAAAASASMVFVSWLPPLKLNGIIRKYTVFCSHPYPTVISEFEASPDSFSYRIPNLSRNRQYSVWVVAVTSAGRGNSSEIITVEPLAKAPARILTFSGTVTTPWMKDIVLPCKAVGDPSPAVKWMKDSNGTPSLVTIDGRRSIFSNGSFIIRTVKAEDSGYYSCIANNNWGSDEIILNLQVQVPPDQPRLTVSKTTSSSITLSWLPGDNGGSSIRGYILQYSEDNSEQWGSFPISPSERSYRLENLKCGTWYKFTLTAQNGVGPGRISEIIEAKTLGKEPQFSKEQELFASINTTRVRLNLIGWNDGGCPITSFTLEYRPFGTTVWTTAQRTSLSKSYILYDLQEATWYELQMRVCNSAGCAEKQANFATLNTGNAKSLAEMLMSKNTRTSDTLSKQQQTLRMHIDIPRAQLLIEERDTMETIDDRSTVLLTDADFGEAAKQKSLTVTHTVHYQSVSQATGPLVDVSDARPGTNPTTRRNAKAGPTARNRYASQWTLNRPHPTISAHTLTTDWRLPTPRAAGSVDKESDSYSVSPSQDTDRARSSMVSTESASSTYEELARAYEHAKMEEQLRHAKFTITECFISDTSSEQLTAGTNEYTDSLTSSTPSESGICRFTASPPKPQDGGRVMNMAVPKAHRPGDLIHLPPYLRMDFLLNRGGPGTSRDLSLGQACLEPQKSRTLKRPTVLEPIPMEAASSASSTREGQSWQPGAVATLPQREGAELGQAAKMSSSQESLLDSRGHLKGNNPYAKSYTLV

SEQ ID NO: 820822 - protein, 2011 aa, Homo sapiens; identical to SEQ ID NO: 820820

SEQ ID NO: 820823 - protein, 1794 aa, Homo sapiens
MWILALSLFQSFANVFSEDLHSSLYFVNASLQEVVFASTTGTLVPCPAAGIPPVTLRWYLATGEEIYDVPGIRHVHPNGTLQIFPFPPSSFSTLIHDNTYYCTAENPSGKIRSQDVHIKAVLREPYTVRVEDQKTMRGNVAVFKCIIPSSVEAYITVVSWEKDTVSLVSGSRFLITSTGALYIKDVQNEDGLYNYRCITRHRYTGETRQSNSARLFVSDPANSAPSILDGFDHRKAMAGQRVELPCKALGHPEPDYRWLKDNMPLELSGRFQKTVTGLLIENIRPSDSGSYVCEVSNRYGTAKVIGRLYVKQPLKATISPRKVKSSVGSQVSLSCSVTGTEDQELSWYRNGEILNPGKNVRITGINHENLIMDHMVKSDGGAYQCFVRKDKLSAQDYVQVVLEDGTPKIISAFSEKVVSPAEPVSLMCNVKGTPLPTITWTLDDDPILKGGSHRISQMITSEGNVVSYLNISSSQVRDGGVYRCTANNSAGVVLYQARINVRGPASIRPMKNITAIAGRDTYIHCRVIGYPYYSIKWYKNSNLLPFNHRQVAFENNGTLKLSDVQKEVDEGEYTCNVLVQPQLSTSQSVHVTVKVPPFIQPFEFPRFSIGQRVFIPCVVVSGDLPITITWQKDGRPIPGSLGVTIDNIDFTSSLRISNLSLMHNGNYTCIARNEAAAVEHQSQLIVRVPPKFVVQPRDQDGIYGKAVILNCSAEGYPVPTIVWKFSKGAGVPQFQPIALNGRIQVLSNGSLLIKHVVEEDSGYYLCKVSNDVGADVSKSMYLTVKIPAMITSYPNTTLATQGQKKEMSCTAHGEKPIIVRWEKEDRIINPEMARYLVSTKEVGEEVISTLQILPTVREDSGFFSCHAINSYGEDRGIIQLTVQEPPDPPEIEIKDVKARTITLRWTMGFDGNSPITGYDIECKNKSDSWDSAQRTKDVSPQLNSATIIDIHPSSTYSIRMYAKNRIGKSEPSNELTITADEAAPDGPPQEVHLEPISSQSIRVTWKAPKKHLQNGIIRGYQIGYREYSTGGNFQFNIISVDTSGDSEVYTLDNLNKFTQYGLVVQACNRAGTGPSSQEIITTTLEDVPSYPPENVQAIATSPESISISWSTLSKEALNGILQGFRVIYWANLMDGELGEIKNITTTQPSLELDGLEKYTNYSIQVLAFTRAGDGVRSEQIFTRTKEDVPGPPAGVKAAAASASMVFVSWLPPLKLNGIIRKYTVFCSHPYPTVISEFEASPDSFSYRIPNLSRNRQYSVWVVAVTSAGRGNSSEIITVEPLAKAPARILTFSGTVTTPWMKDIVLPCKAVGDPSPAVKWMKDSNGTPSLVTIDGRRSIFSNGSFIIRTVKAEDSGYYSCIANNNWGSDEIILNLQVQVPPDQPRLTVSKTTSSSITLSWLPGDNGGSSIRGYILQYSEDNSEQWGSFPISPSERSYRLENLKCGTWYKFTLTAQNGVGPGRISEIIEAKTLGKEPQFSKEQELFASINTTRVRLNLIGWNDGGCPITSFTLEYRPFGTTVWTTAQRTSLSKSYILYDLQEATWYELQMRVCNSAGCAEKQANFATLNTGSTIPPLIKSVVQNEEGLTTNEGLKMLVTISCILVGVLLLFVLLLVVRRRRREQRLKRLRDAKSLAEMLMSKNTRTSDTLSKQQQTLRMHIDIPRAQLLIEERDTMETIDDRSTVLLTDADFGEAAKQKSLTVTHTVHYQSVSQATGPLVDVSDARPGTNPTTRRNAKAGPTARNRYASQWTLNRPHPTISAHTLTTDWRLPTPRAAGSVDKESDSYSVSPSQDTE

SEQ ID NO: 820824 - protein, 411 aa, Homo sapiens
MLLKTVLLLGHVAQVLMLDNGLLQTPPMGWLAWERFRCNINCDEDPKNCISEQLFMEMADRMAQDGWRDMGYTYLNIDDCWIGGRDASGRLMPDPKRFPHGIPFLADYVHSLGLKLGIYADMGNFTCMGYPGTTLDKVVQDAQTFAEWKVDMLKLDGCFSTPEERAQGYPKMAAALNATGRPIAFSCSWPAYEGGLPPRVNYSLLADICNLWRNYDDIQDSWWSVLSILNWFVEHQDILQPVAGPGHWNDPDMLLIGNFGLSLEQSRAQMALWTVLAAPLLMSTDLRTISAQNMDILQNPLMIKINQDPLGIQGRRIHKEKSLIEVYMRPLSNKASALVFFSCRTDMPYRYHSSLGQLNFTGSVIYEAQDVYSGDIISGLRDETNFTVIINPSGVVMWYLYPIKNLEMSQQ

SEQ ID NO: 820825 - protein, 411 aa, Homo sapiens; identical to SEQ ID NO: 820824

SEQ ID NO: 820826 - protein, 411 aa, Homo sapiens; identical to SEQ ID NO: 820824

SEQ ID NO: 820827 - protein, 411 aa, Homo sapiens; identical to SEQ ID NO: 820824

SEQ ID NO: 820828 - protein, 123 aa, Homo sapiens
MLLKTVLLLGHVAQVLMLDNGLLQTPPMGWLAWERFRCNINCDEDPKNCISEQLFMEMADRMAQDGWRDMGYTYLNIDDCWIGGRDASGRLMPDPKRFPHGIPFLADYPSWPLLPCAQPHRRC

SEQ ID NO: 820829 - protein, 354 aa, Homo sapiens
MLLKTVLLLGHVAQVLMLDNGLLQTPPMGWLAWERFRCNINCDEDPKNCISEQLFMEMADRMAQDGWRDMGYTYLNIDDCWIGGRDASGRLMPDPKRFPHGIPFLADYVHSLGLKLGIYADMGNFTCMGYPGTTLDKVVQDAQTFAEWKVDMLKLDGCFSTPEERAQGYPKMAAALNATGRPIAFSCSWPAYEGGLPPRVNYSLLADICNLWRNYDDIQDSWWSVLSILNWFVEHQDILQPVAGPGHWNDPDMLLIGNFGLSLEQSRAQMALWTVLAAPLLMSTDLRTISAQNMDILQNPLMIKINQDPLGIQGRRIHKVMKMFWNYSTYGCLSFCTNNTWLLPPDWSLSGIQR

SEQ ID NO: 820830 - protein, 207 aa, Homo sapiens
MLLKTVLLLGHVAQVLMLDNGLLQTPPMGWLAWERFRCNINCDEDPKNCISEQLFMEMADRMAQDGWRDMGYTYLNIDDCWIGGRDASGRLMPDPKRFPHGIPFLADYVHSLGLKLGIYADMGNFTCMGYPGTTLDKVVQDAQTFAEWKVDMLKLDGCFSTPEERAQGYPKMAAALNATGRPIAFSCSWPAYEGGLPPRVSHSAPCL

SEQ ID NO: 820831 - protein, 123 aa, Homo sapiens; identical to SEQ ID NO: 820828

SEQ ID NO: 820832 - protein, 130 aa, Homo sapiens
MYVCVCVCARTCIFSSPFLNPGLMKNVPCVPPATIFQHHFPAAIDSFQDAVKCLSEFACNAAFPDTSMEAIRLIRFCGKYVSERPRVLQEYTSDDMNVAPGDRVWVRGWFPILFELSCIINRCKLDVRTR

SEQ ID NO: 820833 - protein, 1785 aa, Homo sapiens
MQESQTKSMFVSRALEKILADKEVKRPQHSQLRRACQVALDEIKAEIEKQRLGTAAPPKANFIEADKYFLPFELACQSKSPRVVSTSLDCLQKLIAYGHITGNAPDSGAPGKRLIDRIVETICSCFQGPQTDEGVQLQIIKALLTAVTSPHIEIHEGTILQTVRTCYNIYLASKNLINQTTAKATLTQMLNVIFTRMENQVLQEARELEKPIQSKPQSPVIQAAAVSPKFVRLKHSQAQSKPTTPEKTDLTNGEHARSDSGKVSTENGDAPRERGSSLSGTDDGAQEVVKDILEDVVTSAIKEAAEKHGLTEPERVLGELECQECAIPPGVDENSQTNGIADDRQSLSSADNLESDAQGHQVAARFSHVLQKDAFLVFRSLCKLSMKPLGEGPPDPKSHELRSKVVSLQLLLSVLQNAGPVFRTHEMFINAIKQYLCVALSKNGVSSVPDVFELSLAIFLTLLSNFKMHLKMQIEVFFKEIFLNILETSTSSFEHRWMVIQTLTRICADAQCVVDIYVNYDCDLNAANIFERLVNDLSKIAQGRSGHELGMTPLQELSLRKKGLECLVSILKCMVEWSKDLYVNPNHQTSLGQERLTDQEIGDGKGLDMARRCSVTSMESTVSSGTQTTVQDDPEQFEVIKQQKEIIEHGIELFNKKPKRGIQFLQEQGMLGTSVEDIAQFLHQEERLDSTQVGDFLGDSARFNKEVMYAYVDQLDFCEKEFVSALRTFLEGFRLPGEAQKIDRLMEKFAARYIECNQGQTLFASADTAYVLAYSIIMLTTDLHSPQVKNKMTKEQYIKMNRGINDSKDLPEEYLSSIYEEIEGKKIAMKETKELTIATKSTKQNVASEKQRRLLYNLEMEQMAKTAKALMEAVSHAKAPFTSATHLDHVRPMFKLVWTPLLAAYSIGLQNCDDTEVASLCLEGIRCAIRIACIFGMQLERDAYVQALARFSLLTASSSITKMKQKNIDTIKTLITVAHTDGNYLGNSWHEILKCISQLELAQLIGTGVKTRYLSGSGREREGSLKGHTLAGEEFMGLGLGNLVSGGVDKRQMASFQESVGETSSQSVVVAVDRIFTGSTRLDGNAIVDFVRWLCAVSMDELASPHHPRMFSLQKIVEISYYNMNRIRLQWSRIWHVIGDHFNKVGCNPNEDVAIFAVDSLRQLSMKFLEKGELANFRFQKDFLRPFEHIMKKNRSPTIRDMAIRCIAQMVNSQAANIRSGWKNIFAVFHQAASDHDGNIVELAFQTTCHIVTTIFQHHFPAAIDSFQDAVKCLSEFACNAAFPDTSMEAIRLIRFCGKYVSERPRVLQEYTSDDMNVAPGDRVWVRGWFPILFELSCIINRCKLDVRTRGLTVMFEIMKSYGHTFEKHWWQDLFRIVFRIFDNMKLPEQLSEKSEWMTTTCNHALYAICDVFTQFYEALNEVLLSDVFAQLQWCVKQDNEQLARSGTNCLENLVISNGEKFSPEVWDETCNCMLDIFKTTIPHVLLTWRPVGMEEDSSEKHLDVDLDRQSLSSIDKNPSERGQSQLSNPTDDSWKGRPYANQKLFASLLIKCVVQLELIQTIDNIVFYPATSKKEDAEHMVAAQQDTLDADIHIETEDQGMYKYMSSQHLFKLLDCLQESHSFSKAFNSNYEQRTVLWRAGFKGKSKPNLLKQETSSLACCLRILFRMYVDENRRDSWEEIQQRLLTVCSEALAYFITVNSESHREAWTSLLLLLLTKTLKINDEKFKAHASMYYPYLCEIMQFDLIPELRAVLRKFFLRIGVVYKIWIPEEPSQVPAALSPVW

SEQ ID NO: 820834 - protein, 1785 aa, Homo sapiens; identical to SEQ ID NO: 820833

SEQ ID NO: 820835 - protein, 1722 aa, Homo sapiens
MQESQTKSMFVSRALEKILADKEVKRPQHSQLRRACQVALDEIKAEIEKQRLGTAAPPKANFIEADKYFLPFELACQSKSPRVVSTSLDCLQKLIAYGHITGNAPDSGAPGKRLIDRIVETICSCFQGPQTDEGVQLQIIKALLTAVTSPHIEIHEGTILQTVRTCYNIYLASKNLINQTTAKATLTQMLNMPGDDSGKVSTENGDAPRERGSSLSGTDDGAQEVVKDILEDVVTSAIKEAAEKHGLTEPERVLGELECQECAIPPGVDENSQTNGIADDRQSLSSADNLESDAQGHQVAARFSHVLQKDAFLVFRSLCKLSMKPLGEGPPDPKSHELRSKVVSLQLLLSVLQNAGPVFRTHEMFINAIKQYLCVALSKNGVSSVPDVFELSLAIFLTLLSNFKMHLKMQIEVFFKEIFLNILETSTSSFEHRWMVIQTLTRICADAQCVVDIYVNYDCDLNAANIFERLVNDLSKIAQGRSGHELGMTPLQELSLRKKGLECLVSILKCMVEWSKDLYVNPNHQTSLGQERLTDQEIGDGKGLDMARRCSVTSMESTVSSGTQTTVQDDPEQFEVIKQQKEIIEHGIELFNKKPKRGIQFLQEQGMLGTSVEDIAQFLHQEERLDSTQVGDFLGDSARFNKEVMYAYVDQLDFCEKEFVSALRTFLEGFRLPGEAQKIDRLMEKFAARYIECNQGQTLFASADTAYVLAYSIIMLTTDLHSPQVKNKMTKEQYIKMNRGINDSKDLPEEYLSSIYEEIEGKKIAMKETKELTIATKSTKQNVASEKQRRLLYNLEMEQMAKTAKALMEAVSHAKAPFTSATHLDHVRPMFKLVWTPLLAAYSIGLQNCDDTEVASLCLEGIRCAIRIACIFGMQLERDAYVQALARFSLLTASSSITKMKQKNIDTIKTLITVAHTDGNYLGNSWHEILKCISQLELAQLIGTGVKTRYLSGSGREREGSLKGHTLAGEEFMGLGLGNLVSGGVDKRQMASFQESVGETSSQSVVVAVDRIFTGSTRLDGNAIVDFVRWLCAVSMDELASPHHPRMFSLQKIVEISYYNMNRIRLQWSRIWHVIGDHFNKVGCNPNEDVAIFAVDSLRQLSMKFLEKGELANFRFQKDFLRPFEHIMKKNRSPTIRDMAIRCIAQMVNSQAANIRSGWKNIFAVFHQAASDHDGNIVELAFQTTCHIVTTIFQHHFPAAIDSFQDAVKCLSEFACNAAFPDTSMEAIRLIRFCGKYVSERPRVLQEYTSDDMNVAPGDRVWVRGWFPILFELSCIINRCKLDVRTRGLTVMFEIMKSYGHTFEKHWWQDLFRIVFRIFDNMKLPEQLSEKSEWMTTTCNHALYAICDVFTQFYEALNEVLLSDVFAQLQWCVKQDNEQLARSGTNCLENLVISNGEKFSPEVWDETCNCMLDIFKTTIPHVLLTWRPVGMEEDSSEKHLDVDLDRQSLSSIDKNPSERGQSQLSNPTDDSWKGRPYANQKLFASLLIKCVVQLELIQTIDNIVFYPATSKKEDAEHMVAAQQDTLDADIHIETEDQGMYKYMSSQHLFKLLDCLQESHSFSKAFNSNYEQRTVLWRAGFKGKSKPNLLKQETSSLACCLRILFRMYVDENRRDSWEEIQQRLLTVCSEALAYFITVNSESHREAWTSLLLLLLTKTLKINDEKFKAHASMYYPYLCEIMQFDLIPELRAVLRKFFLRIGVVYKIWIPEEPSQVPAALSPVW

SEQ ID NO: 820836 - protein, 1730 aa, Homo sapiens
MQESQTKSMFVSRALEKILADKEVKRPQHSQLRRACQVALDEIKAEIEKQRLGTAAPPKANFIEADKYFLPFELACQSKSPRVVSTSLDCLQKLIAYGHITGNAPDSGAPGKRLIDRIVETICSCFQGPQTDEGVQLQIIKALLTAVTSPHIEIHEGTILQTVRTCYNIYLASKNLINQTTAKATLTQMLNVIFTRMENQVLQEARELEKPIQSKPQSPVIQAAAVSPKFVRLKHSQAQSKPTTPEKTDLTNGEHARSDSGKVSTENGDAPRERGSSLSGTDDGAQEVVKDILEDVVTSAIKEAAEKHGLTEPERVLGELECQECAIPPGVDENSQTNGIADDRQSLSSADNLESDAQGHQVAARFSHVLQKDAFLVFRSLCKLSMKPLGEGPPDPKSHELRSKVVSLQLLLSVLQNAGPVFRTHEMFINAIKQYLCVALSKNGVSSVPDVFELSLAIFLTLLSNFKMHLKMQIEVFFKEIFLNILETSTSSFEHRWMVIQTLTRICADAQCVVDIYVNYDCDLNAANIFERLVNDLSKIAQGRSGHELGMTPLQELSLRKKGLECLVSILKCMVEWSKDLYVNPNHQTSLGQERLTDQEIGDGKGLDMARRCSVTSMESTVSSGTQTTVQDDPEQFEVIKQQKEIIEHGIELFNKKPKRGIQFLQEQGMLGTSVEDIAQFLHQEERLDSTQVGDFLGDSARFNKEVMYAYVDQLDFCEKEFVSALRTFLEGFRLPGEAQKIDRLMEKFAARYIECNQGQTLFASADTAYVLAYSIIMLTTDLHSPQVKNKMTKEQYIKMNRGINDSKDLPEEYLSSIYEEIEGKKIAMKETKELTIATKSTKQNVASEKQRRLLYNLEMEQMAKTAKALMEAVSHAKAPFTSATHLDHVRPMFKLVWTPLLAAYSIGLQNCDDTEVASLCLEGIRCAIRIACIFGMQLERDAYVQALARFSLLTASSSITKMKQKNIDTIKTLITVAHTDGNYLGNSWHEILKCISQLELAQLIGTGVKTRYLSGSGREREGSLKGHTLAGEEFMGLGLGNLVSGGVDKRQMASFQESVGETSSQSVVVAVDRIFTGSTRLDGNAIVDFVRWLCAVSMDELASPHHPRMFSLQKIVEISYYNMNRIRLQWSRIWHVIGDHFNKVGCNPNEDVAIFAVDSLRQLSMKFLEKGELANFRFQKDFLRPFEHIMKKNRSPTIRDMAIRCIAQMVNSQAANIRSGWKNIFAVFHQAASDHDGNIVELAFQTTCHIVTTIFQHHFPAAIDSFQDAVKCLSEFACNAAFPDTSMEAIRLIRFCGKYVSERPRVLQEYTSDDMNVAPGDRVWVRGWFPILFELSCIINRCKLDVRTRGLTVMFEIMKSYGHTFEKHWWQDLFRIVFRIFDNMKLPEQLSEKSEWMTTTCNHALYAICDVFTQFYEALNEVLLSDVFAQLQWCVKQDNEQLARSGTNCLENLVISNGEKFSPEVWDETCNCMLDIFKTTIPHVLLTWRPVGMEEDSSEKHLDVDLDRQSLSSIDKNPSERGQSQLSNPTDDSWKGRPYANQKLFASLLIKCVVQLELIQTIDNIVFYPATSKKEDAEHMVAAQQDTLDADIHIETEDQGMYKYMSSQHLFKLLDCLQESHSFSKAFNSNYEQRTVLWRAGFKGKSKPNLLKQETSSLACCLRILFRMYVDENRRDSWEEIQQRLLTVCSEALAYFITVNSESHREAWTSLLLLLLTKTLKINDEKSLT

SEQ ID NO: 820837 - protein, 742 aa, Homo sapiens
TPSSASQSAEITGVSHHTRSNVYFVWNYLPRIFTGSTRLDGNAIVDFVRWLCAVSMDELASPHHPRMFSLQKIVEISYYNMNRIRLQWSRIWHVIGDHFNKVGCNPNEDVAIFAVDSLRQLSMKFLEKGELANFRFQKDFLRPFEHIMKKNRSPTIRDMAIRCIAQMVNSQAANIRSGWKNIFAVFHQAASDHDGNIVELAFQTTCHIVTTIFQHHFPAAIDSFQDAVKCLSEFACNAAFPDTSMEAIRLIRFCGKYVSERPRVLQEYTSDDMNVAPGDRVWVRGWFPILFELSCIINRCKLDVRTRGLTVMFEIMKSYGHTFEKHWWQDLFRIVFRIFDNMKLPEQLSEKSEWMTTTCNHALYAICDVFTQFYEALNEVLLSDVFAQLQWCVKQDNEQLARSGTNCLENLVISNGEKFSPEVWDETCNCMLDIFKTTIPHVLLTWRPVGMEEDSSEKHLDVDLDRQSLSSIDKNPSERGQSQLSNPTDDSWKGRPYANQKLFASLLIKCVVQLELIQTIDNIVFYPATSKKEDAEHMVAAQQDTLDADIHIETEDQGMYKYMSSQHLFKLLDCLQESHSFSKAFNSNYEQRTVLWRAGFKGKSKPNLLKQETSSLACCLRILFRMYVDENRRDSWEEIQQRLLTVCSEALAYFITVNSESHREAWTSLLLLLLTKTLKINDEKFKAHASMYYPYLCEIMQFDLIPELRAVLRKFFLRIGVVYKIWIPEEPSQVPAALSPVW

SEQ ID NO: 820838 - protein, 205 aa, Homo sapiens [sequence omitted]

SEQ ID NO: 820839 - protein, 249 aa, Homo sapiens
LSSNIDQKLFASLLIKCVVQLELIQTIDNIVFYPATSKKEDAEHMVAAQQDTLDADIHIETEDQGMYKYMSSQHLFKLLDCLQESHSFSKAFNSNYEQRTVLWRAGFKGKSKPNLLKQETSSLACCLRILFRMYVDENRRDSWEEIQQRLLTVCSEALAYFITVNSESHREAWTSLLLLLLTKTLKINDEKFKAHASMYYPYLCEIMQFDLIPELRAVLRKFFLRIGVVYKIWIPEEPSQVPAALSPVW

SEQ ID NO: 820840 - protein, 1552 aa, Homo sapiens
MQESQTKSMFVSRALEKILADKEVKRPQHSQLRRACQVALDEIKAEIEKQRLGTAAPPKANFIEADKYFLPFELACQSKSPRVVSTSLDCLQKLIAYGHITGNAPDSGAPGKRLIDRIVETICSCFQGPQTDEGVQLQIIKALLTAVTSPHIEIHEGTILQTVRTCYNIYLASKNLINQTTAKATLTQMLNVIFTRMENQVLQEARELEKPIQSKPQSPVIQAAAVSPKFVRLKHSQAQSKPTTPEKTDLTNGEHARSDSGKVSTENGDAPRERGSSLSGTDDGAQEVVKDILEDVVTSAIKEAAEKHGLTEPERVLGELECQECAIPPGVDENSQTNGIADDRQSLSSADNLESDAQGHQVAARFSHVLQKDAFLVFRSLCKLSMKPLGEGPPDPKSHELRSKVVSLQLLLSVLQNAGPVFRTHEMFINAIKQYLCVALSKNGVSSVPDVFELSLAIFLTLLSNFKMHLKMQIEVFFKEIFLNILETSTSSFEHRWMVIQTLTRICADAQCVVDIYVNYDCDLNAANIFERLVNDLSKIAQGRSGHELGMTPLQELSLRKKGLECLVSILKCMVEWSKDLYVNPNHQTSLGQERLTDQEIGDGKGLDMARRCSVTSMESTVSSGTQTTVQDDPEQFEVIKQQKEIIEHGIELFNKKPKRGIQFLQEQGMLGTSVEDIAQFLHQEERLDSTQVGDFLGDSARFNKEVMYAYVDQLDFCEKEFVSALRTFLEGFRLPGEAQKIDRLMEKFAARYIECNQGQTLFASADTAYVLAYSIIMLTTDLHSPQVKNKMTKEQYIKMNRGINDSKDLPEEYLSSIYEEIEGKKIAMKETKELTIATKSTKQNVASEKQRRLLYNLEMEQMAKTAKALMEAVSHAKAPFTSATHLDHVRPMFKLVWTPLLAAYSIGLQNCDDTEVASLCLEGIRCAIRIACIFGMQLERDAYVQALARFSLLTASSSITKMKQKNIDTIKTLITVAHTDGNYLGNSWHEILKCISQLELAQLIGTGVKTRYLSGSGREREGSLKGHTLAGEEFMGLGLGNLVSGGVDKRQMASFQESVGETSSQSVVVAVDRIFTGSTRLDGNAIVDFVRWLCAVSMDELASPHHPRMFSLQKIVEISYYNMNRIRLQWSRIWHVIGDHFNKVGCNPNEDVAIFAVDSLRQLSMKFLEKGELANFRFQKDFLRPFEHIMKKNRSPTIRDMAIRCIAQMVNSQAANIRSGWKNIFAVFHQAASDHDGNIVELAFQTTCHIVTTIFQHHFPAAIDSFQDAVKCLSEFACNAAFPDTSMEAIRLIRFCGKYVSERPRVLQEYTSDDMNVAPGDRVWVRGWFPILFELSCIINRCKLDVRTRGLTVMFEIMKSYGHTFEKHWWQDLFRIVFRIFDNMKLPEQLSEKSEWMTTTCNHALYAICDVFTQFYEALNEVLLSDVFAQLQWCVKQDNEQLARSGTNCLENLVISNGEKFSPEVWDETCNCMLDIFKTTIPHVLLTWRPVGMEEDSSEKHLDVDLDRQSLSSIDKNPSERGQSQLSNPTDDSWKGRPYATSSSSVWSSWN

SEQ ID NO: 820841 - protein, 282 aa, Homo sapiens
MQESQTKSMFVSRALEKILADKEVKRPQHSQLRRACQVALDEIKAEIEKQRLGTAAPPKANFIEADKYFLPFELACQSKSPRVVSTSLDCLQKLIAYGHITGNAPDSGAPGKRLIDRIVETICSCFQGPQTDEGVQLQIIKALLTAVTSPHIEIHEGTILQTVRTCYNIYLASKNLINQTTAKATLTQMLNVIFTRMENQVLQEARELEKPIQSKPQSPVIQAAAVSPKFVRLKHSQAQSKPTTPEKTDLTNGEHARSDSGKVSTENGDAPRERGSSLSGTG

SEQ ID NO: 820842 - protein, 397 aa, Homo sapiens [sequence omitted]

SEQ ID NO: 820843 - protein, 30 aa, Homo sapiens
MYKYMSSQHLFKLLDCLQESHSFSKAFNSN

SEQ ID NO: 820844 - protein, 221 aa, Homo sapiens
PPPQADWRFCGGSSGGQPGRRVTWPTASRATSRGPQGMDLQAAGAQAQGAAEPSRGPPLPSARGAPPSPEAGFATADHSGQERETEKAMDRLARGTQSIPNDSPARGEGTHSEEEGFAMDEEDSDGELNTWELSEGTNCPPKEQPGDLFNEDWDSELKADQGNPYDADDIQESISQELKPWVCCAPQGDMIYDPSWHHPPPLIPYYSKMVFETGQFDDAED

SEQ ID NO: 820845 - protein, 77 aa, Homo sapiens
YYYYKFCGRSDELKADQGNPYDADDIQESISQELKPWVCCAPQGDMIYDPSWHHPPPLIPYYSKMVFETGQFDDAED

SEQ ID NO: 820846 - protein, 221 aa, Homo sapiens; identical to SEQ ID NO: 820844

SEQ ID NO: 820847 - protein, 80 aa, Homo sapiens
RPGRGAAGLRGGESRGRGWALRVSRDGCPPAGRRCGFGKWEVTLVTESRGPLPGAWARARLALLQLTTPVRRERLRKCLQ

SEQ ID NO: 820848 - protein, 242 aa, Homo sapiens
KDKTNDLGTTRTRRIHKVGQKARLENRRPVTITGLKYEPGWRFRQRRASRATSRGPQGMDLQAAGAQAQGAAEPSRGPPLPSARGAPPSPEAGFATADHSGQERETEKAMDRLARGTQSIPNDSPARGEGTHSEEEGFAMDEEDSDGELNTWELSEGTNCPPKEQPGDLFNEDWDSELKADQGNPYDADDIQESISQELKPWVCCAPQGDMIYDPSWHHPPPLIPYYSKMVFETGQFDDAED

SEQ ID NO: 820849 - protein, 221 aa, Homo sapiens; identical to SEQ ID NO: 820844

SEQ ID NO: 820850 - protein, 221 aa, Homo sapiens; identical to SEQ ID NO: 820844

SEQ ID NO: 820851 - protein, 221 aa, Homo sapiens; identical to SEQ ID NO: 820844

SEQ ID NO: 820852 - protein, 172 aa, Homo sapiens [sequence omitted]

SEQ ID NO: 820853 - protein, 270 aa, Homo sapiens
PPPQADWRFCGGSSGGQPGRRVTWPTASRATSRGPQGMDLQAAGAQAQGAAEPSRGPPLPSARGAPPSPEAGFATADHSGQERETEKAMDRLASPLCCLVAFSAQLNSNLLWKPCLELLKGSPELFLCSNPSFYREKQLENARGTQSIPNDSPARGEGTHSEEEGFAMDEEDSDGELNTWELSEGTNCPPKEQPGDLFNEDWDSELKADQGNPYDADDIQESISQELKPWVCCAPQGDMIYDPSWHHPPPLIPYYSKMVFETGQFDDAED

SEQ ID NO: 820854 - protein, 221 aa, Homo sapiens; identical to SEQ ID NO: 820844

SEQ ID NO: 820855 - protein, 172 aa, Homo sapiens [sequence omitted]

SEQ ID NO: 820856 - protein, 117 aa, Homo sapiens
MKRVEEIKQKRQAKLYNGTQMLTRTHTLTRATESSGYQQKSTQNIHLIRAPLLQATRGTPVLAHGRTHWSQAKFTNEDLWHPLGKRCSFKNKSPGLNPFFFFYCYHLLDTQLAPCVH

SEQ ID NO: 820857 - protein, 117 aa, Homo sapiens; identical to SEQ ID NO: 820856

SEQ ID NO: 820858 - protein, 117 aa, Homo sapiens; identical to SEQ ID NO: 820856

SEQ ID NO: 820859 - protein, 117 aa, Homo sapiens; identical to SEQ ID NO: 820856

SEQ ID NO: 820860 - protein, 101 aa, Homo sapiens
STGINAEWPLRPGSSQAWRLFGGVTRGFNMRIEKCYFCSGPIYPGHGMMFVRNDVQGVQICANLNVIKTLKRSAILAKLGGPKHSGKQLVKSLQWIIHCEL

SEQ ID NO: 820861 - protein, 117 aa, Homo sapiens; identical to SEQ ID NO: 820856

SEQ ID NO: 820862 - protein, 117 aa, Homo sapiens; identical to SEQ ID NO: 820856

SEQ ID NO: 820863 - protein, 117 aa, Homo sapiens; identical to SEQ ID NO: 820856

SEQ ID NO: 820864 - protein, 117 aa, Homo sapiens; identical to SEQ ID NO: 820856

SEQ ID NO: 820865 - protein, 117 aa, Homo sapiens; identical to SEQ ID NO: 820856

SEQ ID NO: 820866 - protein, 125 aa, Homo sapiens
  misc_feature (3)..(3): Xaa can be any naturally occurring amino acid
  misc_feature (7)..(7): Xaa can be any naturally occurring amino acid
  misc_feature (25)..(25): Xaa can be any naturally occurring amino acid
  misc_feature (29)..(29): Xaa can be any naturally occurring amino acid
  misc_feature (31)..(31): Xaa can be any naturally occurring amino acid
ALXSPPXFTPIPSPRTSAEREKFDXPLEXTXRVLDLELADPPGCRNSDERGFNMRIEKCYFCSGPIYPGHGMMFVRNDVQGVQICANLNVIKTLKRSAILAKLGGPKHSGKQLVKSLQWIIHCEL

SEQ ID NO: 820867 - protein, 117 aa, Homo sapiens; identical to SEQ ID NO: 820856

SEQ ID NO: 820868 - protein, 117 aa, Homo sapiens; identical to SEQ ID NO: 820856

SEQ ID NO: 820869 - protein, 117 aa, Homo sapiens; identical to SEQ ID NO: 820856

SEQ ID NO: 820870 - protein, 117 aa, Homo sapiens
MKRVEEIKQKRQAKLYNGTQMLTRTHTLTRATESSGYQQKSTQNIHLIRAPLLQATRGTPVLAHGRTHWSQAKFTNEDLWHPLGKRCSFKNKSPGLNPFFFFYCYHLLDTQLAPCVD

SEQ ID NO: 820871 - protein, 86 aa, Homo sapiens
STGINAEWPLRPGSSQAWRLFGGVTRGFNMRIEKCYFCSGPIYPGHGMMFVRNDVQVKKKRNPRKVRWTKAFRKAAGKELTVDNSL

SEQ ID NO: 820872 - protein, 117 aa, Homo sapiens; identical to SEQ ID NO: 820856

SEQ ID NO: 820873 - protein, 117 aa, Homo sapiens; identical to SEQ ID NO: 820870

SEQ ID NO: 820874 - protein, 117 aa, Homo sapiens; identical to SEQ ID NO: 820856

SEQ ID NO: 820875 - protein, 136 aa, Homo sapiens
MRIPSRELEYALIMTYAYRYCKIMTLIMITSESYGIKLCDAMKRVEEIKQKRQAKLYNGTQMLTRTHTLTRATESSGYQQKSTQNIHLIRAPLLQATRGTPVLAHGRTHWSQAKFTNEDLWHPLGKRCSFKNKSPG

SEQ ID NO: 820876 - protein, 115 aa, Homo sapiens
MVAKIILEVHKVLYTEQFEEPEELETVPREISQIVMQRDTQSGFDHPLARRRATLSDDTLVRPSLPTRTCGTHLGKDAPLKTNLLGETHFSFFIVTIFWTHNWPLVWINCGKNLA

SEQ ID NO: 820877 - protein, 157 aa, Homo sapiens
  misc_feature (50)..(50): Xaa can be any naturally occurring amino acid
  misc_feature (56)..(56): Xaa can be any naturally occurring amino acid
MKRVEEIKQKRQAKLYNGTQHRGHASKQSKQLKQSQASSKAQSSQKTIPXNFFNSXKPPPFPFWPSAKRGGTTTTTKGGVSLCGGGGQQHTKAEQQHQGGDYTRHTKPTSCWGGGSYHTTPNIVGPHNKGGVSSHNTPKIYMSAERTGGGDNHLFGA

SEQ ID NO: 820878 - protein, 103 aa, Homo sapiens
METTNGTETWYESLHAVLKALNATLHSNLLCRPGPGLGPDNQTEERRASLPGRDDNSYMYILFVMFLFAVTVGSLILGYTRSRKVDKRSDPYHVYIKNRVSMI

SEQ ID NO: 820879 - protein, 103 aa, Homo sapiens; identical to SEQ ID NO: 820878

SEQ ID NO: 820880 - protein, 103 aa, Homo sapiens; identical to SEQ ID NO: 820878

SEQ ID NO: 820881 - protein, 103 aa, Homo sapiens; identical to SEQ ID NO: 820878

SEQ ID NO: 820882 - protein, 1092 aa, Homo sapiens
MMDSPKIGNGLPVIGPGTDIGISSLHMVGYLGKNFDSAKVPSDEYCPACREKGKLKALKTYRISFQESIFLCEDLQCIYPLGSKSLNNLISPDLEECHTPHKPQKRKSLESSYKDSLLLANSKKTRNYIAIDGGKVLNSKHNGEVYDETSSNLPDSSGQQNPIRTADSLERNEILEADTVDMATTKDPATVDVSGTGRPSPQNEGCTSKLEMPLESKCTSFPQALCVQWKNAYALCWLDCILSALVHSEELKNTVTGLCSKEESIFWRLLTKYNQANTLLYTSQLSGVKDGDCKKLTSEIFAEIETCLNEVRDEIFISLQPQLRCTLGDMESPVFAFPLLLKLETHIEKLFLYSFSWDFECSQCGHQYQNRHMKSLVTFTNVIPEWHPLNAAHFGPCNNCNSKSQIRKMVLEKVSPIFMLHFVEGLPQNDLQHYAFHFEGCLYQITSVIQYRANNHFITWILDADGSWLECDDLKGPCSERHKKFEVPASEIHIVIWERKISQVTDKEAACLPLKKTNDQHALSNEKPVSLTSCSVGDAASAETASVTHPKDISVAPRTLSQDTAVTHGDHLLSGPKGLVDNILPLTLEETIQKTASVSQLNSEAFLLENKPVAENTGILKTNTLLSQESLMASSVSAPCNEKLIQDQFVDISFPSQVVNTNMQSVQLNTEDTVNTKSVNNTDATGLIQGVKSVEIEKDAQLKQFLTPKTEQLKPERVTSQVSNLKKKETTADSQTTTSKSLQNQSLKENQKKPFVGSWVKGLISRGASFMPLCVSAHNRNTITDLQPSVKGVNNFGGFKTKGINQKASHVSKKARKSASKPPPISKPPAGPPSSNGTAAHPHAHAASEVLEKSGSTSCGAQLNHSSYGNGISSANHEDLVEGQIHKLRLKLRKKLKAEKKKLAALMSSPQSRTVRSENLEQVPQDGSPNDCESIEDLLNELPYPIDIASESACTTVPGVSLYSSQTHEEILAELLSPTPVSTELSENGEGDFRYLGMGDSHIPPPVPSEFNDVSQNTHLRQDHNYCSPTKKNPCEVQPDSLTNNACVRTLNLESPMKTDIFDEFFSSSALNALANDTLDLPHFDEYLFENY

SEQ ID NO: 820883 - protein, 121 aa, Homo sapiens
PNPATHTWRAQQPPAPPLLVAAVATASAATGRTATPLRRATGSAHVFTFPATPPSFQAQRAAGRRTLLPRTQAGSRLPSGDASGGGAVRGERGLNVATRVEIKLEQEFRSTRYQEGECPRQ

SEQ ID NO: 820884 - protein, 1092 aa, Homo sapiens; identical to SEQ ID NO: 820882

SEQ ID NO: 820885 - protein, 1086 aa, Homo sapiens
MMDSPKIGNGLPVIGPGTDIGISSLHMNFDSAKVPSDEYCPACREKGKLKALKTYRISFQESIFLCEDLQCIYPLGSKSLNNLISPDLEECHTPHKPQKRKSLESSYKDSLLLANSKKTRNYIAIDGGKVLNSKHNGEVYDETSSNLPDSSGQQNPIRTADSLERNEILEADTVDMATTKDPATVDVSGTGRPSPQNEGCTSKLEMPLESKCTSFPQALCVQWKNAYALCWLDCILSALVHSEELKNTVTGLCSKEESIFWRLLTKYNQANTLLYTSQLSGVKDGDCKKLTSEIFAEIETCLNEVRDEIFISLQPQLRCTLGDMESPVFAFPLLLKLETHIEKLFLYSFSWDFECSQCGHQYQNRHMKSLVTFTNVIPEWHPLNAAHFGPCNNCNSKSQIRKMVLEKVSPIFMLHFVEGLPQNDLQHYAFHFEGCLYQITSVIQYRANNHFITWILDADGSWLECDDLKGPCSERHKKFEVPASEIHIVIWERKISQVTDKEAACLPLKKTNDQHALSNEKPVSLTSCSVGDAASAETASVTHPKDISVAPRTLSQDTAVTHGDHLLSGPKGLVDNILPLTLEETIQKTASVSQLNSEAFLLENKPVAENTGILKTNTLLSQESLMASSVSAPCNEKLIQDQFVDISFPSQVVNTNMQSVQLNTEDTVNTKSVNNTDATGLIQGVKSVEIEKDAQLKQFLTPKTEQLKPERVTSQVSNLKKKETTADSQTTTSKSLQNQSLKENQKKPFVGSWVKGLISRGASFMPLCVSAHNRNTITDLQPSVKGVNNFGGFKTKGINQKASHVSKKARKSASKPPPISKPPAGPPSSNGTAAHPHAHAASEVLEKSGSTSCGAQLNHSSYGNGISSANHEDLVEGQIHKLRLKLRKKLKAEKKKLAALMSSPQSRTVRSENLEQVPQDGSPNDCESIEDLLNELPYPIDIASESACTTVPGVSLYSSQTHEEILAELLSPTPVSTELSENGEGDFRYLGMGDSHIPPPVPSEFNDVSQNTHLRQDHNYCSPTKKNPCEVQPDSLTNNACVRTLNLESPMKTDIFDEFFSSSALNALANDTLDLPHFDEYLFENY

SEQ ID NO: 820886 - protein, 1180 aa, Homo sapiens
PNPATHTWRAQQPPAPPLLVAAVATASAATGRTATPLRRATGSAHVFTFPATPPSFQAQRAAGRRTLLPRTQAGSRLPSGDASGGGAVRGERGLNVATRVEIKLEQEFRSTRYQEGECPRQNFDSAKVPSDEYCPACREKGKLKALKTYRISFQESIFLCEDLQCIYPLGSKSLNNLISPDLEECHTPHKPQKRKSLESSYKDSLLLANSKKTRNYIAIDGGKVLNSKHNGEVYDETSSNLPDSSGQQNPIRTADSLERNEILEADTVDMATTKDPATVDVSGTGRPSPQNEGCTSKLEMPLESKCTSFPQALCVQWKNAYALCWLDCILSALVHSEELKNTVTGLCSKEESIFWRLLTKYNQANTLLYTSQLSGVKDGDCKKLTSEIFAEIETCLNEVRDEIFISLQPQLRCTLGDMESPVFAFPLLLKLETHIEKLFLYSFSWDFECSQCGHQYQNRHMKSLVTFTNVIPEWHPLNAAHFGPCNNCNSKSQIRKMVLEKVSPIFMLHFVEGLPQNDLQHYAFHFEGCLYQITSVIQYRANNHFITWILDADGSWLECDDLKGPCSERHKKFEVPASEIHIVIWERKISQVTDKEAACLPLKKTNDQHALSNEKPVSLTSCSVGDAASAETASVTHPKDISVAPRTLSQDTAVTHGDHLLSGPKGLVDNILPLTLEETIQKTASVSQLNSEAFLLENKPVAENTGILKTNTLLSQESLMASSVSAPCNEKLIQDQFVDISFPSQVVNTNMQSVQLNTEDTVNTKSVNNTDATGLIQGVKSVEIEKDAQLKQFLTPKTEQLKPERVTSQVSNLKKKETTADSQTTTSKSLQNQSLKENQKKPFVGSWVKGLISRGASFMPLCVSAHNRNTITDLQPSVKGVNNFGGFKTKGINQKASHVSKKARKSASKPPPISKPPAGPPSSNGTAAHPHAHAASEVLEKSGSTSCGAQLNHSSYGNGISSANHEDLVEGQIHKLRLKLRKKLKAEKKKLAALMSSPQSRTVRSENLEQVPQDGSPNDCESIEDLLNELPYPIDIASESACTTVPGVSLYSSQTHEEILAELLSPTPVSTELSENGEGDFRYLGMGDSHIPPPVPSEFNDVSQNTHLRQDHNYCSPTKKNPCEVQPDSLTNNACVRTLNLESPMKTDIFDEFFSSSALNALANDTLDLPHFDEYLFENY

SEQ ID NO: 820887 - protein, 763 aa, Homo sapiens
MESPVFAFPLLLKLETHIEKLFLYSFSWDFECSQCGHQYQNRHMKSLVTFTNVIPEWHPLNAAHFGPCNNCNSKSQIRKMVLEKVSPIFMLHFVEGLPQNDLQHYAFHFEGCLYQITSVIQYRANNHFITWILDADGSWLECDDLKGPCSERHKKFEVPASEIHIVIWERKISQVTDKEAACLPLKKTNDQHALSNEKPVSLTSCSVGDAASAETASVTHPKDISVAPRTLSQDTAVTHGDHLLSGPKGLVDNILPLTLEETIQKTASVSQLNSEAFLLENKPVAENTGILKTNTLLSQESLMASSVSAPCNEKLIQDQFVDISFPSQVVNTNMQSVQLNTEDTVNTKSVNNTDATGLIQGVKSVEIEKDAQLKQFLTPKTEQLKPERVTSQVSNLKKKETTADSQTTTSKSLQNQSLKENQKKPFVGSWVKGLISRGASFMPLCVSAHNRNTITDLQPSVKGVNNFGGFKTKGINQKASHVSKKARKSASKPPPISKPPAGPPSSNGTAAHPHAHAASEVLEKSGSTSCGAQLNHSSYGNGISSANHEDLVEGQIHKLRLKLRKKLKAEKKKLAALMSSPQSRTVRSENLEQVPQDGSPNDCESIEDLLNELPYPIDIASESACTTVPGVSLYSSQTHEEILAELLSPTPVSTELSENGEGDFRYLGMGDSHIPPPVPSEFNDVSQNTHLRQDHNYCSPTKKNPCEVQPDSLTNNACVRTLNLESPMKTDIFDEFFSSSALNALANDTLDLPHFDEYLFENY

SEQ ID NO: 820888 - protein, 172 aa, Homo sapiens
MSSSGGAPGASASSAPPAQEEGMTWWYRWLCRLSGVLGAVSCAISGLFNCITIHPLNIAAGVWMIMNAFILLLCEAPFCCQFIEFANTVAEKVDRLRSWQKAVFYCGMAVVPIVISLTLTTLLGNAIAFATGVLYGLSALGKKGDAISYARIQQQRQQADEEKLAETLEGEL

SEQ ID NO: 820889 - protein, 107 aa, Homo sapiens [sequence omitted]

SEQ ID NO: 820890 - protein, 107 aa, Homo sapiens [sequence omitted]

SEQ ID NO: 820891 - protein, 130 aa, Homo sapiens
MSSSGGAPGASASSAPPAQEEGMTWWYRWLCRLSGVLGAVSCAISGLFNCITIHPLNIAAGVWMMMAVVPIVISLTLTTLLGNAIAFATGVLYGLSALGKKGDAISYARIQQQRQQADEEKLAETLEGEL

SEQ ID NO: 820892 - protein, 148 aa, Homo sapiens
AGGQMLTAAGSTAELSACAISGLFNCITIHPLNIAAGVWMIMNAFILLLCEAPFCCQFIEFANTVAEKVDRLRSWQKAVFYCGMAVVPIVISLTLTTLLGNAIAFATGVLYGLSALGKKGDAISYARIQQQRQQADEEKLAETLEGEL

SEQ ID NO: 820893 - protein, 172 aa, Homo sapiens; identical to SEQ ID NO: 820888

SEQ ID NO: 820894 - protein, 69 aa, Homo sapiens
MAVVPIVISLTLTTLLGNAIAFATGVLYGLSALGKKCVCQAQPWAGPSSLRPPKSFSEEDLRVPLLASG

SEQ ID NO: 820895 - protein, 505 aa, Homo sapiens
MNINDLKLTLSKAGQEHLLRFWNELEEAQQVELYAELQAMNFEELNFFFQKAIEGFNQSSHQKNVDARMEPVPREVLGSATRDQDQLQAWESEGLFQISQNKVAVLLLAGGQGTRLGVAYPKGMYDVGLPSRKTLFQIQAERILKLQQVAEKYYGNKCIIPWYIMTSGRTMESTKEFFTKHKYFGLKKENVIFFQQGMLPAMSFDGKIILEEKNKVSMAPDGNGGLYRALAAQNIVEDMEQRGIWSIHVYCVDNILVKVADPRFIGFCIQKGADCGAKVVEKTNPTEPVGVVCRVDGVYQVVEYSEISLATAQKRSSDGRLLFNAGNIANHFFTVPFLRDVVNVYEPQLQHHVAQKKIPYVDTQGQLIKPDKPNGIKMEKFVFDIFQFAKKFVVYEVLREDEFSPLKNADSQNGKDNPTTARHALMSLHHCWVLNAGGHFIDENGSRLPAIPRLKDANDVPIQCEISPLISYAGEGLESYVADKEFHAPLIIDENGVHELVKNGI

SEQ ID NO: 820896 - protein, 522 aa, Homo sapiens
MNINDLKLTLSKAGQEHLLRFWNELEEAQQVELYAELQAMNFEELNFFFQKAIEGFNQSSHQKNVDARMEPVPREVLGSATRDQDQLQAWESEGLFQISQNKVAVLLLAGGQGTRLGVAYPKGMYDVGLPSRKTLFQIQAERILKLQQVAEKYYGNKCIIPWYIMTSGRTMESTKEFFTKHKYFGLKKENVIFFQQGMLPAMSFDGKIILEEKNKVSMAPDGNGGLYRALAAQNIVEDMEQRGIWSIHVYCVDNILVKVADPRFIGFCIQKGADCGAKVVEKTNPTEPVGVVCRVDGVYQVVEYSEISLATAQKRSSDGRLLFNAGNIANHFFTVPFLRDVVNVYEPQLQHHVAQKKIPYVDTQGQLIKPDKPNGIKMEKFVFDIFQFAKKFVVYEVLREDEFSPLKNADSQNGKDNPTTARHALMSLHHCWVLNAGGHFIDENGSRLPAIPRSATNGKSETITADVNHNLKDANDVPIQCEISPLISYAGEGLESYVADKEFHAPLIIDENGVHELVKNGI

SEQ ID NO: 820897 - protein, 505 aa, Homo sapiens; identical to SEQ ID NO: 820895

SEQ ID NO: 820898 - protein, 505 aa, Homo sapiens; identical to SEQ ID NO: 820895

SEQ ID NO: 820899 - protein, 519 aa, Homo sapiens
IPLDVELSKAGQEHLLRFWNELEEAQQVELYAELQAMNFEELNFFFQKAIEGFNQSSHQKNVDARMEPVPREVLGSATRDQDQLQAWESEGLFQISQNKVAVLLLAGGQGTRLGVAYPKGMYDVGLPSRKTLFQIQAERILKLQQVAEKYYGNKCIIPWYIMTSGRTMESTKEFFTKHKYFGLKKENVIFFQQGMLPAMSFDGKIILEEKNKVSMAPDGNGGLYRALAAQNIVEDMEQRGIWSIHVYCVDNILVKVADPRFIGFCIQKGADCGAKVVEKTNPTEPVGVVCRVDGVYQVVEYSEISLATAQKRSSDGRLLFNAGNIANHFFTVPFLRDVVNVYEPQLQHHVAQKKIPYVDTQGQLIKPDKPNGIKMEKFVFDIFQFAKKFVVYEVLREDEFSPLKNADSQNGKDNPTTARHALMSLHHCWVLNAGGHFIDENGSRLPAIPRSATNGKSETITADVNHNLKDANDVPIQCEISPLISYAGEGLESYVADKEFHAPLIIDENGVHELVKNGI

SEQ ID NO: 820900 - protein, 505 aa, Homo sapiens; identical to SEQ ID NO: 820895

SEQ ID NO: 820901 - protein, 358 aa, Homo sapiens
MTSGRTMESTKEFFTKHKYFGLKKENVIFFQQGMLPAMSFDGKIILEEKNKVSMAPDGNGGLYRALAAQNIVEDMEQRGIWSIHVYCVDNILVKVADPRFIGFCIQKGADCGAKVVEKTNPTEPVGVVCRVDGVYQVVEYSEISLATAQKRSSDGRLLFNAGNIANHFFTVPFLRDVVNVYEPQLQHHVAQKKIPYVDTQGQLIKPDKPNGIKMEKFVFDIFQFAKKFVVYEVLREDEFSPLKNADSQNGKDNPTTARHALMSLHHCWVLNAGGHFIDENGSRLPAIPRSATNGKSETITADVNHNLKDANDVPIQCEISPLISYAGEGLESYVADKEFHAPLIIDENGVHELVKNGI

SEQ ID NO: 820902 - protein, 528 aa, Homo sapiens
MNINDLKLTLSKAGQEHLLRFWNELEEAQQVELYAELQAMNFEELNFFFQKAIEGFNQSSHQKNVDARMEPVPREVLGSATRDQDQLQAWESEGLFQISQNKVAVLLLAGGQGTRLGVAYPKGMYDVGLPSRKTLFQIQAERILKLQQVAEKYYGNKCIIPWYIMTSGRTMESTKEFFTKHKYFGLKKENVIFFQQGMLPAMSFDGKIILEEKNKVSMAPDGNGGLYRALAAQNIVEDMEQRGIWSIHVYCVDNILVKVADPRFIGFCIQKGADCGAKVVEKTNPTEPVGVVCRVDGVYQVVEYSEISLATAQKRSSDGRLLFNAGNIANHFFTVPFLRDVVNVYEPQLQHHVAQKKIPYVDTQGQLIKPDKPNGIKMEKFVFDIFQFAKKFVVYEVLREDEFSPLKNADSQNGKDNPTTARHALMSLHHCWVLNAGGHFIDENGSRLPAIPRSATNGKSETITADVNHNLKDANDVPIQCEISPLISYAGEVSLLYFFLYSFTKLCIFQNNEKVDFKCSHHKERISI

SEQ ID NO: 820903 - protein, 352 aa, Homo sapiens
MESTKEFFTKHKYFGLKKENVIFFQQGMLPAMSFDGKIILEEKNKVSMAPDGNGGLYRALAAQNIVEDMEQRGIWSIHVYCVDNILVKVADPRFIGFCIQKGADCGAKVVEKTNPTEPVGVVCRVDGVYQVVEYSEISLATAQKRSSDGRLLFNAGNIANHFFTVPFLRDVVNVYEPQLQHHVAQKKIPYVDTQGQLIKPDKPNGIKMEKFVFDIFQFAKKFVVYEVLREDEFSPLKNADSQNGKDNPTTARHALMSLHHCWVLNAGGHFIDENGSRLPAIPRSATNGKSETITADVNHNLKDANDVPIQCEISPLISYAGEGLESYVADKEFHAPLIIDENGVHELVKNGI

SEQ ID NO: 820904 - protein, 470 aa, Homo sapiens [sequence omitted]

SEQ ID NO: 820905 - protein, 262 aa, Homo sapiens
VALEVPDGIETGADCGAKVVEKTNPTEPVGVVCRVDGVYQVVEYSEISLATAQKRSSDGRLLFNAGNIANHFFTVPFLRDVVNVYEPQLQHHVAQKKIPYVDTQGQLIKPDKPNGIKMEKFVFDIFQFAKKFVVYEVLREDEFSPLKNADSQNGKDNPTTARHALMSLHHCWVLNAGGHFIDENGSRLPAIPRSATNGKSETITADVNHNLKDANDVPIQCEISPLISYAGEGLESYVADKEFHAPLIIDENGVHELVKNGI

SEQ ID NO: 820906 - protein, 360 aa, Homo sapiens [sequence omitted]

SEQ ID NO: 820907 - protein, 166 aa, Homo sapiens
LCGYPRNLLLSHMVLQLKIPYVDTQGQLIKPDKPNGIKMEKFVFDIFQFAKKFVVYEVLREDEFSPLKNADSQNGKDNPTTARHALMSLHHCWVLNAGGHFIDENGSRLPAIPRLKDANDVPIQCEISPLISYAGEGLESYVADKEFHAPLIIDENGVHELVKNGI

SEQ ID NO: 820908 - protein, 512 aa, Homo sapiens
MDLKESPSEGSLQPSSIQIFANTSTLHGIRHIFVYGPLTIRRVLWAVAFVGSLGLLLVESSERVSYYFSYQHVTKVDEVVAQSLVFPAVTLCNLNGFRFSRLTTNDLYHAGELLALLDVNLQIPDPHLADPSVLEALRQKANFKHYKPKQFSMLEFLHRVGHDLKDMMLYCKFKGQECGHQDFTTVFTKYGKCYMFNSGEDGKPLLTTVKGGTGNGLEIMLDIQQDEYLPIWGETEETTFEAGVKVQIHSQSEPPFIQELGFGVAPGFQTFVATQEQRLTYLPPPWGECRSSEMGLDFFPVYSITACRIDCETRYIVENCNCRMVHMPGDAPFCTPEQHKECAEPALGLLAEKDSNYCLCRTPCNLTRYNKELSMVKIPSKTSAKYLEKKFNKSEKYISENILVLDIFFEALNYETIEQKKAYEVAALLGDIGGQMGLFIGASILTILELFDYIYELIKEKLLDLLGKEEDEGSHDENVSTCDTMPNHSETISHTVNVPLQTTLGTLEEIAC

SEQ ID NO: 820909 - protein, 318 aa, Homo sapiens
MFNSGEDGKPLLTTVKGGTGNGLEIMLDIQQDEYLPIWGETEETTFEAGVKVQIHSQSEPPFIQELGFGVAPGFQTFVATQEQRLTYLPPPWGECRSSEMGLDFFPVYSITACRIDCETRYIVENCNCRMVHMPGDAPFCTPEQHKECAEPALGLLAEKDSNYCLCRTPCNLTRYNKELSMVKIPSKTSAKYLEKKFNKSEKYISENILVLDIFFEALNYETIEQKKAYEVAALLGDIGGQMGLFIGASILTILELFDYIYELIKEKLLDLLGKEEDEGSHDENVSTCDTMPNHSETISHTVNVPLQTTLGTLEEIAC

SEQ ID NO: 820910 - protein, 175 aa, Homo sapiens
MAQSQGWVKRYIKAFCKGFFVAVPVAVTFLDRVACVARVEGASMQPSLNPGGSQSSDVVLLNHWKVRNFEVHRGDIVSLVSPKNPEQKIIKRVIALEGDIVRTIGHKNRYVKVPRGHIWVEGDHHGHSFDSNSFGPVSLGLLHAHATHILWPPERWQKLESVLPPERLPVQREEE

SEQ ID NO: 820911 - protein, 110 aa, Homo sapiens
MAQSQGWVKRYIKAFCKGFFVAVPVAVTFLDRVACVARVEGASMQPSLNPGGSQSSDVVLLNHWKVRNFEVHRGDIVSLVSPKNPEQKIIKRVIALEGDIVRDGRKLKRI

SEQ ID NO: 820912 - protein, 174 aa, Homo sapiens
IYLLIWLFICGTFNAPVMVGEDIEARRHFLNLCCQPRRVSLRLKKCISEVKDKAGSAQCHPLEQRAGIPSGEWRQLKERSPKNPEQKIIKRVIALEGDIVRTIGHKNRYVKVPRGHIWVEGDHHGHSFDSNSFGPVSLGLLHAHATHILWPPERWQKLESVLPPERLPVQREEE

SEQ ID NO: 820913 - protein, 115 aa, Homo sapiens
MAQSQGWVKRYIKAFCKGFFVAVPVAVTFLDRVACVARVEGASMQPSLNPGGSQSSDVVLLNHWKVRNFEVHRGDIVSLVSPKNPEQKIIKRVIALEGDIVSNLGRIHLNIPQRS

SEQ ID NO: 820914 - protein, 175 aa, Homo sapiens; identical to SEQ ID NO: 820910

SEQ ID NO: 820915 - protein, 175 aa, Homo sapiens; identical to SEQ ID NO: 820910

SEQ ID NO: 820916 - protein, 175 aa, Homo sapiens; identical to SEQ ID NO: 820910

SEQ ID NO: 820917 - protein, 175 aa, Homo sapiens; identical to SEQ ID NO: 820910

SEQ ID NO: 820918 - protein, 175 aa, Homo sapiens; identical to SEQ ID NO: 820910

SEQ ID NO: 820919 - protein, 104 aa, Homo sapiens
MAQSQGWVKRYIKAFCKGFFVAVPVAVTFLDRVACVARVEGASMQPSLNPGGSQSSDVVLLNHWKVRNFEVHRGDIVSLVSPKNPEQKIIKRVIALEGDIVRFP

SEQ ID NO: 820920 - protein, 174 aa, Homo sapiens; identical to SEQ ID NO: 820912

SEQ ID NO: 820921 - protein, 104 aa, Homo sapiens; identical to SEQ ID NO: 820919

SEQ ID NO: 820922 - protein, 106 aa, Homo sapiens
MAQSQGWVKRYIKAFCKGFFVAVPVAVTFLDRVACVARVEGASMQPSLNPGGSQSSDVVLLNHWKVRNFEVHRGDIVSLVNTYIAKQTVLSIARGFVQSWLTSVVS

SEQ ID NO: 820923 - protein, 1052 aa, Homo sapiens
MEGSEPVAAHQGEEASCSSWGTGSTNKNLPIMSTASVEIDDALYSRQRYVLGDTAMQKMAKSHVFLSGMGGLGLEIAKNLVLAGIKAVTIHDTEKCQAWDLGTNFFLSEDDVVNKRNRAEAVLKHIAELNPYVHVTSSSVPFNETTDLSFLDKYQCVVLTEMKLPLQKKINDFCRSQCPPIKFISADVHGIWSRLFCDFGDEFEVLDTTGEEPKEIFISNITQANPGIVTCLENHPHKLETGQFLTFREINGMTGLNGSIQQITVISPFSFSIGDTTELEPYLHGGIAVQVKTPKTVFFESLERQLKHPKCLIVDFSNPEAPLEIHTAMLALDQFQEKYSRKPNVGCQQDSEELLKLATSISETLEEKPDVNADIVHWLSWTAQGFLSPLAAAVGGVASQEVLKAVTGKFSPLCQWLYLEAADIVESLGKPECEEFLPRGDRYDALRACIGDTLCQKLQNLNIFLVGCGAIGCEMLKNFALLGVGTSKEKGMITVTDPDLIEKSNLNRQFLFRPHHIQKPKSYTAADATLKINSQIKIDAHLNKVCPTTETIYNDEFYTKQDVIITALDNVEARRYVDSRCLANLRPLLDSGTMGTKGHTEVIVPHLTESYNSHRDPPEEEIPFCTLKSFPAAIEHTIQWARDKFESSFSHKPSLFNKFWQTYSSAEEVLQKIQSGHSLEGCFQVIKLLSRRPRNWSQCVELARLKFEKYFNHKALQLLHCFPLDIRLKDGSLFWQSPKRPPSPIKFDLNEPLHLSFLQNAAKLYATVYCIPFAEEDLSADALLNILSEVKIQEFKPSNKVVQTDETARKPDHVPISSEDERNAIFQLEKAILSNEATKSDLQMAVLSFEKDDDHNGHIDFITAASNLRAKMYSIEPADRFKTKRIAGKIIPAIATTTATVSGLVALEMIKVTGGYPFEAYKNCFLNLAIPIVVFTETTEVRKTKIRNGISFTIWDRWTVHGKEDFTLLDFINAVKEKYGIEPTMVVQGVKMLYVPVMPGHAKRLKLTMHKLVKPTTEKKYVDLTVSFAPDIDGDEDLPGPPVRYYFSHDTD

SEQ ID NO: 820924 - protein, 1052 aa, Homo sapiens; identical to SEQ ID NO: 820923

SEQ ID NO: 820925 - protein, 1052 aa, Homo sapiens; identical to SEQ ID NO: 820923

SEQ ID NO: 820926 - protein, 1059 aa, Homo sapiens
MEGSEPVAAHQGEEASCSSWGTGSTNKNLPIMSTASVEIDDALYSRQRYVLGDTAMQKMAKSHVFLSGMGGLGLEIAKNLVLAGIKAVTIHDTEKCQAWDLGTNFFLSEDDVVNKRNRAEAVLKHIAELNPYVHVTSSSVPFNETTDLSFLDKYQCVVLTEMKLPLQKKINDFCRSQCPPIKFISADVHGIWSRLFCDFGDEFEVLDTTGEEPKEIFISNITQANPGIVTCLENHPHKLETGQFLTFREINGMTGLNGSIQQITVISPFSFSIGDTTELEPYLHGGIAVQVKTPKTVFFESLERQLKHPKCLIVDFSNPEAPLEIHTAMLALDQFQEKYSRKPNVGCQQDSEELLKLATSISETLEEKPDVNADIVHWLSWTAQGFLSPLAAAVGGVASQEVLKAVTGKFSPLCQWLYLEAADIVESLGKPECEEFLPRGDRYDALRACIGDTLCQKLQNLNIFLVGCGAIGCEMLKNFALLGVGTSKEKGMPYFLDIEITVTDPDLIEKSNLNRQFLFRPHHIQKPKSYTAADATLKINSQIKIDAHLNKVCPTTETIYNDEFYTKQDVIITALDNVEARRYVDSRCLANLRPLLDSGTMGTKGHTEVIVPHLTESYNSHRDPPEEEIPFCTLKSFPAAIEHTIQWARDKFESSFSHKPSLFNKFWQTYSSAEEVLQKIQSGHSLEGCFQVIKLLSRRPRNWSQCVELARLKFEKYFNHKALQLLHCFPLDIRLKDGSLFWQSPKRPPSPIKFDLNEPLHLSFLQNAAKLYATVYCIPFAEEDLSADALLNILSEVKIQEFKPSNKVVQTDETARKPDHVPISSEDERNAIFQLEKAILSNEATKSDLQMAVLSFEKDDDHNGHIDFITAASNLRAKMYSIEPADRFKTKRIAGKIIPAIATTTATVSGLVALEMIKVTGGYPFEAYKNCFLNLAIPIVVFTETTEVRKTKIRNGISFTIWDRWTVHGKEDFTLLDFINAVKEKYGIEPTMVVQGVKMLYVPVMPGHAKRLKLTMHKLVKPTTEKKYVDLTVSFAPDIDGDEDLPGPPVRYYFSHDTD

SEQ ID NO: 820927 - protein, 1052 aa, Homo sapiens; identical to SEQ ID NO: 820923

SEQ ID NO: 820928 - protein, 730 aa, Homo sapiens
LWQLRKLKLGCSVLSCRCQQDSEELLKLATSISETLEEKPDVNADIVHWLSWTAQGFLSPLAAAVGGVASQEVLKAVTGKFSPLCQWLYLEAADIVESLGKPECEEFLPRGDRYDALRACIGDTLCQKLQNLNIFLVGCGAIGCEMLKNFALLGVGTSKEKGMPYFLDIEITVTDPDLIEKSNLNRQFLFRPHHIQKPKSYTAADATLKINSQIKIDAHLNKVCPTTETIYNDEFYTKQDVIITALDNVEARRYVDSRCLANLRPLLDSGTMGTKGHTEVIVPHLTESYNSHRDPPEEEIPFCTLKSFPAAIEHTIQWARDKFESSFSHKPSLFNKFWQTYSSAEEVLQKIQSGHSLEGCFQVIKLLSRRPRNWSQCVELARLKFEKYFNHKALQLLHCFPLDIRLKDGSLFWQSPKRPPSPIKFDLNEPLHLSFLQNAAKLYATVYCIPFAEEDLSADALLNILSEVKIQEFKPSNKVVQTDETARKPDHVPISSEDERNAIFQLEKAILSNEATKSDLQMAVLSFEKDDDHNGHIDFITAASNLRAKMYSIEPADRFKTKRIAGKIIPAIATTTATVSGLVALEMIKVTGGYPFEAYKNCFLNLAIPIVVFTETTEVRKTKIRNGISFTIWDRWTVHGKEDFTLLDFINAVKEKYGIEPTMVVQGVKMLYVPVMPGHAKRLKLTMHKLVKPTTEKKYVDLTVSFAPDIDGDEDLPGPPVRYYFSHDTD

SEQ ID NO: 820929 - protein, 1052 aa, Homo sapiens; identical to SEQ ID NO: 820923

SEQ ID NO: 820930 - protein, 62 aa, Homo sapiens
MTLVGVSLGVSYKAAVKVLAGPAVILRLDWGRICFPSWLMWFLVGFSSSCIVKLRTSVPAGS

SEQ ID NO: 820931 - protein, 346 aa, Homo sapiens [sequence omitted]

SEQ ID NO: 820932 - protein, 285 aa, Homo sapiens
SAFIFSATVTKMEAFLGSRSGLWAGGPAPGQFYRIPSTPDSFMDPASALYRGPITRTQNPMVTGTSVLGVKFEGGVVIAADMLGSYGSLARFRNISRIMRVNNSTMLGASGDYADFQYLKQVLGQMVIDEELLGDGHSYSPRAIHSWLTRAMYSRRSKMNPLWNTMVIGGYADGESFLGYVDMLGVAYEAPSLATGYGAYLAQPLLREVLEKQPVLSQTEARDLVERCMRVLYYPRMPVLTTGFKSPLVTEKGVEIEGPLSTETNWDIAHMISGFELKYRCIIQN

SEQ ID NO: 820933 - protein, 285 aa, Homo sapiens; identical to SEQ ID NO: 820932

SEQ ID NO: 820934 - protein, 274 aa, Homo sapiens
MEAFLGSRSGLWAGGPAPGQFYRIPSTPDSFMDPASALYRGPITRTQNPMVTGTSVLGVKFEGGVVIAADMLGSYGSLARFRNISRIMRVNNSTMLGASGDYADFQYLKQVLGQMVIDEELLGDGHSYSPRAIHSWLTRAMYSRRSKMNPLWNTMVIGGYADGESFLGYVDMLGVAYEAPSLATGYGAYLAQPLLREVLEKQPVLSQTEARDLVERCMRVLYYPRMPVLTTGFKSPLVTEKGVEIEGPLSTETNWDIAHMISGFELKYRCIIQN

SEQ ID NO: 820935 - protein, 274 aa, Homo sapiens; identical to SEQ ID NO: 820934

SEQ ID NO: 820936 - protein, 173 aa, Homo sapiens
  misc_feature (8)..(8): Xaa can be any naturally occurring amino acid
AGPGLRVXARLGQMVIDEELLGDGHSYSPRAIHSWLTRAMYSRRSKMNPLWNTMVIGGYADGESFLGYVDMLGVAYEAPSLATGYGAYLAQPLLREVLEKQPVLSQTEARDLVERCMRVLYYPRMPVLTTGFKSPLVTEKGVEIEGPLSTETNWDIAHMISGFELKYRCIIQN

SEQ ID NO: 820937 - protein, 293 aa, Homo sapiens
  misc_feature (5)..(6): Xaa can be any naturally occurring amino acid
  misc_feature (9)..(9): Xaa can be any naturally occurring amino acid
GATKXXIQXNRDARYLKQRRSTIRLGTAGAIGRGNKMEAFLGSRSGLWAGGPAPGQFYRIPSTPDSFMDPASALYRGPITRTQNPMVTGTSVLGVKFEGGVVIAADMLGSYGSLARFRNISRIMRVNNSTMLGASGDYADFQYLKQVLGQMVIDEELLGDGHSYSPRAIHSWLTRAMYSRRSKMNPLWNTMVIGGYADGESFLGYVDMLGVAYEAPSLATGYGAYLAQPLLREVLEKQPVLSQTEARDLVERCMRVLYYPRMPVLTTGSTPCPKGCLGPVPARVSLSGLICFP

SEQ ID NO: 820938 - protein, 230 aa, Homo sapiens
TLRARYEAWVVLLGVKFEGGVVIAADMLGSYGSLARFRNISRIMRVNNSTMLGASGDYADFQYLKQVLGQMVIDEELLGDGHSYSPRAIHSWLTRAMYSRRSKMNPLWNTMVIGGYADGESFLGYVDMLGVAYEAPSLATGYGAYLAQPLLREVLEKQPVLSQTEARDLVERCMRVLYYPRMPVLTTGFKSPLVTEKGVEIEGPLSTETNWDIAHMISGFELKYRCIIQN

SEQ ID NO: 820939 - protein, 310 aa, Homo sapiens
  misc_feature (5)..(6): Xaa can be any naturally occurring amino acid
  misc_feature (9)..(9): Xaa can be any naturally occurring amino acid
GATKXXIQXNRDARYLKQRRSTIRLGTAGAIGRGNKMEAFLGSRSGLWAGGPAPGQFYRIPSTPDSFMDPASALYRGPITRTQNPMVTGTSVLGVKFEGGVVIAADMLGSYGSLARFRNISRIMRVNNSTMLGASGDYADFQYLKQVLGQMVIDEELLGDGHSYSPRAIHSWLTRAMYSRRSKMNPLWNTMVIGGYADGESFLGYVDMLGVAYEAPSLATGYGAYLAQPLLREVLEKQPVLSQTEARDLVERCMRVLYYPRMPVLTTGFKSPLVTEKGVEIEGPLSTETNWDIAHMISGFELKYRCIIQN

SEQ ID NO: 820940 - protein, 285 aa, Homo sapiens; identical to SEQ ID NO: 820932

SEQ ID NO: 820941 - protein, 285 aa, Homo sapiens; identical to SEQ ID NO: 820932

SEQ ID NO: 820942 - protein, 285 aa, Homo sapiens; identical to SEQ ID NO: 820932

SEQ ID NO: 820943 - protein, 285 aa, Homo sapiens; identical to SEQ ID NO: 820932

SEQ ID NO: 820944 - protein, 285 aa, Homo sapiens; identical to SEQ ID NO: 820932

SEQ ID NO: 820945 - protein, 285 aa, Homo sapiens; identical to SEQ ID NO: 820932

SEQ ID NO: 820946 - protein, 289 aa, Homo sapiens
SAFIFSATVTKMEAFLGSRSGLWAGGPAPGQFYRIPSTPDSFMDPASALYRGPITRTQNPMVTGTSVLGVKFEGGVVIAADMLGSYGSLARFRNISRIMRVNNSTMLGASGDYADFQYLKQVLGQMVIDEELLGDGHSYSPRAIHSWLTRAMYSRRSKMNPLWNTMVIGGYADGESFLGYVDMLGVAYEAPSLATGYGAYLAQPLLREVLEKQPVLSQTEARDLVERCMRVLYYPRMPVLTTGFKSPLVTEKGVEIEGPLSTETNWDIAHMISGLNEYDAYPNEVAYFN

SEQ ID NO: 820947 - protein, 273 aa, Homo sapiens
SAFIFSATVTKMEAFLGSRSGLWAGGPAPGQFYRIPSTPDSFMDPASALYRGPITRTQNPMVTGTSVLGVKFEGGVVIAADMLGSYGSLARFRNISRIMRVNNSTMLGASGDYADFQYLKQVLGQMVIDEELLGDGHSYSPRAIHSWLTRAMYSRRSKMNPLWNTMVIGGYADGESFLGYVDMLGVAYEAPSLATGYGAYLAQPLLREVLEKQPVLSQTEARDLVERCMRVLYYPRMPVLTTGFKSPLVTEKGVEIEGPLSTETNWDIAHMIR

SEQ ID NO: 820948 - protein, 294 aa, Homo sapiens
  misc_feature (9)..(10): Xaa can be any naturally occurring amino acid
  misc_feature (18)..(19): Xaa can be any naturally occurring amino acid
MAFLWADTXXENHVVVVXXTVYVIPGERLGRVDWAGSPSKFYRIPSTPDSFMDPASALYRGPITRTQNPMVTGTSVLGVKFEGGVVIAADMLGSYGSLARFRNISRIMRVNNSTMLGASGDYADFQYLKQVLGQMVIDEELLGDGHSYSPRAIHSWLTRAMYSRRSKMNPLWNTMVIGGYADGESFLGYVDMLGVAYEAPSLATGYGAYLAQPLLREVLEKQPVLSQTEARDLVERCMRVLYYPRMPVLTTGFKSPLVTEKGVEIEGPLSTETNWDIAHMISGFELKYRCIIQN

SEQ ID NO: 820949 - protein, 248 aa, Homo sapiens
  misc_feature (6)..(6): Xaa can be any naturally occurring amino acid
  misc_feature (8)..(8): Xaa can be any naturally occurring amino acid
SLVPPXGXWISSTHALCTRTQNPMVTGTSVLGVKFEGGVVIAADMLGSYGSLARFRNISRIMRVNNSTMLGASGDYADFQYLKQVLGQMVIDEELLGDGHSYSPRAIHSWLTRAMYSRRSKMNPLWNTMVIGGYADGESFLGYVDMLGVAYEAPSLATGYGAYLAQPLLREVLEKQPVLSQTEARDLVERCMRVLYYPRMPVLTTGFKSPLVTEKGVEIEGPLSTETNWDIAHMISGFELKYRCIIQN

SEQ ID NO: 820950 - protein, 268 aa, Homo sapiens
SAFIFSATVTKMEAFLGSRSGLWAGGPAPGQFYRIPSTPDSFMDPASALYRGPITRTQNPMVTGTSVLGVKFEGGVVIAADMLGSYGSLARFRNISRIMRVNNSTMLGASGDYADFQYLKQVLGQMVIDEELLGDGHSYSPRAIHSWLTRAMYSRRSKMNPLWNTMVIGGYADGESFLGYVDMLGVAYEAPSLATGYGAYLAQPLLREVLEKQPVLSQTEARDLVERCMRVLYYPRMPVLTTGSTPCPKGCLGPVPARVSLSGLICFP

SEQ ID NO: 820951 - protein, 243 aa, Homo sapiens
SAFIFSATVTKMEAFLGSRSGLWAGGPAPGQFYRIPSTPDSFMDPASALYRGPITRTQNPMVTGTSVLGVKFEGGVVIAADMLGSYGSLARFRNISRIMRVNNSTMLGASGDYADFQYLKQVLGQMVIDEELLGDGHSYSPRAIHSWLTRAMYSRRSKMNPLWNTMVIGGYADGESFLGYVDMLGVAYEAPSLATGYGAYLAQPLLREVLEKQPVLSQTEARDLVERCMRVLYYPRMPVLTTG

SEQ ID NO: 820952 - protein, 243 aa, Homo sapiens; identical to SEQ ID NO: 820951

SEQ ID NO: 820953 - protein, 359 aa, Homo sapiens
MEAFLGSRSGLWAGGPAPGQFYRIPSTPDSFMDPASALYRGPITRTQNPMVTGTSVLGVKFEGGVVIAADMLGSYGSLARFRNISRIMRVNNSTMLGASGDYADFQYLKQVLGQMVSVIQRTGEWFPSREGSPLFFIPFDGMGGLVAAGDWKSCWRWAICVCNKVFGIRCKMGEGVVTSFGDGWRPRLNSPPFSHNQFLLRIDEELLGDGHSYSPRAIHSWLTRAMYSRRSKMNPLWNTMVIGGYADGESFLGYVDMLGVAYEAPSLATGYGAYLAQPLLREVLEKQPVLSQTEARDLVERCMRVLYYPRMPVLTTGFKSPLVTEKGVEIEGPLSTETNWDIAHMISGFELKYRCIIQN

SEQ ID NO: 820954 - protein, 226 aa, Homo sapiens
SAFIFSATVTKMEAFLGSRSGLWAGGPAPGQFYRIPSTPDSFMDPASALYRGPITRTQNPMVTGTSVLGVKFEGGVVIAADMLGSYGSLARFRNISRIMRVNNSTMLGASGDYADFQYLKQVLGQMVIDEELLGDGHSYSPRAIHSWLTRAMYSRRSKMNPLWNTMVIGGYADGESFLGYVDMLGVAYEAPSLATGYGAYLAQPLLREVLEKQPVLSQTEAPPNFN

SEQ ID NO: 820955 - protein, 220 aa, Homo sapiens
SAFIFSATVTKMEAFLGSRSGLWAGGPAPGQFYRIPSTPDSFMDPASALYRGPITRTQNPMVTGTSVLGVKFEGGVVIAADMLGSYGSLARFRNISRIMRVNNSTMLGASGDYADFQYLKQVLGQMVIDEELLGDGHSYSPRAIHSWLTRAMYSRRSKMNPLWNTMVIGGYADGESFLGYVDMLGVAYEAPSLATGYGAYLAQVSSKSRGGGKGRQKEMD

SEQ ID NO: 820956 - protein, 178 aa, Homo sapiens
SAFIFSATVTKMEAFLGSRSGLWAGGPAPGQFYRIPSTPDSFMDPASALYRGPITRTQNPMVTGTSVLGVKFEGGVVIAADMLGSYGSLARFRNISRIMRVNNSTMLGASGDYADFQYLKQVLGQMVIDEELLGDGHSYSPRAIHSWLTRAMYSRRSKMNPLWNTMVIGGYADGERFI

SEQ ID NO: 820957 - protein, 220 aa, Homo sapiens; identical to SEQ ID NO: 820955

SEQ ID NO: 820958 - protein, 178 aa, Homo sapiens; identical to SEQ ID NO: 820956

SEQ ID NO: 820959 - protein, 178 aa, Homo sapiens; identical to SEQ ID NO: 820956

SEQ ID NO: 820960 - protein, 220 aa, Homo sapiens; identical to SEQ ID NO: 820955

SEQ ID NO: 820961 - protein, 220 aa, Homo sapiens; identical to SEQ ID NO: 820955

SEQ ID NO: 820962 - protein, 220 aa, Homo sapiens; identical to SEQ ID NO: 820955

SEQ ID NO: 820963 - protein, 220 aa, Homo sapiens; identical to SEQ ID NO: 820955

SEQ ID NO: 820964 - protein, 127 aa, Homo sapiens
SAFIFSATVTKMEAFLGSRSGLWAGGPAPGQFYRIPSTPDSFMDPASALYRGPITRTQNPMVTGTSVLGVKFEGGVVIAADMLGSYGSLARFRNISRIMRVNNSTMLGASGDYADFQYLKQVLGQMV

SEQ ID NO: 820965 - protein, 189 aa, Homo sapiens
SAFIFSATVTKMEAFLGSRSGLWAGGPAPGQFYRIPSTPDSFMDPASALYRGPITRTQNPMVTGTSVLGVKFEGGVVIAADMLGSYGSLARFRNISRIMRVNNSTMLGASGDYADFQYLKQVLGQMVIDEELLGDGHSYSPRAIHSWLTRAMYSRRSKMNPLWNTMVIGGYADGESFLGYVTRMYTGAE

SEQ ID NO: 820966 - protein, 188 aa, Homo sapiens
SAFIFSATVTKMEAFLGSRSGLWAGGPAPGQFYRIPSTPDSFMDPASALYRGPITRTQNPMVTGTSVLGVKFEGGVVIAADMLGSYGSLARFRNISRIMRVNNSTMLGASGDYADFQYLKQVLGQMVIDEELLGDGHSYSPRAIHSWLTRAMYSRRSKMNPLWNTMVIGGYADGESFLGYVATLLFGG

SEQ ID NO: 820967 - protein, 185 aa, Homo sapiens
SAFIFSATVTKMEAFLGSRSGLWAGGPAPGQFYRIPSTPDSFMDPASALYRGPITRTQNPMVTGTSVLGVKFEGGVVIAADMLGSYGSLARFRNISRIMRVNNSTMLGASGDYADFQYLKQVLGQMVIDEELLGDGHSYSPRAIHSWLTRAMYSRRSKMNPLWNTMVIGGYADGESILAPDIAFL

SEQ ID NO: 820968 - protein, 544 aa, Homo sapiens [sequence omitted]

SEQ ID NO: 820969 - protein, 552 aa, Homo sapiens
MGYLEELLGVGPQVEEFSVEPPLDDLSLDEAQFVLAPSCCSVDSAGPRPEVEEENGEEVFLSAYDDLSPLLGPKPPIWKGSGSLEGEAAGCGRQALGQGGEEQACWEVGEDKQAEPGGRLDIREEAEGSPETKVEAGKASEDRGEAGGSQETKVRLREGSREETEAKEEKSKGQKKADSMEAKGVEEPGGDEYTDEKEKEIEREEDEQREEAQVEAGRDLEQGAQEDQVAEEKWEVVQKQEAEGVREDEDKGQREKGYHEARKDQGDGEDSRSPEAATEGGAGEVSKERESGDGEAEGDQRAGGYYLEEDTLSEGSGVASLEVDCAKEGNPHSSEMEEVAPQPPQPEEMEPEGQPSPDGCLCPCSLGLGGVGMRLASTLVQVQQVRSVPVVPPKPQFAKMPSAMCSKIHVAPANPCPRPGRLDGTPGERAWGSRASRSSWRNGGSLSFDAAVALARDRQRTEAQGVRRTQTCTEGGDYCLIPRTSPCSMISAHSPRPLSCLELPSEGAEGSGSRSRLSLPPREPQVPDPLLSSQRRSYAFETQANPGKGEGL

SEQ ID NO: 820970 - protein, 582 aa, Homo sapiens
CGCKDALTGSGLRSCTASCPLKLSGARRASARLGHETQDTISCQGPGSFLFNSHFRVAGAPGAGAAARCPGHPPPPIGSPAPLGPGQAQQLAGIPWGTGRAQVLGDRGDRASALGLLAMKSRQKGKKKGSAKERVFGCDLQEHLQHSGQEVPQVLKSCAEFVEEYGVVDGIYRLSGVSSNIQKLRQEFESERKPDLRRDVYLQDIHCVSSLCKAYFRELPDPLLTYRLYDKFAEAVGVQLEPERLVKILEVLRELPVPNYRTLEFLMRHLVHMASFSAQTNMHARNLAIVWAPNLLRSKDIEASGFNGTAAFMEVRVQSIVVEFILTHVDQLFGGAALSGGEVESGWRSLPGTRASGSPEDLMPRPLPYHLPSILQAGDGPPQMRPYHTIIEIAEHKRKGSLKVRKWRSIFNLGRSGHETKRKLPRGAEDREDKSNKGTLRPAKSMDSLSAAAGASDEPEGLVGPSSPRPSPLLPESLENDSIEAAEGEQEPEAEALGGTNSEPGTPRAGRSAIRAGGSSRAERCAGVHISDPYNVNLPLHITSILSVPPNIISNVSLARLTRGLECPALQHRPSPASGPGP

SEQ ID NO: 820971 - protein, 586 aa, Homo sapiens
CGCKDALTGSGLRSCTASCPLKLSGARRASARLGHETQDTISCQGPGSFLFNSHFRVAGAPGAGAAARCPGHPPPPIGSPAPLGPGQAQQLAGIPWGTGRAQVLGDRGDRASALGLLAMKSRQKGKKKGSAKERVFGCDLQEHLQHSGQEVPQVLKSCAEFVEEYGVVDGIYRLSGVSSNIQKLRQEFESERKPDLRRDVYLQDIHCVSSLCKAYFRELPDPLLTYRLYDKFAEAVGVQLEPERLVKILEVLRELPVPNYRTLEFLMRHLVHMASFSAQTNMHARNLAIVWAPNLLRSKDIEASGFNGTAAFMEVRVQSIVVEFILTHVDQLFGGAALSGGEVESGWRSLPGTRASGSPEDLMPRPLPYHLPSILQAGDGPPQMRPYHTIIEIAEHKRKGSLKVRKWRSIFNLGRSGHETKRKLPRGAEDREDKSNKGTLRPAKSMDSLSAAAGASDEPEGLVGPSSPRPSPLLPESLENDSIEAAEGEQEPEAEALGGTNSEPGTPRAGRSAIRAGGSSRAERCAGVHISDPLPPVTMCKRGPVQISLGSPFSFGITCSYFRKGKWCHSGPGTASPARLGPQVPL

SEQ ID NO: 820972 - protein, 468 aa, Homo sapiens
MSFARRGLPKFHFSDPVQSLTTQSSDFYVSAPSVSPVPQVLKSCAEFVEEYGVVDGIYRLSGVSSNIQKLRQEFESERKPDLRRDVYLQDIHCVSSLCKAYFRELPDPLLTYRLYDKFAEAVGVQLEPERLVKILEVLRELPVPNYRTLEFLMRHLVHMASFSAQTNMHARNLAIVWAPNLLRSKDIEASGFNGTAAFMEVRVQSIVVEFILTHVDQLFGGAALSGGEVESGWRSLPGTRASGSPEDLMPRPLPYHLPSILQAGDGPPQMRPYHTIIEIAEHKRKGSLKVRKWRSIFNLGRSGHETKRKLPRGAEDREDKSNKGTLRPAKSMDSLSAAAGASDEPEGLVGPSSPRPSPLLPESLENDSIEAAEGEQEPEAEALGGTNSEPGTPRAGRSAIRAGGSSRAERCAGVHISDPYNVNLPLHITSILSVPPNIISNVSLARLTRGLECPALQHRPSPASGPGP

SEQ ID NO: 820973 - protein, 236 aa, Homo sapiens
MLCLQVEEFSVEPPLDDLSLDEAQFVLAPSCCSVDSAGPRPEVEEENGEEVFLSAYDDLSPLLGPKPPIWKGSGSLEGEAAGCGRQALGQGGEEQACWEVGEDKQAEPGGRLDIREEAEGSPETKVEAGKASEDRGEAGGSQETKVRLREGSREETEAKEEKSKGQKKADSMEAKGVEEPGGDEYTDEKEKEIEREEDEQREEAQVEAGRDLEQGAQEDQVAEAGKSLEPGRQRLQ

SEQ ID NO: 820974 - protein, 645 aa, Homo sapiens
MRPRKAFLLLLLLGLVQLLAVAGAEGPDEDSSNRENAIEDEEEEEEEDDDEEEDDLEVKEENGVLVLNDANFDNFVADKDTVLLEFYAPWCGHCKQFAPEYEKIANILKDKDPPIPVAKIDATSASVLASRFDVSGYPTIKILKKGQAVDYEGSRTQEEIVAKVREVSQPDWTPPPEVTLVLTKENFDEVVNDADIILVEFYAPWCGHCKKLAPEYEKAAKELSKRSPPIPLAKVDATAETDLAKRFDVSGYPTLKIFRKGRPYDYNGPREKYGIVDYMIEQSGPPSKEILTLKQVQEFLKDGDDVIIIGVFKGESDPAYQQYQDAANNLREDYKFHHTFSTEIAKFLKVSQGQLVVMQPEKFQSKYEPRSHMMDVQGSTQDSAIKDFVLKYALPLVGHRKVSNDAKRYTRRPLVVVYYSVDFSFDYRAATQFWRSKVLEVAKDFPEYTFAIADEEDYAGEVKDLGLSESGEDVNAAILDESGKKFAMEPEEFDSDTLREFVTAFKKGKLKPVIKSQPVPKNNKGPVKVVVGKTFDSIVMDPKKDVLIEFYAPWCGHCKQLEPVYNSLAKKYKGQKGLVIAKMDATANDVPSDRYKVEGFPTIYFAPSGDKKNPVKFEGGDRDLEHLSKFIEEHATKLSRTKEEL

SEQ ID NO: 820975 - protein, 172 aa, Homo sapiens
MRPRKAFLLLLLLGLVQLLAVAGAEGPDEDSSNRENAIEDEEEEEEEDDDEEEDDLEVKEENGVLVLNDANFDNFVADKDTVLLEFYAPWCGHCKQFAPEYEKIANILKDKDPPIPVAKIDATSASVLASRFDVSGYPTIKILKKGQAVDYEGSRTQEDICRQGQTEISRSP

SEQ ID NO: 820976 - protein, 103 aa, Homo sapiens
MRPRKAFLLLLLLGLVQLLAVAGAEGPDEDSSNRENAIEDEEEEEEEDDDEEEDDLEVKEEKVCLDPDELYFDKSEDFRGAPGPEFAYSKVFTYAKRGVAEKG

SEQ ID NO: 820977 - protein, 92 aa, Homo sapiens
MRPRKAFLLLLLLGLVQLLAVAGAEGPDEDFRQVQANSRRTRPGSGKGEGEPLERRGEGVKKQVRVLWNSKHSFSVILLTEKTTCKSRALAS

SEQ ID NO: 820978 - protein, 645 aa, Homo sapiens; identical to SEQ ID NO: 820974

SEQ ID NO: 820979 - protein, 673 aa, Homo sapiens
MRPRKAFLLLLLLGLVQLLAVAGAEGPDEDSSNRENAIEDEEEEEEEDDDEEEDDLEVKEENGVLVLNDANFDNFVADKDTVLLEFYAPWCGHCKQFAPEYEKIANILKDKDPPIPVAKIDATSASVLASRFDVSGYPTIKILKKGQAVDYEGSRTQEDGVFLCLPGWSVQWCNLGSPNSLHLRGSEIVAKVREVSQPDWTPPPEVTLVLTKENFDEVVNDADIILVEFYAPWCGHCKKLAPEYEKAAKELSKRSPPIPLAKVDATAETDLAKRFDVSGYPTLKIFRKGRPYDYNGPREKYGIVDYMIEQSGPPSKEILTLKQVQEFLKDGDDVIIIGVFKGESDPAYQQYQDAANNLREDYKFHHTFSTEIAKFLKVSQGQLVVMQPEKFQSKYEPRSHMMDVQGSTQDSAIKDFVLKYALPLVGHRKVSNDAKRYTRRPLVVVYYSVDFSFDYRAATQFWRSKVLEVAKDFPEYTFAIADEEDYAGEVKDLGLSESGEDVNAAILDESGKKFAMEPEEFDSDTLREFVTAFKKGKLKPVIKSQPVPKNNKGPVKVVVGKTFDSIVMDPKKDVLIEFYAPWCGHCKQLEPVYNSLAKKYKGQKGLVIAKMDATANDVPSDRYKVEGFPTIYFAPSGDKKNPVKFEGGDRDLEHLSKFIEEHATKLSRTKEEL

SEQ ID NO: 820980 - protein, 492 aa, Homo sapiens
MPPQEEIVAKVREVSQPDWTPPPEVTLVLTKENFDEVVNDADIILVEFYAPWCGHCKKLAPEYEKAAKELSKRSPPIPLAKVDATAETDLAKRFDVSGYPTLKIFRKGRPYDYNGPREKYGIVDYMIEQSGPPSKEILTLKQVQEFLKDGDDVIIIGVFKGESDPAYQQYQDAANNLREDYKFHHTFSTEIAKFLKVSQGQLVVMQPEKFQSKYEPRSHMMDVQGSTQDSAIKDFVLKYALPLVGHRKVSNDAKRYTRRPLVVVYYSVDFSFDYRAATQFWRSKVLEVAKDFPEYTFAIADEEDYAGEVKDLGLSESGEDVNAAILDESGKKFAMEPEEFDSDTLREFVTAFKKGKLKPVIKSQPVPKNNKGPVKVVVGKTFDSIVMDPKKDVLIEFYAPWCGHCKQLEPVYNSLAKKYKGQKGLVIAKMDATANDVPSDRYKVEGFPTIYFAPSGDKKNPVKFEGGDRDLEHLSKFIEEHATKLSRTKEEL

SEQ ID NO: 820981 - protein, 453 aa, Homo sapiens
TEETIGAFEQVYRCGHCKKLAPEYEKAAKELSKRSPPIPLAKVDATAETDLAKRFDVSGYPTLKIFRKGRPYDYNGPREKYGIVDYMIEQSGPPSKEILTLKQVQEFLKDGDDVIIIGVFKGESDPAYQQYQDAANNLREDYKFHHTFSTEIAKFLKVSQGQLVVMQPEKFQSKYEPRSHMMDVQGSTQDSAIKDFVLKYALPLVGHRKVSNDAKRYTRRPLVVVYYSVDFSFDYRAATQFWRSKVLEVAKDFPEYTFAIADEEDYAGEVKDLGLSESGEDVNAAILDESGKKFAMEPEEFDSDTLREFVTAFKKGKLKPVIKSQPVPKNNKGPVKVVVGKTFDSIVMDPKKDVLIEFYAPWCGHCKQLEPVYNSLAKKYKGQKGLVIAKMDATANDVPSDRYKVEGFPTIYFAPSGDKKNPVKFEGGDRDLEHLSKFIEEHATKLSRTKEEL

SEQ ID NO: 820982 - protein, 537 aa, Homo sapiens
MRPRKAFLLLLLLGLVQLLAVAGAEGPDEDSSNRENAIEDEEEEEEEDDDEEEDDLEVKEENGVLVLNDANFDNFVADKDTVLLEFYAPWCGHCKQFAPEYEKIANILKDKDPPIPVAKIDATSASVLATAETDLAKRFDVSGYPTLKIFRKGRPYDYNGPREKYGIVDYMIEQSGPPSKEILTLKQVQEFLKDGDDVIIIGVFKGESDPAYQQYQDAANNLREDYKFHHTFSTEIAKFLKVSQGQLVVMQPEKFQSKYEPRSHMMDVQGSTQDSAIKDFVLKYALPLVGHRKVSNDAKRYTRRPLVVVYYSVDFSFDYRAATQFWRSKVLEVAKDFPEYTFAIADEEDYAGEVKDLGLSESGEDVNAAILDESGKKFAMEPEEFDSDTLREFVTAFKKGKLKPVIKSQPVPKNNKGPVKVVVGKTFDSIVMDPKKDVLIEFYAPWCGHCKQLEPVYNSLAKKYKGQKGLVIAKMDATANDVPSDRYKVEGFPTIYFAPSGDKKNPVKFEGGDRDLEHLSKFIEEHATKLSRTKEEL

SEQ ID NO: 820983 - protein, 607 aa, Homo sapiens
MRPRKAFLLLLLLGLVQLLAVAGAEGPDEDSSNRENAIEDEEEEEEEDDDEEEDDLEVKEENGVLVLNDANFDNFVADKDTVLLEFYAPWCGHCKQFAPEYEKIANILKDKDPPIPVAKIDATSASVLASRFDVSGYPTIKILKKGQAVDYEGSRTQEEIVAKVREVSQPDWTPPPEVTLVLTKENFDEVVNDADIILVEFYAPWCGHCKKLAPEYEKAAKELSKRSPPIPLAKVDATAETDLAKRFDVSGYPTLKIFRKGRPYDYNGPREKYGIVDYMIEQSGPPSKEILTLKQVQEFLKDGDDVIIIGVFKGESDPAYQQYQDAANNLREDYKFHHTFSTEIAKFLKVSQGQLVVMQPEKFQSKYEPRSHMMDVQGSTQDSAIKDFVLKYALPLVGHRKVSNDAKRYTRRPLVVVYYSVDFSFDYRAATQFWRSKVLEVAKDFPEYTFAIADEEDYAGEVKDLGLSESGEDVNAAILDESGKKFAMEPEEFDSDTLREFVTAFKKGKLKPVIKSQPVPKNNKGPVKVVVGKTFDSIVMDPKKDVLIEFYAPWCGHCKQLEPVYNSLAKKYKGQKGLVIAKMDATANDVPPDGKKKPRGGRGFFFF

SEQ ID NO: 820984 - protein, 605 aa, Homo sapiens
MRPRKAFLLLLLLGLVQLLAVAGAEGPDEDSSNRENAIEDEEEEEEEDDDEEEDDLEVKEENGVLVLNDANFDNFVADKDTVLLEFYAPWCGHCKQFAPEYEKIANILKDKDPPIPVAKIDATSASVLASRFDVSGYPTIKILKKGQAVDYEGSRTQEEIVAKVREVSQPDWTPPPEVTLVLTKENFDEVVNDADIILVEFYAPWCGHCKKLAPEYEKAAKELSKRSPPIPLAKVDATAETDLAKRFDVSGYPTLKIFRKGRPYDYNGPREKYGIVDYMIEQSGPPSKEILTLKQVQEFLKDGDDVIIIGVFKGESDPAYQQYQDAANNLREDYKFHHTFSTEIAKFLKVSQGQLVVMQPEKFQSKYEPRSHMMDVQGSTQDSAIKDFVLKYALPLVGHRKVSNDAKRYTRRPLVVVYYSVDFSFDYRAATQFWRSKVLEVAKDFPEYTFAIADEEDYAGEVKDLGLSESGEDVNAAILDESGKKFAMEPEEFDSDTLREFVTAFKKGKLKPVIKSQPVPKNNKGPVKVVVGKTFDSIVMDPKKDVLIEFYAPWCGHCKQLEPVYNSLAKKYKGQKGLVIAKMDATANEVSPRPGSTPRGRPPLF

SEQ ID NO: 820985 - protein, 375 aa, Homo sapiens
MRPRKAFLLLLLLGLVQLLAVAGAEGPDEDSSNRENAIEDEEEEEEEDDDEEEDDLEVKEENGVLVLNDANFDNFVADKDTVLLEFYAPWCGHCKQFAPEYEKIANILKDKDPPIPVAKIDATSASVLASRFDVSGYPTIKILKKGQAVDYEGSRTQEEIVAKVREVSQPDWTPPPEVTLVLTKENFDEVVNDADIILVEFYAPWCGHCKKLAPEYEKAAKELSKRSPPIPLAKVDATAETDLAKRFDVSGYPTLKIFRKGRPYDYNGPREKYESLITRVQEVPKLKVCALRVTSRAQRILRAGGKILTFDQLALDSPKGCGTVLLSGPRKGREVYRHFGKPRNPHSTQTYVVQGRSRACRGEGSGVKKYPDLSF

SEQ ID NO: 820986 - protein, 356 aa, Homo sapiens
MRPRKAFLLLLLLGLVQLLAVAGAEGPDEDSSNRENAIEDEEEEEEEDDDEEEDDLEVKEENGVLVLNDANFDNFVADKDTVLLEFYAPWCGHCKQFAPEYEKIANILKDKDPPIPVAKIDATSASVLASRFDVSGYPTIKILKKGQAVDYEGSRTQEDGVFLCLPGWSVQWCNLGSPNSLHLRGSEIVAKVREVSQPDWTPPPEVTLVLTKENFDEVVNDADIILVEFYAPWCGHCKKLAPEYEKAAKELSKRSPPIPLAKVDATAETDLAKRFDVSGYPTLKIFRKGRPYDYNGPREKYGIVDYMIEQSGPPSKEILTLKQVQEFLKDGDDVIIIGVFKGEISNLTHFSPVAVL

SEQ ID NO: 820987 - protein, 197 aa, Homo sapiens
MRPRKAFLLLLLLGLVQLLAVAGAEGPDEDSSNRENAIEDEEEEEEEDDDEEEDDLEVKEENGVLVLNDANFDNFVADKDTVLLEFYAPWCGHCKQFAPEYEKIANILKDKDPPIPVAKIDATSASVLASRFDVSGYPTIKILKKGQAVDYEGSRTQEDGVLLLWPRLQYDGAISAHRNLHLPDSSDSPASASRVAV

SEQ ID NO: 820988 - protein, 645 aa, Homo sapiens; identical to SEQ ID NO: 820974

SEQ ID NO: 820989 - protein, 162 aa, Homo sapiens
MRPRKAFLLLLLLGLVQLLAVAGAEGPDEDFRQVQANSRRTRPGSGKGEGEPLERRGEGVKKQVRVLWNSKHSFSVILLTEPVSFPAIPSPHLSLLPPSLPSLLSPPSTPYSPISPTFLSALPHLFSLHYPPPPPLTPILTPLSPRPLPLIHPPPLLLLSSS

SEQ ID NO: 820990 - protein, 645 aa, Homo sapiens; identical to SEQ ID NO: 820974

SEQ ID NO: 820991 - protein, 632 aa, Homo sapiens
MRPRKAFLLLLLLGLVQLLAVAGAEGPDEDSSNRENAIEDEEEEEEEDDDEEEDDLEVKEENGVLVLNDANFDNFVADKDTVLLEFYAPWCGHCKQFAPEYEKIANILKDKDPPIPVAKIDATSASVLASRFDVSGYPTIKILKKGQAVDYEGSRTQEEIVAKVREVSQPDWTPPPEVTLVLTKENFDEVVNDADIILVEFYAPWAAKELSKRSPPIPLAKVDATAETDLAKRFDVSGYPTLKIFRKGRPYDYNGPREKYGIVDYMIEQSGPPSKEILTLKQVQEFLKDGDDVIIIGVFKGESDPAYQQYQDAANNLREDYKFHHTFSTEIAKFLKVSQGQLVVMQPEKFQSKYEPRSHMMDVQGSTQDSAIKDFVLKYALPLVGHRKVSNDAKRYTRRPLVVVYYSVDFSFDYRAATQFWRSKVLEVAKDFPEYTFAIADEEDYAGEVKDLGLSESGEDVNAAILDESGKKFAMEPEEFDSDTLREFVTAFKKGKLKPVIKSQPVPKNNKGPVKVVVGKTFDSIVMDPKKDVLIEFYAPWCGHCKQLEPVYNSLAKKYKGQKGLVIAKMDATANDVPSDRYKVEGFPTIYFAPSGDKKNPVKFEGGDRDLEHLSKFIEEHATKLSRTKEEL

SEQ ID NO: 820992 - protein, 580 aa, Homo sapiens
MRPRKAFLLLLLLGLVQLLAVAGAEGPDEDSSNRENAIEDEEEEEEEDDDEEEDDLEVKEENGVLVLNDANFDNFVADKDTVLLEFYAPWCGHCKQFAPEYEKIANILKDKDPPIPVAKIDATSASVLASRFDVSGYPTIKILKKGQAVDYEGSRTQEEIVAKVREVSQPDWTPPPEVTLVLTKENFDEVVNDADIILVEFYAPWCGHCKKLAPEYEKAAKELSKRSPPIPLAKVDATAETDLAKRFDVSGYPTLKIFRKGRPYDYNGPREKYGIVDYMIEQSGPPSKEILTLKQVQEFLKDGDDVIIIGVFKGESDPAYQQYQDAANNLREDYKFHHTFSTEIAKFLKVSQGQLVVMQPEKFQSKYEPRSHMMDVQGSTQDSAIKDFVLKYALPLVGHRKVSNDAKRYTRRPLVVVYYSVDFSFDYRAATQFWRSKVLEVAKDFPEYTFAIADEEDYAGEVKDLGLSESGEDVNAAILDESGKKFAMEPEEFDSDTLREFVTAFKKGKLKPVIKSQPVPKNNKGPVKVVVGKTFDSIVMDPKKDVLIEFYAPWCGHCKQLEPVYNSLAKKYKGRPQRPL

SEQ ID NO: 820993 - protein, 442 aa, Homo sapiens
EVTLISLHLFAEFSPAAKELSKRSPPIPLAKVDATAETDLAKRFDVSGYPTLKIFRKGRPYDYNGPREKYGIVDYMIEQSGPPSKEILTLKQVQEFLKDGDDVIIIGVFKGESDPAYQQYQDAANNLREDYKFHHTFSTEIAKFLKVSQGQLVVMQPEKFQSKYEPRSHMMDVQGSTQDSAIKDFVLKYALPLVGHRKVSNDAKRYTRRPLVVVYYSVDFSFDYRAATQFWRSKVLEVAKDFPEYTFAIADEEDYAGEVKDLGLSESGEDVNAAILDESGKKFAMEPEEFDSDTLREFVTAFKKGKLKPVIKSQPVPKNNKGPVKVVVGKTFDSIVMDPKKDVLIEFYAPWCGHCKQLEPVYNSLAKKYKGQKGLVIAKMDATANDVPSDRYKVEGFPTIYFAPSGDKKNPVKFEGGDRDLEHLSKFIEEHATKLSRTKEEL

SEQ ID NO: 820994 - protein, 288 aa, Homo sapiens
MQPEKFQSKYEPRSHMMDVQGSTQDSAIKDFVLKYALPLVGHRKVSNDAKRYTRRPLVVVYYSVDFSFDYRAATQFWRSKVLEVAKDFPEYTFAIADEEDYAGEVKDLGLSESGEDVNAAILDESGKKFAMEPEEFDSDTLREFVTAFKKGKLKPVIKSQPVPKNNKGPVKVVVGKTFDSIVMDPKKDVLIEFYAPWCGHCKQLEPVYNSLAKKYKGQKGLVIAKMDATANDVPSDRYKVEGFPTIYFAPSGDKKNPVKFEGGDRDLEHLSKFIEEHATKLSRTKEEL

SEQ ID NO: 820995 - protein, 169 aa, Homo sapiens
DSSRISHRFAGMEPEEFDSDTLREFVTAFKKGKLKPVIKSQPVPKNNKGPVKVVVGKTFDSIVMDPKKDVLIEFYAPWCGHCKQLEPVYNSLAKKYKGQKGLVIAKMDATANDVPSDRYKVEGFPTIYFAPSGDKKNPVKFEGGDRDLEHLSKFIEEHATKLSRTKEEL

SEQ ID NO: 820996 - protein, 269 aa, Homo sapiens
MRPRKAFLLLLLLGLVQLLAVAGAEGPDEDSSNRENAIEDEEEEEEEDDDEEEDDLEVKEENGVLVLNDANFDNFVADKDTVLLEFYAPWCGHCKQFAPEYEKIANILKDKDPPIPVAKIDATSASVLASRFDVSGYPTIKILKKGQAVDYEGSRTQEEIVAKVREVSQPDWTPPPEVTLVLTKENFDEVVNDADIILVEFYAPWCGHCKKLAPEYEKAAKELSKRSPPIPLAKVDATAETDLAKRFDVSGYPTLKIFSWAVVVIRPLV

SEQ ID NO: 820997 - protein, 325 aa, Homo sapiens
MRPRKAFLLLLLLGLVQLLAVAGAEGPDEDSSNRENAIEDEEEEEEEDDDEEEDDLEVKEENGVLVLNDANFDNFVADKDTVLLEFYAPWCGHCKQFAPEYEKIANILKDKDPPIPVAKIDATSASVLASRFDVSGYPTIKILKKGQAVDYEGSRTQEDGVFLCLPGWSVQWCNLGSPNSLHLRGSEIVAKVREVSQPDWTPPPEVTLVLTKENFDEVVNDADIILVEFYAPWCGHCKKLAPEYEKAAKELSKRSPPIPLAKVDATAETDLAKRFDVSGYPTLKIFRKGRPYDYNGPREKYGDSDPEAGPGVPEGWRRCHHHRGL

SEQ ID NO: 820998 - protein, 767 aa, Homo sapiens
MATYLEFIQQNEERDGVRFSWNVWPSSRLEATRMVVPLACLLTPLKERPDLPPVQYEPVLCSRPTCKAVLNPLCQVDYRAKLWACNFCFQRNQFPPAYGGISEVNQPAELMPQFSTIEYVIQRGAQSPLIFLYVVDTCLEEDDLQALKESLQMSLSLLPPDALVGLITFGRMVQVHELSCEGISKSYVFRGTKDLTAKQIQDMLGLTKPAMPMQQARPAQPQEHPFASSRFLQPVHKIDMNLTDLLGELQRDPWPVTQGKRPLRSTGVALSIAVGLLEGTFPNTGARIMLFTGGPPTQGPGMVVGDELKIPIRSWHDIEKDNARFMKKATKHYEMLANRTAANGHCIDIYACALDQTGLLEMKCCANLTGGYMVMGDSFNTSLFKQTFQRIFTKDFNGDFRMAFGATLDVKTSRELKIAGAIGPCVSLNVKGPCVSENELGVGGTSQWKICGLDPTSTLGIYFEVVNQHNTPIPQGGRGAIQFVTHYQHSSTQRRIRVTTIARNWADVQSQLRHIEAAFDQEAAAVLMARLGVFRAESEEGPDVLRWLDRQLIRLCQKFGQYNKEDPTSFRLSDSFSLYPQFMFHLRRSPFLQVFNNSPDESSYYRHHFARQDLTQSLIMIQPILYSYSFHGPPEPVLLDSSSILADRILLMDTFFQIVIYLGETIAQWRKAGYQDMPEYENFKHLLQAPLDDAQEILQARFPMPRYINTEHGGSQARFLLSKVNPSQTHNNLYAWGQETGAPILTDDVSLQVFMDHLKKLAVSSAC

SEQ ID NO: 820999 - protein, 767 aa, Homo sapiens; identical to SEQ ID NO: 820998

SEQ ID NO: 821000 - protein, 313 aa, Homo sapiens
MATYLEFIQQNEERDGVRFSWNVWPSSRLEATRMVVPLACLLTPLKERPDLPPVQYEPVLCSRPTCKAVLNPLCQVDYRAKLWACNFCFQRNQFPPAYGGISEVNQPAELMPQFSTIEYVIQRGAQSPLIFLYVVDTCLEEDDLQALKESLQMSLSLLPPDALVGLITFGRMVQVHELSCEGISKSYVFRGTKDLTAKQIQDMLGLTKPAMPMQQARPAQPQEHPFASSRFWRLSQMYELTDLLGELQGARQHQGKDLGARGLGLARRGLTTGAPGRGPQATGENKHTRNENARKDRRIKSGNGTREGGSPTP

SEQ ID NO: 821001 - protein, 142 aa, Homo sapiens
PAPRGCPLNAPSSCSCSRSRDPEASEWHWCYFGRKTSRELKIAGAIGPCVSLNVKGPCVSENELGVGGTSQWKICGLDPTSTLGIYMEVVKQHHTPIPQGGRGAIQFVTHYQHSSSQRRIRVTTIARKSLVLVARVSGKSVA

SEQ ID NO: 821002 - protein, 767 aa, Homo sapiens; identical to SEQ ID NO: 820998

SEQ ID NO: 821003 - protein, 767 aa, Homo sapiens; identical to SEQ ID NO: 820998

SEQ ID NO: 821004 - protein, 767 aa, Homo sapiens; identical to SEQ ID NO: 820998

SEQ ID NO: 821005 - protein, 767 aa, Homo sapiens; identical to SEQ ID NO: 820998

SEQ ID NO: 821006 - protein, 767 aa, Homo sapiens; identical to SEQ ID NO: 820998

SEQ ID NO: 821007 - protein, 767 aa, Homo sapiens; identical to SEQ ID NO: 820998

SEQ ID NO: 821008 - protein, 738 aa, Homo sapiens
MATYLEFIQQNEERDGVRFSWNVWPSSRLEATRMVVPLACLLTPLKERPDLPPVQYEPVLCSRPTCKAVLNPLCQVDYRAKLWACNFCFQRNQFPPAYGGISEVNQPAELMPQFSTIEYVIQRGAQSPLIFLYVVDTCLEEDDLQALKESLQMSLSLLPPDALVGLITFGRMVQVHELSCEGISKSYVFRGTKDLTAKQIQDMLGLTKPAMPMQQARPAQPQEHPFASSRFLQPVHKIDMNLTDLLGELQRDPWPVTQGKRPLRSTGVALSIAVGLLEGTFPNTGARIMLFTGGPPTQGPGMVVGDELKIPIRSWHDIEKDNARFMKKATKHYEMLANRTAANGHCIDIYACALDQTGLLEMKCCANLTGGYMVMGDSFNTSLFKQTFQRIFTKDFNGDFRMAFGATLDVKTSRELKIAGAIGPCVSLNVKGPCVSENELGVGGTSQWKICGLDPTSTLGIYFEVVNQHNTPIPQGGRGAIQFVTHYQHSSTQRRIRVTTIARNWADVQSQLRHIEAAFDQEAAAVLMARLGVFRAESEEGPDVLRWLDRQLIRLCQKFGQYNKEDPTSFRLSDSFSLYPQFMFHLRRSPFLQVFNNSPDESSYYRHHFARQDLTQSLIMIQPILYSYSFHGPPETIAQWRKAGYQDMPEYENFKHLLQAPLDDAQEILQARFPMPRYINTEHGGSQARFLLSKVNPSQTHNNLYAWGQETGAPILTDDVSLQVFMDHLKKLAVSSAC

SEQ ID NO: 821009 - protein, 653 aa, Homo sapiens
PAPRGCPLNAPSSCSCSRSRDPEASEWHWCYFGRKTSRELKIAGAIGPCVSLNVKGPCVSENELGVGGTSQWKICGLDPTSTLGIYMEVVKQHHTPIPQGGRGAIQFVTHYQHSSTFLQPVHKIDMNLTDLLGELQRDPWPVTQGKRPLRSTGVALSIAVGLLEGTFPNTGARIMLFTGGPPTQGPGMVVGDELKIPIRSWHDIEKDNARFMKKATKHYEMLANRTAANGHCIDIYACALDQTGLLEMKCCANLTGGYMVMGDSFNTSLFKQTFQRIFTKDFNGDFRMAFGATLDVKTSRELKIAGAIGPCVSLNVKGPCVSENELGVGGTSQWKICGLDPTSTLGIYFEVVNQHNTPIPQGGRGAIQFVTHYQHSSTQRRIRVTTIARNWADVQSQLRHIEAAFDQEAAAVLMARLGVFRAESEEGPDVLRWLDRQLIRLCQKFGQYNKEDPTSFRLSDSFSLYPQFMFHLRRSPFLQVFNNSPDESSYYRHHFARQDLTQSLIMIQPILYSYSFHGPPEPVLLDSSSILADRILLMDTFFQIVIYLGETIAQWRKAGYQDMPEYENFKHLLQAPLDDAQEILQARFPMPRYINTEHGGSQARFLLSKVNPSQTHNNLYAWGQETGAPILTDDVSLQVFMDHLKKLAVSSAC

SEQ ID NO: 821010 - protein, 767 aa, Homo sapiens; identical to SEQ ID NO: 820998

SEQ ID NO: 821011 - protein, 456 aa, Homo sapiens
PAPRGCPLNAPSSCSCSRSRDPEASEWHWCYFGRKTSRELKIAGAIGPCVSLNVKGPCVSENELGVGGTSQWKICGLDPTSTLGIYMEVVKQHHTPIPQGGRGAIQFVTHISTPAPETHPRDHHRPKELGVGGTSQWKICGLDPTSTLGIYFEVVNQHNTPIPQGGRGAIQFVTHYQHSSTQRRIRVTTIARNWADVQSQLRHIEAAFDQEAAAVLMARLGVFRAESEEGPDVLRWLDRQLIRLCQKFGQYNKEDPTSFRLSDSFSLYPQFMFHLRRSPFLQVFNNSPDESSYYRHHFARQDLTQSLIMIQPILYSYSFHGPPEPVLLDSSSILADRILLMDTFFQIVIYLGETIAQWRKAGYQDMPEYENFKHLLQAPLDDAQEILQARFPMPRYINTEHGGSQARFLLSKVNPSQTHNNLYAWGQETGAPILTDDVSLQVFMDHLKKLAVSSAC

SEQ ID NO: 821012 - protein, 739 aa, Homo sapiens
MATYLEFIQQNEERDGVRFSWNVWPSSRLEATRMVVPLACLLTPLKERPDLPPVQYEPVLCSRPTCKAVLNPLCQVDYRAKLWACNFCFQRNQFPPAYGGISEVNQPAELMPQFSTIEYVIQRGAQSPLIFLYVVDTCLEEDDLQALKESLQMSLSLLPPDALVGLITFGRMVQVHELSCEGISKSYVFRGTKDLTAKQIQDMLGLTKPAMPMQQARPAQPQEHPFASSRFLQPVHKIDMNLTDLLGELQRDPWPVTQGKRPLRSTGVALSIAVGLLEGTFPNTGARIMLFTGGPPTQGPGMVVGDELKIPIRSWHDIEKDNARFMKKATKHYEMLANRTAANGHCIDIYACALDQTGLLEMKCCANLTGGYMVMGDSFNTSLFKQTFQRIFTKDFNGDFRMAFGATLDVKTSRELKIAGAIGPCVSLNVKGPCVSENELGVGGTSQWKICGLDPTSTLGIYFEVVNQHNTPIPQGGRGAIQFVTHYQHSSTQRRIRVTTIARNWADVQSQLRHIEAAFDQEAAAVLMARLGVFRAESEEGPDVLRWLDRQLIRLCQKFGQYNKEDPTSFRLSDSFSLYPQFMFHLRRSPFLQVFNNSPDESSYYRHHFARQDLTQSLIMIQPILYSYSFHGPPEPVLLDSSSILADRILLMDTFFQIVIYLGETIAQWRKAGYQDMPEYENFKHLLQAPLDDAQEILQARFPMPRYINTEHGGSQLLQMVHEHLQANIISYGVDAAAN

SEQ ID NO: 821013 - protein, 185 aa, Homo sapiens
MFHLRRSPFLQVFNNSPDESSYYRHHFARQDLTQSLIMIQPILYSYSFHGPPEPVLLDSSSILADRILLMDTFFQIVIYLGETIAQWRKAGYQDMPEYENFKHLLQAPLDDAQEILQARFPMPRYINTEHGGSQARFLLSKVNPSQTHNNLYAWGQETGAPILTDDVSLQVFMDHLKKLAVSSAC

SEQ ID NO: 821014 - protein, 333 aa, Homo sapiens
MATYLEFIQQNEERDGVRFSWNVWPSSRLEATRMVVPLACLLTPLKERPDLPPVQYEPVLCSRPTCKAVLNPLCQVDYRAKLWACNFCFQRNQFPPAYGGISEVNQPAELMPQFSTIEYVIQRGAQSPLIFLYVVDTCLEEDDLQALKESLQMSLSLLPPDALVGLITFGRMVQVHELSCEGISKSYVFRGTKDLTAKQIQDMLGLTKPAMPMQQARPAQPQEHPFASSRFLQPVHKIDMNLTDLLGELQRDPWPVTQGKRPLRSTGVALSIAVGLLEGTFPNTGARIMLFTGGPPTQGPGMVVGDELKIPIRSWHDIEKDNARFMKKATKAL

SEQ ID NO: 821015 - protein, 370 aa, Homo sapiens
MATYLEFIQQNEERDGVRFSWNVWPSSRLEATRMVVPLACLLTPLKERPDLPPVQYEPVLCSRPTCKAVLNPLCQVDYRAKLWACNFCFQRNQFPPAYGGISEVNQPAELMPQFSTIEYVIQRGAQSPLIFLYVVDTCLEEDDLQALKESLQMSLSLLPPDALVGLITFGRMVQVHELSCEGISKSYVFRGTKDLTAKQIQDMLGLTKPAMPMQQARPAQPQEHPFASSRFLQPVHKIDMNLTDLLGELQRDPWPVTQGKRPLRSTGVALSIAVGLLEGTFPNTGARIMLFTGGPPTQGPGMVVGDELKIPIRSWHDIEKDNARFMKKATKHSVMLSNRAHVQMYTTFIYARAPYHTRVLEMSVCTITLG

SEQ ID NO: 821016 - protein, 332 aa, Homo sapiens
PAPRGCPLNAPSSCSCSRSRDPEASEWHWCYFGRKTSRELKIAGAIGPCVSLNVKGPCVSENELGVGGTSQWKICGLDPTSTLGIYMEVVKQHHTPIPQGGRGAIQFVTHYQHSSSQRRIRVTTIARNWADVQSQLRHIEAAFDQEAAAVLMARLGVFRAESEEGPDVLRWLDRQLIRLCQKFGQYNKEDPTSFRLSDSFSLYPQFMFHLRRSPFLQVFNNSPDESSYYRHHFARQDLTQSLIMIQPILYSYSFHGPPEQEILQARFPMPRYINTEHGGSQARFLLSKVNPSQTHNNLYAWGQETGAPILTDDVSLQVFMDHLKKLAVSSAC

SEQ ID NO: 821017 - protein, 258 aa, Homo sapiens
MATYLEFIQQNEERDGVRFSWNVWPSSRLEATRMVVPLACLLTPLKERPDLPPVQYEPVLCSRPTCKAVLNPLCQVDYRAKLWACNFCFQRNQFPPAYGGISEVNQPAELMPQFSTIEYVIQRGAQSPLIFLYVVDTCLEEDDLQALKESLQMSLSLLPPDALVGLITFGRMVQVHELSCEGISKSYVFRGTKDLTAKQIQDMLGLTKPAMPMQQARPAQPQEHPFASSRTLHTCVKGCGRGGSEADLLNEYPCSAGQ

SEQ ID NO: 821018 - protein, 129 aa, Homo sapiens [sequence omitted]

SEQ ID NO: 821019 - protein, 665 aa, Homo sapiens [sequence omitted]

SEQ ID NO: 821020 - protein, 165 aa, Homo sapiens
MAASEAAAAAGSAALAAGARAVPAATTGAAAAASGPWVPPGPRLRGSRPRPAGATQQPAVPAPPAGELIQPSVSELSRAVRTNILCTVRGCGKILPNSPALNMHLVKSHRLQDGIVNPTIRKDLKTGPKFYCCPIEGCPRGPERPFSQFSLVKQVLSTLRMRYRC

SEQ ID NO: 821021 - protein, 830 aa, Homo sapiens
MAASEAAAAAGSAALAAGARAVPAATTGAAAAASGPWVPPGPRLRGSRPRPAGATQQPAVPAPPAGELIQPSVSELSRAVRTNILCTVRGCGKILPNSPALNMHLVKSHRLQDGIVNPTIRKDLKTGPKFYCCPIEGCPRGPERPFSQFSLVKQSLLRSSYHFMKMHAEKKHKCSKCSNSYGTEWDLKRHAEDCGKTFRCTCGCPYASRTALQSHIYRTGHEIPAEHRDPPSKKRKMENCAQNQKLSNKTIESLNNQPIPRPDTQELEASEIKLEPSFEDSCGSNTDKQTLTTPPRYPQKLLLPKPKVALVKLPVMQFSVMPVFVPTADSSAQPVVLGVDQGSATGAVHLMPLSVGTLILGLDSEACSLKESLPLFKIANPIAGEPISTGVQVNFGKSPSNPLQELGNTCQKNSISSINVQTDLSYASQNFIPSAQWATADSSVSSCSQTDLSFDSQVSLPISVHTQTFLPSSKVTSSIAAQTDAFMDTCFQSGGVSRETQTSGIESPTDDHVQMDQAGMCGDIFESVHSSYNVATGNIISNSLVAETVTHSLLPQNEPKTLNQDIEKSAPIINFSAQNSMLPSQNMTDNQTQTIDLLSDLENILSSNLPAQTLDHRSLLSDTNPGPDTQLPSGPAQNPGIDFDIEEFFSASNIQTQTEESELSTMTTEPVLESLDIETQTDFLLADTSAQSYGCRGNSNFLGLEMFDTQTQTDLNFFLDSSPHLPLGSILKHSSFSVSTDSSDTETQTEGVSTAKNIPALESKVQLNSTETQTMSSGFETLGSLFFTSNETQTAMDDFLLADLAWNTMESQFSSVETQTSAEPHTVSNF

SEQ ID NO: 821022 - protein, 594 aa, Homo sapiens
MENCAQNQKLSNKTIESLNNQPIPRPDTQELEASEIKLEPSFEDSCGSNTDKQTLTTPPRYPQKLLLPKPKVALVKLPVMQFSVMPVFVPTADSSAQPVVLGVDQGSATGAVHLMPLSVGTLILGLDSEACSLKESLPLFKIANPIAGEPISTGVQVNFGKSPSNPLQELGNTCQKNSISSINVQTDLSYASQNFIPSAQWATADSSVSSCSQTDLSFDSQVSLPISVHTQTFLPSSKVTSSIAAQTDAFMDTCFQSGGVSRETQTSGIESPTDDHVQMDQAGMCGDIFESVHSSYNVATGNIISNSLVAETVTHSLLPQNEPKTLNQDIEKSAPIINFSAQNSMLPSQNMTDNQTQTIDLLSDLENILSSNLPAQTLDHRSLLSDTNPGPDTQLPSGPAQNPGIDFDIEEFFSASNIQTQTEESELSTMTTEPVLESLDIETQTDFLLADTSAQSYGCRGNSNFLGLEMFDTQTQTDLNFFLDSSPHLPLGSILKHSSFSVSTDSSDTETQTEGVSTAKNIPALESKVQLNSTETQTMSSGFETLGSLFFTSNETQTAMDDFLLADLAWNTMESQFSSVETQTSAEPHTVSNF

SEQ ID NO: 821023 - protein, 526 aa, Homo sapiens
MAASEAAAAAGSAALAAGARAVPAATTGAAAAASGPWVPPGPRLRGSRPRPAGATQQPAVPAPPAGELIQPSVSELSRAVRTNILCTVRGCGKILPNSPALNMHLVKSHRLQDGIVNPTIRKDLKTGPKFYCCPIEGCPRGPERPFSQFSLVKQHFMKMHAEKKHKCSKCSNSYGTEWDLKRHAEDCGKTFRCTCGCPYASRTALQSHIYRTGHEIPAEHRDPPSKKRKMENCAQNQKLSNKTIESLNNQPIPRPDTQELEASEIKLEPSFEDSCGSNTDKQTLTTPPRYPQKLLLPKPKVALVKLPVMQFSVMPVFVPTADSSAQPVVLGVDQGSATGAVHLMPLSVGTLILGLDSEACSLKESLPLFKIANPIAGEPISTGVQVNFGKSPSNPLQELGNTCQKNSISSINVQTDLSYASQNFIPSAQWATADSSVSSCSQTDLSFDSQVSLPISVHTQTFLPSSKVTSSIAAQTDAFMDTCFQSGGSLQLLKLTVESMCEMASTISSGLKLRTGDNSINSIECG

SEQ ID NO: 821024 - protein, 823 aa, Homo sapiens
MAASEAAAAAGSAALAAGARAVPAATTGAAAAASGPWVPPGPRLRGSRPRPAGATQQPAVPAPPAGELIQPSVSELSRAVRTNILCTVRGCGKILPNSPALNMHLVKSHRLQDGIVNPTIRKDLKTGPKFYCCPIEGCPRGPERPFSQFSLVKQHFMKMHAEKKHKCSKCSNSYGTEWDLKRHAEDCGKTFRCTCGCPYASRTALQSHIYRTGHEIPAEHRDPPSKKRKMENCAQNQKLSNKTIESLNNQPIPRPDTQELEASEIKLEPSFEDSCGSNTDKQTLTTPPRYPQKLLLPKPKVALVKLPVMQFSVMPVFVPTADSSAQPVVLGVDQGSATGAVHLMPLSVGTLILGLDSEACSLKESLPLFKIANPIAGEPISTGVQVNFGKSPSNPLQELGNTCQKNSISSINVQTDLSYASQNFIPSAQWATADSSVSSCSQTDLSFDSQVSLPISVHTQTFLPSSKVTSSIAAQTDAFMDTCFQSGGVSRETQTSGIESPTDDHVQMDQAGMCGDIFESVHSSYNVATGNIISNSLVAETVTHSLLPQNEPKTLNQDIEKSAPIINFSAQNSMLPSQNMTDNQTQTIDLLSDLENILSSNLPAQTLDHRSLLSDTNPGPDTQLPSGPAQNPGIDFDIEEFFSASNIQTQTEESELSTMTTEPVLESLDIETQTDFLLADTSAQSYGCRGNSNFLGLEMFDTQTQTDLNFFLDSSPHLPLGSILKHSSFSVSTDSSDTETQTEGVSTAKNIPALESKVQLNSTETQTMSSGFETLGSLFFTSNETQTAMDDFLLADLAWNTMESQFSSVETQTSAEPHTVSNF

SEQ ID NO: 821025 - protein, 823 aa, Homo sapiens; identical to SEQ ID NO: 821024

SEQ ID NO: 821026 - protein, 823 aa, Homo sapiens; identical to SEQ ID NO: 821024

SEQ ID NO: 821027 - protein, 823 aa, Homo sapiens; identical to SEQ ID NO: 821024

SEQ ID NO: 821028 - protein, 229 aa, Homo sapiens
TLEVPHSRIHQEGRDKDTFSKMAMVSEFLKQAWFIENEEQEYVQTVKSSKGGPGSAVSPYPTFNPSSDVAALHKAIMVKGVDEATIIDILTKRNNAQRQQIKAAYLQETGKPLDETLKKALTGHLEEVVLALLKTPAQFDADELRAAMKGLGTDEDTLIEILASRTNKEIRDINRVYREELKRDLAKDITSDTSGDFRNALLSLAKGDRSEDFWCELKTWAGFRCQGIV

SEQ ID NO: 821029 - protein, 103 aa, Homo sapiens
MVSPFAKPSWMKPKEIMRKSWWLFVEETKHSLDGLKQASRMRDASIKLILVLTGGRGLLWLWVLGLVLEAFFNSESVLLPSTELEGAKDGASSSSELSVELSS

SEQ ID NO: 821030 - protein, 100 aa, Homo sapiens
SRGYPLDASVTDHSAYLQETGKPLDETLKKALTGHLEEVVLALLKTPAQFDADELRAAMKGLGTDEDTLIEILASRTNKEIRETLCIQRTLCIQRGSSRL

SEQ ID NO: 821031 - protein, 220 aa, Homo sapiens
MAMVSEFLKQAWFIENEEQEYVQTVKSSKGGPGSAVSPYPTFNPSSDVAALHKAIMVKGVDEATIIDILTKRNNAQRQQIKAAYLQETGKPLDETLKKALTGHLEEVVLALLKTPAQFDADELRAAMKGLGTDEDTLIEILASRTNKEIRDINRVYREELKRDLAKDITSDTSGDFRNALLSLAKGDRSEDFWCELKTWAGFRCQGPCIEAGETENRGQT

SEQ ID NO: 821032 - protein, 220 aa, Homo sapiens; identical to SEQ ID NO: 821031

SEQ ID NO: 821033 - protein, 220 aa, Homo sapiens; identical to SEQ ID NO: 821031

SEQ ID NO: 821034 - protein, 220 aa, Homo sapiens; identical to SEQ ID NO: 821031

SEQ ID NO: 821035 - protein, 220 aa, Homo sapiens; identical to SEQ ID NO: 821031

SEQ ID NO: 821036 - protein, 220 aa, Homo sapiens; identical to SEQ ID NO: 821031

SEQ ID NO: 821037 - protein, 220 aa, Homo sapiens; identical to SEQ ID NO: 821031

SEQ ID NO: 821038 - protein, 220 aa, Homo sapiens; identical to SEQ ID NO: 821031

SEQ ID NO: 821039 - protein, 220 aa, Homo sapiens; identical to SEQ ID NO: 821031

SEQ ID NO: 821040 - protein, 220 aa, Homo sapiens; identical to SEQ ID NO: 821031

SEQ ID NO: 821041 - protein, 220 aa, Homo sapiens; identical to SEQ ID NO: 821031

SEQ ID NO: 821042 - protein, 220 aa, Homo sapiens; identical to SEQ ID NO: 821031

SEQ ID NO: 821043 - protein, 220 aa, Homo sapiens; identical to SEQ ID NO: 821031

SEQ ID NO: 821044 - protein, 220 aa, Homo sapiens; identical to SEQ ID NO: 821031

SEQ ID NO: 821045 - protein, 220 aa, Homo sapiens; identical to SEQ ID NO: 821031

SEQ ID NO: 821046 - protein, 220 aa, Homo sapiens; identical to SEQ ID NO: 821031

SEQ ID NO: 821047 - protein, 220 aa, Homo sapiens; identical to SEQ ID NO: 821031

SEQ ID NO: 821048 - protein, 220 aa, Homo sapiens; identical to SEQ ID NO: 821031

SEQ ID NO: 821049 - protein, 220 aa, Homo sapiens
MAMVSEFLKQAWFIENEEQEYVQTVKSSKGGPGSAVSPYPTFNPSSDVAALHKAIMVKGVDEATIIDILTKRNNAQRQQIKAAYLQETGKPLDETLKKALTGHLEEVVLALLKTPAQFDADELRAAMKGLGTDEDTLIEILASRTNKEIRDINRVYREELKRDLAKDITSDTSGDFRNALLSLAKGDRSEDFGCELKTWAGFRCQGPCIEAGETENRGQT

SEQ ID NO: 821050 - protein, 241 aa, Homo sapiens
TLEVPHSRIHQEGRDKDTFSKMAMVSEFLKQAWFIENEEQEYVQTVKSSKGGPGSAVSPYPTFNPSSDVAALHKAIMVKGVDEATIIDILTKRNNAQRQQIKAAYLQETGKPLDETLKKALTGHLEEVVLALLKTPAQFDADELRAAMKGLGTDEDTLIEILASRTNKEIRDINRVYREELKRDLAKDITSDTSGDFRNALLSLAKGDRSEDFWCELKTWAGFRCQGPCIEAGETENRGQT

SEQ ID NO: 821051 - protein, 231 aa, Homo sapiens
MNLILRYTFSKMAMVSEFLKQAWFIENEEQEYVQTVKSSKGGPGSAVSPYPTFNPSSDVAALHKAIMVKGVDEATIIDILTKRNNAQRQQIKAAYLQETGKPLDETLKKALTGHLEEVVLALLKTPAQFDADELRAAMKGLGTDEDTLIEILASRTNKEIRDINRVYREELKRDLAKDITSDTSGDFRNALLSLAKGDRSEDFWCELKTWAGFRCQGPCIEAGETENRGQT

SEQ ID NO: 821052 - protein, 218 aa, Homo sapiens
MVSEFLKQAWFIENEEQEYVQTVKSSKGGPGSAVSPYPTFNPSSDVAALHKAIMVKGVDEATIIDILTKRNNAQRQQIKAAYLQETGKPLDETLKKALTGHLEEVVLALLKTPAQFDADELRAAMKGLGTDEDTLIEILASRTNKEIRDINRVYREELKRDLAKDITSDTSGDFRNALLSLAKGDRSEDFGCELKTWAEFRCQGPCIEAGETENRGQT

SEQ ID NO: 821053 - protein, 235 aa, Homo sapiens
  misc_feature (29)..(29): Xaa can be any naturally occurring amino acid
ECEIFKKKEIFSFSFFGQAKRRALNDHPXKCSIRSQQLVMKGEQIVNVSLKCRDQREPIYSSSRMSLLHRHMLSVDEATIIDILTKRNNAQRQQIKAAYLQETGKPLDETLKKALTGHLEEVVLALLKTPAQFDADELRAAMKGLGTDEDTLIEILASRTNKEIRDINRVYREELKRDLAKDITSDTSGDFRNALLSLAKGDRSEDFWCELKTWAGFRCQGPCIEAGETENRGQT

SEQ ID NO: 821054 - protein, 154 aa, Homo sapiens
LDAKCPLDAKRQQIKAAYLQETGKPLDETLKKALTGHLEEVVLALLKTPAQFDADELRAAMKGLGTDEDTLIEILASRTNKEIRDINRVYREELKRDLAKDITSDTSGDFRNALLSLAKGDRSEDFWCELKTWAGFRCQGPCIEAGETENRGQT

SEQ ID NO: 821055 - protein, 220 aa, Homo sapiens; identical to SEQ ID NO: 821031

SEQ ID NO: 821056 - protein, 220 aa, Homo sapiens; identical to SEQ ID NO: 821031

SEQ ID NO: 821057 - protein, 203 aa, Homo sapiens
MAMVSEFLKQAWFIENEEQEYVQTVKSSKGGPGSAVSPYPTFNPSSDVAALHKAIMVKGVDEATIIDILTKRNNAQRQQIKAAYLQETGKPLDETLKKALTGHLEEVVLALGLGTDEDTLIEILASRTNKEIRDINRVYREELKRDLAKDITSDTSGDFRNALLSLAKGDRSEDFWCELKTWAGFRCQGPCIEAGETENRGQT

SEQ ID NO: 821058 - protein, 68 aa, Homo sapiens
QEPHQEPHEEPHDEPRKVPHEEPHQDHTKSGSWGDRSEDFGCELKTWAEFRCQGPCIEAGETENRGQT

SEQ ID NO: 821059 - protein, 271 aa, Homo sapiens
MAMVSEFLKQAWFIENEEQEYVQTVKSSKGGPGSAVSPYPTFNPSSDVAALHKAIMVKGVDEATIIDILTKRNNAQRQQIKAAYLQETGKPLDETLKKALTGHLEEVVLALLKTPAQFDADELRAAMKGLGTDEDTLIEILASRTNKEIRDINRVYREELKRDLAKDITSDTSGDFRNALLSLAKGDRSEDFWCELKTWAGFRCQGFVMKQKKVAEEKSERKTEKSPQNDAKEKVALEILTGADDPEGGRSFYFYDKSHVSCPILYGILFI

SEQ ID NO: 821060 - protein, 206 aa, Homo sapiens
MAMVSEFLKQAWFIENEEQEYVQTVKSSKGGPGSAVSPYPTFNPSSDVAALHKAIMVKGVDEATIIDILTKRNNAQRQQIKAAYLQETGKPLDETLKKALTGHLEEVVLALLKTPAQFDADELRAAMKGLGTDEDTLIEILASRTNKEIRDINRVYREELKRDLAKDITSDTSGDFRNALLSLAKGDRSEDFWCELKTWAGFRCQG

SEQ ID NO: 821061 - protein, 208 aa, Homo sapiens
MAMVSEFLKQAWFIENEEQEYVQTVKSSKGGPGSAVSPYPTFNPSSDVAALHKAIMVKGVDEATIIDILTKRNNAQRQQIKAAYLQETGKPLDETLKKALTGHLEEVVLALLKTPAQFDADELRAAMKGLGTDEDTLIEILASRTNKEIRDINRVYREELKRDLAKDITSDTSGDFRNALLSLAKGDRSEDFWCELKTWAGFRCQGIV

SEQ ID NO: 821062 - protein, 133 aa, Homo sapiens
  misc_feature (5)..(5): Xaa can be any naturally occurring amino acid
  misc_feature (9)..(10): Xaa can be any naturally occurring amino acid
  misc_feature (17)..(17): Xaa can be any naturally occurring amino acid
  misc_feature (19)..(19): Xaa can be any naturally occurring amino acid
  misc_feature (23)..(23): Xaa can be any naturally occurring amino acid
  misc_feature (41)..(41): Xaa can be any naturally occurring amino acid
REKGXRHSXXSAHTTFXTXRTPXLPQRFATPPPAPCASTEXSGLEESDMTHPPQLRERATANQLSAREAHHAHGGVGTRHKALIRIMVSRSEIDMNDIKAFYQKMYGISLCQAILDETKGDYEKILVALCGGN

SEQ ID NO: 821063 - protein, 200 aa, Homo sapiens
MAMVSEFLKQAWFIENEEQEYVQTVKSSKGGPGSAVSPYPTFNPSSDVAALHKAIMVKGVDEATIIDILTKRNNAQRQQIKAAYLQETGKPLDETLKKALTGHLEEVVLALLKTPAQFDADELRAAMKGLGTDEDTLIEILASRTNKEIRDINRVYREELKRDLAKDITSDTSGDFRNALLSLAKVQLRYFRKCLLFYKD

SEQ ID NO: 821064 - protein, 216 aa, Homo sapiens
MAMVSEFLKQAWFIENEEQEYVQTVKSSKGGPGSAVSPYPTFNPSSDVAALHKAIMVKGVDEATIIDILTKRNNAQRQQIKAAYLQETGKPLDETLKKALTGHLEEVVLALLKTPAQFDADELRAAMKGLGTDEDTLIEILASRTNKEIRDINRVYREELKRDLAKDITSDTLHPETLCIQRHFASRDTLDPEDTLHPETLCIQRTLCIQRGSSRL

SEQ ID NO: 821065 - protein, 176 aa, Homo sapiens
MAMVSEFLKQAWFIENEEQEYVQTVKSSKGGPGSAVSPYPTFNPSSDVAALHKAIMVKGVDEATIIDILTKRNNAQRQQIKAAYLQETGKPLDETLKKALTGHLEEVVLALLKTPAQFDADELRAAMKGLGTDEDTLIEILASRTNKEIRDFGSRGHFASRDTLHPEDTLHPEGIL

SEQ ID NO: 821066 - protein, 150 aa, Homo sapiens
LDAKCPLDAKRQQIKAAYLQETGKPLDETLKKALTGHLEEVVLALLKTPAQFDADELRAAMKGLGTDEDTLIEILASRTNKEIRDINRVYREELKRDLAKDITSDTLHPETLCIQRHFASRDTLDPEDTLHPETLCIQRTLCIQRGSSRL

SEQ ID NO: 821067 - protein, 147 aa, Homo sapiens
REVVAPSVWAVPWLEVTVRRRLRRRLWWRRWRLRRRPRRRRRKQKMADFLKGLPVYNKSNFSRFHADSVCKASNRRPSVYLPTREYPSEQIIVTEKTNILLRYLHQQWDKKNAAKKRDQEQVELEGESSAPPRKVARTDSPDMHEDT

SEQ ID NO: 821068 - protein, 147 aa, Homo sapiens; identical to SEQ ID NO: 821067

SEQ ID NO: 821069 - protein, 147 aa, Homo sapiens; identical to SEQ ID NO: 821067

SEQ ID NO: 821070 - protein, 102 aa, Homo sapiens
MADFLKGLPVYNKSNFSRFHADSVCKASNRRPSVYLPTREYPSEQIIVTEKTNILLRYLHQQWDKKNAAKKRDQEQVELEGESSAPPRKVARTDSPDMHEDT

SEQ ID NO: 821071 - protein, 147 aa, Homo sapiens; identical to SEQ ID NO: 821067

SEQ ID NO: 821072 - protein, 128 aa, Homo sapiens
VRVSRRLREARGRGEQRLRRRRRKKKMADFLKGLPVYNKSNFSRFHADSVCKASNRRPSVYLPTREYPSEQIIVTEKTNILLRYLHQQWDKKNAAKKRDQEQVELEGESSAPPRKVARTDSPDMHEDT

SEQ ID NO: 821073 - protein, 131 aa, Homo sapiens
NSIPGRRFHLLDSWPVAVNLQRRRRRKKKMADFLKGLPVYNKSNFSRFHADSVCKASNRRPSVYLPTREYPSEQIIVTEKTNILLRYLHQQWDKKNAAKKRDQEQVELEGESSAPPRKVARTDSPDMHEDT

SEQ ID NO: 821074 - protein, 110 aa, Homo sapiens
VAASVLRSKNMGLLEISGVGGTEFQPQKDLPGQCQGRSLGRGGVCDFLYLSSLVIVTEKTNILLRYLHQQWDKKNAAKKRDQEQVELEGESSAPPRKVARTDSPDMHEDT

SEQ ID NO: 821075 - protein, 152 aa, Homo sapiens
REVVAPSVWAVPWLEVTVRRRLRRRLWWRRWRLRRRPRRRRRKQKMADFLKGLPVYNKSNFSRFHADSVCKASNRRPSVYLPTREYPSEQIIVTEKTNILLRYLHQQWDKKLPARWRGPTAQTCTRTLKTLNSTGASCQVCSSVAHPPARHV

SEQ ID NO: 821076 - protein, 117 aa, Homo sapiens
SPFKKSAIFCFLRRRLAAASAMGQKERCQEERPGASGAGRRELRTSPQGGADRQPRHARGHLRLSTPQAPPARSAPRSPTRLPAMCKHPARPPPCRPIHTLRPHHFQPHRSRCIYFP

SEQ ID NO: 821077 - protein, 78 aa, Homo sapiens
VCAFSALAIFLLRLVPLLLRFVLFLLAFVLVLPRLVCSLRFFLMSSWFVVVLSPRVCAHLVQLIFPLLSVRVQSLVVH

SEQ ID NO: 821078 - protein, 279 aa, Homo sapiens
ISRCVRETQARSSLDLLHPPRQFFFFKSKSLDFLKLLNWMRLLKSELGSFITDYFQNQLLAKGLFFVEEKIKLCEGENRIEVLAEVWDHFFTETLPTLQAIFYPVQSVHEPTGPSESYLQLEELVKQVVSPFLGISGDRSFSGPTYTLARRHSRVRPKVTVLNYASPITAVSRPLNEMVLTPLTEQEGEAYLEKCGSVRRHTVANAHSDIQLLAMATMMHSGLGEEASSENKCLLLPPSFPPPHRQCSSEPNITDNPDGLEEGARGSQEGSELNCASLS

SEQ ID NO: 821079 - protein, 139 aa, Homo sapiens
MPVFSRAPARRHSRVRPKVTVLNYASPITAVSRPLNEMVLTPLTEQEGEAYLEKCGSVRRHTVANAHSDIQLLAMATMMHSGLGEEASSENKCLLLPPSFPPPHRQCSSEPNITDNPDGLEEGARGSQEGSELNCASLS

SEQ ID NO: 821080 - protein, 99 aa, Homo sapiens
SATGRTIQVAHFSPVRKLPREDRKLFPRRAESGAEASGGCARLGVIHAGDPKEKRQFGHKEKHQGHECTEERPCDGMATRQPSVNQGERPQRKSTLLTP

SEQ ID NO: 821081 - protein, 135 aa, Homo sapiens
MVGEPSGPRGEAELSPGLMTRGFAPILPVEFHKMGSFRRPRPRFMSSPVLSDLPRFQATRQALQLSSSSAWNRRLLKSELGSFITDYFQKRQFGHKEKHQGHECTEERPCDGMATRQPSVNQGERPQRKSTLLTP

SEQ ID NO: 821082 - protein, 368 aa, Homo sapiens
MTRGFAPILPVEFHKMGSFRRPRPRFMSSPVLSDLPRFQATRQALQLSSSSAWNSVQTAVINVFKGGGLQSNELYALNENIRRLLKSELGSFITDYFQNQLLAKGLFFVEEKIKLCEGENRIEVLAEVWDHFFTETLPTLQAIFYPVQGQELTIRQISLLGFRDLVLLKVKLGDLLLLAQSKLPSSIVQMLLILQSVHEPTGPSESYLQLEELVKQVVSPFLGISGDRSFSGPTYTLARRHSRVRPKVTVLNYASPITAVSRPLNEMVLTPLTEQEGEAYLEKCGSVRRHTVANAHSDIQLLAMATMMHSGLGEEASSENKCLLLPPSFPPPHRQCSSEPNITDNPDGLEEGARGSQEGSELNCASLS

SEQ ID NO: 821083 - protein, 368 aa, Homo sapiens; identical to SEQ ID NO: 821082

SEQ ID NO: 821084 - protein, 344 aa, Homo sapiens
MEGGRAGLSDLPRFQATRQALQLSSSSAWNSVQTAVINVFKGGGLQSNELYALNENIRRLLKSELGSFITDYFQNQLLAKGLFFVEEKIKLCEGENRIEVLAEVWDHFFTETLPTLQAIFYPVQGQELTIRQISLLGFRDLVLLKVKLGDLLLLAQSKLPSSIVQMLLILQSVHEPTGPSESYLQLEELVKQVVSPFLGISGDRSFSGPTYTLARRHSRVRPKVTVLNYASPITAVSRPLNEMVLTPLTEQEGEAYLEKCGSVRRHTVANAHSDIQLLAMATMMHSGLGEEASSENKCLLLPPSFPPPHRQCSSEPNITDNPDGLEEGARGSQEGSELNCASLS

SEQ ID NO: 821085 - protein, 193 aa, Homo sapiens
DPGPQCKDAEDGRYAGVAFSLGGFQIEELSSCLDSGAVGDELPVVSDMPVSAMALLPKGLAHLPMWIQVPTGGLVLNYASPITAVSRPLNEMVLTPLTEQEGEAYLEKCGSVRRHTVANAHSDIQLLAMATMMHSGLGEEASSENKCLLLPPSFPPPHRQCSSEPNITDNPDGLEEGARGSQEGSELNCASLS

SEQ ID NO: 821086 - protein, 257 aa, Homo sapiens [sequence omitted]

SEQ ID NO: 821087 - protein, 460 aa, Homo sapiens
MKHSLRYFEEESKDLAGRLQRSSQRIGELEWSLCAVAATQKKKPDGFSSRSKALLKRQLEQSIREQILLKGHVTQLKESLKEVQLERDQYAEQIKGERAQWQQRMRKMSQEVCTLKEEKKHDTHRVEELERSLSRLKNQMAEPLPPDAPAVSSEVELQDLRKELERVAGELQAQVENNQCISLLNRGQKERLREQEERLQEQQERLREQEKRLQQLAEPQSDLEELKHENKSALQLEQQVKELQEKLGQVTETLTSAEKEPEAAVPASGTGGESSGLMDLLEEKVDLREHVEKLELGFIQYRRERCHQKVHRLLTEPGDSAKDASPGGGHHQAGPGRGGEEGEAVGAAGDGVAACGSYSEGHGKFLAAARNPAAEPSPGAPAPQELGAADKHGDLCEASLTNSVEPAQGEAREGSSQDNPTAQPVVQLLGEMQDHQEHPGLGSNCCVPCFCWAWLPRRRR

SEQ ID NO: 821088 - protein, 460 aa, Homo sapiens; identical to SEQ ID NO: 821087

SEQ ID NO: 821089 - protein, 558 aa, Homo sapiens
MCSLISYSQQQSSSASSSLHARQSPCQEQAAVLNSRSIKISRLNDTIKSLKQQKKQVEHQLEEEKKANNEKQKAERELEGQIQRLNTEKKKLNTDLYHMKHSLRYFEEESKDLAGRLQRSSQRIGELEWSLCAVAATQKKKPDGFSSRSKALLKRQLEQSIREQILLKGHVTQLKESLKEVQLERDQYAEQIKGERAQWQQRMRKMSQEVCTLKEEKKHDTHRVEELERSLSRLKNQMAEPLPPDAPAVSSEVELQDLRKELERVAGELQAQVENNQCISLLNRGQKERLREQEERLQEQQERLREQEKRLQQLAEPQSDLEELKHENKSALQLEQQVKELQEKLGQVTETLTSAEKEPEAAVPASGTGGESSGLMDLLEEKVDLREHVEKLELGFIQYRRERCHQKVHRLLTEPGDSAKDASPGGGHHQAGPGRGGEEGEAVGAAGDGVAACGSYSEGHGKFLAAARNPAAEPSPGAPAPQELGAADKHGDLCEASLTNSVEPAQGEAREGSSQDNPTAQPVVQLLGEMQDHQEHPGLGSNCCVPCFCWAWLPRRRR

SEQ ID NO: 821090 - protein, 600 aa, Homo sapiens
QKGEPFSNSISRGLCYCPLKRFLIQTLSCEAVAENQQRPKSSVLGSLGTVPVPIGSENFAFKIHSWPLPAASCLGNRVEGATLHHFNLTLPKKQQKKQVEHQLEEEKKANNEKQKAERELEGQIQRLNTEKKKLNTDLYHMKHSLRYFEEESKDLAGRLQRSSQRIGELEWSLCAVAATQKKKPDGFSSRSKALLKRQLEQSIREQILLKGHVTQLKESLKEVQLERDQYAEQIKGERAQWQQRMRKMSQEVCTLKEEKKHDTHRVEELERSLSRLKNQMAEPLPPDAPAVSSEVELQDLRKELERVAGELQAQVENNQCISLLNRGQKERLREQEERLQEQQERLREQEKRLQQLAEPQSDLEELKHENKSALQLEQQVKELQEKLGQVTETLTSAEKEPEAAVPASGTGGESSGLMDLLEEKVDLREHVEKLELGFIQYRRERCHQKVHRLLTEPGDSAKDASPGGGHHQAGPGRGGEEGEAVGAAGDGVAACGSYSEGHGKFLAAARNPAAEPSPGAPAPQELGAADKHGDLCEASLTNSVEPAQGEAREGSSQDNPTAQPVVQLLGEMQDHQEHPGLGSNCCVPCFCWAWLPRRRR

SEQ ID NO: 821091 - protein, 206 aa, Homo sapiens
MKHSLRYFEEESKDLAGRLQRSSQRIGELEWSLCAVAATQKKKPDGFSSRSKALLKRQLEQSIREQILLKGHVTQLKESLKEVQLERDQYAEQIKGERAQWQQRMRKMSQEVCTLKEEKKHDTHRVEELERSLSRLKNQMAEPLPPDAPAVSSEVELQDLRKELERVAGELQAQVENNQCISLLNRGPSGWFGELLVRGEGELTEA

SEQ ID NO: 821092 - protein, 84 aa, Homo sapiens
QLEQQVKELQEKLGQVTETLTSAEKEPEAAVPASGTGGESVSGETLRPCRKSWRSWRGVSPSMGQEGQGWGRSLLRCDPIILAP

SEQ ID NO: 821093 - protein, 460 aa, Homo sapiens; identical to SEQ ID NO: 821087

SEQ ID NO: 821094 - protein, 460 aa, Homo sapiens; identical to SEQ ID NO: 821087

SEQ ID NO: 821095 - protein, 183 aa, Homo sapiens
MDLLEEKVDLREHVEKLELGFIQYRRERCHQKVHRLLTEPGDSAKDASPGGGHHQAGPGRGGEEGEAVGAAGDGVAACGSYSEGHGKFLAAARNPAAEPSPGAPAPQELGAADKHGDLCEASLTNSVEPAQGEAREGSSQDNPTAQPVVQLLGEMQDHQEHPGLGSNCCVPCFCWAWLPRRRR

SEQ ID NO: 821096 - protein, 348 aa, Homo sapiens
MKHSLRYFEEESKDLAGRLQRSSQRIGELEWSLCAVAATQKKKPDGFSSRSKALLKRQLEQSIREQILLKGHVTQLKESLKEVQLERDQYAEQIKGERAQWQQRMRKMSQEVCTLKEEKKHDTHRVEELERSLSRLKNQMAEPLPPDAPAVSSEVELQDLRKELERVAGELQAQVENNQCISLLNRGQKERLREQEERLQEQQERLREQEKRLQQLAEPQSDLEELKHENKSALQLEQQVKELQEKLGQVTETLTSAEKEPEAAVPASGTGGESSGLMDLLEEKVDLREHVEKLELGFIQYRRERCHQKVHRLLTEPGDSAKDASPGGGHHQAGPGRGGEEGRVCNIP

SEQ ID NO: 821097 - protein, 182 aa, Homo sapiens
MKHSLRYFEEESKDLAGRLQRSSQRIGELEWSLCAVAATQKKKPDGFSSRSKALLKRQLEQSIREQILLKGHVTQLKESLKEVQLERDQYAEQIKGERAQWQQRMRKMSQEVCIIEEVLKKNCPHIVVGTPGRILAVARNKSLNLKHIKHFILDECDKMLEQLDMRRDVQNFSMTPHEKLAE

SEQ ID NO: 821098 - protein, 195 aa, Homo sapiens
MYRISQLMSTPVASSSRLEREYAGELSPTCIFPSFTCDSLDGYHSFECGSIDPLTGSHYTCRRSPRLLTNGYYIWTEDSFLCDKDGNITLNPSQTSVMYKENLVRIFRKKKRICHSFSSLFNLSTSKSWLHGSIFGDINSSPSEDNWLKGTRRLDTDHCNGNETRLLQEVFFQAILLAVCLIISACARWIHGETF

SEQ ID NO: 821099 - protein, 69 aa, Homo sapiens
FCFFASGYAGCFQKKTREVVRLTFPRTIHSFIPGNRQENKRLPKTKLLCKHLCTAMCVGICEKKRICEV

SEQ ID NO: 821100 - protein, 332 aa, Homo sapiens
MYRISQLMSTPVASSSRLEREYAGELSPTCIFPSFTCDSLDGYHSFECGSIDPLTGSHYTCRRSPRLLTNGYYIWTEDSFLCDKDGNITLNPSQTSVMYKENLVRIFRKKKRICHSFSSLFNLSTSKSWLHGSIFGDINSSPSEDNWLKGTRRLDTDHCNGNADDLDCSSLTDDWESGKMNAESVITSSSSHIISQPPGGNSHSLSLQSQLTASERFQENSSDHSETRLLQEVFFQAILLAVCLIISACARWFMGEILASVFTCSLMITVAYVKSLFLSLASYFKTTACARLSKFDNHLGMPSMNVLHLNIWKLSNLQSTWNQVFYWKGVSE

SEQ ID NO: 821101 - protein, 276 aa, Homo sapiens
MYRISQLMSTPVASSSRLEREYAGELSPTCIFPSFTCDSLDGYHSFECGSIDPLTGSHYTCRRSPRLLTNGYYIWTEDSFLCDKDGNITLNPSQTSVMYKENLVSTSKSWLHGSIFGDINSSPSEDNWLKGTRRLDTDHCNGNADDLDCSSLTDDWESGKMNAESVITSSSSHIISQPPGGNSHSLSLQSQLTASERFQENSSDHSETRLLQEVFFQAILLAVCLIISACARWFMGEILASVFTCSLMITVAYVKSLFLSLASYFKTTACARFVKI

SEQ ID NO: 821102 - protein, 598 aa, Homo sapiens
MPCVQAQYGSSPQGASPASQSYSYHSSGEYSSDFLTPEFVKFSMDLTNTEITATTSLPSFSTFMDNYSTGYDVKPPCLYQMPLSGQQSSIKVEDIQMHNYQQHSHLPPQSEEMMPHSGSVYYKPSSPPTPTTPGFQVQHSPMWDDPGSLHNFHQNYVATTHMIEQRKTPVSRLSLFSFKQSPPGTPVSSCQMRFDGPLHVPMNPEPAGSHHVVDGQTFAVPNPIRKPASMGFPGLQIGHASQLLDTQVPSPPSRGSPSNEGLCAVCGDNAACQHYGVRTCEGCKGFFKRTVQKNAKYVCLANKNCPVDKRRRNRCQYCRFQKCLAVGMVKEVVRTDSLKGRRGRLPSKPKSPQEPSPPSPPVSLISALVRAHVDSNPAMTSLDYSRFQANPDYQMSGDDTQHIQQFYDLLTGSMEIIRGWAEKIPGFADLPKADQDLLFESAFLELFVLRLAYRSNPVEGKLIFCNGVVLHRLQCVRGFGEWIDSIVEFSSNLQNMNIDISAFSCIAALAMVTERHGLKEPKRVEELQNKIVNCLKDHVTFNNGGLNRPNYLSKLLGKLPELRTLCTQGLQRIFYLKLEDLVPPPAIIDKLFLDTLPF

SEQ ID NO: 821103 - protein, 535 aa, Homo sapiens
MDNYSTGYDVKPPCLYQMPLSGQQSSIKVEDIQMHNYQQHSHLPPQSEEMMPHSGSVYYKPSSPPTPTTPGFQVQHSPMWDDPGSLHNFHQNYVATTHMIEQRKTPVSRLSLFSFKQSPPGTPVSSCQMRFDGPLHVPMNPEPAGSHHVVDGQTFAVPNPIRKPASMGFPGLQIGHASQLLDTQVPSPPSRGSPSNEGLCAVCGDNAACQHYGVRTCEGCKGFFKRTVQKNAKYVCLANKNCPVDKRRRNRCQYCRFQKCLAVGMVKEVVRTDSLKGRRGRLPSKPKSPQEPSPPSPPVSLISALVRAHVDSNPAMTSLDYSRFQANPDYQMSGDDTQHIQQFYDLLTGSMEIIRGWAEKIPGFADLPKADQDLLFESAFLELFVLRLAYRSNPVEGKLIFCNGVVLHRLQCVRGFGEWIDSIVEFSSNLQNMNIDISAFSCIAALAMVTERHGLKEPKRVEELQNKIVNCLKDHVTFNNGGLNRPNYLSKLLGKLPELRTLCTQGLQRIFYLKLEDLVPPPAIIDKLFLDTLPF

SEQ ID NO: 821104 - protein, 153 aa, Homo sapiens
LSLFGINCRSNPVEGKLIFCNGVVLHRLQCVRGFGEWIDSIVEFSSNLQNMNIDISAFSCIAALAMVTERHGLKEPKRVEELQNKIVNCLKDHVTFNNGGLNRPNYLSKLLGKLPELRTLCTQGLQRIFYLKLEDLVPPPAIIDKLFLDTLPF

SEQ ID NO: 821105 - protein, 598 aa, Homo sapiens; identical to SEQ ID NO: 821102

SEQ ID NO: 821106 - protein, 598 aa, Homo sapiens; identical to SEQ ID NO: 821102

SEQ ID NO: 821107 - protein, 401 aa, Homo sapiens
MPCVQAQYGSSPQGASPASQSYSYHSSGEYSSDFLTPEFVKFSMDLTNTEITATTSLPSFSTFMDNYSTGYDVKPPCLYQMPLSGQQSSIKRTVQKNAKYVCLANKNCPVDKRRRNRCQYCRFQKCLAVGMVKEVVRTDSLKGRRGRLPSKPKSPQEPSPPSPPVSLISALVRAHVDSNPAMTSLDYSRFQANPDYQMSGDDTQHIQQFYDLLTGSMEIIRGWAEKIPGFADLPKADQDLLFESAFLELFVLRLAYRSNPVEGKLIFCNGVVLHRLQCVRGFGEWIDSIVEFSSNLQNMNIDISAFSCIAALAMVTERHGLKEPKRVEELQNKIVNCLKDHVTFNNGGLNRPNYLSKLLGKLPELRTLCTQGLQRIFYLKLEDLVPPPAIIDKLFLDTLPF

SEQ ID NO: 821108 - protein, 535 aa, Homo sapiens; identical to SEQ ID NO: 821103

SEQ ID NO: 821109 - protein, 598 aa, Homo sapiens; identical to SEQ ID NO: 821102

SEQ ID NO: 821110 - protein, 555 aa, Homo sapiens
MDLTNTEITATTSLPSFSTFMDNYSTGYDVKPPCLYQMPLSGQQSSIKVEDIQMHNYQQHSHLPPQSEEMMPHSGSVYYKPSSPPTPTTPGFQVQHSPMWDDPGSLHNFHQNYVATTHMIEQRKTPVSRLSLFSFKQSPPGTPVSSCQMRFDGPLHVPMNPEPAGSHHVVDGQTFAVPNPIRKPASMGFPGLQIGHASQLLDTQVPSPPSRGSPSNEGLCAVCGDNAACQHYGVRTCEGCKGFFKRTVQKNAKYVCLANKNCPVDKRRRNRCQYCRFQKCLAVGMVKEVVRTDSLKGRRGRLPSKPKSPQEPSPPSPPVSLISALVRAHVDSNPAMTSLDYSRFQANPDYQMSGDDTQHIQQFYDLLTGSMEIIRGWAEKIPGFADLPKADQDLLFESAFLELFVLRLAYRSNPVEGKLIFCNGVVLHRLQCVRGFGEWIDSIVEFSSNLQNMNIDISAFSCIAALAMVTERHGLKEPKRVEELQNKIVNCLKDHVTFNNGGLNRPNYLSKLLGKLPELRTLCTQGLQRIFYLKLEDLVPPPAIIDKLFLDTLPF

SEQ ID NO: 821111 - protein, 662 aa, Homo sapiens
MSSYHTDRWPRTNIRTEDIVMELTSPSLLLNILAVFVLHRIADTVLTFNLRHLKTQLVTYALKAMPCVQAQYGSSPQGASPASQSYSYHSSGEYSSDFLTPEFVKFSMDLTNTEITATTSLPSFSTFMDNYSTGYDVKPPCLYQMPLSGQQSSIKVEDIQMHNYQQHSHLPPQSEEMMPHSGSVYYKPSSPPTPTTPGFQVQHSPMWDDPGSLHNFHQNYVATTHMIEQRKTPVSRLSLFSFKQSPPGTPVSSCQMRFDGPLHVPMNPEPAGSHHVVDGQTFAVPNPIRKPASMGFPGLQIGHASQLLDTQVPSPPSRGSPSNEGLCAVCGDNAACQHYGVRTCEGCKGFFKRTVQKNAKYVCLANKNCPVDKRRRNRCQYCRFQKCLAVGMVKEVVRTDSLKGRRGRLPSKPKSPQEPSPPSPPVSLISALVRAHVDSNPAMTSLDYSRFQANPDYQMSGDDTQHIQQFYDLLTGSMEIIRGWAEKIPGFADLPKADQDLLFESAFLELFVLRLAYRSNPVEGKLIFCNGVVLHRLQCVRGFGEWIDSIVEFSSNLQNMNIDISAFSCIAALAMVTERHGLKEPKRVEELQNKIVNCLKDHVTFNNGGLNRPNYLSKLLGKLPELRTLCTQGLQRIFYLKLEDLVPPPAIIDKLFLDTLPF

SEQ ID NO: 821112 - protein, 455 aa, Homo sapiens
MPCVQAQYGSSPQGASPASQSYSYHSSGEYSSDFLTPEFVKFSMDLTNTEITATTSLPSFSTFMDNYSTGYDVKPPCLYQMPLSGQQSSIKVEDIQMHNYQQHSHLPPQSEEMMPHSGSVYYKPSSPPTPTTPGFQVQHSPMWDDPGSLHNFHQNYVATTHMIEQRKTPVSRLSLFSFKQSPPGTPVSSCQMRFDGPLHVPMNPEPAGSHHVVDGQTFAVPNPIRKPASMGFPGLQIGHASQLLDTQVPSPPSRGSPSNEGLCAVCGDNAACQHYGVRTCEGCKGFFKRTVQKNAKYVCLANKNCPVDKRRRNRCQYCRFQKCLAVGMVKEVVRTDSLKGRRGRLPSKPKSPQEPSPPSPPVSLISALVRAHVDSNPAMTSLDYSRFQANPDYQMSGDDTQHIQQFYDLLTGSMEIIRGWAEKIPGFADLPKADQDLLFESAFLELFVLRLAYRI

SEQ ID NO: 821113 - protein, 216 aa, Homo sapiens
MKFQFQANPDYQMSGDDTQHIQQFYDLLTGSMEIIRGWAEKIPGFADLPKADQDLLFESAFLELFVLRLAYRSNPVEGKLIFCNGVVLHRLQCVRGFGEWIDSIVEFSSNLQNMNIDISAFSCIAALAMVTERHGLKEPKRVEELQNKIVNCLKDHVTFNNGGLNRPNYLSKLLGKLPELRTLCTQGLQRIFYLKLEDLVPPPAIIDKLFLDTLPF

SEQ ID NO: 821114 - protein, 598 aa, Homo sapiens; identical to SEQ ID NO: 821102

SEQ ID NO: 821115 - protein, 598 aa, Homo sapiens; identical to SEQ ID NO: 821102

SEQ ID NO: 821116 - protein, 598 aa, Homo sapiens; identical to SEQ ID NO: 821102

SEQ ID NO: 821117 - protein, 454 aa, Homo sapiens
MPCVQAQYGSSPQGASPASQSYSYHSSGEYSSDFLTPEFVKFSMDLTNTEITATTSLPSFSTFMDNYSTGYDVKPPCLYQMPLSGQQSSIKVEDIQMHNYQQHSHLPPQSEEMMPHSGSVYYKPSSPPTPTTPGFQVQHSPMWDDPGSLHNFHQNYVATTHMIEQRKTPVSRLSLFSFKQSPPGTPVSSCQMRFDGPLHVPMNPEPAGSHHVVDGQTFAVPNPIRKPASMGFPGLQIGHASQLLDTQVPSPPSRGSPSNEGLCAVCGDNAACQHYGVRTCEGCKGFFKRTVQKNAKYVCLANKNCPVDKRRRNRCQYCRFQKCLAVGMVKEVVRTDSLKGRRGRLPSKPKSPQEPSPPSPPVSLISALVRAHVDSNPAMTSLDYSRFQANPDYQMSGDDTQHIQQFYDLLTGSMEIIRGWAEKIPGFADLPKADQDLLFESAFLELFVLRLAYR

SEQ ID NO: 821118 - protein, 33 aa, Homo sapiens
MNIDISAFSCIAALAMVTGQYCRRRALPLQNCL

SEQ ID NO: 821119 - protein, 178 aa, Homo sapiens
LLLLNSRPARQHYKKYLMGIQPKMFGMVLEKIIIPEIQKVSGNVEKKICAVGITKLLTECPPMMDTEYTKLWTPLLQSLIGLFELPEDDTIPDEEHFIDIEDTPGYQTAFSQLAFAGKKEHDPVGQMVNNPKIHLAQSLHKLSTACPGRVPSMVSTSLNAEALQYLQGYLQAASVTLL

SEQ ID NO: 821120 - protein, 104 aa, Homo sapiens
GRWTKTPDLPHAEIYTSVPKEHLLVSIPLLINHLQAESIVVHTYAAHALERLFTMRGPNNATLFTAAEIAPFVEILLTNLFKALTLPGSSENEYIMKEPKQTSL

SEQ ID NO: 821121 - protein, 93 aa, Homo sapiens
MELSDANLQTLTEYLKKTLDPDPAIRRPAEKFLESVEGNQNYPLLLLTLLEKSQDNVIKVCASVTFKNYIKRNWRIEDEPNLSSPELQKQLSV

SEQ ID NO: 821122 - protein, 971 aa, Homo sapiens
MELSDANLQTLTEYLKKTLDPDPAIRRPAEKFLESVEGNQNYPLLLLTLLEKSQDNVIKVCASVTFKNYIKRNWRIVEDEPNKICEADRVAIKANIVHLMLSSPEQIQKQLSDAISIIGREDFPQKWPDLLTEMVNRFQSGDFHVINGVLRTAHSLFKRYRHEFKSNELWTEIKLVLDAFALPLTNLFKATIELCSTHANDASALRILFSSLILISKLFYSLNFQDLPEFFEDNMETWMNNFHTLLTLDNKLLQTDDEEEAGLLELLKSQICDNAALYAQKYDEEFQRYLPRFVTAIWNLLVTTGQEVKYDLLVSNAIQFLASVCERPHYKNLFEDQNTLTSICEKVIVPNMEFRAADEEAFEDNSEEYIRRDLEGSDIDTRRRAACDLVRGLCKFFEGPVTGIFSGYVNSMLQEYAKNPSVNWKHKDAAIYLVTSLASKAQTQKHGITQANELVNLTEFFVNHILPDLKSANVNEFPVLKADGIKYIMIFRNQVPKEHLLVSIPLLINHLQAESIVVHTYAAHALERLFTMRGPNNATLFTAAEIAPFVEILLTNLFKALTLPGSSENEYIMKAIMRSFSLLQEAIIPYIPTLITQLTQKLLAVSKNPSKPHFNHYMFEAICLSIRITCKANPAAVVNFEEALFLVFTEILQNDVQEFIPYVFQVMSLLLETHKNDIPSSYMALFPHLLQPVLWERTGNIPALVRLLQAFLERGSNTIASAAADKIPGLLGVFQKLIASKANDHQGFYLLNSIIEHMPPESVDQYRKQIFILLFQRLQNSKTTKFIKSFLVFINLYCIKYGALALQEIFDGIQPKMFGMVLEKIIIPEIQKVSGNVEKKICAVGITKLLTECPPMMDTEYTKLWTPLLQSLIGLFELPEDDTIPDEEHFIDIEDTPGYQTAFSQLAFAGKKEHDPVGQMVNNPKIHLAQSLHKLSTACPGRVPSMVSTSLNAEALQYLQGYLQAASVTLL

SEQ ID NO: 821123 - protein, 971 aa, Homo sapiens; identical to SEQ ID NO: 821122

SEQ ID NO: 821124 - protein, 971 aa, Homo sapiens; identical to SEQ ID NO: 821122

SEQ ID NO: 821125 - protein, 971 aa, Homo sapiens; identical to SEQ ID NO: 821122

SEQ ID NO: 821126 - protein, 971 aa, Homo sapiens; identical to SEQ ID NO: 821122

SEQ ID NO: 821127 - protein, 1026 aa, Homo sapiens
LVDGRESAVEMKVRFTADEYDSEMDFGVGLVSGCSLRIGGPFNASVSVSPRDPIAMELSDANLQTLTEYLKKTLDPDPAIRRPAEKFLESVEGNQNYPLLLLTLLEKSQDNVIKVCASVTFKNYIKRNWRIVEDEPNKICEADRVAIKANIVHLMLSSPEQIQKQLSDAISIIGREDFPQKWPDLLTEMVNRFQSGDFHVINGVLRTAHSLFKRYRHEFKSNELWTEIKLVLDAFALPLTNLFKATIELCSTHANDASALRILFSSLILISKLFYSLNFQDLPEFFEDNMETWMNNFHTLLTLDNKLLQTDDEEEAGLLELLKSQICDNAALYAQKYDEEFQRYLPRFVTAIWNLLVTTGQEVKYDLLVSNAIQFLASVCERPHYKNLFEDQNTLTSICEKVIVPNMEFRAADEEAFEDNSEEYIRRDLEGSDIDTRRRAACDLVRGLCKFFEGPVTGIFSGYVNSMLQEYAKNPSVNWKHKDAAIYLVTSLASKAQTQKHGITQANELVNLTEFFVNHILPDLKSANVNEFPVLKADGIKYIMIFRNQVPKEHLLVSIPLLINHLQAESIVVHTYAAHALERLFTMRGPNNATLFTAAEIAPFVEILLTNLFKALTLPGSSENEYIMKAIMRSFSLLQEAIIPYIPTLITQLTQKLLAVSKNPSKPHFNHYMFEAICLSIRITCKANPAAVVNFEEALFLVFTEILQNDVQEFIPYVFQVMSLLLETHKNDIPSSYMALFPHLLQPVLWERTGNIPALVRLLQAFLERGSNTIASAAADKIPGLLGVFQKLIASKANDHQGFYLLNSIIEHMPPESVDQYRKQIFILLFQRLQNSKTTKFIKSFLVFINLYCIKYGALALQEIFDGIQPKMFGMVLEKIIIPEIQKVSGNVEKKICAVGITKLLTECPPMMDTEYTKLWTPLLQSLIGLFELPEDDTIPDEEHFIDIEDTPGYQTAFSQLAFAGKKEHDPVGQMVNNPKIHLAQSLHKLSTACPGRVPSMVSTSLNAEALQYLQGYLQAASVTLL

SEQ ID NO: 821128 - protein, 872 aa, Homo sapiens
MLSSPEQIQKQLSDAISIIGREDFPQKWPDLLTEMVNRFQSGDFHVINGVLRTAHSLFKRYRHEFKSNELWTEIKLVLDAFALPLTNLFKATIELCSTHANDASALRILFSSLILISKLFYSLNFQDLPEFFEDNMETWMNNFHTLLTLDNKLLQTDDEEEAGLLELLKSQICDNAALYAQKYDEEFQRYLPRFVTAIWNLLVTTGQEVKYDLLVSNAIQFLASVCERPHYKNLFEDQNTLTSICEKVIVPNMEFRAADEEAFEDNSEEYIRRDLEGSDIDTRRRAACDLVRGLCKFFEGPVTGIFSGYVNSMLQEYAKNPSVNWKHKDAAIYLVTSLASKAQTQKHGITQANELVNLTEFFVNHILPDLKSANVNEFPVLKADGIKYIMIFRNQVPKEHLLVSIPLLINHLQAESIVVHTYAAHALERLFTMRGPNNATLFTAAEIAPFVEILLTNLFKALTLPGSSENEYIMKAIMRSFSLLQEAIIPYIPTLITQLTQKLLAVSKNPSKPHFNHYMFEAICLSIRITCKANPAAVVNFEEALFLVFTEILQNDVQEFIPYVFQVMSLLLETHKNDIPSSYMALFPHLLQPVLWERTGNIPALVRLLQAFLERGSNTIASAAADKIPGLLGVFQKLIASKANDHQGFYLLNSIIEHMPPESVDQYRKQIFILLFQRLQNSKTTKFIKSFLVFINLYCIKYGALALQEIFDGIQPKMFGMVLEKIIIPEIQKVSGNVEKKICAVGITKLLTECPPMMDTEYTKLWTPLLQSLIGLFELPEDDTIPDEEHFIDIEDTPGYQTAFSQLAFAGKKEHDPVGQMVNNPKIHLAQSLHKLSTACPGRVPSMVSTSLNAEALQYLQGYLQAASVTLL

SEQ ID NO: 821129 - protein, 737 aa, Homo sapiens
METWMNNFHTLLTLDNKLLQTDDEEEAGLLELLKSQICDNAALYAQKYDEEFQRYLPRFVTAIWNLLVTTGQEVKYDLLVSNAIQFLASVCERPHYKNLFEDQNTLTSICEKVIVPNMEFRAADEEAFEDNSEEYIRRDLEGSDIDTRRRAACDLVRGLCKFFEGPVTGIFSGYVNSMLQEYAKNPSVNWKHKDAAIYLVTSLASKAQTQKHGITQANELVNLTEFFVNHILPDLKSANVNEFPVLKADGIKYIMIFRNQVPKEHLLVSIPLLINHLQAESIVVHTYAAHALERLFTMRGPNNATLFTAAEIAPFVEILLTNLFKALTLPGSSENEYIMKAIMRSFSLLQEAIIPYIPTLITQLTQKLLAVSKNPSKPHFNHYMFEAICLSIRITCKANPAAVVNFEEALFLVFTEILQNDVQEFIPYVFQVMSLLLETHKNDIPSSYMALFPHLLQPVLWERTGNIPALVRLLQAFLERGSNTIASAAADKIPGLLGVFQKLIASKANDHQGFYLLNSIIEHMPPESVDQYRKQIFILLFQRLQNSKTTKFIKSFLVFINLYCIKYGALALQEIFDGIQPKMFGMVLEKIIIPEIQKVSGNVEKKICAVGITKLLTECPPMMDTEYTKLWTPLLQSLIGLFELPEDDTIPDEEHFIDIEDTPGYQTAFSQLAFAGKKEHDPVGQMVNNPKIHLAQSLHKLSTACPGRVPSMVSTSLNAEALQYLQGYLQAASVTLL

SEQ ID NO: 821130 - protein, 860 aa, Homo sapiens
LVDGRESAVEMKVRFTADEYDSEMDFGVGLVSGCSLRIGGPFNASVSVSPRDPIAMELSDANLQTLTEYLKKTLDPDPAIRRPAEKFLESVEGNQNYPLLLLTLLEKSQDNVIKDLPEFFEDNMETWMNNFHTLLTLDNKLLQTDDEEEAGLLELLKSQICDNAALYAQKYDEEFQRYLPRFVTAIWNLLVTTGQEVKYDLLVSNAIQFLASVCERPHYKNLFEDQNTLTSICEKVIVPNMEFRAADEEAFEDNSEEYIRRDLEGSDIDTRRRAACDLVRGLCKFFEGPVTGIFSGYVNSMLQEYAKNPSVNWKHKDAAIYLVTSLASKAQTQKHGITQANELVNLTEFFVNHILPDLKSANVNEFPVLKADGIKYIMIFRNQVPKEHLLVSIPLLINHLQAESIVVHTYAAHALERLFTMRGPNNATLFTAAEIAPFVEILLTNLFKALTLPGSSENEYIMKAIMRSFSLLQEAIIPYIPTLITQLTQKLLAVSKNPSKPHFNHYMFEAICLSIRITCKANPAAVVNFEEALFLVFTEILQNDVQEFIPYVFQVMSLLLETHKNDIPSSYMALFPHLLQPVLWERTGNIPALVRLLQAFLERGSNTIASAAADKIPGLLGVFQKLIASKANDHQGFYLLNSIIEHMPPESVDQYRKQIFILLFQRLQNSKTTKFIKSFLVFINLYCIKYGALALQEIFDGIQPKMFGMVLEKIIIPEIQKVSGNVEKKICAVGITKLLTECPPMMDTEYTKLWTPLLQSLIGLFELPEDDTIPDEEHFIDIEDTPGYQTAFSQLAFAGKKEHDPVGQMVNNPKIHLAQSLHKLSTACPGRVPSMVSTSLNAEALQYLQGYLQAASVTLL

SEQ ID NO: 821131 - protein, 945 aa, Homo sapiens
MELSDANLQTLTEYLKKTLDPDPAIRRPAEKFLESVEGNQNYPLLLLTLLEKSQDNVIKVCASVTFKNYIKRNWRIVEDEPNKICEADRVAIKANIVHLMLSSPEQIQKQLSDAISIIGREDFPQKWPDLLTEMVNRFQSGDFHVINGVLRTAHSLFKRYRHEFKSNELWTEIKLVLDAFALPLTNLFKATIELCSTHANDASALRILFSSLILISKLFYSLNFQDLPEFFEDNMETWMNNFHTLLTLDNKLLQTDDEEEAGLLELLKSQICDNAALYAQKYDEEFQRYLPRFVTAIWNLLVTTGQEVKYDLLVSNAIQFLASVCERPHYKNLFEDQNTLTSICEKVIVPNMEFRAADEEAFEDNSEEYIRRDLEGSDIDTRRRAACDLVRGLCKFFEGPVTGIFSGYVNSMLQEYAKNPSVNWKHKDAAIYLVTSLASKAQTQKHGITQANELVNLTEFFVNHILPDLKSANVNEFPVLKADGIKYIMIFRNQVPKEHLLVSIPLLINHLQAESIVVHTYAAHALERLFTMRGPNNATLFTAAEIAPFVEILLTNLFKALTLPGSSENEYIMKAIMRSFSLLQEAIIPYIPTLITQLTQKLLAVSKNPSKPHFNHYMFEAICLSIRITCKANPAAVVNFEEALFLVFTEILQNDVQEFIPYVFQVMSLLLETHKNDIPSSYMALFPHLLQPVLWERTGNIPALVRLLQAFLERGSNTIASAAADKIPGLLGVFQKLIASKANDHQGFYLLNSIIEHMPPESVDQYRKQIFILLFQRLQNSKTTKFIKSFLVFINLYCIKYGALALQEIFDGIQPKMFGMVLEKIIIPEIQKVSGNVEKKICAVGITKLLTECPPMMDTEYTKLWTPLLQSLIGLFELPEDDTIPDEEHFIDIEDTPGYQTAFSQLAFAGKKEHDPVGQMVNNPKIHLAQSLHKLSTACPGRTYF

SEQ ID NO: 821132 - protein, 945 aa, Homo sapiens; identical to SEQ ID NO: 821131

SEQ ID NO: 821133 - protein, 558 aa, Homo sapiens
MELSDANLQTLTEYLKKTLDPDPAIRRPAEKFLESVEGNQNYPLLLLTLLEKSQDNVIKVCASVTFKNYIKRNWRIVEDEPNKICEADRVAIKANIVHLMLSSPEQIQKQLSDAISIIGREDFPQKWPDLLTEMVNRFQSGDFHVINGVLRTAHSLFKRYRHEFKSNELWTEIKLVLDAFALPLTNLFKATIELCSTHANDASALRILFSSLILISKLFYSLNFQDLPEFFEDNMETWMNNFHTLLTLDNKLLQTDDEEEAGLLELLKSQICDNAALYAQKYDEEFQRYLPRFVTAIWNLLVTTGQEVKYDLLVSNAIQFLASVCERPHYKNLFEDQNTLTSICEKVIVPNMEFRAADEEAFEDNSEEYIRRDLEGSDIDTRRRAACDLVRGLCKFFEGPVTGIFSGYVNSMLQEYAKNPSVNWKHKDAAIYLVTSLASKAQTQKHGITQANELVNLTEFFVNHILPDLKSANVNEFPVLKADGIKYIMIFRNQVPKEHLLVSIPLLINHLQAESIVVHTYAAHALERLFTMRGPNNATLTQANLTLITTCLKQYVYP

SEQ ID NO: 821134 - protein, 945 aa, Homo sapiens; identical to SEQ ID NO: 821131

SEQ ID NO: 821135 - protein, 962 aa, Homo sapiens [sequence omitted]

SEQ ID NO: 821136 - protein, 809 aa, Homo sapiens
MELSDANLQTLTEYLKKTLDPDPAIRRPAEKFLESVEGNQNYPLLLLTLLEKSQDNVIKVCASVTFKNYIKRNWRIVEDEPNKICEADRVAIKANIVHLMLSSPEQIQKQLSDAISIIGREDFPQKWPDLLTEMVNRFQSGDFHVINGVLRTAHSLFKRYRHEFKSNELWTEIKLVLDAFALPLTNLFKATIELCSTHANDASALRILFSSLILISKLFYSLNFQDLPEFFEDNMETWMNNFHTLLTLDNKLLQTDDEEEAGLLELLKSQICDNAALYAQKYDEEFQRYLPRFVTAIWNLLVTTGQEVKYDLLVSNAIQFLASVCERPHYKNLFEDQNTLTSICEKVIVPNMEFRAADEEAFEDNSEEYIRRDLEGSDIDTRRRAACDLVRGLCKFFEGPVTGIFSGYVNSMLQEYAKNPSVNWKHKDAAIYLVTSLASKAQTQKHGITQANELVNLTEFFVNHILPDLKSANVNEFPVLKADGIKYIMIFRNQVPKEHLLVSIPLLINHLQAESIVVHTYAAHALERLFTMRGPNNATLFTAAEIAPFVEILLTNLFKALTLPGSSENEYIMKAIMRSFSLLQEAIIPYIPTLITQLTQKLLAVSKNPSKPHFNHYMFEAICLSIRITCKANPAAVVNFEEALFLVFTEILQNDVQEFIPYVFQVMSLLLETHKNDIPSSYMALFPHLLQPVLWERTGNIPALVRLLQAFLERGSNTIASAAADKIPGLLGVFQKLIASKANDHQGFYLLNSIIEHMPPESVDQYRKQIFILLFQRLQNSKTTKFIKKCLEWFWKKLLFLKFRRYLEM

SEQ ID NO: 821137 - protein, 305 aa, Homo sapiens
MSLLLETHKNDIPSSYMALFPHLLQPVLWERTGNIPALVRLLQAFLERGSNTIASAAADKIPGLLGVFQKLIASKANDHQGFYLLNSIIEHMPPESVDQYRKQIFILLFQRLQNSKTTKFIKSFLVFINLYCIKYGALALQEIFDGIQPKMFGMVLEKIIIPEIQKVSGNVEKKICAVGITKLLTECPPMMDTEYTKLWTPLLQSLIGLFELPEDDTIPDEEHFIDIEDTPGYQTAFSQLAFAGKKEHDPVGQMVNNPKIHLAQSLHKLSTACPGRVPSMVSTSLNAEALQYLQGYLQAASVTLL

SEQ ID NO: 821138 - protein, 790 aa, Homo sapiens [sequence omitted]

SEQ ID NO: 821139 - protein, 265 aa, Homo sapiens
RSRGPHAHAGKHNSKCAVDKIPGLLGVFQKLIASKANDHQGFYLLNSIIEHMPPESVDQYRKQIFILLFQRLQNSKTTKFIKSFLVFINLYCIKYGALALQEIFDGIQPKMFGMVLEKIIIPEIQKVSGNVEKKICAVGITKLLTECPPMMDTEYTKLWTPLLQSLIGLFELPEDDTIPDEEHFIDIEDTPGYQTAFSQLAFAGKKEHDPVGQMVNNPKIHLAQSLHKLSTACPGRVPSMVSTSLNAEALQYLQGYLQAASVTLL

SEQ ID NO: 821140 - protein, 261 aa, Homo sapiens
PASEQFLTIASAAADKIPGLLGVFQKLIASKANDHQGFYLLNSIIEHMPPESVDQYRKQIFILLFQRLQNSKTTKFIKSFLVFINLYCIKYGALALQEIFDGIQPKMFGMVLEKIIIPEIQKVSGNVEKKICAVGITKLLTECPPMMDTEYTKLWTPLLQSLIGLFELPEDDTIPDEEHFIDIEDTPGYQTAFSQLAFAGKKEHDPVGQMVNNPKIHLAQSLHKLSTACPGRVPSMVSTSLNAEALQYLQGYLQAASVTLL

SEQ ID NO: 821141 - protein, 178 aa, Homo sapiens; identical to SEQ ID NO: 821119

SEQ ID NO: 821142 - protein, 195 aa, Homo sapiens
MELSDANLQTLTEYLKKTLDPDPAIRRPAEKFLESVEGNQNYPLLLLTLLEKSQDNVIKVCASVTFKNYIKRNWRIVEDEPNKICEADRVAIKANIVHLMLSSPEQIQKQLSDAISIIGREDFPQKWPDLLTEMVNRFQSGDFHVINGVLRTAHSLFKRYRHEFKSNELWTEIKLVLDAFALPLTNLFKVWNASW

SEQ ID NO: 821143 - protein, 195 aa, Homo sapiens; identical to SEQ ID NO: 821142

SEQ ID NO: 821144 - protein, 83 aa, Homo sapiens
PVVLEDPNNGVTVWYLSVTIGHILLVIGYANRRVTSQVVYRLSQEGPIFEGIKAVPSMVSTSLNAEALQYLQGYLQAASVTLL

SEQ ID NO: 821145 - protein, 105 aa, Homo sapiens
MELSDANLQTLTEYLKKTLDPDPAIRRPAEKFLESVEGNQNYPLLLLTLLEKSQDNVIKVCASVTFKNYIKRNWRIVPSMVSTSLNAEALQYLQGYLQAASVTLL

SEQ ID NO: 821146 - protein, 528 aa, Homo sapiens
MNDHLHVGSHAHGQIQVQQLFEDNSNKRTVLTTQPNGLTTVGKTGLPVVPERQLDSIHRRQGSSTSLKSMEGMGKVKATPMTPEQAMKQYMQKLTAFEHHEIFSYPEIYFLGLNAKKRQGMTGGPNNGGYDDDQGSYVQVPHDHVAYRYEVLKVIGKGSFGQVVKAYDHKVHQHVALKMVRNEKRFHRQAAEEIRILEHLRKQDKDNTMNVIHMLENFTFRNHICMTFELLSMNLYELIKKNKFQGFSLPLVRKFAHSILQCLDALHKNRIIHCDLKPENILLKQQGRSGIKVIDFGSSCYEHQRVYTYIQSRFYRAPEVILGARYGMPIDMWSLGCILAELLTGYPLLPGEDEGDQLACMIELLGMPSQKLLDASKRAKNFVSSKGYPRYCTVTTLSDGSVVLNGGRSRRGKLRGPPESREWGNALKGCDDPLFLDFLKQCLEWDPAVRMTPGQALRHPWLRRRLPKPPTGEKTSVKRITESTGAITSISKLPPPSSSASKLRTNLAQMTDANGNIQQRTVLPKLVS

SEQ ID NO: 821147 - protein, 601 aa, Homo sapiens
MLTRKPSAAAPAAYPTGRGGDSAVRQLQASPGLGAGATRSGVGTGPPSPIALPPLRASNAAAAAHTIGGSKHTMNDHLHVGSHAHGQIQVQQLFEDNSNKRTVLTTQPNGLTTVGKTGLPVVPERQLDSIHRRQGSSTSLKSMEGMGKVKATPMTPEQAMKQYMQKLTAFEHHEIFSYPEIYFLGLNAKKRQGMTGGPNNGGYDDDQGSYVQVPHDHVAYRYEVLKVIGKGSFGQVVKAYDHKVHQHVALKMVRNEKRFHRQAAEEIRILEHLRKQDKDNTMNVIHMLENFTFRNHICMTFELLSMNLYELIKKNKFQGFSLPLVRKFAHSILQCLDALHKNRIIHCDLKPENILLKQQGRSGIKVIDFGSSCYEHQRVYTYIQSRFYRAPEVILGARYGMPIDMWSLGCILAELLTGYPLLPGEDEGDQLACMIELLGMPSQKLLDASKRAKNFVSSKGYPRYCTVTTLSDGSVVLNGGRSRRGKLRGPPESREWGNALKGCDDPLFLDFLKQCLEWDPAVRMTPGQALRHPWLRRRLPKPPTGEKTSVKRITESTGAITSISKLPPPSSSASKLRTNLAQMTDANGNIQQRTVLPKLVS

SEQ ID NO: 821148 - protein, 601 aa, Homo sapiens; identical to SEQ ID NO: 821147

SEQ ID NO: 821149 - protein, 601 aa, Homo sapiens; identical to SEQ ID NO: 821147

SEQ ID NO: 821150 - protein, 601 aa, Homo sapiens; identical to SEQ ID NO: 821147

SEQ ID NO: 821151 - protein, 210 aa, Homo sapiens
GRARAGPGEAPEPGGLRSSQRFQLPAPLCEGDGEARGAQGRARHVHGPEGAAAARGRGGRRRGGERGARGGGPRPRGCSGLCVSGCSRREAATRRRGPARGAAGRRRRRPPEVAAGPAAATAALKCIFLSSGHVNQETFGRRSRRLPDRPRWGQRRSSASGFPGARCRGHPERSGDWPALPHRPAASPGQQRCRRSPHGPHRLSECLRRS

SEQ ID NO: 821152 - protein, 181 aa, Homo sapiens
IHPRHPEAAVPTNRSYCWRPEEPIMATPPKRRAVEATGEKVLRYETFISDVLQRDLRKVLDHRDKVYEQLAKYLQLRNVIERLQEAKHSELYMQVDLGCNFFVDTVVPDTSRIYVALGYGFFLELTLAEALKFIDRKSSLLTELSNSLTKDSMNIKAHIHMLLEGLRELQGLQNFPEKPHH

SEQ ID NO: 821153 - protein, 169 aa, Homo sapiens
MVFPLPTPQEPIMATPPKRRAVEATGEKVLRYETFISDVLQRDLRKVLDHRDKVYEQLAKYLQLRNVIERLQEAKHSELYMQVDLGCNFFVDTVVPDTSRIYVALGYGFFLELTLAEALKFIDRKSSLLTELSNSLTKDSMNIKAHIHMLLEGLRELQGLQNFPEKPHH

SEQ ID NO: 821154 - protein, 171 aa, Homo sapiens
NLRLGSEAGCEEPIMATPPKRRAVEATGEKVLRYETFISDVLQRDLRKVLDHRDKVYEQLAKYLQLRNVIERLQEAKHSELYMQVDLGCNFFVDTVVPDTSRIYVALGYGFFLELTLAEALKFIDRKSSLLTELSNSLTKDSMNIKAHIHMLLEGLRELQGLQNFPEKPHH

SEQ ID NO: 821155 - protein, 171 aa, Homo sapiens; identical to SEQ ID NO: 821154

SEQ ID NO: 821156 - protein, 171 aa, Homo sapiens
IHPRHPEAAVPTNRSYCWRPEEPIMATPPKRRAVEATGEKVLRYETFISDVLQRDLRKVLDHRDKVYEQLAKYLQLRNVIERLQEAKHSELYMQVDLGCNFFVDTVVPDTSRIYVALGYGFFLELTLAEALKFIDRKSSLLTEGSSTRPTQGLLISSHITFARGWTSASIS

SEQ ID NO: 821157 - protein, 169 aa, Homo sapiens; identical to SEQ ID NO: 821153

SEQ ID NO: 821158 - protein, 169 aa, Homo sapiens; identical to SEQ ID NO: 821153

SEQ ID NO: 821159 - protein, 169 aa, Homo sapiens; identical to SEQ ID NO: 821153

SEQ ID NO: 821160 - protein, 169 aa, Homo sapiens; identical to SEQ ID NO: 821153

SEQ ID NO: 821161 - protein, 167 aa, Homo sapiens
MVFPLPTPQEPIMATPPKRRAVEATGEKVLRYETFISDVLQRDLRKVLDHRDKVYEQLAKYLQLRNVIERLQEAKHSELYMQVDLGCNFFVDTVVPDTSRIYVALGYGFFLELTLAEALKFIDRKSSLLTELSNSLTKDSMNIKAHIHMLLEVRAAHPHYQTLCLGW

SEQ ID NO: 821162 - protein, 162 aa, Homo sapiens
MVFPLPTPQEPIMATPPKRRAVEATGEKVLRYETFISDVLQRDLRKVLDHRDKVYEQLAKYLQLRNVIERLQEAKHSELYMQVDLGCNFFVDTVVPDTSRIYVALGYGFFLELTLAEALKFIDRKSSLLTDVELIGFHKAQQQPHQGLHEYQSPYPHVARGA

SEQ ID NO: 821163 - protein, 102 aa, Homo sapiens
MVFPLPTPQEPIMATPPKRRAVEATGEKVLRYETFISDVLQRDLRKVLDHRDKVYEQLAKYLQLRNVIERLQEAKHSELYMQVDLGCNFFVDTVVGRSSQVH

SEQ ID NO: 821164 - protein, 130 aa, Homo sapiens
MNGAVPELKLLCGADVLKTFQTPNLWKDAHIQEIVEKFGLVCVGRVGHDPKGYIAESPILRMHQHNIHLAKEPVQNEISATYIRRALGQGQSVKYLIPDAVITYIKDHGLYTKGSTWKGKSTQSTEGKTS

SEQ ID NO: 821165 - protein, 224 aa, Homo sapiens
MKSRIPVVLLACGSFNPITNMHLRMFEVARDHLHQTGMYQVIQGIISPVNDTYGKKDLAASHHRVAMARLALQTSDWIRVDPWESEQAQWMETVKVLAVPELKLLCGADVLKTFQTPNLWKDAHIQEIVEKFGLVCVGRVGHDPKGYIAESPILRMHQHNIHLAKEPVQNEISATYIRRALGQGQSVKYLIPDAVITYIKDHGLYTKGSTWKGKSTQSTEGKTS

SEQ ID NO: 821166 - protein, 215 aa, Homo sapiens
MYQVIQGIISPVNDTYGKKDLAASHHRVAMARLALQTSDWIRVDPWESEQAQWMETVKVLRHHHSKLLRSPPQMEGPDHGKALFSTPAAVPELKLLCGADVLKTFQTPNLWKDAHIQEIVEKFGLVCVGRVGHDPKGYIAESPILRMHQHNIHLAKEPVQNEISATYIRRALGQGQSVKYLIPDAVITYIKDHGLYTKGSTWKGKSTQSTEGKTS

SEQ ID NO: 821167 - protein, 266 aa, Homo sapiens
KSSFKRKRTEEQAFCDLNDSKCKGTTLKKIIFIDSTWNQTNKIFTDERLQGMYQVIQGIISPVNDTYGKKDLAASHHRVAMARLALQTSDWIRVDPWESEQAQWMETVKVLRHHHSKLLRSPPQMEGPDHGKALFSTPAAVPELKLLCGADVLKTFQTPNLWKDAHIQEIVEKFGLVCVGRVGHDPKGYIAESPILRMHQHNIHLAKEPVQNEISATYIRRALGQGQSVKYLIPDAVITYIKDHGLYTKGSTWKGKSTQSTEGKTS

SEQ ID NO: 821168 - protein, 75 aa, Homo sapiens
IAKGRGADLFPSDSICPGPLRERKVKFALALPPAQVLGGLDLRLPGPEAALSPETKRRFPLGPRAPGRALTDSPC

SEQ ID NO: 821169 - protein, 75 aa, Homo sapiens; identical to SEQ ID NO: 821168

SEQ ID NO: 821170 - protein, 252 aa, Homo sapiens
MKSRIPVVLLACGSFNPITNMHLRMFEVARDHLHQTGMYQVIQGIISPVNDTYGKKDLAASHHRVAMARLALQTSDWIRVDPWESEQAQWMETVKVLRHHHSKLLRSPPQMEGPDHGKALFSTPAAVPELKLLCGADVLKTFQTPNLWKDAHIQEIVEKFGLVCVGRVGHDPKGYIAESPILRMHQHNIHLAKEPVQNEISATYIRRALGQGQSVKYLIPDAVITYIKDHGLYTKGSTWKGKSTQSTEGKTS

SEQ ID NO: 821171 - protein, 252 aa, Homo sapiens; identical to SEQ ID NO: 821170

SEQ ID NO: 821172 - protein, 140 aa, Homo sapiens
MDCAHLVKANSIQGCKMNNVNVVYTPWSNLKKTADMDVGQIGFHRQKDVKIVTVEKKVNEILNRLEKTKVERFPDLAAEKECRDREERNEKKAQIQEMKKREKEEMKKKREMDELRSYSSLMKVENMSSNQDGNDSDEFM

SEQ ID NO: 821173 - protein, 245 aa, Homo sapiens
VHGGVLGARRPPRVWYPELRELSAAAPRWSHRTAPGIMVFYFTSSSVNSSAYTIYMGKDKYENEDLIKHGWPEDIWFHVDKLSSAHVYLRLHKGENIEDIPKEVLMDCAHLVKANSIQGCKMNNVNVVYTPWSNLKKTADMDVGQIGFHRQKDVKIVTVEKKVNEILNRLEKTKVERFPDLAAEKECRDREERNEKKAQIQEMKKREKEEMKKKREMDELRSYSSLMKVENMSSNQDGNDSDEFM

SEQ ID NO: 821174 - protein, 79 aa, Homo sapiens
VHGGVLGARRPPRVWYPELRELSAAAPRWSHRTAPGIMVFYFTSSSVNSSAYTIYMGKDKYENEDLIKHGWPEDIWERI

SEQ ID NO: 821175 - protein, 245 aa, Homo sapiens; identical to SEQ ID NO: 821173

SEQ ID NO: 821176 - protein, 140 aa, Homo sapiens; identical to SEQ ID NO: 821172

SEQ ID NO: 821177 - protein, 79 aa, Homo sapiens; identical to SEQ ID NO: 821174

SEQ ID NO: 821178 - protein, 239 aa, Homo sapiens
VHGGVLGARRPPRVWYPELRELSAAAPRWSHRTAPGIMVFYFTSSSVNSSAYTIYMGKDKYENEDLIKHGWPEDIWFHVDKLSSAHVYLRLHKGENIEDIPKEVLMDCAHLVKANSIQGCKMNNVNVVYTPWSNLKKTADMDVGQIGFHRQKDVKIVTVEKKVNEILNRLEKTKVERFPDLAAEKECRDREERNEKKAQIQEMKKREKEEMKKKREMDELRMAMIQMNSCKRRKGEKDL

SEQ ID NO: 821179 - protein, 129 aa, Homo sapiens
VHGGVLGARRPPRVWYPELRELSAAAPRWSHRTAPGIMVFYFTSSSVNSSAYTIYMGKDKYENEDLIKHGWPEDIWFHVDKLSSAHVYLRLHKGENIEDIPKEVLMDCAHLVKANSIQGKNCDSGEESK

SEQ ID NO: 821180 - protein, 140 aa, Homo sapiens; identical to SEQ ID NO: 821172

SEQ ID NO: 821181 - protein, 134 aa, Homo sapiens
MDCAHLVKANSIQGCKMNNVNVVYTPWSNLKKTADMDVGQIGFHRQKDVKIVTVEKKVNEILNRLEKTKVERFPDLAAEKECRDREERNEKKAQIQEMKKREKEEMKKKREMDELRMAMIQMNSCKRRKGEKDL

SEQ ID NO: 821182 - protein, 123 aa, Homo sapiens
VHGGVLGARRPPRVWYPELRELSAAAPRWSHRTAPGIMVFYFTSSSVNSSAYTIYMGKDKYENEDLIKHGWPEDIWFHVDKLSSAHVYLRLHKGENIEDIPKEVLMDCAHLVKANSIQGAIHH

SEQ ID NO: 821183 - protein, 245 aa, Homo sapiens; identical to SEQ ID NO: 821173

SEQ ID NO: 821184 - protein, 129 aa, Homo sapiens; identical to SEQ ID NO: 821179

SEQ ID NO: 821185 - protein, 630 aa, Homo sapiens
MASNMDREMILADFQACTGIENIDEAITLLEQNNWDLVAAINGVIPQENGILQSEYGGETIPGPAFNPASHPASAPTSSSSSAFRPVMPSRQIVERQPRMLDFRVEYRDRNVDVVLEDTCTVGEIKQILENELQIPVSKMLLKGWKTGDVEDSTVLKSLHLPKNNSLYVLTPDLPPPSSSSHAGALQESLNQNFMLIITHREVQREYNLNFSGSSTIQEVKRNVYDLTSIPVRHQLWEGWPTSATDDSMCLAESGLSYPCHRLTVGRRSSPAQTREQSEEQITDVHMVSDSDGDDFEDATEFGVDDGEVFGMASSALRKSPMMPENAENEGDALLQFTAEFSSRYGDCHPVFFIGSLEAAFQEAFYVKARDRKLLAIYLHHDESVLTNVFCSQMLCAESIVSYLSQNFITWAWDLTKDSNRARFLTMCNRHFGSVVAQTIRTQKTDQFPLFLIIMGKRSSNEVLNVIQGNTTVDELMMRLMAAMEIFTAQQQEDIKDEDEREARENVKREQDEAYRLSLEADRAKREAHEREMAEQFRLEQIRKEQEEEREAIRLSLEQALPPEPKEENAEPVSKLRIRTPSGEFLERRFLASNKLQIVFDFVASKGFPWDEYKLLSTFPRRDVTQPGPK

SEQ ID NO: 821186 - protein, 204 aa, Homo sapiens
MCNRHFGSVVAQTIRTQKTDQFPLFLIIMGKRSSNEVLNVIQGNTTVDELMMRLMAAMEIFTAQQQEDIKDEDEREARENVKREQDEAYRLSLEADRAKREAHEREMAEQFRLEQIRKEQEEEREAIRLSLEQALPPEPKEENAEPVSKLRIRTPSGEFLERRFLASNKLQIVFDFVASKGFPWDEYKLLSTFPRRDVTQPGPK

SEQ ID NO: 821187 - protein, 96 aa, Homo sapiens
FSLSPPPLLSPNTQHDLAIRLSLEQALPPEPKEENAEPVSKLRIRTPSGEFLERRFLASNKLQIVFDFVASKGFPWDEYKLLSTFPRRDVTQPGPK

SEQ ID NO: 821188 - protein, 201 aa, Homo sapiens
NSFLATTCHSDVTPLAKRKDALQESLNQNFMLIITHREVQREYNLNFSGSSTIQEVKRNVYDLTSIPVRHQLWEGWPTSATDDSMCLAESGLSYPCHRLTVGRRSSPAQTREQSEEQITDVHMVSDSDGDDFEDATEFGVDDGEVFGMASSALRKSPMNDAEKQDNEGDAYKITAELLQRYERRHPVLKWLHRSGNKRPSK

SEQ ID NO: 821189 - protein, 630 aa, Homo sapiens; identical to SEQ ID NO: 821185

SEQ ID NO: 821190 - protein, 643 aa, Homo sapiens
GPLPLPLPTSWVSGATRESSSQRLNAAVACTGIENIDEAITLLEQNNWDLVAAINGVIPQENGILQSEYGGETIPGPAFNPASHPASAPTSSSSSAFRPVMPSRQIVERQPRMLDFRVEYRDRNVDVVLEDTCTVGEIKQILENELQIPVSKMLLKGWKTGDVEDSTVLKSLHLPKNNSLYVLTPDLPPPSSSSHAGALQESLNQNFMLIITHREVQREYNLNFSGSSTIQEVKRNVYDLTSIPVRHQLWEGWPTSATDDSMCLAESGLSYPCHRLTVGRRSSPAQTREQSEEQITDVHMVSDSDGDDFEDATEFGVDDGEVFGMASSALRKSPMMPENAENEGDALLQFTAEFSSRYGDCHPVFFIGSLEAAFQEAFYVKARDRKLLAIYLHHDESVLTNVFCSQMLCAESIVSYLSQNFITWAWDLTKDSNRARFLTMCNRHFGSVVAQTIRTQKTDQFPLFLIIMGKRSSNEVLNVIQGNTTVDELMMRLMAAMEIFTAQQQEDIKDEDEREARENVKREQDEAYRLSLEADRAKREAHEREMAEQFRLEQIRKEQEEEREAIRLSLEQALPPEPKEENAEPVSKLRIRTPSGEFLERRFLASNKLQIVFDFVASKGFPWDEYKLLSTFPRRDVTQPGPK

SEQ ID NO: 821191 - protein, 543 aa, Homo sapiens
MPSRQIVERQPRMLDFRVEYRDRNVDVVLEDTCTVGEIKQILENELQIPVSKMLLKGWKTGDVEDSTVLKSLHLPKNNSLYVLTPDLPPPSSSSHAGALQESLNQNFMLIITHREVQREYNLNFSGSSTIQEVKRNVYDLTSIPVRHQLWEGWPTSATDDSMCLAESGLSYPCHRLTVGRRSSPAQTREQSEEQITDVHMVSDSDGDDFEDATEFGVDDGEVFGMASSALRKSPMMPENAENEGDALLQFTAEFSSRYGDCHPVFFIGSLEAAFQEAFYVKARDRKLLAIYLHHDESVLTNVFCSQMLCAESIVSYLSQNFITWAWDLTKDSNRARFLTMCNRHFGSVVAQTIRTQKTDQFPLFLIIMGKRSSNEVLNVIQGNTTVDELMMRLMAAMEIFTAQQQEDIKDEDEREARENVKREQDEAYRLSLEADRAKREAHEREMAEQFRLEQIRKEQEEEREAIRLSLEQALPPEPKEENAEPVSKLRIRTPSGEFLERRFLASNKLQIVFDFVASKGFPWDEYKLLSTFPRRDVTQPGPK

SEQ ID NO: 821192 - protein, 613 aa, Homo sapiens
MASNMDREMILADFQACTGIENIDEAITLLEQNNWDLVAAINGVIPQENGILQSEYGGETIPGPAFNPASHPASAPTSSSSSAFRPVMPSRQIVERQPRMLDFRVEYRDRNVDVVLEDTCTVGEIKQILENELQIPVSKMLLKGWKTGDVEDSTVLKSLHLPKNNSLYVLTPDLPPPSSSSHAGALQESLNQNFMLIITHREVKRNVYDLTSIPVRHQLWEGWPTSATDDSMCLAESGLSYPCHRLTVGRRSSPAQTREQSEEQITDVHMVSDSDGDDFEDATEFGVDDGEVFGMASSALRKSPMMPENAENEGDALLQFTAEFSSRYGDCHPVFFIGSLEAAFQEAFYVKARDRKLLAIYLHHDESVLTNVFCSQMLCAESIVSYLSQNFITWAWDLTKDSNRARFLTMCNRHFGSVVAQTIRTQKTDQFPLFLIIMGKRSSNEVLNVIQGNTTVDELMMRLMAAMEIFTAQQQEDIKDEDEREARENVKREQDEAYRLSLEADRAKREAHEREMAEQFRLEQIRKEQEEEREAIRLSLEQALPPEPKEENAEPVSKLRIRTPSGEFLERRFLASNKLQIVFDFVASKGFPWDEYKLLSTFPRRDVTQPGPK

SEQ ID NO: 821193 - protein, 476 aa, Homo sapiens
MASNMDREMILADFQACTGIENIDEAITLLEQNNWDLVAAINGVIPQENGILQSEYGGETIPGPAFNPASHPASAPTSSSSSAFRPVMPSRQIVERQPRMLDFRVEYRDRNVDVVLEDTCTVGEIKQILENELQIPVSKMLLKGWKTGDVEDSTVLKSLHLPKNNSLYVLTPDLPPPSSSSHAGLTFSYRYGDCHPVFFIGSLEAAFQEAFYVKARDRKLLAIYLHHDESVLTNVFCSQMLCAESIVSYLSQNFITWAWDLTKDSNRARFLTMCNRHFGSVVAQTIRTQKTDQFPLFLIIMGKRSSNEVLNVIQGNTTVDELMMRLMAAMEIFTAQQQEDIKDEDEREARENVKREQDEAYRLSLEADRAKREAHEREMAEQFRLEQIRKEQEEEREAIRLSLEQALPPEPKEENAEPVSKLRIRTPSGEFLERRFLASNKLQIVFDFVASKGFPWDEYKLLSTFPRRDVTQPGPK

SEQ ID NO: 821194 - protein, 630 aa, Homo sapiens; identical to SEQ ID NO: 821185

SEQ ID NO: 821195 - protein, 630 aa, Homo sapiens; identical to SEQ ID NO: 821185

SEQ ID NO: 821196 - protein, 630 aa, Homo sapiens; identical to SEQ ID NO: 821185

SEQ ID NO: 821197 - protein, 630 aa, Homo sapiens; identical to SEQ ID NO: 821185

SEQ ID NO: 821198 - protein, 454 aa, Homo sapiens
MCNRHFGSVVAQTIRTQKTDQFPLFLIIMGKRSSNEVLNVIQGNTTVDELMMRLMAAMEIFTAQQQEDIKDEDEREARENVKREQDEAYRLSLEADRAKREAHEREMAEQFRLEQIRKEQEEEREAIRLSLEQALPPEPKEENLQMMPENAENEGDALLQFTAEFSSRYGDCHPVFFIGSLEAAFQEAFYVKARDRKLLAIYLHHDESVLTNVFCSQMLCAESIVSYLSQNFITWAWDLTKDSNRARFLTMCNRHFGSVVAQTIRTQKTDQFPLFLIIMGKRSSNEVLNVIQGNTTVDELMMRLMAAMEIFTAQQQEDIKDEDEREARENVKREQDEAYRLSLEADRAKREAHEREMAEQFRLEQIRKEQEEEREAIRLSLEQALPPEPKEENAEPVSKLRIRTPSGEFLERRFLASNKLQIVFDFVASKGFPWDEYKLLSTFPRRDVTQPGPK

SEQ ID NO: 821199 - protein, 415 aa, Homo sapiens
MFLGNTTVDELMMRLMAAMEIFTAQQQEDIKDEDEREARENVKREQDEAYRLSLEADRAKREAHEREMAEQFRLEQIRKEQEEEREAIRLSLEQALPPEPKEENLQMMPENAENEGDALLQFTAEFSSRYGDCHPVFFIGSLEAAFQEAFYVKARDRKLLAIYLHHDESVLTNVFCSQMLCAESIVSYLSQNFITWAWDLTKDSNRARFLTMCNRHFGSVVAQTIRTQKTDQFPLFLIIMGKRSSNEVLNVIQGNTTVDELMMRLMAAMEIFTAQQQEDIKDEDEREARENVKREQDEAYRLSLEADRAKREAHEREMAEQFRLEQIRKEQEEEREAIRLSLEQALPPEPKEENAEPVSKLRIRTPSGEFLERRFLASNKLQIVFDFVASKGFPWDEYKLLSTFPRRDVTQPGPK

SEQ ID NO: 821200 - protein, 641 aa, Homo sapiens
MASNMDREMILADFQACTGIENIDEAITLLEQNNWDLVAAINGVIPQENGILQSEYGGETIPGPAFNPASHPASAPTSSSSSAFRPVMPSRQIVERQPRMLDFRVEYRDRNVDVVLEDTCTVGEIKQILENELQIPVSKMLLKGWKTGDVEDSTVLKSLHLPKNNSLYVLTPDLPPPSSSSHAGALQESLNQNFMLIITHREVQREYNLNFSGSSTIQEVKRNVYDLTSIPVRHQLWEGWPTSATDDSMCLAESGLSYPCHRLTVGRRSSPAQTREQSEEQITDVHMVSDSDGDDFEDATEFGVDDGEVFGMASSALRKSPMMPENAENEGDALLQFTAEFSSRYGDCHPVFFIGSLEAAFQEAFYVKARDRKLLAIYLHHDESVLTNVFCSQMLCAESIVSYLSQNFITWAWDLTKDSNRARFLTMCNRHFGSVVAQTIRTQKTDQFPLFLIIMGKRSSNEVLNVIQGNTTVDELMMRLMAAMEIFTAQQQEDIKDEDEREARENVKREQDEAYRLSLEADRAKREAHEREMAEQFRLEQIRKEQEEERETIRMYFKSSAMNYLQPQERTMLKPREDKTMRESENHQEDEVHRKQGVIHGTKNEPPRNGHKNNETHIAKQETPLRMKTKTTGATYPKEEK

SEQ ID NO: 821201 - protein, 667 aa, Homo sapiens
MASNMDREMILADFQACTGIENIDEAITLLEQNNWDLVAAINGVIPQENGILQSEYGGETIPGPAFNPASHPASAPTSSSSSAFRPVMPSRQIVERQPRMLDFRVEYRDRNVDVVLEDTCTVGEIKQILENELQIPVSKMLLKGWKTGDVEDSTVLKSLHLPKNNSLYVLTPDLPPPSSSSHAGALQESLNQNFMLIITHREVQREYNLNFSGSSTIQEVKRNVYDLTSIPVRHQLWEGWPTSATDDSMCLAESGLSYPCHRLTVGRRSSPAQTREQSEEQITDVHMVSDSDGDDFEDATEFGVDDGEVFGMASSALRKSPMMPENAENEGDALLQFTAEFSSRYGDCHPVFFIGSLEAAFQEAFYVKARDRKLLAIYLHHDESVLTNVFCSQMLCAESIVSYLSQNFITWAWDLTKDSNRARFLTMCNRHFGSVVAQTIRTQKTDQFPLFLIIMGKRSSNEVLNVIQGTGERRDDASMSFTLVITRVVCDNGPVSLDQAQATARERITREEDAQSSTVYSLTAKCRMKKTQRMEGTCSALFNLEGMTRRQGEGACSTEDDEIGERLCFVFVIPEFRQRRPQTDGRVTAIRLSLEQALPPEPKEENAEPVSKLRIRTPSGEFLERRFLASNKLQIVFDFVASKGFPWDEYKLLSTFPRRDVTQPGPK

SEQ ID NO: 821202 - protein, 96 aa, Homo sapiens
GVSTCYVIYFVLYCDFLAIRLSLEQALPPEPKEENAEPVSKLRIRTPSGEFLERRFLASNKLQIVFDFVASKGFPWDEYKLLSTFPRRDVTQPGPK

SEQ ID NO: 821203 - protein, 204 aa, Homo sapiens; identical to SEQ ID NO: 821186

SEQ ID NO: 821204 - protein, 136 aa, Homo sapiens
MASNMDREMILADFQACTGIENIDEAITLLEQNNWDLVAAINGVIPQENGILQSEYGGETIPGPAFNPASHPASAPTSSSSSAFRPVMPSRQIVERQPRMLDFRVEYRDRNVDVVLEDTCTVGKVFPAIKPSQINN

SEQ ID NO: 821205 - protein, 254 aa, Homo sapiens
MNKLFSFWKRKNETRSQGYNLREKDLKKLHRAASVGDLKKLKEYLQIKKYDVNMQDKKYRTPLHLACANGHTDVVLFLIEQQCKINVRDSENKSPLIKAVQCQNEDCATILLNFGADPDLRDIRYNTVLHYAVCGQSLSLVEKLLEYEADLEAKNKDGYTPLLVAVINNNPKMVKFLLEKGADVNASDNYQRTALILAVSGEPPCLVKLLLQQGVELCYEGIVDSQLRNMFISMVLLHRYPQFTASHGKKKHAK

SEQ ID NO: 821206 - protein, 254 aa, Homo sapiens; identical to SEQ ID NO: 821205

SEQ ID NO: 821207 - protein, 254 aa, Homo sapiens; identical to SEQ ID NO: 821205

SEQ ID NO: 821208 - protein, 196 aa, Homo sapiens
MITPLHLACANGHTDVVLFLIEQQCKINVRDSENKSPLIKAVQCQNEDCATILLNFGADPDLRDIRYNTVLHYAVCGQSLSLVEKLLEYEADLEAKNKDGYTPLLVAVINNNPKMVKFLLEKGADVNASDNYQRTALILAVSGEPPCLVKLLLQQGVELCYEGIVDSQLRNMFISMVLLHRYPQFTASHGKKKHAK

SEQ ID NO: 821209 - protein, 274 aa, Homo sapiens
MNKLFSFWKRKNETRSQGYNLREKDLKKLHRAASVGDLKKLKEYLQIKKYDVNMQDKKYSVVQSSRWLLSYTTPLNDFIRTPLHLACANGHTDVVLFLIEQQCKINVRDSENKSPLIKAVQCQNEDCATILLNFGADPDLRDIRYNTVLHYAVCGQSLSLVEKLLEYEADLEAKNKDGYTPLLVAVINNNPKMVKFLLEKGADVNASDNYQRTALILAVSGEPPCLVKLLLQQGVELCYEGIVDSQLRNMFISMVLLHRYPQFTASHGKKKHAK

SEQ ID NO: 821210 - protein, 216 aa, Homo sapiens
MIVVQSSRWLLSYTTPLNDFIRTPLHLACANGHTDVVLFLIEQQCKINVRDSENKSPLIKAVQCQNEDCATILLNFGADPDLRDIRYNTVLHYAVCGQSLSLVEKLLEYEADLEAKNKDGYTPLLVAVINNNPKMVKFLLEKGADVNASDNYQRTALILAVSGEPPCLVKLLLQQGVELCYEGIVDSQLRNMFISMVLLHRYPQFTASHGKKKHAK

SEQ ID NO: 821211 - protein, 242 aa, Homo sapiens [sequence omitted]

SEQ ID NO: 821212 - protein, 237 aa, Homo sapiens
MNKLFSFWKRKNETRSQGYNLREKDLKKLHRAASVGDLKKLKEYLQIKKYDVNMQDKKYRTPLHLACANGHTDVVLFLIEQQCKINVRDSENKSPLIKAVQCQNEDCATILLNFGADPDLRDIRYNTVLHYAVCGQSLSLVEKLLEYEADLEAKNKDGYTPLLVAVINNNPKMVKFLLEKGADVNASDNYQRTALILAVSGEPPCLVKLLLQQGVELCYEDRYPQFTASHGKKKHAK

SEQ ID NO: 821213 - protein, 183 aa, Homo sapiens
GGGGGAGRSRGRAFWGRGLVRLTLEGFASASETVRILMTMRSLLRTPFLCGLLWAFCAPGARAEEPAASFSQPGSMGLDKNTVHDQEHIMEHLEGVINKPEAEMSPQELQLHYFKMHDYDGNNLLDGLELSTAITHVHKEEGSEQAPLMSEDELINIIDGVLRDDDKNNDGYIDYAEFAKSLQ

SEQ ID NO: 821214 - protein, 78 aa, Homo sapiens
GGGGGAGRSRGRAFWGRGLVRLTLEGFASASETVREGSEQAPLMSEDELINIIDGVLRDDDKNNDGYIDYAEFAKSLQ

SEQ ID NO: 821215 - protein, 224 aa, Homo sapiens
MEHLEGVINKPEAEMSPQELQLHYFKMHDYDGNNLLDGLELSTAITHVHKERTGSEQAPLHECTTEPDLTYLRLVYIDDELTDQRHQLDCDYHLTLLADTLPHTPLDHVRTVPQRALLPWVPYTHRLVNPLDSRGSSLSKRTYVRISTRPQTQLDQLAVYIPTTVTLDQWHQSDINMGRSKSTPVRLTPALVTSITSKRWMGALTRQRHETTKSQVKTLATRHD

SEQ ID NO: 821216 - protein, 183 aa, Homo sapiens; identical to SEQ ID NO: 821213

SEQ ID NO: 821217 - protein, 183 aa, Homo sapiens; identical to SEQ ID NO: 821213

SEQ ID NO: 821218 - protein, 165 aa, Homo sapiens
GGGGGAGRSRGRAFWGRGLVRLTLEGFASASETVRILMTMRSLLRTPFLCGLLWAFCAPGARAEEPAASFSQPGSMGLDKNTVHDQEHIMEHLEGVINKPEAEMSPQELQLHYFTITHVHKEEGSEQAPLMSEDELINIIDGVLRDDDKNNDGYIDYAEFAKSLQ

SEQ ID NO: 821219 - protein, 160 aa, Homo sapiens
GGGGGAGRSRGRAFWGRGLVRLTLEGFASASETVRILMTMRSLLRTPFLCGLLWAFCAPGARAEEPAASFSQPGSMGLDKNTVHDQEHIMEHLEGVINKPEAEMSPQELQLHYFKMHDYDGNNLLDGLELSTAITHVHKEANLCTELTLRRTGTFPIKEE

SEQ ID NO: 821220 - protein, 118 aa, Homo sapiens
GGGGGAGRSRGRAFWGRGLVRLTLEGFASASETVRILMTMRSLLRTPFLCGLLWAFCAPGARAEEPAASFSQPGSMGLDKNTVHDQEHIMEHLEGVINKPEAEMSPQELQLHYFKMHD

SEQ ID NO: 821221 - protein, 96 aa, Homo sapiens
FCFPAVMTYAHENMPLAKDLLHPSPEEEKRKHKKKRLVQSPNSYFMDVKCPGCYKITTVFSHAQTVVLCVGCSTVLCQPTGKARLTEGCSFRRKQH

SEQ ID NO: 821222 - protein, 110 aa, Homo sapiens
CVGACSPPSFSCWAFSPLKLFTASSYLEHITSGPILAVSSSGFLTKGAPPGHLAPQTCRLLPLRFLISGPPLDHMSSGPPGAGTTAENSCRIRHEYRRMFLQEEAALKAL

SEQ ID NO: 821223 - protein, 96 aa, Homo sapiens; identical to SEQ ID NO: 821221

SEQ ID NO: 821224 - protein, 399 aa, Homo sapiens
MAERRRHKKRIQEVGEPSKEEKAVAKYLRFNCPTKSTNMMGHRVDYFIASKAVDCLLDSKWAKAKKGEEALFTTRESVVDYCNRLLKKQFFHRALKVMKMKYDKDIKKEKDKGKAESGKEEDKKSKKENIKDEKTKKEKEKKKDGEKEESKKEETPGTPKKKETKKKFKLEPHDDQVFLDGNEVYVWIYDPVHFKTFVMGLILVIAVIAATLFPLWPAEMRVGVYYLSVGAGCFVASILLLAVARCILFLIIWLITGGRHHFWFLPNLTADVGFIDSFRPLYTHEYKGPKADLKKDEKSETKKQQKSDSEEKSDSEKKEDEEGKVGPGNHGTEGSGGERHSDTDSDRREDDRSQHSSGNGNDFEMITKEELEQQTDGDCEEDEEEENDGETPKSSHEKS

SEQ ID NO: 821225 - protein, 399 aa, Homo sapiens; identical to SEQ ID NO: 821224

SEQ ID NO: 821226 - protein, 205 aa, Homo sapiens
  misc_feature (136)..(136): Xaa can be any naturally occurring amino acid
MAERRRHKKRIQEVGEPSKEEKAVAKYLRFNCPTKSTNMMGHRVDYFIASKAVDCLLDSKWAKAKKGEEALFTTRESVVDYCNRLLKKQFFHRALKVMKMKYDKDIKKEKDKGKAESGKEEDKKSKKENIKDEMIXGSTKSVMSTEGFQLKRNMSGINMSTPLAAIVPVSREGTPCVIFVMPGKILVTDGHVSLSFFDAGSPAWI

SEQ ID NO: 821227 - protein, 168 aa, Homo sapiens
MAERRRHKKRIQEVGEPSKEEKAVAKYLRFNCPTKSTNMMGHRVDYFIASKAVDCLLDSKWAKAKKGEEALFTTRESVVDYCNRLLKKQFFHRALKVMKMKYDKDIKKGTCWTKHKVSYKGLVLTTHTHWQRQADQWGRRETQGHSGLGAGHWKGGSISMEMSCVEND

SEQ ID NO: 821228 - protein, 106 aa, Homo sapiens
ISSPVCYCVDPFFFLTFSSYLQSGRSDQNMLWYSTVLTCITAGLSAHESEKQKATWVTLCKGLWCSKLSRQRSENLEFCLNCAFIPDWFIITLGTKRLAVAGVLVE

SEQ ID NO: 821229 - protein, 399 aa, Homo sapiens; identical to SEQ ID NO: 821224

SEQ ID NO: 821230 - protein, 399 aa, Homo sapiens; identical to SEQ ID NO: 821224

SEQ ID NO: 821231 - protein, 399 aa, Homo sapiens; identical to SEQ ID NO: 821224

SEQ ID NO: 821232 - protein, 369 aa, Homo sapiens
MAERRRHKKRIQEVGEPSKEEKAVAKYLRFNCPTKSTNMMGHRVDYFIASKAVDCLLDSKWAKAKKGEEALFTTRESVVDYCNRLLKKQFFHRALKVMKMKYDKDIKKEKDKGKAESGKEEDKKSKKENIKDEKTKKEKEKKKDGEKEESKKEETPGTPKKKETKKKFKLEPHDDQVFLDGNEVYVWIYDPVHFKTFVMGLILVIAVIAATLFPLWPAEMRVGVYYLSVGAGCFVASILLLAVARCILFLIIWLITGGRHHFWFLPNLTADVGFIDSFRPLYTHEYKGPKADLKKDEKSETKKQQKSDSEEKSDSEKKEDEEGKVGPGNHGTEGSGGERHSDTDSDRREDDRSQHSSGNGNDFEMAAVL

SEQ ID NO: 821233 - protein, 361 aa, Homo sapiens
MMGHRVDYFIASKAVDCLLDSKWAKAKKGEEALFTTRESVVDYCNRLLKKQFFHRALKVMKMKYDKDIKKEKDKGKAESGKEEDKKSKKENIKDEKTKKEKEKKKDGEKEESKKEETPGTPKKKETKKKFKLEPHDDQVFLDGNEVYVWIYDPVHFKTFVMGLILVIAVIAATLFPLWPAEMRVGVYYLSVGAGCFVASILLLAVARCILFLIIWLITGGRHHFWFLPNLTADVGFIDSFRPLYTHEYKGPKADLKKDEKSETKKQQKSDSEEKSDSEKKEDEEGKVGPGNHGTEGSGGERHSDTDSDRREDDRSQHSSGNGNDFEMITKEELEQQTDGDCEEDEEEENDGETPKSSHEKS

SEQ ID NO: 821234 - protein, 361 aa, Homo sapiens; identical to SEQ ID NO: 821233

SEQ ID NO: 821235 - protein, 404 aa, Homo sapiens
RYPSTLYTSRRHKKRIQEVGEPSKEEKAVAKYLRFNCPTKSTNMMGHRVDYFIASKAVDCLLDSKWAKAKKGEEALFTTRESVVDYCNRLLKKQFFHRALKVMKMKYDKDIKKEKDKGKAESGKEEDKKSKKENIKDEKTKKEKEKKKDGEKEESKKEETPGTPKKKETKKKFKLEPHDDQVFLDGNEVYVWIYDPVHFKTFVMGLILVIAVIAATLFPLWPAEMRVGVYYLSVGAGCFVASILLLAVARCILFLIIWLITGGRHHFWFLPNLTADVGFIDSFRPLYTHEYKGPKADLKKDEKSETKKQQKSDSEEKSDSEKKEDEEGKVGPGNHGTEGSGGERHSDTDSDRREDDRSQHSSGNGNDFEMITKEELEQQTDGDCEEDEEEENDGETPKSSHEKS

SEQ ID NO: 821236 - protein, 361 aa, Homo sapiens; identical to SEQ ID NO: 821233

SEQ ID NO: 821237 - protein, 436 aa, Homo sapiens
VFVVSSFLPTNQSSQIRQNYSTDVEAAVNSLVNLYLQAVLLPVFFSLLLEVGEPSKEEKAVAKYLRFNCPTKSTNMMGHRVDYFIASKAVDCLLDSKWAKAKKGEEALFTTRESVVDYCNRLLKKQFFHRALKVMKMKYDKDIKKEKDKGKAESGKEEDKKSKKENIKDEKTKKEKEKKKDGEKEESKKEETPGTPKKKETKKKFKLEPHDDQVFLDGNEVYVWIYDPVHFKTFVMGLILVIAVIAATLFPLWPAEMRVGVYYLSVGAGCFVASILLLAVARCILFLIIWLITGGRHHFWFLPNLTADVGFIDSFRPLYTHEYKGPKADLKKDEKSETKKQQKSDSEEKSDSEKKEDEEGKVGPGNHGTEGSGGERHSDTDSDRREDDRSQHSSGNGNDFEMITKEELEQQTDGDCEEDEEEENDGETPKSSHEKS

SEQ ID NO: 821238 - protein, 361 aa, Homo sapiens; identical to SEQ ID NO: 821233

SEQ ID NO: 821239 - protein, 423 aa, Homo sapiens
MAERRRHKKRIQEVGEPSKEEKAVAKYLRFNCPTKSTNMMGHRVDYFIASKAVDCLLDSKWAKAKKGEEALFTTRESVVDYCNRYLIFLLFSLYLYGECNAITCFSQRLLKKQFFHRALKVMKMKYDKDIKKEKDKGKAESGKEEDKKSKKENIKDEKTKKEKEKKKDGEKEESKKEETPGTPKKKETKKKFKLEPHDDQVFLDGNEVYVWIYDPVHFKTFVMGLILVIAVIAATLFPLWPAEMRVGVYYLSVGAGCFVASILLLAVARCILFLIIWLITGGRHHFWFLPNLTADVGFIDSFRPLYTHEYKGPKADLKKDEKSETKKQQKSDSEEKSDSEKKEDEEGKVGPGNHGTEGSGGERHSDTDSDRREDDRSQHSSGNGNDFEMITKEELEQQTDGDCEEDEEEENDGETPKSSHEKS

SEQ ID NO: 821240 - protein, 191 aa, Homo sapiens
MAERRRHKKRIQEVGEPSKEEKAVAKYLRFNCPTKSTNMMGHRVDYFIASKAVDCLLDSKWAKAKKGEEALFTTRESVVDYCNRLLKKQFFHRALKVMKMKYDKDIKKEKDKGKAESGKEEDKKSKKENIKDEKTKKEKEKKKDGEKEESKKEETPGTPKKKETKKKFKLEPHDDQVFLDGNEEIHTDLYV

SEQ ID NO: 821241 - protein, 201 aa, Homo sapiens
MGLILVIAVIAATLFPLWPAEMRVGVYYLSVGAGCFVASILLLAVARCILFLIIWLITGGRHHFWFLPNLTADVGFIDSFRPLYTHEYKGPKADLKKDEKSETKKQQKSDSEEKSDSEKKEDEEGKVGPGNHGTEGSGGERHSDTDSDRREDDRSQHSSGNGNDFEMITKEELEQQTDGDCEEDEEEENDGETPKSSHEKS

SEQ ID NO: 821242 - protein, 313 aa, Homo sapiens
ISSPVCYCVDPFFFLTFSSYLQSGRSDQNMLWYSTVLTCITAGLSAHESEKQKATWVTLCKGLWCSKLSRQRSENLEFCLNCAFIPDWFIIYIRDKKVYVWIYDPVHFKTFVMGLILVIAVIAATLFPLWPAEMRVGVYYLSVGAGCFVASILLLAVARCILFLIIWLITGGRHHFWFLPNLTADVGFIDSFRPLYTHEYKGPKADLKKDEKSETKKQQKSDSEEKSDSEKKEDEEGKVGPGNHGTEGSGGERHSDTDSDRREDDRSQHSSGNGNDFEMITKEELEQQTDGDCEEDEEEENDGETPKSSHEKS

SEQ ID NO: 821243 - protein, 231 aa, Homo sapiens
MTCFSKSQVFLDGNEVYVWIYDPVHFKTFVMGLILVIAVIAATLFPLWPAEMRVGVYYLSVGAGCFVASILLLAVARCILFLIIWLITGGRHHFWFLPNLTADVGFIDSFRPLYTHEYKGPKADLKKDEKSETKKQQKSDSEEKSDSEKKEDEEGKVGPGNHGTEGSGGERHSDTDSDRREDDRSQHSSGNGNDFEMITKEELEQQTDGDCEEDEEEENDGETPKSSHEKS

SEQ ID NO: 821244 - protein, 180 aa, Homo sapiens [sequence omitted]

SEQ ID NO: 821245 - protein, 180 aa, Homo sapiens [sequence omitted]

SEQ ID NO: 821246 - protein, 399 aa, Homo sapiens; identical to SEQ ID NO: 821224

SEQ ID NO: 821247 - protein, 399 aa, Homo sapiens; identical to SEQ ID NO: 821224

SEQ ID NO: 821248 - protein, 399 aa, Homo sapiens; identical to SEQ ID NO: 821224

SEQ ID NO: 821249 - protein, 399 aa, Homo sapiens; identical to SEQ ID NO: 821224

SEQ ID NO: 821250 - protein, 574 aa, Homo sapiens
  misc_feature (506)..(506): Xaa can be any naturally occurring amino acid
  misc_feature (510)..(510): Xaa can be any naturally occurring amino acid
  misc_feature (528)..(528): Xaa can be any naturally occurring amino acid
  misc_feature (544)..(544): Xaa can be any naturally occurring amino acid
  misc_feature (547)..(548): Xaa can be any naturally occurring amino acid
  misc_feature (574)..(574): Xaa can be any naturally occurring amino acid
MAERRRHKKRIQEVGEPSKEEKAVAKYLRFNCPTKSTNMMGHRVDYFIASKAVDCLLDSKWAKAKKGEEALFTTRESVVDYCNRLLKKQFFHRALKVMKMKYDKDIKKEKDKGKAESGKEEDKKSKKENIKDEKTKKEKEKKKDGEKEESKKEETPGTPKKKETKKKFKLEPHDDQVFLDGNEVYVWIYDPVHFKTFVMGLILVIAVIAATLFPLWPAEMRVGVYYLSVGAGCFVASILLLAVARCILFLIIWLITGGRHHFWFLPNLTADVGFIDSFRPLYTHEYKGPKADLKKDEKSETKKQQKSDSEEKSDSEKKEDEEGKVGPGNHGTEGSGGERHSDTDSDRREDDRSQHSSGNGNDFEMAAVLWALGFIFLFTVGGLTGIVLANSSLDIVLHDTYYVVAHFHYVLSIGAVFAIIGGFIHCFPLFSGYTLDQTYAKIHFIYHIHRRKSELSSHNTFLRLIRKLRRYSDYPDAYTIMKHPIICRLIHFSNSSNINNFHDLRXLRFXAKILISKRTLHKPGIDYXDAPPPYHTFRRTRYTXKIXXKKERNPNPPQAWFSKPNPPWAPMNFX

SEQ ID NO: 821251 - protein, 303 aa, Homo sapiens
MAERRRHKKRIQEVGEPSKEEKAVAKYLRFNCPTKSTNMMGHRVDYFIASKAVDCLLDSKWAKAKKGEEALFTTRESVVDYCNRLLKKQFFHRALKVMKMKYDKDIKKEKDKGKAESGKEEDKKSKKENIKDEKTKKEKEKKKDGEKEESKKEETPGTPKKKETKKKFKLEPHDDQVFLDGNEVYVWIYDPVHFKTFVMGLILVIAVIAATLFPLWPAEMRVGVYYLSVGAGCFVASILLLAVARCILFLIIWLITGGRHHFWFLPNLTADVGFIDSFRPLYTHEYKGGPVNPDRLCLPSSPV

SEQ ID NO: 821252 - protein, 271 aa, Homo sapiens
MAERRRHKKRIQEVGEPSKEEKAVAKYLRFNCPTKSTNMMGHRVDYFIASKAVDCLLDSKWAKAKKGEEALFTTRESVVDYCNRLLKKQFFHRALKVMKMKYDKDIKKEKDKGKAESGKEEDKKSKKENIKDEKTKKEKEKKKDGEKEESKKEETPGTPKKKETKKKFKLEPHDDQVFLDGNEVYVWIYDPVHFKTFVMGLILVIAVIAATLFPLWPAEMRVGVYYLSVGAGCFVASILLLAVGSGEPSKEEKAVAKYLRFNCPTKSTNMD

SEQ ID NO: 821253 - protein, 205 aa, Homo sapiens
MAERRRHKKRIQEVGEPSKEEKAVAKYLRFNCPTKSTNMMGHRVDYFIASKAVDCLLDSKWAKAKKGEEALFTTRESVVDYCNRLLKKQFFHRALKVMKMKYDKDIKKEKDKGKAESGKEEDKKSKKENIKDEKTKKEKEKKKDGEKEESKKEETPGTPKKKETKKKFKLEPHDDQVFLDGNEVYVWIYDPVHFKTFVMGLILGK

SEQ ID NO: 821254 - protein, 205 aa, Homo sapiens; identical to SEQ ID NO: 821253

SEQ ID NO: 821255 - protein, 188 aa, Homo sapiens
MAERRRHKKRIQEVGEPSKEEKAVAKYLRFNCPTKSTNMMGHRVDYFIASKAVDCLLDSKWAKAKKGEEALFTTRESVVDYCNRLLKKQFFHRALKVMKMKYDKDIKKEKDKGKAESGKEEDKKSKKENIKDEKTKKEKEKKKDGEKEESKKEETPGTPKKKETKKKFKLEPHDDQVFLDGNEVRVSL

SEQ ID NO: 821256 - protein, 154 aa, Homo sapiens
MAERRRHKKRIQEVGEPSKEEKAVAKYLRFNCPTKSTNMMGHRVDYFIASKAVDCLLDSKWAKAKKGEEALFTTRESVVDYCNRLLKKQFFHRALKVMKMKYDKDIKKEKDKGKAESGKEEDKKSKKENIKDESRRAGTSFYFFSCDAERTHLL

SEQ ID NO: 821257 - protein, 163 aa, Homo sapiens
MADEEKLPPGWEKRMSRSSGRVYYFNHITNASQWERPSGNSSSGGKNGQGEPARVRCSHLLVKHSQSRRPSSWRQEKITRTKEEALELINGYIQKIKSGEEDFESLASQFSDCSSAKARGDLGAFSRGQMQKPFEDASFALRTGEMSGPVFTDSGIHIILRTE

SEQ ID NO: 821258 - protein, 163 aa, Homo sapiens; identical to SEQ ID NO: 821257

SEQ ID NO: 821259 - protein, 163 aa, Homo sapiens; identical to SEQ ID NO: 821257

SEQ ID NO: 821260 - protein, 191 aa, Homo sapiens
MHGVVAKSRAFGCEVPEYSSCLPLCVPGDRVNTQEALPTAAIPRDAKGRVYYFNHITNASQWERPSGNSSSGGKNGQGEPARVRCSHLLVKHSQSRRPSSWRQEKITRTKEEALELINGYIQKIKSGEEDFESLASQFSDCSSAKARGDLGAFSRGQMQKPFEDASFALRTGEMSGPVFTDSGIHIILRTE

SEQ ID NO: 821261 - protein, 184 aa, Homo sapiens
MDLLNEGAPCKPGPHPGFWLWAQGCPGSTTLAEFLPASPPGRVYYFNHITNASQWERPSGNSSSGGKNGQGEPARVRCSHLLVKHSQSRRPSSWRQEKITRTKEEALELINGYIQKIKSGEEDFESLASQFSDCSSAKARGDLGAFSRGQMQKPFEDASFALRTGEMSGPVFTDSGIHIILRTE

SEQ ID NO: 821262 - protein, 191 aa, Homo sapiens; identical to SEQ ID NO: 821260

SEQ ID NO: 821263 - protein, 184 aa, Homo sapiens; identical to SEQ ID NO: 821261

SEQ ID NO: 821264 - protein, 145 aa, Homo sapiens
MADEEKLPPGWEKRMSRSSGRVYYFNHITNASQWERPSGNSSSGGNSQSRRPSSWRQEKITRTKEEALELINGYIQKIKSGEEDFESLASQFSDCSSAKARGDLGAFSRGQMQKPFEDASFALRTGEMSGPVFTDSGIHIILRTE

SEQ ID NO: 821265 - protein, 142 aa, Homo sapiens
MADEEKLPPGWEKRMSRSSGRVYYFNHITNASQWERPSGNSSSGGKNGQGEPARVRCSHLLVKHSQSRRPSSWRQEKITRTKEEALELINGYIQKIKSGEEDFESLASQFSDCSSAKARGDLGAFSRGAQGMGLTRSDAEAI

SEQ ID NO: 821266 - protein, 170 aa, Homo sapiens
MHGVVAKSRAFGCEVPEYSSCLPLCVPGDRVNTQEALPTAAIPRDAKGRVYYFNHITNASQWERPSGNSSSGGKNGQGEPARVRCSHLLVKHSQSRRPSSWRQEKITRTKEEALELINGYIQKIKSGEEDFESLASQFSDCSSAKARGDLGAFSRGAQGMGLTRSDAEAI

SEQ ID NO: 821267 - protein, 163 aa, Homo sapiens; identical to SEQ ID NO: 821257

SEQ ID NO: 821268 - protein, 163 aa, Homo sapiens; identical to SEQ ID NO: 821257

SEQ ID NO: 821269 - protein, 163 aa, Homo sapiens; identical to SEQ ID NO: 821257

SEQ ID NO: 821270 - protein, 133 aa, Homo sapiens
MADEEKLPPGWEKRMSRSSGRVYYFNHITNASQWERPSGNSSSGGKNGQGEPARVRCSHLLVKHSQSRRPSSWRQEKITRTKEEALELINGYIQKIKSGEEDFESLASQFRSAEPPRVPPGAGGRLEGRIVSS

SEQ ID NO: 821271 - protein, 145 aa, Homo sapiens
MADEEKLPPGWEKRMSRSSGRVYYFNHITNASQWERPSGNSSSGGKNGQGEPARVRCSHLLVKHSQSRRPSSWRQEKITRTKEEALELINGYIQKIKSGEEDFESLASQFSDCSSAKARGDLGAFSRGAQGMGLTRLGDPYHPEG

SEQ ID NO: 821272 - protein, 138 aa, Homo sapiens
MADEEKLPPGWEKRMSRSSGRVYYFNHITNASQWERPSGNSSSGGKNGQGEPARVRCSHLLVKHSQSRRPSSWRQEKITRTKEEALELINGYIQKIKSGEEDFESLASQFSDCSSAKVSRAAPCPPRCWRQTRGPNCF

SEQ ID NO: 821273 - protein, 181 aa, Homo sapiens
MADEEKLPPGWEKRMSRSSGVNTQEALPTAAIPRDAKGRVYYFNHITNASQWERPSGNSSSGGKNGQGEPARVRCSHLLVKHSQSRRPSSWRQEKITRTKEEALELINGYIQKIKSGEEDFESLASQFSDCSSAKARGDLGAFSRGQMQKPFEDASFALRTGEMSGPVFTDSGIHIILRTE

SEQ ID NO: 821274 - protein, 149 aa, Homo sapiens
GGHGKTCVQLSGQHSLLEQPQWDSAVAMGKHVYIFGGMTPAGALDTMYQYHTEEQHWTLLKFDTLLPPGRLDHSMCIIPWPVTCASEKEDSNSLTLNHEAEKEDSADKVMSHSGDSHEESQTATLLCLVFGGMNTEGEIYDDCIVTVVD

SEQ ID NO: 821275 - protein, 145 aa, Homo sapiens
MKQLPVLEPGDKPRKATWYTLTVPGDSPCARVGHSCSYLPPVGNAKRGKVFIVGGANPNRSFSDVHTMDLETRTWTTPEVTSPPPSPRTFHTSSAAIGNQLYVFGGGERGAQPVQDTKLHVFDASMDWWAPWGWSGPSQFTHYLI

SEQ ID NO: 821276 - protein, 372 aa, Homo sapiens
MKQLPVLEPGDKPRKATWYTLTVPGDSPCARVGHSCSYLPPVGNAKRGKVFIVGGANPNRSFSDVHTMDLGKHQWDLDTCKGLLPRYEHASFIPSCTPDRIWVFGGANQSGNRNCLQVLNPETRTWTTPEVTSPPPSPRTFHTSSAAIGNQLYVFGGGERGAQPVQDTKLHVFDANTLTWSQPETLGNPPSPRHGHVMVAAGTKLFIHGGLAGDRFYDDLHCIDISDMKWQKLNPTGAAPAGCAAHSAVAMGKHVYIFGGMTPAGALDTMYQYHTEEQHWTLLKFDTLLPPGRLDHSMCIIPWPVTCASEKEDSNSLTLNHEAEKEDSADKVMSHSGDSHEESQTATLLCLVFGGMNTEGEIYDDCIVTVVD

SEQ ID NO: 821277 - protein, 372 aa, Homo sapiens; identical to SEQ ID NO: 821276

SEQ ID NO: 821278 - protein, 372 aa, Homo sapiens; identical to SEQ ID NO: 821276

SEQ ID NO: 821279 - protein, 372 aa, Homo sapiens; identical to SEQ ID NO: 821276

SEQ ID NO: 821280 - protein, 292 aa, Homo sapiens
MKQLPVLEPGDKPRKATWYTLTVPGDSPCARVGHSCSYLPPVGNAKRGKVFIVGGANPNRSFSDVHTMDLGKHQWDLDTCKGLLPRYEHASFIPSCTPDRIWVFGGANQSGNRNCLQVLNPETRTWTTPEVTSPPPSPRTFHTSSAAIGNQLYVFGGGERGAQPVQDTKLHVFDANTLTWSQPETLGNPPSPRHGHVMVAAGTKLFIHGGLAGDRFYDDLHCIDISDMKWQKLNPTGAAPAGCAAHSAVAMGKHVYIFGGMTPAGALDTMYQYHTETGFHRVSQDGLHLLTS

SEQ ID NO: 821281 - protein, 466 aa, Homo sapiens
  misc_feature (3)..(3): Xaa can be any naturally occurring amino acid
RGXELRLGTRLGRGSPDTGSITVSGRESESFRGVGPSRVQRTGKGLPWLRPGHFDRISLFFPDPVSYPLELPRGDEICWAGSGGCCGRSRPREASLTELWTLGTAVSGLGRRYTLTVPGDSPCARVGHSCSYLPPVGNAKRGKVFIVGGANPNRSFSDVHTMDLGKHQWDLDTCKGLLPRYEHASFIPSCTPDRIWVFGGANQSGNRNCLQVLNPETRTWTTPEVTSPPPSPRTFHTSSAAIGNQLYVFGGGERGAQPVQDTKLHVFDANTLTWSQPETLGNPPSPRHGHVMVAAGTKLFIHGGLAGDRFYDDLHCIDISDMKWQKLNPTGAAPAGCAAHSAVAMGKHVYIFGGMTPAGALDTMYQYHTEEQHWTLLKFDTLLPPGRLDHSMCIIPWPVTCASEKEDSNSLTLNHEAEKEDSADKVMSHSGDSHEESQTATLLCLVFGGMNTEGEIYDDCIVTVVD

SEQ ID NO: 821282 - protein, 305 aa, Homo sapiens
MDLGKHQWDLDTCKGLLPRYEHASFIPSCTPDRIWVFGGANQSGNRNCLQVLNPETRTWTTPEVTSPPPSPRTFHTSSAAIGNQLYVFGGGERGAQPVQDTKLHVFDANTLTWSQPETLGNPPSPRHGHVMVAAGTKLFIHGGLAGDRFYDDLHCIDISDMKWQKLNPTGAAPAGCAAHSAVAMGKHVYIFGGMTPAGALDTMYQYHTEEQHWTLLKFDTLLPPGRLDHSMCIIPWPVTCASEKEDSNSLTLNHEAEKEDSADKVMSHSGDSHEESQTATLLCLVFGGMNTEGEIYDDCIVTVVD

SEQ ID NO: 821283 - protein, 354 aa, Homo sapiens
MKQLPVLEPGDKPRKATWYTLTVPGDSPCARVGHSCSYLPPVGNAKRGKVFIVGGANPNRSFSDVHTMDLDASFIPSCTPDRIWVFGGANQSGNRNCLQVLNPETRTWTTPEVTSPPPSPRTFHTSSAAIGNQLYVFGGGERGAQPVQDTKLHVFDANTLTWSQPETLGNPPSPRHGHVMVAAGTKLFIHGGLAGDRFYDDLHCIDISDMKWQKLNPTGAAPAGCAAHSAVAMGKHVYIFGGMTPAGALDTMYQYHTEEQHWTLLKFDTLLPPGRLDHSMCIIPWPVTCASEKEDSNSLTLNHEAEKEDSADKVMSHSGDSHEESQTATLLCLVFGGMNTEGEIYDDCIVTVVD

SEQ ID NO: 821284 - protein, 321 aa, Homo sapiens
MKQLPVLEPGDKPRKATWYTLTVPGDSPCARVGHSCSYLPPVGNAKRGKVFIVGGANPNRSFSDVHTMDLETRTWTTPEVTSPPPSPRTFHTSSAAIGNQLYVFGGGERGAQPVQDTKLHVFDANTLTWSQPETLGNPPSPRHGHVMVAAGTKLFIHGGLAGDRFYDDLHCIDISDMKWQKLNPTGAAPAGCAAHSAVAMGKHVYIFGGMTPAGALDTMYQYHTEEQHWTLLKFDTLLPPGRLDHSMCIIPWPVTCASEKEDSNSLTLNHEAEKEDSADKVMSHSGDSHEESQTATLLCLVFGGMNTEGEIYDDCIVTVVD

SEQ ID NO: 821285 - protein, 318 aa, Homo sapiens
MKQLPVLEPGDKPRKATWYTLTVPGDSPCARVGHSCSYLPPVGNAKRGKVFIVGGANPNRSFSDVHTMDLGKHQWDLDTCKGLLPRYEHASFIPSCTPDRIWVFGGANQSGNRNCLQVLNPDTLTWSQPETLGNPPSPRHGHVMVAAGTKLFIHGGLAGDRFYDDLHCIDISDMKWQKLNPTGAAPAGCAAHSAVAMGKHVYIFGGMTPAGALDTMYQYHTEEQHWTLLKFDTLLPPGRLDHSMCIIPWPVTCASEKEDSNSLTLNHEAEKEDSADKVMSHSGDSHEESQTATLLCLVFGGMNTEGEIYDDCIVTVVD

SEQ ID NO: 821286 - protein, 175 aa, Homo sapiens
MVAAGTKLFIHGGLAGDRFYDDLHCIDISDMKWQKLNPTGAAPAGCAAHSAVAMGKHVYIFGGMTPAGALDTMYQYHTEEQHWTLLKFDTLLPPGRLDHSMCIIPWPVTCASEKEDSNSLTLNHEAEKEDSADKVMSHSGDSHEESQTATLLCLVFGGMNTEGEIYDDCIVTVVD

SEQ ID NO: 821287 - protein, 267 aa, Homo sapiens
MKQLPVLEPGDKPRKATWYTLTVPGDSPCARVGHSCSYLPPVGNAKRGKVFIVGGANPNRSFSDVHTMDLDTLTWSQPETLGNPPSPRHGHVMVAAGTKLFIHGGLAGDRFYDDLHCIDISDMKWQKLNPTGAAPAGCAAHSAVAMGKHVYIFGGMTPAGALDTMYQYHTEEQHWTLLKFDTLLPPGRLDHSMCIIPWPVTCASEKEDSNSLTLNHEAEKEDSADKVMSHSGDSHEESQTATLLCLVFGGMNTEGEIYDDCIVTVVD

SEQ ID NO: 821288 - protein, 175 aa, Homo sapiens; identical to SEQ ID NO: 821286

SEQ ID NO: 821289 - protein, 146 aa, Homo sapiens
MKQLPVLEPGDKPRKATWYTLTVPGDSPCARVGHSCSYLPPVGNAKRGKVFIVGGANPNRSFSDVHTMDLGKHQWDLDTCKGLLPRYEHASFIPSCTPDRIWVFGGANQSGNRNCLQVLNPETRTWTTPEVTSPPPSPRTIPTLSL

SEQ ID NO: 821290 - protein, 112 aa, Homo sapiens
MTPAGALDTMYQYHTEEQHWTLLKFDTLLPPGRLDHSMCIIPWPVTCASEKEDSNSLTLNHEAEKEDSADKVMSHSGDSHEESQTATLLCLVFGGMNTEGEIYDDCIVTVVD

SEQ ID NO: 821291 - protein, 112 aa, Homo sapiens; identical to SEQ ID NO: 821290

SEQ ID NO: 821292 - protein, 157 aa, Homo sapiens
MKQLPVLEPGDKPRKATWYTLTVPGDSPCARVGHSCSYLPPVGNAKRGKVFIVGGANPNRKEQHWTLLKFDTLLPPGRLDHSMCIIPWPVTCASEKEDSNSLTLNHEAEKEDSADKVMSHSGDSHEESQTATLLCLVFGGMNTEGEIYDDCIVTVVD

SEQ ID NO: 821293 - protein, 114 aa, Homo sapiens
  misc_feature (3)..(3): Xaa can be any naturally occurring amino acid
RGXELRLGTRLGRGSPDTGSITVSGRESESFRGVGPSRVQRTGKGLPWLRPGHFDRISLFFPDPVSYPLELPRGDEICWAGSGGCCGRSRPREASLTELWTLGTAVSGLGRRTP

SEQ ID NO: 821294 - protein, 114 aa, Homo sapiens; identical to SEQ ID NO: 821293
  misc_feature (3)..(3): Xaa can be any naturally occurring amino acid

SEQ ID NO: 821295 - protein, 114 aa, Homo sapiens; identical to SEQ ID NO: 821293
  misc_feature (3)..(3): Xaa can be any naturally occurring amino acid

SEQ ID NO: 821296 - protein, 71 aa, Homo sapiens
NQYNNWQPQSRNWVKCFPGKHQWDLDTCKGLLPRYEHASFIPSCTPDRIWVFGGANQSGNRNCLQVLNPGK

SEQ ID NO: 821297 - protein, 581 aa, Homo sapiens
ALLNDPRRRVLNPRLTSVSPGARASPRARASASPKAPPQGAALPTCSPTCSLEGGARGRADKMFLLPLPAAGRVVVRRLAVRRFGSRSLSTADMTKGLVLGIYSKEKEDDVPQFTSAGENFDKLLAGKLRETLNISGPPLKAGKTRTFYGLHQDFPSVVLVGLGKKAAGIDEQENWHEGKENIRAAVAAGCRQIQDLELSSVEVDPCGDAQAAAEGAVLGLYEYDDLKQKKKMAVSAKLYGSGDQEAWQKGVLFASGQNLARQLMETPANEMTPTRFAEIIEKNLKSASSKTEVHIRPKSWIEEQAMGSFLSVAKGSDEPPVFLEIHYKGSPNANEPPLVFVGKGITFDSGGISIKASANMDLMRADMGGAATICSAIVSAAKLNLPINIIGLAPLCENMPSGKANKPGDVVRAKNGKTIQVDNTDAEGRLILADALCYAHTFNPKVILNAATLTGAMDVALGSGATGVFTNSSWLWNKLFEASIETGDRVWRMPLFEHYTRQVVDCQLADVNNIGKYRSAGACTAAAFLKEFVTHPKWAHLDIAGVMTNKDEVPYLRKGMTGRPTRTLIEFLLRFSQDNA

SEQ ID NO: 821298 - protein, 630 aa, Homo sapiens
MRAHTNAGAHECRAHTNAGAHECGRTRMRAHTNAGAPLSPLHNRGLIPAVQSAGAAHPSRPLDSRPSRPAPEPVRAHARLRPRKPRPQGAALPTCSPTCSLEGGARGRADKMFLLPLPAAGRVVVRRLAVRRFGSRSLSTADMTKGLVLGIYSKEKEDDVPQFTSAGENFDKLLAGKLRETLNISGPPLKAGKTRTFYGLHQDFPSVVLVGLGKKAAGIDEQENWHEGKENIRAAVAAGCRQIQDLELSSVEVDPCGDAQAAAEGAVLGLYEYDDLKQKKKMAVSAKLYGSGDQEAWQKGVLFASGQNLARQLMETPANEMTPTRFAEIIEKNLKSASSKTEVHIRPKSWIEEQAMGSFLSVAKGSDEPPVFLEIHYKGSPNANEPPLVFVGKGITFDSGGISIKASANMDLMRADMGGAATICSAIVSAAKLNLPINIIGLAPLCENMPSGKANKPGDVVRAKNGKTIQVDNTDAEGRLILADALCYAHTFNPKVILNAATLTGAMDVALGSGATGVFTNSSWLWNKLFEASIETGDRVWRMPLFEHYTRQVVDCQLADVNNIGKYRSAGACTAAAFLKEFVTHPKWAHLDIAGVMTNKDEVPYLRKGMTGRPTRTLIEFLLRFSQDNA

SEQ ID NO: 821299 - protein, 612 aa, Homo sapiens
MRAHTNAGAHECRAHTNAGAHECGRTRMRAHTNAGAPLSPLHNRGLIPAVQSAGAAHPSRPLDSRPSRPAPEPVRAHARLRPRKPRPQGAALPTCSPTCSLEGGARGRADKMFLLPLPAAGRVVVRRLAVRRFGSRSLSTADMTKGLVLGIYSKEKEDDVPQFTSAGENFDKLLAGKLRETLNISGPPLKAGKTRTFYGLHQDFPSVVLVGLGKKAAGIDEQENWHEGKENIRAAVAAGCRQIQDLELSSVEVDPCGDAQAAAEGAVLGLYEYDDLKQKKKMAVSAKLYGSGDQEAWQKGVLFASGQNLARQLMETPANEMTPTRFAEIIEKNLKSASSKTEVHIRPKSWIEEQAMGSFLSVAKGSDEPPVFLEIHYKGSPNANEPPLVFVGKGITFDSGGISIKASANMDLMRADMGGAATICSAIVSAAKLNLPINIIGLAPLCENMPSGKANKPGDVVRAMADALCYAHTFNPKVILNAATLTGAMDVALGSGATGVFTNSSWLWNKLFEASIETGDRVWRMPLFEHYTRQVVDCQLADVNNIGKYRSAGACTAAAFLKEFVTHPKWAHLDIAGVMTNKDEVPYLRKGMTGRPTRTLIEFLLRFSQDNA

SEQ ID NO: 821300 - protein, 630 aa, Homo sapiens; identical to SEQ ID NO: 821298

SEQ ID NO: 821301 - protein, 420 aa, Homo sapiens
VDPCGDAQAAAEGAVLGLYEYIRAAVAAGCRQIQDLELSSVEVDPCGDAQAAAEGAVLGLYEYDDLKQKKKMAVSAKLYGSGDQEAWQKGVLFASGQNLARQLMETPANEMTPTRFAEIIEKNLKSASSKTEVHIRPKSWIEEQAMGSFLSVAKGSDEPPVFLEIHYKGSPNANEPPLVFVGKGITFDSGGISIKASANMDLMRADMGGAATICSAIVSAAKLNLPINIIGLAPLCENMPSGKANKPGDVVRAKNGKTIQVDNTDAEGRLILADALCYAHTFNPKVILNAATLTGAMDVALGSGATGVFTNSSWLWNKLFEASIETGDRVWRMPLFEHYTRQVVDCQLADVNNIGKYRSAGACTAAAFLKEFVTHPKWAHLDIAGVMTNKDEVPYLRKGMTGRPTRTLIEFLLRFSQDNA

SEQ ID NO: 821302 - protein, 349 aa, Homo sapiens [sequence omitted]

SEQ ID NO: 821303 - protein, 545 aa, Homo sapiens
MRAHTNAGAHECRAHTNAGAHECGRTRMRAHTNAGAPLSPLHNRGLIPAVQSAGAAHPSRPLDSRPSRPAPEPVRAHARLRPRKPRPQGAALPTCSPTCSLEGGARGRADKMFLLPLPAAGRVVVRRLAVRRFGSRSLSTADMTKGLVLGIYSKEKEDDVPQFTSAGENFDKLLAGKLRETLNISGPPLKAGKTRTFYGLHQDFPSVVLVGLGKKAAGIDEQENWHEGKENIRAAVAAGCRQIQDLELSSVEVDPCGDAQAAAEGAVLGLYEYDDLKQKKKMAVSAKLYGSGDQEAWQKGVLFASGQNLARQLMETPANEMTPTRFAEIIEKNLKSASSKTEVHIRPKSWIEEQAMGSFLSVAKGSDEPPVFLEIHYKGSPNANEPPLVFVGKGITFDSGGISIKASANMDLMRADMGGAATICSAIVSAAKLNLPINIIGLAPLCENMPSGKANKPGDVVRAKNGKTIQVDNTDAEGRLILADALCYAHTFNPKVILNAATLTGAMDVALGSGATGVFTNSSWLWNKLFEVGIIFVYLNCRDGE

SEQ ID NO: 821304 - protein, 131 aa, Homo sapiens
MFLLPLPAAGRVVVRRLAVRRFGSRSLSTADMTKGLVLGIYSKEKEDDVPQFTSAGENFDKLLAGKLRETLNISGPPLKAGKTRTFYGLHQDFPSVVLVGLGKKAAGIDEQENWHEGKENIRAAVAGYFTF

SEQ ID NO: 821305 - protein, 672 aa, Homo sapiens
YRCDRACNPGTDAWAAIDAAFSRGGLGKEEGRRGQRGRLQQEARRGRRGRGETEYSQRLPASVALGQTREAPGRCHHRWRSKWRWERSYITRLLCIDYVPGTMLPINTLHHLILSASPGKYDATRFHRQGNKPREGDECTQGQQLVMLMLLVRGTHYENLRSKVVLPTPLGGRSTETFVSEFPGPDTGIRWRRSDEALRVNVGGVRRQLSARALARFPGTRLGRLQAAASEEQARRLCDDYDEAAREFYFDRHPGFFLSLLHFYRTGHLHVLDELCVFAFGQEADYWGLGENALAACCRARYLERRLTQPHAWDEDSDTPSSVDPCPDEISDVQRELARYGAARCGRLRRRLWLTMENPGYSLPSKLFSCVSISVVLASIAAMCIHSLPEYQAREAAAAVAAVAAGRSPEGVRDDPVLRRLEYFCIAWFSFEVSSRLLLAPSTRNFFCHPLNLIDIVSVLPFYLTLLAGVALGDQGGKEFGHLGKVVQVFRLMRIFRVLKLARHSTGLRSLGATLKHSYREVGILLLYLAVGVSVFSGVAYTAEKEEDVGFNTIPACWWWGTVSMTTVGYGDVVPVTVAGKLAASGCILGGILVVALPITIIFNKFSHFYRRQKALEAAVRNSNHQEFEDLLSSIDGVSEASLETSRETSQEGQSADLESQAPSEPPHPQMY

SEQ ID NO: 821306 - protein, 137 aa, Homo sapiens
MGLRAGGTLGRAGAGRGAPEGPGPSGGAQGGSIHSGRIAAVHNVPLSVLIRPLPSVLDPAKVQSLVDTIREDPDSVPPIDVLWIKGAQGGDYFYSFGGCHRYAAYQQLQRETIPAKLVQSTLSDLRVYLGASTPDLQ

SEQ ID NO: 821307 - protein, 82 aa, Homo sapiens
LRLRQKDPRRDPYLRARYFIGRLTMAVVSTNEVTSTENHVCVQGRRGGGRGRAKLAGPVTFYQKVKPRQKSVSCSLPLHIFT

SEQ ID NO: 821308 - protein, 137 aa, Homo sapiens; identical to SEQ ID NO: 821306

SEQ ID NO: 821309 - protein, 137 aa, Homo sapiens; identical to SEQ ID NO: 821306

SEQ ID NO: 821310 - protein, 137 aa, Homo sapiens; identical to SEQ ID NO: 821306

SEQ ID NO: 821311 - protein, 137 aa, Homo sapiens; identical to SEQ ID NO: 821306

SEQ ID NO: 821312 - protein, 76 aa, Homo sapiens
AHGVRVPGGPAERSIGEQRRSVTHGFPGGAEQPGAACDLHTHGAPRKDTLKMLALPLCAHFCTVLEHDASYTHLCA

SEQ ID NO: 821313 - protein, 151 aa, Homo sapiens
MEGQAQGGDALKYSRAGPFLLKRSLQERSVWGGRGLCEAGPGARAGRGPRARGRGSRGQEEGEETGLGERPAERPPGSSRSRTASLYPPAARTKEGAQPAALASPPRVQLAQLAQRPPRLGQGFNGPHQNAISNGTRHGNHDVYISQIRWG

SEQ ID NO: 821314 - protein, 124 aa, Homo sapiens
SESHLVWLPVCRRGFSTELPASTDHTKMPSQMEHAMETMMFTFHKFAGDKGYLTKEDLRVLMEKEFPGFLENQKDPLAVDKIMKDLDQCRDGKVGFQSFFSLIAGLTIACNDYFVVHMKQKGKK

SEQ ID NO: 821315 - protein, 79 aa, Homo sapiens
  misc_feature (50)..(50): Xaa can be any naturally occurring amino acid
  misc_feature (61)..(61): Xaa can be any naturally occurring amino acid
  misc_feature (71)..(71): Xaa can be any naturally occurring amino acid
  misc_feature (74)..(74): Xaa can be any naturally occurring amino acid
MPSQMEHAMETMMFTFHKFAGDKGYLTKEDLRVLMEKEFPGFLENQKRPXGLWTKINEGTXYQLLKMAKSXAFXEDFFF

SEQ ID NO: 821316 - protein, 148 aa, Homo sapiens
RQTTAGTHTARSSWWNRTRSPPRSPLRPASSSPSSPSVRRASAKASTDHTKMPSQMEHAMETMMFTFHKFAGDKGYLTKEDLRVLMEKEFPGFLENQKDPLAVDKIMKDLDQCRDGKVGFQSFFSLIAGLTIACNDYFVVHMKQKGKK

SEQ ID NO: 821317 - protein, 121 aa, Homo sapiens
LLVIPDTGTLPAERASAASTDHTKMPSQMEHAMETMMFTFHKFAGDKGYLTKEDLRVLMEKEFPGFLENQKDPLAVDKIMKDLDQCRDGKVGFQSFFSLIAGLTIACNDYFVVHMKQKGKK

SEQ ID NO: 821318 - protein, 151 aa, Homo sapiens; identical to SEQ ID NO: 821313

SEQ ID NO: 821319 - protein, 151 aa, Homo sapiens; identical to SEQ ID NO: 821313

SEQ ID NO: 821320 - protein, 38 aa, Homo sapiens
MAGVRKQHVLNMGDWAKGKSLDPSSMAQRGKTLQGHHK

SEQ ID NO: 821321 - protein, 151 aa, Homo sapiens; identical to SEQ ID NO: 821313

SEQ ID NO: 821322 - protein, 117 aa, Homo sapiens
MPSQMEHAMETMMFTFHKFAGDKGYLTKEDLRVLMEKEFPGFLEAIFLSLVDGMDPTGKTTPYRFLTSITTKRSAEANHHVSKIKAKGVLPAHLCSIHSYQALRVMGSLRLHPTYSF

SEQ ID NO: 821323 - protein, 133 aa, Homo sapiens
MPSQMEHAMETMMFTFHKFAGDKGYLTKEDLRVLMEKEFPGFLEAIFLSLVDGMDPTGKTTPYRFLTSITTKRSAEANHHNQKDPLAVDKIMKDLDQCRDGKVGFQSFFSLIAGLTIACNDYFVVHMKQKGKK

SEQ ID NO: 821324 - protein, 82 aa, Homo sapiens
ARYPSGEDCGSGEDCGSAKTVDQAKTVVENQKDPLAVDKIMKDLDQCRDGKVGFQSFFSLIAGLTIACNDYFVVHMKQKGKK

SEQ ID NO: 821325 - protein, 151 aa, Homo sapiens; identical to SEQ ID NO: 821313

SEQ ID NO: 821326 - protein, 117 aa, Homo sapiens; identical to SEQ ID NO: 821322

SEQ ID NO: 821327 - protein, 131 aa, Homo sapiens
MSGGHSSPEPPRPWPLDRGSLPSPPAFPPGIATRATRAWAAPAKMLPCARSACRARDSGLASGTRAEVGGGPASEEYARRLAGCCPRLARPSLPTCEMHRTGLHLFNESFLSSCCEPGLEQAWVLWMGAGP

SEQ ID NO: 821328 - protein, 322 aa, Homo sapiens
MSGELPPNINIKEPRWDQSTFIGRANHFFTVTDPRNILLTNEQLESARKIVHDYRQGIVPPGLTENELWRAKYIYDSAFHPDTGEKMILIGRMSAQVPMNMTITGCMMTFYRTTPAVLFWQWINQSFNAVVNYTNRSGDAPLTVNELGTAYVSATTGAVATALGLNALTKHVSPLIGRFVPFAAVAAANCINIPLMRQRELKVGIPVTDENGNRLGESANAAKQAITQVVVSRILMAAPGMAIPPFIMNTLEKKAFLKRFPWMSAPIQVGLVGFCLVFATPLCCALFPQKSSMSVTSLEAELQAKIQESHPELRRVYFNKGL

SEQ ID NO: 821329 - protein, 322 aa, Homo sapiens; identical to SEQ ID NO: 821328

SEQ ID NO: 821330 - protein, 322 aa, Homo sapiens; identical to SEQ ID NO: 821328

SEQ ID NO: 821331 - protein, 261 aa, Homo sapiens
MITENELWRAKYIYDSAFHPDTGEKMILIGRMSAQVPMNMTITGCMMTFYRTTPAVLFWQWINQSFNAVVNYTNRSGDAPLTVNELGTAYVSATTGAVATALGLNALTKHVSPLIGRFVPFAAVAAANCINIPLMRQRELKVGIPVTDENGNRLGESANAAKQAITQVVVSRILMAAPGMAIPPFIMNTLEKKAFLKRFPWMSAPIQVGLVGFCLVFATPLCCALFPQKSSMSVTSLEAELQAKIQESHPELRRVYFNKGL

SEQ ID NO: 821332 - protein, 322 aa, Homo sapiens; identical to SEQ ID NO: 821328

SEQ ID NO: 821333 - protein, 322 aa, Homo sapiens; identical to SEQ ID NO: 821328

SEQ ID NO: 821334 - protein, 322 aa, Homo sapiens; identical to SEQ ID NO: 821328

SEQ ID NO: 821335 - protein, 242 aa, Homo sapiens
MITENELWRAKYIYDSAFHPDTGEKMILIGRMSAQVPMNMTITGCMMTFYRTTPAVLFWQWINQSFNAVVNYTNRSGDAPLTVNELGTAYVSATTGAVATALGLNALTKHVSPLIGRFVPFAAVAAANCINIPLMRQRELKVGIPVTDENGNRLGESANAAKQAITQVVVSRILMAAPGMAIPPFIMNTLEKKAFLKRFPWMSAPIQVGLVGFCLVFATPLCCALFPQKRYVFVIRQNHHEY

SEQ ID NO: 821336 - protein, 242 aa, Homo sapiens
MSGELPPNINIKEPRWDQSTFIGRANHFFTVTDPRNILLTNEQLESARKIVHDYRQGIVPPGLTENELWRAKYIYDSAFHPDTGEKMILIGRMSAQVPMNMTITGCMMTFYRTTPAVLFWQWINQSFNAVVNYTNRSGDAPLTVNELGTAYVSATTGAVATALGLNALTKHVSPLIGRFVPFAAVAAANCINIPLMRQRELKVGIPVTDENGNRLGESANAAKQAITQVVVSRILMAAPGMG

SEQ ID NO: 821337 - protein, 145 aa, Homo sapiens
MSGELPPNINIKEPRWDQSTFIGRANHFFTVTDPRNILLTNEQLESARKIVHDYRQGIVPPGLTENELWRAKYIYDSAFHPDTGEKMILIGRMSAQVPMNMTITGCMMTFYRTTPAVLFWQWINQSFNAVVNYTNRSGDAPLTVK

SEQ ID NO: 821338 - protein, 360 aa, Homo sapiens
APGLQVSQAPPPRRGFAVGRRYSPPALAPGRCAAPHGGGRKELPTRRPGHGMAPKFPDSVEELRAAGNESFRNGQYAEASALYGRALRVLQAQGSSDPEEESVLYSNRAACHLKDGNCRDCIKDCTSALALVPFSIKPLLRRASAYEALEKYPMAYVDYKTVLQIDDNVTSAVEGINRMTRALMDSLGPEWRLKLPSIPLVPVSAQKRWNSLPSENHKEMAKSKSKETTATKNRVPSAGDVEKARVLKEEGNELVKKGNHKKAIEKYSESLLCSNLESATYSNRALCYLVLKQYTEAVKDCTEALKLDGKNVKAFYRRAQAHKALKDYKSSFADISNLLQIEPRNGPAQKLRQEVKQNLH

SEQ ID NO: 821339 - protein, 360 aa, Homo sapiens; identical to SEQ ID NO: 821338

SEQ ID NO: 821340 - protein, 360 aa, Homo sapiens; identical to SEQ ID NO: 821338

SEQ ID NO: 821341 - protein, 336 aa, Homo sapiens
EAEKTPILSKPGCNRTRHLPTRRPGHGMAPKFPDSVEELRAAGNESFRNGQYAEASALYGRALRVLQAQGSSDPEEESVLYSNRAACHLKDGNCRDCIKDCTSALALVPFSIKPLLRRASAYEALEKYPMAYVDYKTVLQIDDNVTSAVEGINRMTRALMDSLGPEWRLKLPSIPLVPVSAQKRWNSLPSENHKEMAKSKSKETTATKNRVPSAGDVEKARVLKEEGNELVKKGNHKKAIEKYSESLLCSNLESATYSNRALCYLVLKQYTEAVKDCTEALKLDGKNVKAFYRRAQAHKALKDYKSSFADISNLLQIEPRNGPAQKLRQEVKQNLH

SEQ ID NO: 821342 - protein, 253 aa, Homo sapiens
GVLEDPRRMETQRRIKDCTSALALVPFSIKPLLRRASAYEALEKYPMAYVDYKTVLQIDDNVTSAVEGINRMTRALMDSLGPEWRLKLPSIPLVPVSAQKRWNSLPSENHKEMAKSKSKETTATKNRVPSAGDVEKARVLKEEGNELVKKGNHKKAIEKYSESLLCSNLESATYSNRALCYLVLKQYTEAVKDCTEALKLDGKNVKAFYRRAQAHKALKDYKSSFADISNLLQIEPRNGPAQKLRQEVKQNLH

SEQ ID NO: 821343 - protein, 182 aa, Homo sapiens [sequence omitted]

SEQ ID NO: 821344 - protein, 241 aa, Homo sapiens
APGLQVSQAPPPRRGFAVGRRYSPPALAPGRCAAPHGGGRKELPTRRPGHGMAPKFPDSVEELRAAGNESFRNGQYAEASALYGRALRVLQAQGSSDPEEESVLYSNRAACHLKDGNCRDCIKDCTSALALVPFSIKPLLRRASAYEALEKYPMAYVDYKTVLQIDDNVTSAVEGINRMTRALMDSLGPEWRLKLPSIPLVPVSAQKRWNSLPSENHKEMAKSKSKETTATKNREHSAIWS

SEQ ID NO: 821345 - protein, 360 aa, Homo sapiens; identical to SEQ ID NO: 821338

SEQ ID NO: 821346 - protein, 360 aa, Homo sapiens; identical to SEQ ID NO: 821338

SEQ ID NO: 821347 - protein, 207 aa, Homo sapiens
MAYVDYKTVLQIDDNVTSAVEGINRMTRALMDSLGPEWRLKLPSIPLVPVSAQKRWNSLPSENHKEMAKSKSKETTATKNRVPSAGDVEKARVLKEEGNELVKKGNHKKAIEKYSESLLCSNLESATYSNRALCYLVLKQYTEAVKDCTEALKLDGKNVKAFYRRAQAHKALKDYKSSFADISNLLQIEPRNGPAQKLRQEVKQNLH

SEQ ID NO: 821348 - protein, 221 aa, Homo sapiens
MRRASAYEALEKYPMAYVDYKTVLQIDDNVTSAVEGINRMTRALMDSLGPEWRLKLPSIPLVPVSAQKRWNSLPSENHKEMAKSKSKETTATKNRVPSAGDVEKARVLKEEGNELVKKGNHKKAIEKYSESLLCSNLESATYSNRALCYLVLKQYTEAVKDCTEALKLDGKNVKAFYRRAQAHKALKDYKSSFADISNLLQIEPRNGPAQKLRQEVKQNLH

SEQ ID NO: 821349 - protein, 69 aa, Homo sapiens
SHLRACSSNSRNHRPGLARRPAVLPGPPTLPAPSDSGILPETSSALSFHLLVNCPVGPHPKLFRPRSEP

SEQ ID NO: 821350 - protein, 513 aa, Homo sapiens
SQPLGAACRVPATARVSGGRTRPEPVSARQPPAAAESPAASPPRAPSSTSRPALRSAADMCAAQMPPLAHIFRGTFVHSTWTCPMEVLRDHLLGVSDSGKIVFLEEASQQEKLAKEWCFKPCEIRELSHHEFFMPGLVDTHIHASQYSFAGSSIDLPLLEWLTKYTFPAEHRFQNIDFAEEVYTRVVRRTLKNGTTTACYFATIHTDSSLLLADITDKFGQRAFVGKVCMDLNDTFPEYKETTEESIKETERFVSEMLQKNYSRVKPIVTPRFSLSCSETLMGELGNIAKTRDLHIQSHISENRDEVEAVKNLYPSYKNYTSVYDKNNLLTNKTVMAHGCYLSAEELNVFHERGASIAHCPNSNLSLSSGFLNVLEVLKHEVKIGLGTDVAGGYSYSMLDAIRRAVMVSNILLINKVNEKSLTLKEVFRLATLGGSQALGLDGEIGNFEVGKEFDAILINPKASDSPIDLFYGDFFGDISEAVIQKFLYLGDDRNIEEVYVGGKQVVPFSSSV

SEQ ID NO: 821351 - protein, 513 aa, Homo sapiens; identical to SEQ ID NO: 821350

SEQ ID NO: 821352 - protein, 380 aa, Homo sapiens
MPGLVDTHIHASQYSFAGSSIDLPLLEWLTKYTFPAEHRFQNIDFAEEVYTRVVRRTLKNGTTTACYFATIHTDSSLLLADITDKFGQRAFVGKVCMDLNDTFPEYKETTEESIKETERFVSEMLQKNYSRVKPIVTPRFSLSCSETLMGELGNIAKTRDLHIQSHISENRDEVEAVKNLYPSYKNYTSVYDKNNLLTNKTVMAHGCYLSAEELNVFHERGASIAHCPNSNLSLSSGFLNVLEVLKHEVKIGLGTDVAGGYSYSMLDAIRRAVMVSNILLINKVNEKSLTLKEVFRLATLGGSQALGLDGEIGNFEVGKEFDAILINPKASDSPIDLFYGDFFGDISEAVIQKFLYLGDDRNIEEVYVGGKQVVPFSSSV

SEQ ID NO: 821353 - protein, 552 aa, Homo sapiens
SQPLGAACRVPATARVSGGRTRPEPVSARQPPAAAESPAASPPRAPSSTSRPALRSAADMCAAQMPPLAHIFRGTFVHSTWTCPMEVLRDHLLGVSDSGKIVFLEEASQQEKLAKEWCFKPCEIRELSHHEFFMPGLVDTHIHASQYSFAGSSIDLPLLEWLTKYTFPAEHRFQNIDFAEEVYTRVVRRTLKNGTTTACYFATIHTDSSLLLADITDKFGQRAFVGKVCMDLNDTFPEYKETTEESIKETERLSLCHPGWSAMARSRSLKPPPPVFKRFSCLSLPSSWDYRFVSEMLQKNYSRVKPIVTPRFSLSCSETLMGELGNIAKTRDLHIQSHISENRDEVEAVKNLYPSYKNYTSVYDKNNLLTNKTVMAHGCYLSAEELNVFHERGASIAHCPNSNLSLSSGFLNVLEVLKHEVKIGLGTDVAGGYSYSMLDAIRRAVMVSNILLINKVNEKSLTLKEVFRLATLGGSQALGLDGEIGNFEVGKEFDAILINPKASDSPIDLFYGDFFGDISEAVIQKFLYLGDDRNIEEVYVGGKQVVPFSSSV

SEQ ID NO: 821354 - protein, 513 aa, Homo sapiens; identical to SEQ ID NO: 821350

SEQ ID NO: 821355 - protein, 589 aa, Homo sapiens
MARCNSEKAHTKATTHHLSKKRPSEVINRIIPYRRPFWTGGVWWPWYVLSRVTSRHHWYMVSVLVSRPPAGRARVSGGRTRPEPVSARQPPAAAESPAASPPRAPSSTSRPALRSAADMCAAQMPPLAHIFRGTFVHSTWTCPMEVLRDHLLGVSDSGKIVFLEEASQQEKLAKEWCFKPCEIRELSHHEFFMPGLVDTHIHASQYSFAGSSIDLPLLEWLTKYTFPAEHRFQNIDFAEEVYTRVVRRTLKNGTTTACYFATIHTDSSLLLADITDKFGQRAFVGKVCMDLNDTFPEYKETTEESIKETERFVSEMLQKNYSRVKPIVTPRFSLSCSETLMGELGNIAKTRDLHIQSHISENRDEVEAVKNLYPSYKNYTSVYDKNNLLTNKTVMAHGCYLSAEELNVFHERGASIAHCPNSNLSLSSGFLNVLEVLKHEVKIGLGTDVAGGYSYSMLDAIRRAVMVSNILLINKVNEKSLTLKEVFRLATLGGSQALGLDGEIGNFEVGKEFDAILINPKASDSPIDLFYGDFFGDISEAVIQKFLYLGDDRNIEEVYVGGKQVVPFSSSVKETIHLPASSPHPPPFP

SEQ ID NO: 821356 - protein, 513 aa, Homo sapiens; identical to SEQ ID NO: 821350

SEQ ID NO: 821357 - protein, 513 aa, Homo sapiens; identical to SEQ ID NO: 821350

SEQ ID NO: 821358 - protein, 513 aa, Homo sapiens; identical to SEQ ID NO: 821350

SEQ ID NO: 821359 - protein, 494 aa, Homo sapiens
SQPLGAACRVPATARVSGGRTRPEPVSARQPPAAAESPAASPPRAPSSTSRPALRSAADMCAAQMPPLAHIFRGTFVHSTWTCPMEVLRDHLLGVSDSGKIVFLEEASQQEKLAKEWCFKPCEIRELSHHEFFMPGLVDTHIHASQYSFAGSSIDLPLLEWLTKYTFPAEHRFQNIDFAEEVYTRVVRRTLKNGTTTACYFATIHTDSSLLLADITDKFGQRAFVGKVCMDLNDTFPEYKETTEESIKETERFVSEMLQKNSHISENRDEVEAVKNLYPSYKNYTSVYDKNNLLTNKTVMAHGCYLSAEELNVFHERGASIAHCPNSNLSLSSGFLNVLEVLKHEVKIGLGTDVAGGYSYSMLDAIRRAVMVSNILLINKVNEKSLTLKEVFRLATLGGSQALGLDGEIGNFEVGKEFDAILINPKASDSPIDLFYGDFFGDISEAVIQKFLYLGDDRNIEEVYVGGKQVVPFSSSVKETIHLPASSPHPPPFP

SEQ ID NO: 821360 - protein, 121 aa, Homo sapiens
MLHTGKSADYVNLALKNGAVSLVINLGSGAFEALVEPVNGKFNDNAWHDVKVTRNLRQVTISVDGILTTTGYTQEDYTMLGSDDFFYVGGSPSTADLPGSPIQHESTFAEDPMFQSQTGQL

SEQ ID NO: 821361 - protein, 1477 aa, Homo sapiens
MGTALLQRGGCFLLCLSLLLLGCWAELGSGLEFPGAEGQWTRFPKWNACCESEMSFQLKTRSARGLVLYFDDEGFCDFLELILTRGGRLQLSFSIFCAEPATLLADTPVNDGAWHSVRIRRQFRNTTLFIDQVEAKWVEVKSKRRDMTVFSGLFVGGLPPELRAAALKLTLASVREREPFKGWIRDVRVNSSQVLPVDSGEVKLDDEPPNSGGGSPCEAGEEGEGGVCLNGGVCSVVDDQAVCDCSRTGFRGKDCSQEDNNVEGLAHLMMGDQGKSKGKEEYIATFKGSEYFCYDLSQNPIQSSSDEITLSFKTLQRNGLMLHTGKSADYVNLALKNGAVSLVINLGSGAFEALVEPVNGKFNDNAWHDVKVTRNLRQHSGIGHAMVTISVDGILTTTGYTQEDYTMLGSDDFFYVGGSPSTADLPGSPVSNNFMGCLKEVVYKNNDVRLELSRLAKQGDPKMKIHGVVAFKCENVATLDPITFETPESFISLPKWNAKKTGSISFDFRTTEPNGLILFSHGKPRHQKDAKHPQMIKVDFFAIEMLDGHLYLLLDMGSGTIKIKALLKKVNDGEWYHVDFQRDGRSGTISVNTLRTPYTAPGESEILDLDDELYLGGLPENKAGLVFPTEVWTALLNYGYVGCIRDLFIDGQSKDIRQMAEVQSTAGVKPSCSKETAKPCLSNPCKNNGMCRDGWNRYVCDCSGTGYLGRSCEREATVLSYDGSMFMKIQLPVVMHTEAEDVSLRFRSQRAYGILMATTSRDSADTLRLELDAGRVKLTVNLDCIRINCNSSKGPETLFAGYNLNDNEWHTVRVVRRGKSLKLTVDDQQAMTGQMAGDHTRLEFHNIETGIITERRYLSSVPSNFIGHLQSLTFNGMAYIDLCKNGDIDYCELNARFGFRNIIADPVTFKTKSSYVALATLQAYTSMHLFFQFKTTSLDGLILYNSGDGNDFIVVELVKGYLHYVFDLGNGANLIKGSSNKPLNDNQWHNVMISRDTSNLHTVKIDTKITTQITAGARNLDLKSDLYIGGVAKETYKSLPKLVHAKEGFQGCLASVDLNGRLPDLISDALFCNGQIERGCEGPSTTCQEDSCSNQGVCLQQWDGFSCDCSMTSFSGPLCNDPGTTYIFSKGGGQITYKWPPNDRPSTRADRLAIGFSTVQKEAVLVRVDSSSGLGDYLELHIHQGKIGVKFNVGTDDIAIEESNAIINDGKYHVVRFTRSGGNATLQVDSWPVIERYPAGRQLTIFNSQATIIIGGKEQGQPFQGQLSGLYYNGLKVLNMAAENDANIAIVGNVRLVGEVPSSMTTESTATAMQSEMSTSIMETTTTLATSTARRGKPPTKEPISQTTDDILVASAECPSDDEDIDPCEPSSGGLANPTRAGGREPYPGSAEVIRESSSTTGMVVGIVAAAALCILILLYAMYKYRNRDEGSYHVDESRNYISNSAQSNGAVVKEKQPSSAKSSNKNKKNKDKEYYV

SEQ ID NO: 821362 - protein, 442 aa, Homo sapiens
MYQRMLRCGAELGSPGGGGGGGGGGGAGGRLALLWIVPLTLSGLLGVAWGASSLGAHHIHHFHGSSKHHSVPIAIYRSPASLRGGHAGTTYIFSKGGGQITYKWPPNDRPSTRADRLAIGFSTVQKEAVLVRVDSSSGLGDYLELHIHQGKIGVKFNVGTDDIAIEESNAIINDGKYHVVRFTRSGGNATLQVDSWPVIERYPAGRQLTIFNSQATIIIGGKEQGQPFQGQLSGLYYNGLKVLNMAAENDANIAIVGNVRLVGEVPSSMTTESTATAMQSEMSTSIMETTTTLATSTARRGKPPTKEPISQTTDDILVASAECPSDDEDIDPCEPSSGGLANPTRAGGREPYPGSAEVIRESSSTTGMVVGIVAAAALCILILLYAMYKYRNRDEGSYHVDESRNYISNSAQSNGAVVKEKQPSSAKSSNKNKKNKDKEYYV

SEQ ID NO: 821363 - protein, 1484 aa, Homo sapiens
MGTALLQRGGCFLLCLSLLLLGCWAELGSGLEFPGAEGQWTRFPKWNACCESEMSFQLKTRSARGLVLYFDDEGFCDFLELILTRGGRLQLSFSIFCAEPATLLADTPVNDGAWHSVRIRRQFRNTTLFIDQVEAKWVEVKSKRRDMTVFSGLFVGGLPPELRAAALKLTLASVREREPFKGWIRDVRVNSSQVLPVDSGEVKLDDEPPNSGGGSPCEAGEEGEGGVCLNGGVCSVVDDQAVCDCSRTGFRGKDCSQEDNNVEGLAHLMMGDQGKSKGKEEYIATFKGSEYFCYDLSQNPIQSSSDEITLSFKTLQRNGLMLHTGKSADYVNLALKNGAVSLVINLGSGAFEALVEPVNGKFNDNAWHDVKVTRNLRQHSGIGHAMVNKLHCSVTISVDGILTTTGYTQEDYTMLGSDDFFYVGGSPSTADLPGSPVSNNFMGCLKEVVYKNNDVRLELSRLAKQGDPKMKIHGVVAFKCENVATLDPITFETPESFISLPKWNAKKTGSISFDFRTTEPNGLILFSHGKPRHQKDAKHPQMIKVDFFAIEMLDGHLYLLLDMGSGTIKIKALLKKVNDGEWYHVDFQRDGRSGTISVNTLRTPYTAPGESEILDLDDELYLGGLPENKAGLVFPTEVWTALLNYGYVGCIRDLFIDGQSKDIRQMAEVQSTAGVKPSCSKETAKPCLSNPCKNNGMCRDGWNRYVCDCSGTGYLGRSCEREATVLSYDGSMFMKIQLPVVMHTEAEDVSLRFRSQRAYGILMATTSRDSADTLRLELDAGRVKLTVNLDCIRINCNSSKGPETLFAGYNLNDNEWHTVRVVRRGKSLKLTVDDQQAMTGQMAGDHTRLEFHNIETGIITERRYLSSVPSNFIGHLQSLTFNGMAYIDLCKNGDIDYCELNARFGFRNIIADPVTFKTKSSYVALATLQAYTSMHLFFQFKTTSLDGLILYNSGDGNDFIVVELVKGYLHYVFDLGNGANLIKGSSNKPLNDNQWHNVMISRDTSNLHTVKIDTKITTQITAGARNLDLKSDLYIGGVAKETYKSLPKLVHAKEGFQGCLASVDLNGRLPDLISDALFCNGQIERGCEGPSTTCQEDSCSNQGVCLQQWDGFSCDCSMTSFSGPLCNDPGTTYIFSKGGGQITYKWPPNDRPSTRADRLAIGFSTVQKEAVLVRVDSSSGLGDYLELHIHQGKIGVKFNVGTDDIAIEESNAIINDGKYHVVRFTRSGGNATLQVDSWPVIERYPAGRQLTIFNSQATIIIGGKEQGQPFQGQLSGLYYNGLKVLNMAAENDANIAIVGNVRLVGEVPSSMTTESTATAMQSEMSTSIMETTTTLATSTARRGKPPTKEPISQTTDDILVASAECPSDDEDIDPCEPSSGGLANPTRAGGREPYPGSAEVIRESSSTTGMVVGIVAAAALCILILLYAMYKYRNRDEGSYHVDESRNYISNSAQSNGAVVKEKQPSSAKSSNKNKKNKDKEYYV

SEQ ID NO: 821364 - protein, 1484 aa, Homo sapiens; identical to SEQ ID NO: 821363

SEQ ID NO: 821365 - protein, 144 aa, Homo sapiens
TYGEQAKTQIRKQTTDDILVASAECPSDDEDIDPCEPSSGGLANPTRAGGREPYPGSAEVIRESSSTTGMVVGIVAAAALCILILLYAMYKYRNRDEGSYHVDESRNYISNSAQSNGAVVKEKQPSSAKSSNKNKKNKDKEYYV

SEQ ID NO: 821366 - protein, 182 aa, Homo sapiens
SGSQGALLSPVLISEDGLNFLGFPLRIKKKALSTQGSQTDMDMRWHCENSQTTDDILVASAECPSDDEDIDPCEPSSGGLANPTRAGGREPYPGSAEVIRESSSTTGMVVGIVAAAALCILILLYAMYKYRNRDEGSYHVDESRNYISNSAQSNGAVVKEKQPSSAKSSNKNKKNKDKEYYV

SEQ ID NO: 821367 - protein, 145 aa, Homo sapiens
MIVSFLRPPEPCGTTTDDILVASAECPSDDEDIDPCEPSSGGLANPTRAGGREPYPGSAEVIRESSSTTGMVVGIVAAAALCILILLYAMYKYRNRDEGSYHVDESRNYISNSAQSNGAVVKEKQPSSAKSSNKNKKNKDKEYYV

SEQ ID NO: 821368 - protein, 1140 aa, Homo sapiens
MGTALLQRGGCFLLCLSLLLLGCWAELGSGLEFPGAEGQWTRFPKWNACCESEMSFQLKTRSARGLVLYFDDEGFCDFLELILTRGGRLQLSFSIFCAEPATLLADTPVNDGAWHSVRIRRQFRNTTLFIDQVEAKWVEVKSKRRDMTVFSGLFVGGLPPELRAAALKLTLASVREREPFKGWIRDVRVNSSQVLPVDSGEVKLDDEPPNSGGGSPCEAGEEGEGGVCLNGGVCSVVDDQAVCDCSRTGFRGKDCSQEDNNVEGLAHLMMGDQGKSKGKEEYIATFKGSEYFCYDLSQNPIQSSSDEITLSFKTLQRNGLMLHTGKSADYVNLALKNGAVSLVINLGSGAFEALVEPVNGKFNDNAWHDVKVTRNLRQHSGIGHAMVNKLHCSVTISVDGILTTTGYTQEDYTMLGSDDFFYVGGSPSTADLPGSPVSNNFMGCLKEVVYKNNDVRLELSRLAKQGDPKMKIHGVVAFKCENVATLDPITFETPESFISLPKWNAKKTGSISFDFRTTEPNGLILFSHGKPRHQKDAKHPQMIKVDFFAIEMLDGHLYLLLDMGSGTIKIKALLKKVNDGEWYHVDFQRDGRSGTISVNTLRTPYTAPGESEILDLDDELYLGGLPENKAGLVFPTEVWTALLNYGYVGCIRDLFIDGQSKDIRQMAEVQSTAGVKPSCSKETAKPCLSNPCKNNGMCRDGWNRYVCDCSGTGYLGRSCEREATVLSYDGSMFMKIQLPVVMHTEAEDVSLRFRSQRAYGILMATTSRDSADTLRLELDAGRVKLTVNLDCIRINCNSSKGPETLFAGYNLNDNEWHTVRVVRRGKSLKLTVDDQQAMTGQMAGDHTRLEFHNIETGIITERRYLSSVPSNFIGHLQSLTFNGMAYIDLCKNGDIDYCELNARFGFRNIIADPVTFKTKSSYVALATLQAYTSMHLFFQFKTTSLDGLILYNSGDGNDFIVVELVKGYLHYVFDLGNGANLIKGSSNKPLNDNQWHNVMISRDTSNLHTVKIDTKITTQITAGARNLDLKSDLYIGGVAKETYKSLPKLVHAKEGFQGCLASVDLNGRLPDLISDALFCNGQIERGCEGPSTTCQEDSCSNQGVCLQQWDGFSCDCSMTSFSGPLCNDRKYLSEYGLILI

SEQ ID NO: 821369 - protein, 284 aa, Homo sapiens
MGTALLQRGGCFLLCLSLLLLGCWAELGSGLEFPGAEGQWTRFPKWNACCESEMSFQLKTRSARGLVLYFDDEGFCDFLELILTRGGRLQLSFSIFCAEPATLLADTPVNDGAWHSVRIRRQFRNTTLFIDQVEAKWVEVKSKRRDMTVFSGLFVGGLPPELRAAALKLTLASVREREPFKGWIRDVRVNSSQVLPVDSGEVKLDDEPPNSGGGSPCEAGEEGEGGVCLNGGVCSVVDDQAVCDCSRTGFRGKDCSQGLAHLMMGDQGMGSVPFPLCFQCFLVL

SEQ ID NO: 821370 - protein, 326 aa, Homo sapiens
MGTALLQRGGCFLLCLSLLLLGCWAELGSGLEFPGAEGQWTRFPKWNACCESEMSFQLKTRSARGLVLYFDDEGFCDFLELILTRGGRLQLSFSIFCAEPATLLADTPVNDGAWHSVRIRRQFRNTTLFIDQVEAKWVEVKSKRRDMTVFSGLFVGGLPPELRAAALKLTLASVREREPFKGWIRDVRVNSSQVLPVDSGEVKLDDEPPNSGGGSPCEAGEEGEGGVCLNGGVCSVVDDQAVCDCSRTGFRGKDCSQEIKFGLQCVLPVLLHDNDQGKYCCINTAKPLTEKDNNVEGLAHLMMGDQGKSKEKLEIFRWIRKDFTNF

SEQ ID NO: 821371 - protein, 456 aa, Homo sapiens
MGTALLQRGGCFLLCLSLLLLGCWAELGSGLEFPGAEGQWTRFPKWNACCESEMSFQLKTRSARGLVLYFDDEGFCDFLELILTRGGRLQLSFSIFCAEPATLLADTPVNDGAWHSVRIRRQFRNTTLFIDQVEAKWVEVKSKRRDMTVFSGLFVGGLPPELRAAALKLTLASVREREPFKGWIRDVRVNSSQVLPVDSGEVKLDDEPPNSGGGSPCEAGEEGEGGVCLNGGVCSVVDDQAVCDCSRTGFRGKDCSQEDNNVEGLAHLMMGDQGKSKGKEEYIATFKGSEYFCYDLSQNPIQSSSDEITLSFKTLQRNGLMLHTGKSADYVNLALKNGAVSLVINLGSGAFEALVEPVNGKFNDNAWHDVKVTRNLRQHSGIGHAMVNKLHCSVTISVDGILTTTGYTQEDYTMLGSDDFFYVGGSPSTADLPGSPIQHESTFAEDPMFQSQTGQL

SEQ ID NO: 821372 - protein, 265 aa, Homo sapiens
MGTALLQRGGCFLLCLSLLLLGCWAELGSGLEFPGAEGQWTRFPKWNACCESEMSFQLKTRSARGLVLYFDDEGFCDFLELILTRGGRLQLSFSIFCAEPATLLADTPVNDGAWHSVRIRRQFRNTTLFIDQVLPVDSGEVKLDDEPPNSGGGSPCEAGEEGEGGVCLNGGVCSVVDDQAVCDCSRTGFRGKDCSQEIKFGLQCVLPVLLHDNDQGKYCCINTAKPLTEKDNNVEGLAHLMMGDQGKSKEKLEIFRWIRKDFTNF

SEQ ID NO: 821373 - protein, 443 aa, Homo sapiens
MGTALLQRGGCFLLCLSLLLLGCWAELGSGLEFPGAEGQWTRFPKWNACCESEMSFQLKTRSARGLVLYFDDEGFCDFLELILTRGGRLQLSFSIFCAEPATLLADTPVNDGAWHSVRIRRQFRNTTLFIDQVEAKWVEVKSKRRDMTVFSGLFVGGLPPELRAAALKLTLASVREREPFKGWIRDVRVNSSQVLPVDSGEVKLDDEPPNSGGGSPCEAGEEGEGGVCLNGGVCSVVDDQAVCDCSRTGFRGKDCSQEDNNVEGLAHLMMGDQGKSKGKEEYIATFKGSEYFCYDLSQNPIQSSSDEITLSFKTLQRNGLMLHTGKSADYVNLALKNGAVSLVINLGSGAFEALVEPVNGKFNDNAWHDVKVTRNLRQVTISVDGILTTTGYTQEDYTMLGSDDFFYVGGSPSTADLPGSPVSNNFMGCLKEIKEKKGNHSTY

SEQ ID NO: 821374 - protein, 1602 aa, Homo sapiens
ASGAAARPERRGGEDETGTRPGQEGAGQPREPRTPGKMLSWRLQTGPEKAELQELNARLYDYVCRVRELERENLLLEEELRGRRGREGLWAEGQARCAEEARSLRQQLDELSWATALAEGERDALRRELRELQRLDAEERAARGRLDAELGAQQRELQEALGARAALEALLGRLQAERRGLDAAHERDVRELRARAASLTMHFRARATGPAAPPPRLREVHDSYALLVAESWRETVQLYEDEVRELEEALRRGQESRLQAEEETRLCAQEAEALRREALGLEQLRARLEDALLRMREEYGIQAEERQRAIDCLEDEKATLTLAMADWLRDYQDLLQVKTGLSLEVATYRALLEGESNPEIVIWAEHVENMPSEFRNKSYHYTDSLLQRENERNLFSRQKAPLASFNHSSALYSNLSGHRGSQTGTSIGGDARRGFLGSGYSSSATTQQENSYGKAVSSQTNVRTFSPTYGLLRNTEAQVKTFPDRPKAGDTREVPVYIGEDSTIARESYRDRRDKVAAGASESTRSNERTVILGKKTEVKATREQERNRPETIRTKPEEKMFDSKEKASEERNLRWEELTKLDKEARQRESQQMKEKAKEKDSLKEKSVREREVPISLEVSQDRRAEVSPKGLQTPVKDAGGGTGREAEARELRFRLGTSDATGSLQGDSMTETVAENIVTSILKQFTQSPETEASADSFPDTKVTYVDRKELPGERKTKTEIVVESKLTEDVDVSDEAGLDYLLSKDIKEVGLKGKSAEQMIGDIINLGLKGREGRAKVVNVEIVEEPVSYVSGEKPEEFSVPFKVEEVEDVSPGPWGLVKEEEGYGESDVTFSVNQHRRTKQPQENTTHVEEVTEAGDSEGEQSYFVSTPDEHPGGHDRDDGSVYGQIHIEEESTIRYSWQDEIVQGTRRRTQKDGAVGEKVVKPLDVPAPSLEGDLGSTHWKEQARSGEFHAEPTVIEKEIKIPHEFHTSMKGISSKEPRQQLVEVIGQLEETLPERMREELSALTREGQGGPGSVSVDVKKVQGAGGSSVTLVAEVNVSQTVDADRLDLEELSKDEASEMEKAVESVVRESLSRQRSPAPGSPDEEGGAEAPAAGIRFRRWATRELYIPSGESEVAGGASHSSGQRTPQGPVSATVEVSSPTGFAQSQVLEDVSQAARHIKLGPSEVWRTERMSYEGPTAEVVEVSAGGDLSQAASPTGASRSVRHVTLGPGQSPLSREVIFLGPAPACPEAWGSPEPGPAESSADMDGSGRHSTFGCRQFHAEKEIIFQGPISAAGKVGDYFATEESVGTQTSVRQLQLGPKEGFSGQIQFTAPLSDKVELGVIGDSVHMEGLPGSSTSIRHISIGPQRHQTTQQIVYHGLVPQLGESGDSESTVHGEGSADVHQATHSHTSGRQTVMTEKSTFQSVVSESPQEDSAGDTSGAEMTSGVSRSFRHIRLGPTETETSEHIAIRGPVSRTFVLAGSADSPELGKLADSSRTLRHIAPGPKETSFTFQMDVSNVEAIRSRTQEAGALGVSDRGSWRDADSRNDQAVGVSFKASAGEGDQAHREQGKEQAMFDKKVQLQRMVDQRSVISDEKKVALLYLDNEEEENDGHWF

SEQ ID NO: 821375 - protein, 1602 aa, Homo sapiens; identical to SEQ ID NO: 821374

SEQ ID NO: 821376 - protein, 1290 aa, Homo sapiens
ASGAAARPERRGGEDETGTRPGQEGAGQPREPRTPGKMLSWRLQTGPEKAELQELNARLYDYVCRVRELERENLLLEEELRGRRGREGLWAEGQARCAEEARSLRQQLDELSWATALAEGERDALRRELRELQRLDAEERAARGRLDAELGAQQRELQEALGARAALEALLGRLQAERRGLDAAHERDVRELRARAASLTMHFRARATGPAAPPPRLREVHDSYALLVAESWRETVQLYEDEVRELEEALRRGQESRLQAEEETRLCAQEAEALRREALGLEQLRARLEDALLRMREEYGIQAEERQRAIDCLEDEKATLTLAMADWLRDYQDLLQVKTGLSLEVATYRALLEGESNPEIVIWAEHVENMPSEFRNKSYHYTDSLLQRENERNLFSRQKAPLASFNHSSALYSNLSGHRGSQTGTSIGGDARRGFLGSGYSSSATTQQENSYGKAVSSQTNVRTFSPTYGLLRNTEAQVKTFPDRPKAGDTREVPVYIGEDSTIARESYRDRRDKVAAGASESTRSNERTVILGKKTEVKATREQERNRPETIRTKPEEKMFDSKEKASEERNLRWEELTKLDKEARQRESQQMKEKAKEKDSLKEKSVREREVPISLEVSQDRRAEVSPKGLQTPVKDAGGGTGREAEARELRFRLGTSDATGSLQGDSMTETVAENIVTSILKQFTQSPETEASADSFPDTKVTYVDRKELPGERKTKTEIVVESKLTEDVDVSDEAGLDYLLSKDIKEVGLKGKSAEQMIGDIINLGLKGREGRAKVVNVEIVEEPVSYVSGEKPEEFSVPFKVEEVEDVSPGPWGLVKEEEGYGESDVTFSVNQHRRTKQPQENTTHVEEVTEAGDSEGEQSYFVSTPDEHPGGHDRDDGSVYGQIHIEEESTIRYSWQDEIVQGTRRRTQKDGAVGEKVVKPLDVPAPSLEGDLGSTHWKEQARSGEFHAEPTVIEKEIKIPHEFHTSMKGISSKEPRQQLVEVIGQLEETLPERMREELSALTREGQGGPGSVSVDVKKVQGAGGSSVTLVAEVNVSQTVDADRLDLEELSKDEASEMEKAVESVVRESLSRQRSPAPGSPDEEGGAEAPAAGIRFRRWATRELYIPSGESEVAGGASHSSGQRTPQGPVSATVEVSSPTGFAQSQVLEDVSQAARHIKLGPSEVWRTERMSYEGPTAEVVEMDVSNVEAIRSRTQEAGALGVSDRGSWRDADSRNDQAVGVSFKASAGEGDQAHREQGKEQAMFDKKVQLQRMVDQRSVISDEKKVALLYLDNEEEENDGHWF

SEQ ID NO: 821377 - protein, 1290 aa, Homo sapiens; identical to SEQ ID NO: 821376

SEQ ID NO: 821378 - protein, 1226 aa, Homo sapiens
GLEDPLPLLLQRENERNLFSRQKAPLASFNHSSALYSNLSGHRGSQTGTSIGGDARRGFLGSGYSSSATTQQENSYGKAVSSQTNVRTFSPTYGLLRNTEAQVKTFPDRPKAGDTREVPVYIGEDSTIARESYRDRRDKVAAGASESTRSNERTVILGKKTEVKATREQERNRPETIRTKPEEKMFDSKEKASEERNLRWEELTKLDKEARQRESQQMKEKAKEKDSLKEKSVREREVPISLEVSQDRRAEVSPKGLQTPVKDAGGGTGREAEARELRFRLGTSDATGSLQGDSMTETVAENIVTSILKQFTQSPETEASADSFPDTKVTYVDRKELPGERKTKTEIVVESKLTEDVDVSDEAGLDYLLSKDIKEVGLKGKSAEQMIGDIINLGLKGREGRAKVVNVEIVEEPVSYVSGEKPEEFSVPFKVEEVEDVSPGPWGLVKEEEGYGESDVTFSVNQHRRTKQPQENTTHVEEVTEAGDSEGEQSYFVSTPDEHPGGHDRDDGSVYGQIHIEEESTIRYSWQDEIVQGTRRRTQKDGAVGEKVVKPLDVPAPSLEGDLGSTHWKEQARSGEFHAEPTVIEKEIKIPHEFHTSMKGISSKEPRQQLVEVIGQLEETLPERMREELSALTREGQGGPGSVSVDVKKVQGAGGSSVTLVAEVNVSQTVDADRLDLEELSKDEASEMEKAVESVVRESLSRQRSPAPGSPDEEGGAEAPAAGIRFRRWATRELYIPSGESEVAGGASHSSGQRTPQGPVSATVEVSSPTGFAQSQVLEDVSQAARHIKLGPSEVWRTERMSYEGPTAEVVEVSAGGDLSQAASPTGASRSVRHVTLGPGQSPLSREVIFLGPAPACPEAWGSPEPGPAESSADMDGSGRHSTFGCRQFHAEKEIIFQGPISAAGKVGDYFATEESVGTQTSVRQLQLGPKEGFSGQIQFTAPLSDKVELGVIGDSVHMEGLPGSSTSIRHISIGPQRHQTTQQIVYHGLVPQLGESGDSESTVHGEGSADVHQATHSHTSGRQTVMTEKSTFQSVVSESPQEDSAGDTSGAEMTSGVSRSFRHIRLGPTETETSEHIAIRGPVSRTFVLAGSADSPELGKLADSSRTLRHIAPGPKETSFTFQMDVSNVEAIRSRTQEAGALGVSDRGSWRDADSRNDQAVGVSFKASAGEGDQAHREQGKEQAMFDKKVQLQRMVDQRSVISDEKKVALLYLDNEEEENDGHWF

SEQ ID NO: 821379 - protein, 1209 aa, Homo sapiens
TTTKFAAASTSFNHSSALYSNLSGHRGSQTGTSIGGDARRGFLGSGYSSSATTQQENSYGKAVSSQTNVRTFSPTYGLLRNTEAQVKTFPDRPKAGDTREVPVYIGEDSTIARESYRDRRDKVAAGASESTRSNERTVILGKKTEVKATREQERNRPETIRTKPEEKMFDSKEKASEERNLRWEELTKLDKEARQRESQQMKEKAKEKDSLKEKSVREREVPISLEVSQDRRAEVSPKGLQTPVKDAGGGTGREAEARELRFRLGTSDATGSLQGDSMTETVAENIVTSILKQFTQSPETEASADSFPDTKVTYVDRKELPGERKTKTEIVVESKLTEDVDVSDEAGLDYLLSKDIKEVGLKGKSAEQMIGDIINLGLKGREGRAKVVNVEIVEEPVSYVSGEKPEEFSVPFKVEEVEDVSPGPWGLVKEEEGYGESDVTFSVNQHRRTKQPQENTTHVEEVTEAGDSEGEQSYFVSTPDEHPGGHDRDDGSVYGQIHIEEESTIRYSWQDEIVQGTRRRTQKDGAVGEKVVKPLDVPAPSLEGDLGSTHWKEQARSGEFHAEPTVIEKEIKIPHEFHTSMKGISSKEPRQQLVEVIGQLEETLPERMREELSALTREGQGGPGSVSVDVKKVQGAGGSSVTLVAEVNVSQTVDADRLDLEELSKDEASEMEKAVESVVRESLSRQRSPAPGSPDEEGGAEAPAAGIRFRRWATRELYIPSGESEVAGGASHSSGQRTPQGPVSATVEVSSPTGFAQSQVLEDVSQAARHIKLGPSEVWRTERMSYEGPTAEVVEVSAGGDLSQAASPTGASRSVRHVTLGPGQSPLSREVIFLGPAPACPEAWGSPEPGPAESSADMDGSGRHSTFGCRQFHAEKEIIFQGPISAAGKVGDYFATEESVGTQTSVRQLQLGPKEGFSGQIQFTAPLSDKVELGVIGDSVHMEGLPGSSTSIRHISIGPQRHQTTQQIVYHGLVPQLGESGDSESTVHGEGSADVHQATHSHTSGRQTVMTEKSTFQSVVSESPQEDSAGDTSGAEMTSGVSRSFRHIRLGPTETETSEHIAIRGPVSRTFVLAGSADSPELGKLADSSRTLRHIAPGPKETSFTFQMDVSNVEAIRSRTQEAGALGVSDRGSWRDADSRNDQAVGVSFKASAGEGDQAHREQGKEQAMFDKKVQLQRMVDQRSVISDEKKVALLYLDNEEEENDGHWF

SEQ ID NO: 821380 - protein, 841 aa, Homo sapiens
MIGDIINLGLKGREGRAKVVNVEIVEEPVSYVSGEKPEEFSVPFKVEEVEDVSPGPWGLVKEEEGYGESDVTFSVNQHRRTKQPQENTTHVEEVTEAGDSEGEQSYFVSTPDEHPGGHDRDDGSVYGQIHIEEESTIRYSWQDEIVQGTRRRTQKDGAVGEKVVKPLDVPAPSLEGDLGSTHWKEQARSGEFHAEPTVIEKEIKIPHEFHTSMKGISSKEPRQQLVEVIGQLEETLPERMREELSALTREGQGGPGSVSVDVKKVQGAGGSSVTLVAEVNVSQTVDADRLDLEELSKDEASEMEKAVESVVRESLSRQRSPAPGSPDEEGGAEAPAAGIRFRRWATRELYIPSGESEVAGGASHSSGQRTPQGPVSATVEVSSPTGFAQSQVLEDVSQAARHIKLGPSEVWRTERMSYEGPTAEVVEVSAGGDLSQAASPTGASRSVRHVTLGPGQSPLSREVIFLGPAPACPEAWGSPEPGPAESSADMDGSGRHSTFGCRQFHAEKEIIFQGPISAAGKVGDYFATEESVGTQTSVRQLQLGPKEGFSGQIQFTAPLSDKVELGVIGDSVHMEGLPGSSTSIRHISIGPQRHQTTQQIVYHGLVPQLGESGDSESTVHGEGSADVHQATHSHTSGRQTVMTEKSTFQSVVSESPQEDSAGDTSGAEMTSGVSRSFRHIRLGPTETETSEHIAIRGPVSRTFVLAGSADSPELGKLADSSRTLRHIAPGPKETSFTFQMDVSNVEAIRSRTQEAGALGVSDRGSWRDADSRNDQAVGVSFKASAGEGDQAHREQGKEQAMFDKKVQLQRMVDQRSVISDEKKVALLYLDNEEEENDGHWF

SEQ ID NO: 821381 - protein, 154 aa, Homo sapiens
MGNCLKSPTSDDISLLHESQSDRASFGEGTEPDQEPPPPYQEQVPVPVYHPTPSQTRLATQLTEEEQIRIAQRIGLIQHLPKGVYDPGRDGSEKKIRECVICMMDFVYGDPIRFLPCMHIYHLDCIDDWLMRSFTCPSCMEPVDAALLSSYETN

SEQ ID NO: 821382 - protein, 154 aa, Homo sapiens; identical to SEQ ID NO: 821381

SEQ ID NO: 821383 - protein, 154 aa, Homo sapiens; identical to SEQ ID NO: 821381

SEQ ID NO: 821384 - protein, 154 aa, Homo sapiens; identical to SEQ ID NO: 821381

SEQ ID NO: 821385 - protein, 152 aa, Homo sapiens
MTRPLGGTVGRWSRLRLIPGLSPDPTSPTEADRGVCERPHRCFLLPQITHPSSGRWGTASNPPPRMTSPCFTSLSPTGLALARGRSRIRSRRRHIRCVICMMDFVYGDPIRFLPCMHIYHLDCIDDWLMRSFTCPSCMEPVDAALLSSYETN

SEQ ID NO: 821386 - protein, 154 aa, Homo sapiens; identical to SEQ ID NO: 821381

SEQ ID NO: 821387 - protein, 154 aa, Homo sapiens; identical to SEQ ID NO: 821381

SEQ ID NO: 821388 - protein, 154 aa, Homo sapiens; identical to SEQ ID NO: 821381

SEQ ID NO: 821389 - protein, 154 aa, Homo sapiens; identical to SEQ ID NO: 821381

SEQ ID NO: 821390 - protein, 154 aa, Homo sapiens; identical to SEQ ID NO: 821381

SEQ ID NO: 821391 - protein, 148 aa, Homo sapiens
MGNCLKSPTSDDISLLHESQSDRASFGEGTEPDQEPPPPYQEQVPVPVYHPTPSQTRLATQLTEEEQIRIAQRIGLIQHLPKGVYDPGRDGSEKKIRECVICMMDFVYGDPIRFLPCMHIYHLDCIDDWLMRSFTCPSAALLSSYETN

SEQ ID NO: 821392 - protein, 707 aa, Homo sapiens
IFDFKVKENRLRREKELEYQRIEKTLKKSAFLEAQCLVQEEKKRKALEAKKEEEEIQREMVKLRREIIERRRTVKAAWKIEKKRQEENSQNSSEKVMFQSTHILPDEEKMVKERKRKLKEVLIQTFKENQQCQKRYFAAWHKLILDHRIKLGKAGTLSDWKIQLKVLRAWRDYTRFQKLERETQALENDLREENRKQQLATEYNRKQVLRHCFTEWQHWHGAELLKRELALTKEETRKKMDALLQAASLGKLSANGLSGISLPEEATAMVGPPVKNGQETAVPPLWEKPPLGSSGCMLSPPLGRTTTGNLQGSLQNVSLSAPGNKQHKTLGAEPSQQPGSNETLRTTSQKAEPLCLGHFHNRHVFQQQLIEKQKKKLQEQQKTILELKKNLQLAEAQWAAEHALAVTEAQSHLLSKPREEEPRTCQMLVNSPVASPGTEGRSDSRNSLSGLRRKPKQLMTPHPILKAMEERAIQRAECRRILAEKKKKQEEEKLAQLKAQEEERQKREAEEKEAQLERKREEKRLKKMKELEKQKRIKRNQQLEAIAKEHYERVLLRKKGLEPWKRLRMQSKQNIQVAEEHYSLFLQRKYMLTWFQRSQESLARKMAQADQFYSQILLKRVIQSWLQYVIDLQEEVRKFCVHFLQKKIFRAWFNMVREVKIDSQGKHEIAAEHSDRRILWITLRTWKKFVKFMKEESSKRRKATATS

SEQ ID NO: 821393 - protein, 103 aa, Homo sapiens
MKELEKQKRIKRNQQLEAIAKEHYERVLLRKKGLEPWKRLRMQSKQNIQVAEEHYSLFLQRKYMLTWFQRSQESLARKMAQADQFYSQILLKRVIQSWLQVRT

SEQ ID NO: 821394 - protein, 240 aa, Homo sapiens
MEERAIQRAECRRILAEKKKKQEEEKLAQLKAQEEERQKREAEEKEAQLERKREEKRLKKMKELEKQKRIKRNQQLEAIAKEHYERVLLRKKGLEPWKRLRMQSKQNIQVAEEHYSLFLQRKYMLTWFQRSQESLARKMAQADQFYSQILLKRVIQSWLQYVIDLQEEVRKFCVHFLQKKIFRAWFNMVREVKIDSQGKHEIAAEHSDRRILWITLRTWKKFVKFMKEESSKRRKATATS

SEQ ID NO: 821395 - protein, 565 aa, Homo sapiens
MCFKVKENRLRREKELEYQRIEKTLKKSAFLEAQCLVQEEKKRKALEAKKEEEEIQREMVKLRREIIERRRTVKAAWKIEKKRQEENSQNSSEKVMFQSTHILPDEEKMVKERKRKLKEVLIQTFKENQQCQKRYFAAWHKLILDHRIKLGKAGTLSDWKIQLKVLRAWRDYTRFQKLERETQALENDLREENRKQQLATEYNRKQVLRHCFTEWQHWHGAELLKRELALTKEETSGTAENNSRAEEKPAAGRGSVAAEHALAVTEAQSHLLSKPREEEPRTCQMLVNSPVASPGTEGRSDSRNSLSGLRRKPKQLMTPHPILKAMEERAIQRAECRRILAEKKKKQEEEKLAQLKAQEEERQKREAEEKEAQLERKREEKRLKKMKELEKQKRIKRNQQLEAIAKEHYERVLLRKKGLEPWKRLRMQSKQNIQVAEEHYSLFLQRKYMLTWFQRSQESLARKMAQADQFYSQILLKRVIQSWLQYVIDLQEEVRKFCVHFLQKKIFRAWFNMVREVKIDSQGKHEIAAEHSDRRILWITLRTWKKFVKFMKEESSKRRKATATS

SEQ ID NO: 821396 - protein, 482 aa, Homo sapiens
IFDFKVKENRLRREKELEYQRIEKTLKKSAFLEAQCLVQEEKKRKALEAKKEEEEIQREMVKLRREIIERRRTVKAAWKIEKKRQEENSQNSSEKVMFQSTHILPDEEKMVKERKRKLKEVLIQTFKENQQCQKRYFAAWHKLILDHRIKLGKAGTLSDWKIQLKVLRAWRDYTRFQKLERETQALENDLREENRKQQLATEYNRKQVLRHCFTEWQHWHGAELLKRELALTKEETRKKMDALLQAASLGKLSANGLSGISLPEEATAMVGPPVKNGQETAVPPLWEKPPLGSSGCMLSPPLGRTTTGNLQGSLQNVSLSAPGNKQHKTLGAEPSQQPGSNETLRTTSQKAEPLCLGHFHNRHVFQQQLIEKQKKKLQEQQKTILELKKNLQLAEAQWAAEHALAVTEAQSHLLSKPREEEPRTCQMLVNSPVASPGTEGRSDSRNSLSGLRRKPKQLMTPHPILKGRAVLGGGLGGCYLLS

SEQ ID NO: 821397 - protein, 212 aa, Homo sapiens
IFDFKVKENRLRREKELEYQRIEKTLKKSAFLEAQCLVQEEKKRKALEAKKEEEEIQREMVKLRREIIERRRTVKAAWKIEKKRQEENSQNSSEKVMFQSTHILPDEEKMVKERKRKLKEVLIQTFKENQQCQKRYFAAWHKLILDHRIKLGKAGTLSDWKIQLKVLRAWRDYTRFQKLERETQALENDLREENRNTLALVYEQSRPAYDAA

SEQ ID NO: 821398 - protein, 100 aa, Homo sapiens
ARRKMISSGRVNSRKVGSEMTVWEMVCTGSNTHVTSLGRQDLSTGSEGWSAAQPQVHLQAKSLLPVTVVCTCLYPQTFLMLGICSIRPTCIKLSQMNKSI

SEQ ID NO: 821399 - protein, 606 aa, Homo sapiens
LLPGGIIERRGPGPALAAEARPERGARAAAPGPRPRLCPPPPTARRPPPMERAAPSRRVPLPLLLLGGLALLAAGVDADVLLEACCADGHRMATHQKDCSLPYATESKECRMVQEQCCHSQLEELHCATGISLANEQDRCATPHGDNASLEATFVKRCCHCCLLGRAAQAQGQSCEYSLMVGYQCGQVFRACCVKSQETGDLDVGGLQETDKIIEVEEEQEDPYLNDRCRGGGPCKQQCRDTGDEVVCSCFVGYQLLSDGVSCEDVNECITGSHSCRLGESCINTVGSFRCQRDSSCGTGYELTEDNSCKDIDECESGIHNCLPDFICQNTLGSFRCRPKLQCKSGFIQDALGNCIDINECLSISAPCPIGHTCINTEGSYTCQKNVPNCGRGYHLNEEGTRCVDVDECAPPAEPCGKGHRCVNSPGSFRCECKTGYYFDGISRMCVDVNECQRYPGRLCGHKCENTLGSYLCSCSVGFRLSVDGRSCEDINECSSSPCSQECANVYGSYQCYCRRGYQLSDVDGVTCEDIDECALPTGGHICSYRCINIPGSFQCSCPSSGYRLAPNGRNCQDIDECVTGIHNCSINETCFNIQGGVPLPGLRVP

SEQ ID NO: 821400 - protein, 606 aa, Homo sapiens; identical to SEQ ID NO: 821399

SEQ ID NO: 821401 - protein, 519 aa, Homo sapiens
SVGSARYERTARCLICYVNPKECRMVQEQCCHSQLEELHCATGISLANEQDRCATPHGDNASLEATFVKRCCHCCLLGRAAQAQGQSCEYSLMVGYQCGQVFRACCVKSQETGDLDVGGLQETDKIIEVEEEQEDPYLNDRCRGGGPCKQQCRDTGDEVVCSCFVGYQLLSDGVSCEDVNECITGSHSCRLGESCINTVGSFRCQRDSSCGTGYELTEDNSCKDIDECESGIHNCLPDFICQNTLGSFRCRPKLQCKSGFIQDALGNCIDINECLSISAPCPIGHTCINTEGSYTCQKNVPNCGRGYHLNEEGTRCVDVDECAPPAEPCGKGHRCVNSPGSFRCECKTGYYFDGISRMCVDVNECQRYPGRLCGHKCENTLGSYLCSCSVGFRLSVDGRSCEDINECSSSPCSQECANVYGSYQCYCRRGYQLSDVDGVTCEDIDECALPTGGHICSYRCINIPGSFQCSCPSSGYRLAPNGRNCQDIDECVTGIHNCSINETCFNIQGGVPLPGLRVP

SEQ ID NO: 821402 - protein, 448 aa, Homo sapiens
GTRGRPPQQTAMAAPLHKCGLMVGYQCGQVFRACCVKSQETGDLDVGGLQETDKIIEVEEEQEDPYLNDRCRGGGPCKQQCRDTGDEVVCSCFVGYQLLSDGVSCEDVNECITGSHSCRLGESCINTVGSFRCQRDSSCGTGYELTEDNSCKDIDECESGIHNCLPDFICQNTLGSFRCRPKLQCKSGFIQDALGNCIDINECLSISAPCPIGHTCINTEGSYTCQKNVPNCGRGYHLNEEGTRCVDVDECAPPAEPCGKGHRCVNSPGSFRCECKTGYYFDGISRMCVDVNECQRYPGRLCGHKCENTLGSYLCSCSVGFRLSVDGRSCEDINECSSSPCSQECANVYGSYQCYCRRGYQLSDVDGVTCEDIDECALPTGGHICSYRCINIPGSFQCSCPSSGYRLAPNGRNCQDIDECVTGIHNCSINETCFNIQGGVPLPGLRVP

SEQ ID NO: 821403 - protein, 419 aa, Homo sapiens
TVATVFTRRKREILDVECAPADTDKIIEVEEEQEDPYLNDRCRGGGPCKQQCRDTGDEVVCSCFVGYQLLSDGVSCEDVNECITGSHSCRLGESCINTVGSFRCQRDSSCGTGYELTEDNSCKDIDECESGIHNCLPDFICQNTLGSFRCRPKLQCKSGFIQDALGNCIDINECLSISAPCPIGHTCINTEGSYTCQKNVPNCGRGYHLNEEGTRCVDVDECAPPAEPCGKGHRCVNSPGSFRCECKTGYYFDGISRMCVDVNECQRYPGRLCGHKCENTLGSYLCSCSVGFRLSVDGRSCEDINECSSSPCSQECANVYGSYQCYCRRGYQLSDVDGVTCEDIDECALPTGGHICSYRCINIPGSFQCSCPSSGYRLAPNGRNCQDIDECVTGIHNCSINETCFNIQGGVPLPGLRVP

SEQ ID NO: 821404 - protein, 333 aa, Homo sapiens
LLPGGIIERRGPGPALAAEARPERGARAAAPGPRPRLCPPPPTARRPPPMERAAPSRRVPLPLLLLGGLALLAAGVDADVLLEACCADGHRMATHQKDCSLPYATESKECRMVQEQCCHSQLEELHCATGISLANEQDRCATPHGDNASLEATFVKRCCHCCLLGRAAQAQGQSCEYSLMVGYQCGQVFRACCVKSQETGDLDVGGLQETDKIIEVEEEQEDPYLNDRCRGGGPCKQQCRDTGDEVVCSCFVGYQLLSDGVSCEDVNECITGSHSCRLGESCINTVGSFRCQRDSSCGTGYELTEDNSCKGILWDPSAADPSYSARVALYKML

SEQ ID NO: 821405 - protein, 382 aa, Homo sapiens
MTFAKSTAIFHCHREVGQNDLVFKNWFVGYQLLSDGVSCEDVNECITGSHSCRLGESCINTVGSFRCQRDSSCGTGYELTEDNSCKDIDECESGIHNCLPDFICQNTLGSFRCRPKLQCKSGFIQDALGNCIDINECLSISAPCPIGHTCINTEGSYTCQKNVPNCGRGYHLNEEGTRCVDVDECAPPAEPCGKGHRCVNSPGSFRCECKTGYYFDGISRMCVDVNECQRYPGRLCGHKCENTLGSYLCSCSVGFRLSVDGRSCEDINECSSSPCSQECANVYGSYQCYCRRGYQLSDVDGVTCEDIDECALPTGGHICSYRCINIPGSFQCSCPSSGYRLAPNGRNCQDIDECVTGIHNCSINETCFNIQGGVPLPGLRVP

SEQ ID NO: 821406 - protein, 606 aa, Homo sapiens; identical to SEQ ID NO: 821399

SEQ ID NO: 821407 - protein, 372 aa, Homo sapiens
GDLEDAASKDITLKDIFVGYQLLSDGVSCEDVNECITGSHSCRLGESCINTVGSFRCQRDSSCGTGYELTEDNSCKDIDECESGIHNCLPDFICQNTLGSFRCRPKLQCKSGFIQDALGNCIDINECLSISAPCPIGHTCINTEGSYTCQKNVPNCGRGYHLNEEGTRCVDVDECAPPAEPCGKGHRCVNSPGSFRCECKTGYYFDGISRMCVDVNECQRYPGRLCGHKCENTLGSYLCSCSVGFRLSVDGRSCEDINECSSSPCSQECANVYGSYQCYCRRGYQLSDVDGVTCEDIDECALPTGGHICSYRCINIPGSFQCSCPSSGYRLAPNGRNCQDIDECVTGIHNCSINETCFNIQGGVPLPGLRVP

SEQ ID NO: 821408 - protein, 346 aa, Homo sapiens
QRKEPTVLMQDSPSRQLWLPVMHSLTSSQETPSDSSCGTGYELTEDNSCKDIDECESGIHNCLPDFICQNTLGSFRCRPKLQCKSGFIQDALGNCIDINECLSISAPCPIGHTCINTEGSYTCQKNVPNCGRGYHLNEEGTRCVDVDECAPPAEPCGKGHRCVNSPGSFRCECKTGYYFDGISRMCVDVNECQRYPGRLCGHKCENTLGSYLCSCSVGFRLSVDGRSCEDINECSSSPCSQECANVYGSYQCYCRRGYQLSDVDGVTCEDIDECALPTGGHICSYRCINIPGSFQCSCPSSGYRLAPNGRNCQDIDECVTGIHNCSINETCFNIQGGVPLPGLRVP

SEQ ID NO: 821409 - protein, 606 aa, Homo sapiens; identical to SEQ ID NO: 821399

SEQ ID NO: 821410 - protein, 606 aa, Homo sapiens; identical to SEQ ID NO: 821399

SEQ ID NO: 821411 - protein, 606 aa, Homo sapiens; identical to SEQ ID NO: 821399

SEQ ID NO: 821412 - protein, 302 aa, Homo sapiens
LPLPTQATVQGSQSILTDKIGEAVMNTLGSFRCRPKLQCKSGFIQDALGNCIDINECLSISAPCPIGHTCINTEGSYTCQKNVPNCGRGYHLNEEGTRCVDVDECAPPAEPCGKGHRCVNSPGSFRCECKTGYYFDGISRMCVDVNECQRYPGRLCGHKCENTLGSYLCSCSVGFRLSVDGRSCEDINECSSSPCSQECANVYGSYQCYCRRGYQLSDVDGVTCEDIDECALPTGGHICSYRCINIPGSFQCSCPSSGYRLAPNGRNCQDIDECVTGIHNCSINETCFNIQGGVPLPGLRVP

SEQ ID NO: 821413 - protein, 606 aa, Homo sapiens; identical to SEQ ID NO: 821399

SEQ ID NO: 821414 - protein, 606 aa, Homo sapiens; identical to SEQ ID NO: 821399

SEQ ID NO: 821415 - protein, 606 aa, Homo sapiens; identical to SEQ ID NO: 821399

SEQ ID NO: 821416 - protein, 445 aa, Homo sapiens
LLPGGIIERRGPGPALAAEARPERGARAAAPGPRPRLCPPPPTARRPPPMERAAPSRRVPLPLLLLGGLALLAAGVDADVLLEACCADGHRMATHQKDCSLPYATESKECRMVQEQCCHSQLEELHCATGISLANEQDRCATPHGDNASLEATFVKRCCHCCLLGRAAQAQGQSCEYSLMVGYQCGQVFRACCVKSQETGDLDVGGLQETDKIIEVEEEQEDPYLNDRCRGGGPCKQQCRDTGDEVVCSCFVGYQLLSDGVSCEDVNECITGSHSCRLGESCINTVGSFRCQRDSSCGTGYELTEDNSCKDIDECESGIHNCLPDFICQNTLGSFRCRPKLQCKSGFIQDALGNCIDINECLSISAPCPIGHTCINTEGSYTCQKNVPNCGRGYHLNEEGTRCVDVDECAPPAEPCGKGHLREHAGLLPLQLFRGLPALCGWQVM

SEQ ID NO: 821417 - protein, 606 aa, Homo sapiens; identical to SEQ ID NO: 821399

SEQ ID NO: 821418 - protein, 606 aa, Homo sapiens; identical to SEQ ID NO: 821399

SEQ ID NO: 821419 - protein, 606 aa, Homo sapiens; identical to SEQ ID NO: 821399

SEQ ID NO: 821420 - protein, 606 aa, Homo sapiens; identical to SEQ ID NO: 821399

SEQ ID NO: 821421 - protein, 606 aa, Homo sapiens; identical to SEQ ID NO: 821399

SEQ ID NO: 821422 - protein, 606 aa, Homo sapiens; identical to SEQ ID NO: 821399

SEQ ID NO: 821423 - protein, 606 aa, Homo sapiens; identical to SEQ ID NO: 821399

SEQ ID NO: 821424 - protein, 606 aa, Homo sapiens; identical to SEQ ID NO: 821399

SEQ ID NO: 821425 - protein, 597 aa, Homo sapiens
LLPGGIIERRGPGPALAAEARPERGARAAAPGPRPRLCPPPPTARRPPPMERAAPSRRVPLPLLLLGGLALLAAGVDADVLLEACCADGHRMATHQKDCSLPYATESKECRMVQEQCCHSQLEELHCATGISLANEQDRCATPHGDNASLEATFVKRCCHCCLLGRAAQAQGQSCEYSLMVGYQCGQVFRACCVKSQETGDLDVGGLQETDKIIEVEEEQEDPYLNDRCRGGGPCKQQCRDTGDEVVCSCFVGYQLLSDGVSCEDVNECITGSHSCRLGESCINTVGSFRCQRDSSCGTGYELTEDNSCKDIDECESGIHNCLPDFICQNTLGSFRCRPKLQCKSGFIQDALGNCIDINECLSISAPCPIGHTCINTEGSYTCQKNVPNCGRGYHLNEEGTRCVDVDECAPPAEPCGKGHRCVNSPGSFRCECKTGYYFDGISRMCVDVNECQRYPGRLCGHKCENTLGSYLCSCSVGFRLSVDGRSCEDINECSSSPCSQECANVYGSYQCYCRRGYQLSDVDGVTCEDIDECALPTGGHICSYRCINIPGSFQCSCPSSGYRLAPNGRNCQDIDECVTGIHNCSINETCFNIRRQ

SEQ ID NO: 821426 - protein, 582 aa, Homo sapiens
LLPGGIIERRGPGPALAAEARPERGARAAAPGPRPRLCPPPPTARRPPPMERAAPSRRVPLPLLLLGGLALLAAGVDADVLLEACCADGHRMATHQKDCSLPYATESKECRMVQEQCCHSQLEELHCATGISLANEQDRCATPHGDNASLEATFVKRCCHCCLLGRAAQAQGQSCEYSLMVGYQCGQVFRACCVKSQETGDLDVGGLQETDKIIEVEEEQEDPYLNDRCRGGGPCKQQCRDTGDEVVCSCFVGYQLLSDGVSCEDVNECITGSHSCRLGESCINTVGSFRCQRDSSCGTGYELTEDNSCKDIDECESGIHNCLPDFICQNTLGSFRCRPKLQCKSGFIQDALGNCIDINECLSISAPCPIGHTCINTEGSYTCQKNVPNCGRGYHLNEEGTRCVDVDECAPPAEPCGKGHRCVNSPGSFRCECKTGYYFDGISRMCVDVNECQRYPGRLCGHKCENTLGSYLCSCSVGFRLSVDGRSCEDINECSSSPCSQECANVYGSYQCYCRRGYQLSDVDGVTCEDIDECALPTGGHICSYRCINIPGSFQCSCPSSGYRLAPNGRNCQGEQEGCPGV

SEQ ID NO: 821427 - protein, 580 aa, Homo sapiens
LLPGGIIERRGPGPALAAEARPERGARAAAPGPRPRLCPPPPTARRPPPMERAAPSRRVPLPLLLLGGLALLAAGVDADVLLEACCADGHRMATHQKDCSLPYATESKECRMVQEQCCHSQLEELHCATGISLANEQDRCATPHGDNASLEATFVKRCCHCCLLGRAAQAQGQSCEYSLMVGYQCGQVFRACCVKSQETGDLDVGGLQETDKIIEVEEEQEDPYLNDRCRGGGPCKQQCRDTGDEVVCSCFVGYQLLSDGVSCEDVNECITGSHSCRLGESCINTVGSFRCQRDSSCGTGYELTEDNSCKDIDECESGIHNCLPDFICQNTLGSFRCRPKLQCKSGFIQDALGNCIDINECLSISAPCPIGHTCINTEGSYTCQKNVPNCGRGYHLNEEGTRCVDVDECAPPAEPCGKGHRCVNSPGSFRCECKTGYYFDGISRMCVDVNECQRYPGRLCGHKCENTLGSYLCSCSVGFRLSVDGRSCEDINECSSSPCSQECANVYGSYQCYCRRGYQLSDVDGVTCEDIDECALPTGGHICSYRCINIPGSFQCSCPSSGYRLAPNGRNCQDIYECVT

SEQ ID NO: 821428 - protein, 610 aa, Homo sapiens
LLPGGIIERRGPGPALAAEARPERGARAAAPGPRPRLCPPPPTARRPPPMERAAPSRRVPLPLLLLGGLALLAAGVDADVLLEACCADGHRMATHQKDCSLPYATESKECRMVQEQCCHSQLEELHCATGISLANEQDRCATPHGDNASLEATFVKRCCHCCLLGRAAQAQGQSCEYSLMVGYQCGQVFRACCVKSQETGDLDVGGLQETDKIIEVEEEQEDPYLNDRCRGGGPCKQQCRDTGDEVVCSCFVGYQLLSDGVSCEDVNECITGSHSCRLGESCINTVGSFRCQRDSSCGTGYELTEDNSCKDIDECESGIHNCLPDFICQNTLGSFRCRPKLQCKSGFIQDALGNCIDINECLSISAPCPIGHTCINTEGSYTCQKNVPNCGRGYHLNEEGTRCVDVDECAPPAEPCGKGHRCVNSPGSFRCECKTGYYFDGISRMCVDVNECQRYPGRLCGHKCENTLGSYLCSCSVGFRLSVDGRSCEDINECSSSPCSQECANVYGSYQCYCRRGYQLSDVDGVTCEDIDECALPTGGHICSYRCINIPGSFQCSCPSSGYRLAPNGRNCQDIDERVTPCPTLKPKAVIWFVMCLSGLETKPLQERRT

SEQ ID NO: 821429 - protein, 67 aa, Homo sapiens
ADLEDPYSENIIKRYMDGMTVGVVRQVRPIVGPFHAVLKLEMNYVVGGVVSHRNVVNVHIFVSEYWF

SEQ ID NO: 821430 - protein, 498 aa, Homo sapiens
LLPGGIIERRGPGPALAAEARPERGARAAAPGPRPRLCPPPPTARRPPPMERAAPSRRVPLPLLLLGGLALLAAGVDADVLLEACCADGHRMATHQKDCSLPYATESKECRMVQEQCCHSQLEELHCATGISLANEQDRCATPHGDNASLEATFVKRCCHCCLLGRAAQAQGQSCEYSLMVGYQCGQVFRACCVKSQETGDLDVGGLQETDKIIEVEEEQEDPYLNDRCRGGGPCKQQCRDTGDEVVCSCFVGYQLLSDGVSCEDVNECITGSHSCRLGESCINTVGSFRCQRDSSCGTGYELTEDNSCKDIDECESGIHNCLPDFICQNTLGSFRCRPKLQCKSGFIQDALGNCIDINECLSISAPCPIGHTCINTEGSYTCQKNVPNCGRGYHLNEEGTRCVDVDECAPPAEPCGKGHRCVNSPGSFRCECKTGYYFDGISRMCVDVNECQRYPGRLCGHKCENTLGSYLCSCSVGFRLSVDGRSCEEGAAGAPST

SEQ ID NO: 821431 - protein, 100 aa, Homo sapiens; identical to SEQ ID NO: 821398

SEQ ID NO: 821432 - protein, 120 aa, Homo sapiens
STDVKREEPDLISPTSKTPSEQQRPQHPPRTGDSIFTATPCGGRLTTSHHIIPELSSSSGMTPSPPPPSSSFSSFWLQAGPPGRNCQDIDECVTGIHNCSINETCFNIQGGVPLPGLRVP

SEQ ID NO: 821433 - protein, 476 aa, Homo sapiens
LLPGGIIERRGPGPALAAEARPERGARAAAPGPRPRLCPPPPTARRPPPMERAAPSRRVPLPLLLLGGLALLAAGVDADVLLEACCADGHRMATHQKDCSLPYATESKECRMVQEQCCHSQLEELHCATGISLANEQDRCATPHGDNASLEATFVKRCCHCCLLGRAAQAQGQSCEYSLMVGYQCGQVFRACCVKSQETGDLDVGGLQETDKIIEVEEEQEDPYLNDRCRGGGPCKQQCRDTGDEVVCSCFVGYQLLSDGVSCEDVNECITGSHSCRLGESCINTVGSFRCQRDSSCGTGYELTEDNSCKDIDECESGIHNCLPDFICQNTLGSFRCRPKLQCKSGFIQDALGNCIDINECLSISAPCPIGHTCINTEGSYTCQKNVPNCGRGYHLNEEGTRCVDVDECAPPAEPCGKGHRCVNSPGSFRCECKTGYYFDGISRMCVDVDERPRYPGACVALRARHAAPPTPPVRD

SEQ ID NO: 821434 - protein, 468 aa, Homo sapiens
LLPGGIIERRGPGPALAAEARPERGARAAAPGPRPRLCPPPPTARRPPPMERAAPSRRVPLPLLLLGGLALLAAGVDADVLLEACCADGHRMATHQKDCSLPYATESKECRMVQEQCCHSQLEELHCATGISLANEQDRCATPHGDNASLEATFVKRCCHCCLLGRAAQAQGQSCEYSLMVGYQCGQVFRACCVKSQETGDLDVGGLQETDKIIEVEEEQEDPYLNDRCRGGGPCKQQCRDTGDEVVCSCFVGYQLLSDGVSCEDVNECITGSHSCRLGESCINTVGSFRCQRDSSCGTGYELTEDNSCKDIDECESGIHNCLPDFICQNTLGSFRCRPKLQCKSGFIQDALGNCIDINECLSISAPCPIGHTCINTEGSYTCQKNVPNCGRGYHLNEEGTRCVDVDECAPPAEPCGKGHRCVNSPGSFRCECKTGYYFDGISRMCVDVNECQQLRPGACVHRYTPYE

SEQ ID NO: 821435 - protein, 374 aa, Homo sapiens
LLPGGIIERRGPGPALAAEARPERGARAAAPGPRPRLCPPPPTARRPPPMERAAPSRRVPLPLLLLGGLALLAAGVDADVLLEACCADGHRMATHQKDCSLPYATESKECRMVQEQCCHSQLEELHCATGISLANEQDRCATPHGDNASLEATFVKRCCHCCLLGRAAQAQGQSCEYSLMVGYQCGQVFRACCVKSQETGDLDVGGLQETDKIIEVEEEQEDPYLNDRCRGGGPCKQQCRDTGDEVVCSCFVGYQLLSDGVSCEDVNECITGSHSCRLGESCINTVGSFRCQRDSSCGTGYELTEDNSCKDIDECESGIHNCLPDFICQNTLGSFRCRPKLQCKSGFIQDALGNCIGKRCAARISGLFQEGSAT

SEQ ID NO: 821436 - protein, 329 aa, Homo sapiens
LLPGGIIERRGPGPALAAEARPERGARAAAPGPRPRLCPPPPTARRPPPMERAAPSRRVPLPLLLLGGLALLAAGVDADVLLEACCADGHRMATHQKDCSLPYATESKECRMVQEQCCHSQLEELHCATGISLANEQDRCATPHGDNASLEATFVKRCCHCCLLGRAAQAQGQSCEYSLMVGYQCGQVFRACCVKSQETGDLDVGGLQETDKIIEVEEEQEDPYLNDRCRGGGPCKQQCRDTGDEVVCSCFVGYQLLSDGVSCEDVNECITGSHSCRLGESCINTVGSFRCQRDSSCGTGYELTEDNSCKDIDECESGIHNCLPDFICQ

SEQ ID NO: 821437 - protein, 242 aa, Homo sapiens
MKVLQNAPDEILVVASSMLCNLLLEFSPSKEPILESGAVELLCGLTQSENPALRVNGIWALMNMAFQAEQKIKADILRSLSTEQLFRLLSDSDLNVLMKTLGLLRNLLSTRPHIDKIMSTHGKQIMQAVTLILEGEHNIEVKEQTLCILANIADGTTAKDLIMTNDDILQKIKYYMGHSHVKLQLAAMFCISNLIWNEEEGSQERQDKLRDMGIVDILHKLSQSPDSNLCDKAKMALQQYLA

SEQ ID NO: 821438 - protein, 385 aa, Homo sapiens
MEVTASSRHYVDRLFDPDPQKVLQGVIDMKNAVIGNNKQKANLIVLGAVPRLLYLLQQETSSTELKTECAVVLGSLAMGTENNVKSLLDCHIIPALLQGLLSPDLKFIEACLRCLRTIFTSPVTPEELLYTDATVIPHLMALLSRSRYTQEYICQIFSHCCKGPDHQTILFNHGAVQNIAHLLTSLSYKVRMQALKCFSVLAFENPQVSMTLVNVLVDGELLPQIFVKMLQRDKPIEMQLTSAKCLTYMCRAGAIRTDDNCIVLKTLPCLVRMCSKERLLEERVEGAETLAYLIEPDVELQRIASITDHLIAMLADYFKYPSSVSAITDIKRLDHDLKHAHELRQAAFKLYASLGANDEDIRKKVSLGEGRPPVLTASRQGVTST

SEQ ID NO: 821439 - protein, 385 aa, Homo sapiens; identical to SEQ ID NO: 821438

SEQ ID NO: 821440 - protein, 357 aa, Homo sapiens
MKNAVIGNNKQKANLIVLGAVPRLLYLLQQETSSTELKTECAVVLGSLAMGTENNVKSLLDCHIIPALLQGLLSPDLKFIEACLRCLRTIFTSPVTPEELLYTDATVIPHLMALLSRSRYTQEYICQIFSHCCKGPDHQTILFNHGAVQNIAHLLTSLSYKVRMQALKCFSVLAFENPQVSMTLVNVLVDGELLPQIFVKMLQRDKPIEMQLTSAKCLTYMCRAGAIRTDDNCIVLKTLPCLVRMCSKERLLEERVEGAETLAYLIEPDVELQRIASITDHLIAMLADYFKYPSSVSAITDIKRLDHDLKHAHELRQAAFKLYASLGANDEDIRKKVSLGEGRPPVLTASRQGVTST

SEQ ID NO: 821441 - protein, 104 aa, Homo sapiens
RPPARPPGSLIPVSTIPPSVVCLLGTTPWGGPRLSLGPGSERGWRGGIDGQRGPRPSQRRFQLRELPPVRVPRMASGRRGGWAYRQLAGRRGLDFAKRFTEPSF

SEQ ID NO: 821442 - protein, 659 aa, Homo sapiens
MEVTASSRHYVDRLFDPDPQKVLQGVIDMKNAVIGNNKQKANLIVLGAVPRLLYLLQQETSSTELKTECAVVLGSLAMGTENNVKSLLDCHIIPALLQGLLSPDLKFIEACLRCLRTIFTSPVTPEELLYTDATVIPHLMALLSRSRYTQEYICQIFSHCCKGPDHQTILFNHGAVQNIAHLLTSLSYKVRMQALKCFSVLAFENPQVSMTLVNVLVDGELLPQIFVKMLQRDKPIEMQLTSAKCLTYMCRAGAIRTDDNCIVLKTLPCLVRMCSKERLLEERVEGAETLAYLIEPDVELQRIASITDHLIAMLADYFKYPSSVSAITDIKRLDHDLKHAHELRQAAFKLYASLGANDEDIRKKIIETENMMDRIVTGLSESSVKVRLAAVRCLHSLSRSVQQLRTSFQDHAVWKPLMKVLQNAPDEILVVASSMLCNLLLEFSPSKEPILESGAVELLCGLTQSENPALRVNGIWALMNMAFQAEQKIKADILRSLSTEQLFRLLSDSDLNVLMKTLGLLRNLLSTRPHIDKIMSTHGKQIMQAVTLILEGEHNIEVKEQTLCILANIADGTTAKDLIMTNDDILQKIKYYMGHSHVKLQLAAMFCISNLIWNEEEGSQERQDKLRDMGIVDILHKLSQSPDSNLCDKAKMALQQYLA

SEQ ID NO: 821443 - protein, 431 aa, Homo sapiens
MLQRDKPIEMQLTSAKCLTYMCRAGAIRTDDNCIVLKTLPCLVRMCSKERLLEERVEGAETLAYLIEPDVELQRIASITDHLIAMLADYFKYPSSVSAITDIKRLDHDLKHAHELRQAAFKLYASLGANDEDIRKKIIETENMMDRIVTGLSESSVKVRLAAVRCLHSLSRSVQQLRTSFQDHAVWKPLMKVLQNAPDEILVVASSMLCNLLLEFSPSKEPILESGAVELLCGLTQSENPALRVNGIWALMNMAFQAEQKIKADILRSLSTEQLFRLLSDSDLNVLMKTLGLLRNLLSTRPHIDKIMSTHGKQIMQAVTLILEGEHNIEVKEQTLCILANIADGTTAKDLIMTNDDILQKIKYYMGHSHVKLQLAAMFCISNLIWNEEEGSQERQDKLRDMGIVDILHKLSQSPDSNLCDKAKMALQQYLA

SEQ ID NO: 821444 - protein, 673 aa, Homo sapiens
MACLLETPIRMSVLSEVTASSRHYVDRLFDPDPQKVLQGVIDMKNAVIGNNKQKANLIVLGAVPRLLYLLQQETSSTELKTECAVVLGSLAMGTENNVKSLLDCHIIPALLQGLLSPDLKFIEACLRCLRTIFTSPVTPEELLYTDATVIPHLMALLSRSRYTQEYICQIFSHCCKGPDHQTILFNHGAVQNIAHLLTSLSYKVRMQALKCFSVLAFENPQVSMTLVNVLVDGELLPQIFVKMLQRDKPIEMQLTSAKCLTYMCRAGAIRTDDNCIVLKTLPCLVRMCSKERLLEERVEGAETLAYLIEPDVELQRIASITDHLIAMLADYFKYPSSVSAITDIKRLDHDLKHAHELRQAAFKLYASLGANDEDIRKKIIETENMMDRIVTGLSESSVKVRLAAVRCLHSLSRSVQQLRTSFQDHAVWKPLMKVLQNAPDEILVVASSMLCNLLLEFSPSKEPILESGAVELLCGLTQSENPALRVNGIWALMNMAFQAEQKIKADILRSLSTEQLFRLLSDSDLNVLMKTLGLLRNLLSTRPHIDKIMSTHGKQIMQAVTLILEGEHNIEVKEQTLCILANIADGTTAKDLIMTNDDILQKIKYYMGHSHVKLQLAAMFCISNLIWNEEEGSQERQDKLRDMGIVDILHKLSQSPDSNLCDKAKMALQQYLA

SEQ ID NO: 821445 - protein, 631 aa, Homo sapiens
MKNAVIGNNKQKANLIVLGAVPRLLYLLQQETSSTELKTECAVVLGSLAMGTENNVKSLLDCHIIPALLQGLLSPDLKFIEACLRCLRTIFTSPVTPEELLYTDATVIPHLMALLSRSRYTQEYICQIFSHCCKGPDHQTILFNHGAVQNIAHLLTSLSYKVRMQALKCFSVLAFENPQVSMTLVNVLVDGELLPQIFVKMLQRDKPIEMQLTSAKCLTYMCRAGAIRTDDNCIVLKTLPCLVRMCSKERLLEERVEGAETLAYLIEPDVELQRIASITDHLIAMLADYFKYPSSVSAITDIKRLDHDLKHAHELRQAAFKLYASLGANDEDIRKKIIETENMMDRIVTGLSESSVKVRLAAVRCLHSLSRSVQQLRTSFQDHAVWKPLMKVLQNAPDEILVVASSMLCNLLLEFSPSKEPILESGAVELLCGLTQSENPALRVNGIWALMNMAFQAEQKIKADILRSLSTEQLFRLLSDSDLNVLMKTLGLLRNLLSTRPHIDKIMSTHGKQIMQAVTLILEGEHNIEVKEQTLCILANIADGTTAKDLIMTNDDILQKIKYYMGHSHVKLQLAAMFCISNLIWNEEEGSQERQDKLRDMGIVDILHKLSQSPDSNLCDKAKMALQQYLA

SEQ ID NO: 821446 - protein, 659 aa, Homo sapiens; identical to SEQ ID NO: 821442

SEQ ID NO: 821447 - protein, 631 aa, Homo sapiens; identical to SEQ ID NO: 821445

SEQ ID NO: 821448 - protein, 659 aa, Homo sapiens; identical to SEQ ID NO: 821442

SEQ ID NO: 821449 - protein, 659 aa, Homo sapiens; identical to SEQ ID NO: 821442

SEQ ID NO: 821450 - protein, 643 aa, Homo sapiens
MEVTASSRHYVDRLFDPDPQKVLQGVIDMKNAVIGNNKQKANLIVLGAVPRLLYLLQQETSSTELKTECAVVLGSLAMGTENNVKSLLDCHIIPALLQGLLSPDLKFIEACLRCLRTIFTSPVTPEELLYTDATVIPHLMALLSRSRYTQEYICQIFSHCCKGPDHQTILFNHGAVQNIAHLLTSLSYKVRMQALKCFSVLAFENPQVSMTLVNVLVDGELLPQIFVKMLQRDKPIEMQLTSAKCLTYMCRAGAIRTDDNCIVLKTLPCLVRMCSKERLLEERVEGAETLAYLIEPDVELQRIASITDHLIAMLADYFKYPSSVSAITDIKRLDHDLKHAHELRQAAFKLYASLGANDEDIRKKIIETENMMDRIVTGLSESSVKVRLAAVRCLHSLSRSVQQLRTSFQDHAVWKPLMKVLQNAPDEILVVASSMLCNLLLEFSPSKEPILESGAVELLCGLTQSENPALRVNGIWALMNMAFQAEQKIKADILRSLSTEQLFRLLSDSDLNVLMKTLGLLRNLLSTRPHIDKIMSTHGKQIMQAVTLILEGEHNIEVKEQTLCILANIADGTTAKDLIMTNDDILQKIKYYMGHSHVKLQLAAMFCISNLIWNEEEGQRWHCSSTWHDGSAPGHLRASHLLV

SEQ ID NO: 821451 - protein, 631 aa, Homo sapiens; identical to SEQ ID NO: 821445

SEQ ID NO: 821452 - protein, 520 aa, Homo sapiens
MALLSRSRYTQEYICQIFSHCCKGPDHQTILFNHGAVQNIAHLLTSLSYKVRMQALKCFSVLAFENPQVSMTLVNVLVDGELLPQIFVKMLQRDKPIEMQLTSAKCLTYMCRAGAIRTDDNCIVLKTLPCLVRMCSKERLLEERVEGAETLAYLIEPDVELQRIASITDHLIAMLADYFKYPSSVSAITDIKRLDHDLKHAHELRQAAFKLYASLGANDEDIRKKIIETENMMDRIVTGLSESSVKVRLAAVRCLHSLSRSVQQLRTSFQDHAVWKPLMKVLQNAPDEILVVASSMLCNLLLEFSPSKEPILESGAVELLCGLTQSENPALRVNGIWALMNMAFQAEQKIKADILRSLSTEQLFRLLSDSDLNVLMKTLGLLRNLLSTRPHIDKIMSTHGKQIMQAVTLILEGEHNIEVKEQTLCILANIADGTTAKDLIMTNDDILQKIKYYMGHSHVKLQLAAMFCISNLIWNEEEGSQERQDKLRDMGIVDILHKLSQSPDSNLCDKAKMALQQYLA

SEQ ID NO: 821453 - protein, 642 aa, Homo sapiens
MACLLETPIRMSVLSEVTASSRHYVDRLFDPDPQKVLQGVIDMKNAVIGNNKQKANLIVLGAVPRLLYLLQQETSSTELKTECAVVLGSLAMGTENNVKSLLDCHIIPALLQGLLSPDLKFIEACLRCLRTIFTSPVTPEELLYTGPDHQTILFNHGAVQNIAHLLTSLSYKVRMQALKCFSVLAFENPQVSMTLVNVLVDGELLPQIFVKMLQRDKPIEMQLTSAKCLTYMCRAGAIRTDDNCIVLKTLPCLVRMCSKERLLEERVEGAETLAYLIEPDVELQRIASITDHLIAMLADYFKYPSSVSAITDIKRLDHDLKHAHELRQAAFKLYASLGANDEDIRKKIIETENMMDRIVTGLSESSVKVRLAAVRCLHSLSRSVQQLRTSFQDHAVWKPLMKVLQNAPDEILVVASSMLCNLLLEFSPSKEPILESGAVELLCGLTQSENPALRVNGIWALMNMAFQAEQKIKADILRSLSTEQLFRLLSDSDLNVLMKTLGLLRNLLSTRPHIDKIMSTHGKQIMQAVTLILEGEHNIEVKEQTLCILANIADGTTAKDLIMTNDDILQKIKYYMGHSHVKLQLAAMFCISNLIWNEEEGSQERQDKLRDMGIVDILHKLSQSPDSNLCDKAKMALQQYLA

SEQ ID NO: 821454 - protein, 631 aa, Homo sapiens; identical to SEQ ID NO: 821445

SEQ ID NO: 821455 - protein, 385 aa, Homo sapiens; identical to SEQ ID NO: 821438

SEQ ID NO: 821456 - protein, 385 aa, Homo sapiens; identical to SEQ ID NO: 821438

SEQ ID NO: 821457 - protein, 385 aa, Homo sapiens; identical to SEQ ID NO: 821438

SEQ ID NO: 821458 - protein, 246 aa, Homo sapiens [sequence omitted]

SEQ ID NO: 821459 - protein, 385 aa, Homo sapiens; identical to SEQ ID NO: 821438

SEQ ID NO: 821460 - protein, 385 aa, Homo sapiens; identical to SEQ ID NO: 821438

SEQ ID NO: 821461 - protein, 385 aa, Homo sapiens; identical to SEQ ID NO: 821438

SEQ ID NO: 821462 - protein, 246 aa, Homo sapiens [sequence omitted]

SEQ ID NO: 821463 - protein, 385 aa, Homo sapiens; identical to SEQ ID NO: 821438

SEQ ID NO: 821464 - protein, 385 aa, Homo sapiens; identical to SEQ ID NO: 821438

SEQ ID NO: 821465 - protein, 385 aa, Homo sapiens; identical to SEQ ID NO: 821438

SEQ ID NO: 821466 - protein, 385 aa, Homo sapiens; identical to SEQ ID NO: 821438

SEQ ID NO: 821467 - protein, 385 aa, Homo sapiens; identical to SEQ ID NO: 821438

SEQ ID NO: 821468 - protein, 127 aa, Homo sapiens
GRVGRPTRRQGLLSPDLKFIEACLRCLRTIFTSPVTPEELLYTDATVIPHLMALLSRSRYTQEYICQIFSHCCKGPDHQTILFNHGAVQNIAHLLTSLSYKVRMQALKCFSVLAFENPQVSMTLVNV

SEQ ID NO: 821469 - protein, 119 aa, Homo sapiens
ISFLLIGLLSPDLKFIEACLRCLRTIFTSPVTPEELLYTGPDHQTILFNHGAVQNIAHLLTSLSYKLDHDLKHAHELRQAAFKLYASLGANDEDIRKKVSLGEGRPPVLTASRQGVTST

SEQ ID NO: 821470 - protein, 192 aa, Homo sapiens [sequence omitted]

SEQ ID NO: 821471 - protein, 195 aa, Homo sapiens
MEVTASSRHYVDRLFDPDPQKVLQGVIDMKNAVIGNNKQKANLIVLGAVPRLLYLLQQETSSTELKTECAVVLGSLAMGTENNVKSLLDCHIIPALLQGLLSPDLKFIEACLRCLRTIFTSPVTPEELLYTDATVIPHLMALLSRSRYTQEYICQIFSHCCKVRTRINVIYNVKSYYAFKRCTFFVYPPGVVIHI

SEQ ID NO: 821472 - protein, 137 aa, Homo sapiens
MEVTASSRHYVDRLFDPDPQKVLQGVIDMKNAVIGNNKQKANLIVLGAVPRLLYLLQQETSSTELKTECAVVLGSLAMGTENNVKSLLDCHIIPALLQGLLSPDLKFIEACLRCLRTIFTSPVTPEELLYTVSFRCI

SEQ ID NO: 821473 - protein, 24 aa, Homo sapiens
MENERLIMLSGEFDAKVGETEKRR

SEQ ID NO: 821474 - protein, 190 aa, Homo sapiens
YTFRYGLGMIYYKQEKFSLAEMHFQKALDINPQSSVLLCHIGVVQHALKKSEKALDTLNKAIVIDPKNPLCKFHRASVLFANEKYKSALQELEELKQIVPKESLVYFLIGKVYKKLGQTHLALMNFSWAMDLDPKGANNQIKEAIDKRYLPDDEEPITQEEQIMGTDESQESSMTDADDTQLHAAESDEF

SEQ ID NO: 821475 - protein, 190 aa, Homo sapiens; identical to SEQ ID NO: 821474

SEQ ID NO: 821476 - protein, 190 aa, Homo sapiens; identical to SEQ ID NO: 821474

SEQ ID NO: 821477 - protein, 190 aa, Homo sapiens; identical to SEQ ID NO: 821474

SEQ ID NO: 821478 - protein, 135 aa, Homo sapiens
YTFRYGLGMIYYKQEKFSLAEMHFQKALDINPQSSVLLCHIGVVQHALKKSEKALDTLNKAIVIDPKNPLCKFHRASVLFANEKYKSALQELEELKQIVPKESLVYFLIGKILKEPITRLKRQLISVIFQMMRSQ

SEQ ID NO: 821479 - protein, 21 aa, Homo sapiens
MKLMTVDPVVQEATLHVSSRL

SEQ ID NO: 821480 - protein, 21 aa, Homo sapiens
MKLMTVDPVVQEATLHVSSRL

SEQ ID NO: 821481 - protein, 21 aa, Homo sapiens
MKLMTVDPVVQEATLHVSSRL

SEQ ID NO: 821482 - protein, 21 aa, Homo sapiens
MKLMTVDPVVQEATLHVSSRL

SEQ ID NO: 821483 - protein, 476 aa, Homo sapiens
AGPGSEGVRGLSGSCPGCSPLEPGSRGRGAAAWRILRCRRLPEPSPFLTQPNLAQSQPPAPVPVTDPSVTMHPAVFLSLPDLRCSLLLLVTWVFTPVTTEITSLDTENIDEILNNADVALVNFYADWCRFSQMLHPIFEEASDVIKEEFPNENQVVFARVDCDQHSDIAQRYRISKYPTLKLFRNGMMMKREYRGQRSVKALADYIRQQKSDPIQEIRDLAEITTLDRSKRNIIGYFEQKDSDNYRVFERVANILHDDCAFLSAFGDVSKPERYSGDNIIYKPPGHSAPDMVYLGAMTNFDVTYNWIQDKCVPLVREITFENGEELTEEGLPFLILFHMKEDTESLEIFQNEVARQLISEKGTINFLHADCDKFRHPLLHIQKTPADCPVIAIDSFRHMYVFGDFKDVLIPGKLKQFVFDLHSGKLHREFHHGPDPTDTAPGEQAQDVASSPPESSFQKLAPSEYRYTLLRDRDEL

SEQ ID NO: 821484 - protein, 168 aa, Homo sapiens
AGPGSEGVRGLSGSCPGCSPLEPGSRGRGAAAWRILRCRRLPEPSPFLTQPNLAQSQPPAPVPVTDPSVTMHPAVFLSLPDLRCSLLLLVTWVFTPVTTEITSLDTENIDEILNNADVALVNFYADWCRFSQMLHPIFEEASDVIKEEFPNENQVVFARVDCDQHFWT

SEQ ID NO: 821485 - protein, 349 aa, Homo sapiens
AGPGSEGVRGLSGSCPGCSPLEPGSRGRGAAAWRILRCRRLPEPSPFLTQPNLAQSQPPAPVPVTDPSVTMHPAVFLSLPDLRCSLLLLVTWVFTPVTTEITSLDTENIDEILNNADVALVNFYADWCRFSQMLHPIFEEASDVIKEEFPNENQVVFARVDCDQHSDIAQRYRISKYPTLKLFRNGMMMKREYRGQRSVKALADYIRQQKSDPIQEIRDLAEITTLDRSKRNIIGYFEQKDSDNYRVFERVANILHDDCAFLSAFGDVSKPERYSGDNIIYKPPGHSAPDMVYLGAMTNFDVTYNWIQDKCVPLVREITFENGEELPKKDCFLILFPERRSDVAIFRMK

SEQ ID NO: 821486 - protein, 306 aa, Homo sapiens
AGPGSEGVRGLSGSCPGCSPLEPGSRGRGAAAWRILRCRRLPEPSPFLTQPNLAQSQPPAPVPVTDPSVTMHPAVFLSLPDLRCSLLLLVTWVFTPVTTEITSLDTENIDEILNNADVALVNFYADWCRFSQMLHPIFEEASDVIKEEFPNENQVVFARVDCDQHSDIAQRYRISKYPTLKLFRNGMMMKREYRGQRSVKALADYIRQQKSDPIQEIRDLAEITTLDRSKRNIIGYFEQKDSDNYRVFERVANILHDDCAFLSAFGDVSKPERYSGDNIIYKPPGHSAPDMVYLGTTLWHWVLRFG

SEQ ID NO: 821487 - protein, 490 aa, Homo sapiens
AGPGSEGVRGLSGSCPGCSPLEPGSRGRGAAAWRILRCRRLPEPSPFLTQPNLAQSQPPAPVPVTDPSVTMHPAVFLSLPDLRCSLLLLVTWVFTPVTTEITSLDTENIDEILNNADVALVNFYADWCRFSQMLHPIFEEASDVIKEEFPNENQVVFARVDCDQHSDIAQRYRISKYPTLKLFRNGMMMKREYRGQRSVKALADYIRQQKSDPIQEIRDLAEITTLDRSKRNIIGYFEQKDSDNYRVFERVANILHDDCAFLSAFGDVSKPERYSGDNIIYKPPGHSAPDMVYLGSYEQKFFVELFGTFNKIVGISKGLKMLFPFVVPEKITFGKMGEELTEEGLPFLILFHMKEDTESLEIFQNEVARQLISEKGTINFLHADCDKFRHPLLHIQKTPADCPVIAIDSFRHMYVFGDFKDVLIPGKLKQFVFDLHSGKLHREFHHGPDPTDTAPGEQAQDVASSPPESSFQKLAPSEYRYTLLRDRDEL

SEQ ID NO: 821488 - protein, 406 aa, Homo sapiens
MHPAVFLSLPDLRCSLLLLVTWVFTPVTTEITSLDTENIDEILNNADVALVNFYADWCRFSQMLHPIFEEASDVIKEEFPNENQVVFARVDCDQHSDIAQRYRISKYPTLKLFRNGMMMKREYRGQRSVKALADYIRQQKSDPIQEIRDLAEITTLDRSKRNIIGYFEQKDSDNYRVFERVANILHDDCAFLSAFGDVSKPERYSGDNIIYKPPGHSAPDMVYLGAMTNFDVTYNWIQDKCVPLVREITFENGEELTEEGLPFLILFHMKEDTESLEIFQNEVARQLISEKGTINFLHADCDKFRHPLLHIQKTPADCPVIAIDSFRHMYVFGDFKDVLIPGKLKQFVFDLHSGKLHREFHHGPDPTDTAPGEQAQDVASSPPESSFQKLAPSEYRYTLLRDRDEL

SEQ ID NO: 821489 - protein, 369 aa, Homo sapiens
MLPSAPDNADVALVNFYADWCRFSQMLHPIFEEASDVIKEEFPNENQVVFARVDCDQHSDIAQRYRISKYPTLKLFRNGMMMKREYRGQRSVKALADYIRQQKSDPIQEIRDLAEITTLDRSKRNIIGYFEQKDSDNYRVFERVANILHDDCAFLSAFGDVSKPERYSGDNIIYKPPGHSAPDMVYLGAMTNFDVTYNWIQDKCVPLVREITFENGEELTEEGLPFLILFHMKEDTESLEIFQNEVARQLISEKGTINFLHADCDKFRHPLLHIQKTPADCPVIAIDSFRHMYVFGDFKDVLIPGKLKQFVFDLHSGKLHREFHHGPDPTDTAPGEQAQDVASSPPESSFQKLAPSEYRYTLLRDRDEL

SEQ ID NO: 821490 - protein, 338 aa, Homo sapiens
AGPGSEGVRGLSGSCPGCSPLEPGSRGRGAAAWRILRCRRLPEPSPFLTQPNLAQSQPPAPVPVTDPSVTMHPAVFLSLPDLRCSLLLLRSKRNIIGYFEQKDSDNYRVFERVANILHDDCAFLSAFGDVSKPERYSGDNIIYKPPGHSAPDMVYLGAMTNFDVTYNWIQDKCVPLVREITFENGEELTEEGLPFLILFHMKEDTESLEIFQNEVARQLISEKGTINFLHADCDKFRHPLLHIQKTPADCPVIAIDSFRHMYVFGDFKDVLIPGKLKQFVFDLHSGKLHREFHHGPDPTDTAPGEQAQDVASSPPESSFQKLAPSEYRYTLLRDRDEL

SEQ ID NO: 821491 - protein, 157 aa, Homo sapiens
MQLTVKALQGRECSLQVPEDELVSTLKQLVSEKLNVPVRQQRLLFKGKALADGKRLSDYSIGPNSKLNLVVKPLEKVLLEEGEAQRLADSPPPQVWQLISKVLARHFSAADASRVLEQLQRDYERSLSRLTLDDIERLASRFLHPEVTETMEKGFSK

SEQ ID NO: 821492 - protein, 157 aa, Homo sapiens; identical to SEQ ID NO: 821491

SEQ ID NO: 821493 - protein, 146 aa, Homo sapiens
GRMPHSRMPQRSAPAARGGLAPRATPTAVEEEEPIDLSLADGKRLSDYSIGPNSKLNLVVKPLEKVLLEEGEAQRLADSPPPQVWQLISKVLARHFSAADASRVLEQLQRDYERSLSRLTLDDIERLASRFLHPEVTETMEKGFSK

SEQ ID NO: 821494 - protein, 157 aa, Homo sapiens; identical to SEQ ID NO: 821491

SEQ ID NO: 821495 - protein, 157 aa, Homo sapiens; identical to SEQ ID NO: 821491

SEQ ID NO: 821496 - protein, 180 aa, Homo sapiens [sequence omitted]

SEQ ID NO: 821497 - protein, 159 aa, Homo sapiens
MPQRSAPAARGGLAPRATPTAVEEEEPIDLSLADGKRLSDYSIGPNSKLNLVVKPLEKVLLEEGEAQRLADSPPPQVWQLISKVLARHFSAADASRVLEQLQRVRRVTLGILFRPSCSQPLPLLQCMPPPHWQPLNLPALLSPGLREVPESPDAGRHRT

SEQ ID NO: 821498 - protein, 113 aa, Homo sapiens
MEREGSGGSGGSAGLLQQILSLKVVPRVGNGTLCPNSTSLCSFPEMWYGVFLWALVSSLFFHVPAGLLALFTLRHHKYGRFMSVSILLMGIVGPITAGILTSMLDIKIPVKNV

SEQ ID NO: 821499 - protein, 97 aa, Homo sapiens
GTRGSRCPSRDFPGRDCEVAEMWYGVFLWALVSSLFFHVPAGLLALFTLRHHKYGAAIAGVYRAAGKEMIPFEALTLGTGQTFCVLVVSFLRILATL

SEQ ID NO: 821500 - protein, 200 aa, Homo sapiens
MEREGSGGSGGSAGLLQQILSLKVVPRVGNGTLCPNSTSLCSFPGTARPAPAHCAPRRRRCRAVGAPSLGGVPGAQPAGGVGRCPPGGGPCCSPGAPFPITSSAVPEAEPRSPAGREMQRAAAEMWYGVFLWALVSSLFFHVPAGLLALFTLRHHKYGAAIAGVYRAAGKEMIPFEALTLGTGQTFCVLVVSFLRILATL

SEQ ID NO: 821501 - protein, 97 aa, Homo sapiens; identical to SEQ ID NO: 821499

SEQ ID NO: 821502 - protein, 223 aa, Homo sapiens
MEREGSGGSGGSAGLLQQILSLKVVPRVGNGTLCPNSTSLCSFPGTARPAPAHCAPRRRRCRAVGAPSLGGVPGAQPAGGVGRCPPGGGPCCSPGAPFPITSSAVPEAEPRSPAGREMQRAAAEMWYGVFLWALVSSLFFHVPAGLLALFTLRHHKYGRFMSVSILLMGIVGPITAGILTSAAIAGVYRAAGKEMIPFEALTLGTGQTFCVLVVSFLRILATL

SEQ ID NO: 821503 - protein, 132 aa, Homo sapiens
LSNYHRYRLSEGRRPSWADCLSRGIQDQPGQHEMWYGVFLWALVSSLFFHVPAGLLALFTLRHHKYGRFMSVSILLMGIVGPITAGILTSAAIAGVYRAAGKEMIPFEALTLGTGQTFCVLVVSFLRILATL

SEQ ID NO: 821504 - protein, 144 aa, Homo sapiens
MEREGSGGSGGSAGLLQQILSLKVVPRVGNGTLCPNSTSLCSFPEMWYGVFLWALVSSLFFHVPAGLLALFTLRHHKYGRFMSVSILLMGIVGPITAGILTSAAIAGVYRAAGKEMIPFEALTLGTGQTFCVLVVSFLRILATL

SEQ ID NO: 821505 - protein, 107 aa, Homo sapiens
MQFPTFSQGALQRRAEQSARSQSAPSRRGRVRGAVSLRALRNVGGGNNPGPAPERCGALGLEEATVTWQRRWDWGKRTPAGGDAEAARVSRRRPLPHFGRSSLISLW

SEQ ID NO: 821506 - protein, 97 aa, Homo sapiens; identical to SEQ ID NO: 821499

SEQ ID NO: 821507 - protein, 521 aa, Homo sapiens
MNSSLGHRARPCLKIILLILELTYQNYSDIYTEQKLISRVVMQPNILTNSLTRSSNLSHRQIVKILVFCLKSCDFQKYPFSLRNLGNWKLFLWEMIAIISTEEMPLTEKCLLKEFLPKAFFGCNFIHLTYRPVVSGPLLLNSNFEVLNMIKMLDIFHWSSDLKLGHFERCICFCFLFDIFWLSTLLKTKRIKGIFKLLSVSSIPVGEVFSSEVNLYIYIDFKKLERCSLKCFQGKTIRIIRNSFDFLFYVSNIELFGGGHSDGRILAIVLNILPYIVLRIFAKTDFLEISSPSCALVFWFFCFETESCSVAQAGVQWHDLGSLQALPPGFTPFSCLSLPSSWDYGRPPPCPANFLYFVVETGFHRVSQDGLNLLTRLHLPKCWDYRHEPPHPASALFFKKKEMQEREGGSLLTIKADFLIFFSFFFEMESCSVSKAGVQWHGLSSLQPPFLGSSDCPALAAGVARITGTRHKAQLIFVFLVETGFDYVGQAGLKLLTSSDPPASASQRDGTIDMSHRAWPS

SEQ ID NO: 821508 - protein, 1374 aa, Homo sapiens
MSTEADEGITFSVPPFAPSGFCTIPEGGICRRGGAAAVGEGEEHQLPPPPPGSFWNVESAAAPGIGCPAATSSSSATRGRGSSVGGGSRRTTVAYVINEASQGQLVVAESEALQSLREACETVGATLETLHFGKLDFGETTVLDRFYNADIAVVEMSDAFRQPSLFYHLGVRESFSMANNIILYCDTNSDSLQSLKEIICQKNTMCTGNYTFVPYMITPHNKVYCCDSSFMKGLTELMQPNFELLLGPICLPLVDRFIQLLKVAQASSSQYFRESILNDIRKARNLYTGKELAAELARIRQRVDNIEVLTADIVINLLLSYRDIQDYDSIVKLVETLEKLPTFDLASHHHVKFHYAFALNRRNLPGDRAKALDIMIPMVQSEGQVASDMYCLVGRIYKDMFLDSNFTDTESRDHGASWFKKAFESEPTLQSGINYAVLLLAAGHQFESSFELRKVGVKLSSLLGKKGNLEKLQSYWEVGFFLGASVLANDHMRVIQASEKLFKLKTPAWYLKSIVETILIYKHFVKLTTEQPVAKQELVDFWMDFLVEATKTDVTVVRFPVLILEPTKIYQPSYLSINNEVEEKTISIWHVLPDDKKGIHEWNFSASSVRGVSISKFEERCCFLYVLHNSDDFQIYFCTELHCKKFFEMVNTITEEKGRSTEEGDCESDLLEYDYEYDENGDRVVLGKGTYGIVYAGRDLSNQVRIAIKEIPERDSRYSQPLHEEIALHKHLKHKNIVQYLGSFSENGFIKIFMEQVPGGSLSALLRSKWGPLKDNEQTIGFYTKQILEGLKYLHDNQIVHRDIKGDNVLINTYSGVLKISDFGTSKRLAGINPCTETFTGTLQYMAPEIIDKGPRGYGKAADIWSLGCTIIEMATGKPPFYELGEPQAAMFKVGMFKVHPEIPESMSAEAKAFILKCFEPDPDKRACANDLLVDEFLKVSSKKKKTQPKLSALSAGSNEYLRSISLPVPVLVEDTSSSSEYGSVSPDTELKVDPFSFKTRAKSCGERDVKGIRTLFLGIPDENFEDHSAPPSPEEKDSGFFMLRKDSERRATLHRILTEDQDKIVRNLMESLAQGAEEPKLKWEHITTLIASLREFVRSTDRKIIATTLSKLKLELDFDSHGISQVQVVLFGFQDAVNKVLRNHNIKPHWMFALDSIIRKAVQTAITILVPELRPHFSLASESDTADQEDLDVEDDHEEQPSNQTVRRPQAVIEDAVATSGVSTLSSTVSHDSQSAHRSLNVQLGRMKIETNRLLEELVRKEKELQALLHRAIEEKDQEIKHLKLKSQPIEIPELPVFHLNSSGTNTEDSELTDWLRVNGADEDTISRFLAEDYTLLDVLYYVTRDDLKCLRLRGGMLCTLWKAIIDFRNKQT

SEQ ID NO: 821509 - protein, 1356 aa, Homo sapiens
MSTEADEGITFSVPPFAPSGFCTIPEGGICRRGGAAAVGEGEEHQLPPPPPGSFWNVESAAAPGIGCPAATSSSSATRGRGSSVGGGSRRTTVAYVINEASQGQLVVAESEALQSLREACETVGATLETLHFGKLDFGETTVLDRFYNADIAVVEMSDAFRQPSLFYHLGVRESFSMANNIILYCDTNSDSLQSLKEIICQKNTMCTGNYTFVPYMITPHNKVYCCDSSFMKGLTELMQPNFELLLGPICLPLVDRFIQLLKVAQASSSQYFRESILNDIRKARNLYTGKELAAELARIRQRVDNIEVLTADIVINLLLSYRDIQDYDSIVKLVETLEKLPTFDLASHHHVKFHYAFALNRRNLPGDRAKALDIMIPMVQSEGQVASDMYCLVGRIYKDMFLDSNFTDTESRDHGASWFKKAFESEPTLQSGINYAVLLLAAGHQFESSFELRKVGVKLSSLLGKKGNLEKLQSYWEVGFFLGASVLANDHMRVIQASEKLFKLKTPAWYLKSIVETILIYKHFVKLTTEQPVAKQELVDFWMDFLVEATKTDVTVVRFPVLILEPTKIYQPSYLSINNEVEEKTISIWHVLPDDKKGIHEWNFSASSVRGVSISKFEERCCFLYVLHNSDDFQIYFCTELHCKKFFEMVNTITEEKGRSTEEGDCESDLLEYDYEYDENGDRVVLGKGTYGIVYAGRDLSNQVRIAIKEIPERDSRYSQPLHEEIALHKHLKHKNIVQYLGSFSENGFIKIFMEQVPGGSLSALLRSKWGPLKDNEQTIGFYTKQILEGLKYLHDNQIVHRDIKGDNVLINTYSGVLKISDFGTSKRLAGINPCTETFTGTLQYMAPEIIDKGPRGYGKAADIWSLGCTIIEMATGKPPFYELGEPQAAMFKVGMFKVHPEIPESMSAEAKAFILKCFEPDPDKRACANDLLVDEFLKVSSKKKKTQPKLSALSAGSNEYLRSISLPVPVLVEDTSSSSEYGSVSPDTELKVDPFSFKTRAKSCGERDVKGIRTLFLGIPDENFEDHSAPPSPEEKDSGFFMLRKDSERRATLHRILTEDQDIKWEHITTLIASLREFVRSTDRKIIATTLSKLKLELDFDSHGISQVQVVLFGFQDAVNKVLRNHNIKPHWMFALDSIIRKAVQTAITILVPELRPHFSLASESDTADQEDLDVEDDHEEQPSNQTVRRPQAVIEDAVATSGVSTLSSTVSHDSQSAHRSLNVQLGRMKIETNRLLEELVRKEKELQALLHRAIEEKDQEIKHLKLKSQPIEIPELPVFHLNSSGTNTEDSELTDWLRVNGADEDTISRFLAEDYTLLDVLYYVTRDDLKCLRLRGGMLCTLWKAIIDFRNKQT

SEQ ID NO: 821510 - protein, 1353 aa, Homo sapiens
MSTEADEGITFSVPPFAPSGFCTIPEGGICRRGGAAAVGEGEEHQLPPPPPGSFWNVESAAAPGIGCPAATSSSSATRGRGSSVGGGSRRTTVAYVINEASQGQLVVAESEALQSLREACETVGATLETLHFGKLDFGETTVLDRFYNADIAVVEMSDAFRQPSLFYHLGVRESFSMANNIILYCDTNSDSLQSLKEIICQKNTMCTGNYTFVPYMITPHNKVYCCDSSFMKGLTELMQPNFELLLGPICLPLVDRFIQLLKVAQASSSQYFRESILNDIRKARNLYTGKELAAELARIRQRVDNIEVLTADIVINLLLSYRDIQDYDSIVKLVETLEKLPTFDLASHHHVKFHYAFALNRRNLPGDRAKALDIMIPMVQSEGQVASDMYCLVGRIYKDMFLDSNFTDTESRDHGASWFKKAFESEPTLQSGINYAVLLLAAGHQFESSFELRKVGVKLSSLLGKKGNLEKLQSYWEVGFFLGASVLANDHMRVIQASEKLFKLKTPAWYLKSIVETILIYKHFVKLTTEQPVAKQELVDFWMDFLVEATKTDVTVVRFPVLILEPTKIYQPSYLSINNEVEEKTISIWHVLPDDKKGIHEWNFSASSVRGVSISKFEERCCFLYVLHNSDDFQIYFCTELHCKKFFEMVNTITEEKGRSTEEGDCESDLLEYDYEYDENGDRVVLGKGTYGIVYAGRDLSNQVRIAIKEIPERDSRYSQPLHEEIALHKHLKHKNIVQYLGSFSENGFIKIFMEQVPGGSLSALLRSKWGPLKDNEQTIGFYTKQILEGLKYLHDNQIVHRDIKGDNVLINTYSGVLKISDFGTSKRLAGINPCTETFTGTLQYMAPEIIDKGPRGYGKAADIWSLGCTIIEMATGKPPFYELGEPQAAMFKVGMFKVHPEIPESMSAEAKAFILKCFEPDPDKRACANDLLVDEFLKVSSKKKKTQPKLSALSAGSNEYLRSISLPVPVLVEDTSSSSEYGSVSPDTELKVDPFSFHSDENFEDHSAPPSPEEKDSGFFMLRKDSERRATLHRILTEDQDKIVRNLMESLAQGAEEPKLKWEHITTLIASLREFVRSTDRKIIATTLSKLKLELDFDSHGISQVQVVLFGFQDAVNKVLRNHNIKPHWMFALDSIIRKAVQTAITILVPELRPHFSLASESDTADQEDLDVEDDHEEQPSNQTVRRPQAVIEDAVATSGVSTLSSTVSHDSQSAHRSLNVQLGRMKIETNRLLEELVRKEKELQALLHRAIEEKDQEIKHLKLKSQPIEIPELPVFHLNSSGTNTEDSELTDWLRVNGADEDTISRFLAEDYTLLDVLYYVTRDDLKCLRLRGGMLCTLWKAIIDFRNKQT

SEQ ID NO: 821511 - protein, 223 aa, Homo sapiens
MFALDSIIRKAVQTAITILVPELRPHFSLASESDTADQEDLDVEDDHEEQPSNQTVRRPQAVIEDAVATSGVSTLSSTVSHDSQSAHRSLNVQLGRMKIETNRLLEELVRKEKELQALLHRAIEEKDQEIKHLKLKSQPIEIPELPVFHLNSSGTNTEDSELTDWLRVNGADEDTISRFLAEDYTLLDVLYYVTRDDLKCLRLRGGMLCTLWKAIIDFRNKQT

SEQ ID NO: 821512 - protein, 966 aa, Homo sapiens
MSTEADEGITFSVPPFAPSGFCTIPEGGICRRGGAAAVGEGEEHQLPPPPPGSFWNVESAAAPGIGCPAATSSSSATRGRGSSVGGGSRRTTVAYVINEASQGQLVVAESEALQSLREACETVGATLETLHFGKLDFGETTVLDRFYNADIAVVEMSDAFRQPSLFYHLGVRESFSMANNIILYCDTNSDSLQSLKEIICQKNTMCTGNYTFVPYMITPHNKVYCCDSSFMKGLTELMQPNFELLLGPICLPLVDRFIQLLKVAQASSSQYFRESILNDIRKARNLYTGKELAAELARIRQRVDNIEVLTADIVINLLLSYRDIQDYDSIVKLVETLEKLPTFDLASHHHVKFHYAFALNRRNLPGDRAKALDIMIPMVQSEGQVASDMYCLVGRIYKDMFLDSNFTDTESRDHGASWFKKAFESEPTLQSGINYAVLLLAAGHQFESSFELRKVGVKLSSLLGKKGNLEKLQSYWEVGFFLGASVLANDHMRVIQASEKLFKLKTPAWYLKSIVETILIYKHFVKLTTEQPVAKQELVDFWMDFLVEATKTDVTVVRFPVLILEPTKIYQPSYLSINNEVEEKTISIWHVLPDDKKGIHEWNFSASSVRGVSISKFEERCCFLYVLHNSDDFQIYFCTELHCKKFFEMVNTITEEKGRSTEEGDCESDLLEYDYEYDENGDRVVLGKGTYGIVYAGRDLSNQVRIAIKEIPERDSRYSQPLHEEIALHKHLKHKNIVQYLGSFSENGFIKIFMEQVPGGSLSALLRSKWGPLKDNEQTIGFYTKQILEGLKYLHGQSDSSPGHKGTLQYMAPEIIDKGPRGYGKAADIWSLGCTIIEMATGKPPLLLEELVRKEKELQALLHRAIEEKDQEIKHLKLKSQPIEIPELPVFHLNSSGTNTEDSELTDWLRVNGADEDTISRFLAEDYTLLDVLYYVTRDDLKCLRLRGGMLCTLWKAIIDFRNKQT

SEQ ID NO: 821513 - protein, 479 aa, Homo sapiens
MSTEADEGITFSVPPFAPSGFCTIPEGGICRRGGAAAVGEGEEHQLPPPPPGSFWNVESAAAPGIGCPAATSSSSATRGRGSSVGGGSRRTTVAYVINEASQGQLVVAESEALQSLREACETVGATLETLHFGKLDFGETTVLDRFYNADIAVVEMSDAFRQPSLFYHLGVRESFSMANNIILYCDTNSDSLQSLKEIICQKNTMCTGNYTFVPYMITPHNKVYCCDSSFMKGLTELMQPNFELLLGPICLPLVDRFIQLLKVAQASSSQYFRESILNDIRKARNLYTGKELAAELARIRQRVDNIEVLTADIVINLLLSYRDIQDYDSIVKLVETLEKLPTFDLASHHHVKFHYAFALNRRNLPGDRAKALDIMIPMVQSEGQVASDMYCLVGRIYKDMFLDSNFTDTESRDHGASWFKKAFESEPTLQSGINYAVLLLAAGHQFESSFELRKVGNYNLIFYMEIKKLDPTWCKEKES

SEQ ID NO: 821514 - protein, 474 aa, Homo sapiens
MSTEADEGITFSVPPFAPSGFCTIPEGGICRRGGAAAVGEGEEHQLPPPPPGSFWNVESAAAPGIGCPAATSSSSATRGRGSSVGGGSRRTTVAYVINEASQGQLVVAESEALQSLREACETVGATLETLHFGKLDFGETTVLDRFYNADIAVVEMSDAFRQPSLFYHLGVRESFSMANNIILYCDTNSDSLQSLKEIICQKNTMCTGNYTFVPYMITPHNKVYCCDSSFMKGLTELMQPNFELLLGPICLPLVDRFIQLLKVAQASSSQYFRESILNDIRKARNLYTGKELAAELARIRQRVDNIEVLTADIVINLLLSYRDIQDYDSIVKLVETLEKLPTFDLASHHHVKFHYAFALNRRNLPGDRAKALDIMIPMVQSEGQVASDMYCLVGRIYKDMFLDSNFTDTESRDHGASCIAVVEMNDAFRQPSLFYHLGVRESFSMANNIILYCDTNSDSLQVTEDCNFLAGKDR

SEQ ID NO: 821515 - protein, 798 aa, Homo sapiens
MVALPMVLVLLLVLSRGESELDAKIPSTGDATEWRNPHLSMLGSCQPAPSCQKCILSHPSCAWCKQLNFTASGEAEARRCARREELLARGCPLEELEEPRGQQEVLQDQPLSQGARGEGATQLAPQRVRVTLRPGEPQQLQVRFLRAEGYPVDLYYLMDLSYSMKDDLERVRQLGHALLVRLQEVTHSVRIGFGSFVDKTVLPFVSTVPSKLRHPCPTRLERCQSPFSFHHVLSLTGDAQAFEREVGRQSVSGNLDSPEGGFDAILQAALCQEQIGWRNVSRLLVFTSDDTFHTAGDGKLGGIFMPSDGHCHLDSNGLYSRSTEFDYPSVGQVAQALSAANIQPIFAVTSAALPVYQELSKLIPKSAVGELSEDSSNVVQLIMDAYNSLSSTVTLEHSSLPPGVHISYESQCEGPEKREGKAEDRGQCNHVRINQTVTFWVSLQATHCLPEPHLLRLRALGFSEELIVELHTLCDCNCSDTQPQAPHCSDGQGHLQCGVCSCAPGRLGRLCECSVAELSSPDLESGCRAPNGTGPLCSGKGHCQCGRCSCSGQSSGHLCECDDASCERHEGILCGGFGRCQCGVCHCHANRTGRACECSGDMDSCISPEGGLCSGHGRCKCNRCQCLDGYYGALCDQCPGCKTPCERHRDCAECGAFRTGPLATNCSTACAHTNVTLALAPILDDGWCKERTLDNQLFFFLVEDDARGTVVLRVRPQEKGADHTQAIVLGCVGGIVAVGLGLVLAYRLSVEIYDRREYSRFEKEQQQLNWKQDSNPLYKSAITTTINPRFQEADSPTL

SEQ ID NO: 821516 - protein, 798 aa, Homo sapiens; identical to SEQ ID NO: 821515

SEQ ID NO: 821517 - protein, 798 aa, Homo sapiens; identical to SEQ ID NO: 821515

SEQ ID NO: 821518 - protein, 798 aa, Homo sapiens; identical to SEQ ID NO: 821515

SEQ ID NO: 821519 - protein, 197 aa, Homo sapiens [sequence omitted]

SEQ ID NO: 821520 - protein, 650 aa, Homo sapiens
MVALPMVLVLLLVLSRGESELDAKIPSTGDATEWRNPHLSMLGSCQPAPSCQKCILSHPSCAWCKQLNFTASGEAEARRCARREELLARGCPLEELEEPRGQQEVLQDQPLSQGARGEGATQLAPQRVRVTLRPGEPQQLQVRFLRAEGYPVDLYYLMDLSYSMKDDLERVRQLGHALLVRLQEVTHSVRIGFGSFVDKTVLPFVSTVPSKLRHPCPTRLERCQSPFSFHHVLSLTGDAQAFEREVGRQSVSGNLDSPEGGFDAILQAALCQEQIGWRNVSRLLVFTSDDTFHTAGDGKLGGIFMPSDGHCHLDSNGLYSRSTEFDYPSVGQVAQALSAANIQPIFAVTSAALPVYQELSKLIPKSAVGELSEDSSNVVQLIMDAYNSLSSTVTLEHSSLPPGVHISYESQCEGPEKREGKAEDRGQCNHVRINQTVTFWVSLQATHCLPEPHLLRLRALGFSEELIVELHTLCDCNCSDTQPQAPHCSDGQGHLQCGVCRDCAECGAFRTGPLATNCSTACAHTNVTLALAPILDDGWCKERTLDNQLFFFLVEDDARGTVVLRVRPQEKGADHTQAIVLGCVGGIVAVGLGLVLAYRLSVEIYDRREYSRFEKEQQQLNWKQDSNPLYKSAITTTINPRFQEADSPTL

SEQ ID NO: 821521 - protein, 493 aa, Homo sapiens
LQSQCPSLGMKMPLQSQHRVDYPSVGQVAQALSAANIQPIFAVTSAALPVYQELSKLIPKSAVGELSEDSSNVVQLIMDAYNSLSSTVTLEHSSLPPGVHISYESQCEGPEKREGKAEDRGQCNHVRINQTVTFWVSLQATHCLPEPHLLRLRALGFSEELIVELHTLCDCNCSDTQPQAPHCSDGQGHLQCGVCSCAPGRLGRLCECSVAELSSPDLESGCRAPNGTGPLCSGKGHCQCGRCSCSGQSSGHLCECDDASCERHEGILCGGFGRCQCGVCHCHANRTGRACECSGDMDSCISPEGGLCSGHGRCKCNRCQCLDGYYGALCDQCPGCKTPCERHRDCAECGAFRTGPLATNCSTACAHTNVTLALAPILDDGWCKERTLDNQLFFFLVEDDARGTVVLRVRPQEKGADHTQAIVLGCVGGIVAVGLGLVLAYRLSVEIYDRREYSRFEKEQQQLNWKQDSNPLYKSAITTTINPRFQEADSPTL

SEQ ID NO: 821522 - protein, 208 aa, Homo sapiens
MVALPMVLVLLLVLSRGESELDAKIPSTGDATEWRNPHLSMLGSCQPAPSCQKCILSHPSCAWCKQLNFTASGEAEARRCARREELLARGCPLEELEEPRGQQEVLQDQPLSQGARGEGATQLAPQRVRVTLRPGEPQQLQVRFLRAEGYPVDLYYLMDLSYSMKDDLERVRQLGHALLVRLQEVTHSVRIGEPSAASRPVSPCLFNH

SEQ ID NO: 821523 - protein, 219 aa, Homo sapiens
MQGLLFSTLLLAGLAQFCCRVQGTGPLDTTPEGRPGEVSDAPQRKQFCHWPCKCPQQKPRCPPGVSLVRDGCGCCKICAKQPGEICNEADLCDPHKGLYCDYSVDRPRYETGVCAYLVAVGCEFNQVHYHNGQVFQPNPLFSCLCVSGAIGCTPLFIPKLAGSHCSGAKGGKKSDQSNCSLEPLLQQLSTSYKTMPDVCQASNLLPALRSLNCCLPSSL

SEQ ID NO: 821524 - protein, 332 aa, Homo sapiens
MKISRGRVCLESENKDAGVAGRKQFCHWPCKCPQQKPRCPPGVSLVRDGCGCCKICAKQPGEICNEADLCDPHKGLYCDYSVDRPRYETGVCAYLVAVGCEFNQVHYHNGQVFQPNPLFSCLCVSGAIGCTPLFIPKLAGSHCSGAKGGKKSDQSNCSLEPLLQQLSTSYKTMPAYRNLPLIWKKKCLVQATKWTPCSRTCGMGISNRVTNENSNCEMRKEKRLCYIQPCDSNILKTIKIPKGKTCQPTFQLSKAEKFVFSGCSSTQSYKPTFCGICLDKRCCIPNKSKMITIQFDCPNEGSFKWKMLWITSCVCQRNCREPGDIFSELKIL

SEQ ID NO: 821525 - protein, 372 aa, Homo sapiens
MNKRRLLYPSGWLHGPSDMQGLLFSTLLLAGLAQFCCRVQGTGPLDTTPEGRPGEVSDAPQRKQFCHWPCKCPQQKPRCPPGVSLVRDGCGCCKICAKQPGEICNEADLCDPHKGLYCDYSVDRPRYETGVCAYLVAVGCEFNQVHYHNGQVFQPNPLFSCLCVSGAIGCTPLFIPKLAGSHCSGAKGGKKSDQSNCSLEPLLQQLSTSYKTMPAYRNLPLIWKKKCLVQATKWTPCSRTCGMGISNRVTNENSNCEMRKEKRLCYIQPCDSNILKTIKIPKGKTCQPTFQLSKAEKFVFSGCSSTQSYKPTFCGICLDKRCCIPNKSKMITIQFDCPNEGSFKWKMLWITSCVCQRNCREPGDIFSELKIL

SEQ ID NO: 821526 - protein, 354 aa, Homo sapiens
MQGLLFSTLLLAGLAQFCCRVQGTGPLDTTPEGRPGEVSDAPQRKQFCHWPCKCPQQKPRCPPGVSLVRDGCGCCKICAKQPGEICNEADLCDPHKGLYCDYSVDRPRYETGVCAYLVAVGCEFNQVHYHNGQVFQPNPLFSCLCVSGAIGCTPLFIPKLAGSHCSGAKGGKKSDQSNCSLEPLLQQLSTSYKTMPAYRNLPLIWKKKCLVQATKWTPCSRTCGMGISNRVTNENSNCEMRKEKRLCYIQPCDSNILKTIKIPKGKTCQPTFQLSKAEKFVFSGCSSTQSYKPTFCGICLDKRCCIPNKSKMITIQFDCPNEGSFKWKMLWITSCVCQRNCREPGDIFSELKIL

SEQ ID NO: 821527 - protein, 331 aa, Homo sapiens
MKRLVCVLLVCSSAVAQLHKDPTLDHHWHLWKKTYGKQYKEKNEEAVRRLIWEKNLKFVMLHNLEHSMGMHSYDLGMNHLGDMTSEEVMSLMSSLRVPSQWQRNITYKSNPNRILPDSVDWREKGCVTEVKYQGSCGACWAFSAVGALEAQLKLKTGKLVSLSAQNLVDCSTEKYGNKGCNGGFMTTAFQYIIDNKGIDSDASYPYKAMDQKCQYDSKYRAATCSKYTELPYGREDVLKEAVANKGPVSVGVDARHPSFFLYRSGVYYEPSCTQNVNHGVLVVGYGDLNGKEYWLVKNSWGHNFGEEGYIRMARNKGNHCGIASFPSYPEI

SEQ ID NO: 821528 - protein, 331 aa, Homo sapiens; identical to SEQ ID NO: 821527

SEQ ID NO: 821529 - protein, 331 aa, Homo sapiens; identical to SEQ ID NO: 821527

SEQ ID NO: 821530 - protein, 331 aa, Homo sapiens; identical to SEQ ID NO: 821527

SEQ ID NO: 821531 - protein, 331 aa, Homo sapiens; identical to SEQ ID NO: 821527

SEQ ID NO: 821532 - protein, 331 aa, Homo sapiens; identical to SEQ ID NO: 821527

SEQ ID NO: 821533 - protein, 331 aa, Homo sapiens; identical to SEQ ID NO: 821527

SEQ ID NO: 821534 - protein, 331 aa, Homo sapiens; identical to SEQ ID NO: 821527

SEQ ID NO: 821535 - protein, 308 aa, Homo sapiens
MKRLVCVLLVCSSAVAQLHKDPTLDHHWHLWKKTYGKQYKEKNEEAVRRLIWEKNLKFVMLHNLEHSMGMHSYDLGMNHLGDMTSEEVMSLMSSLRVPSQWQRNITYKSNPNRILPDSVDWREKGCVTEVKYQGSCGACWAFSAVGALEAQLKLKTGKLVSLSAQNLVDCSTEKYGNKGCNGGFMTTAFQYIIDNKGIDSDASYPYKAMDQKCQYDSKYRAATCSKYTELPYGREDVLKEAVANKGPVSVGVDARHPSFFLYRSDGVLLCCQAGVRWHDLSSLQPLPPGFKQFSCLSLLSSWDYRCLL

SEQ ID NO: 821536 - protein, 331 aa, Homo sapiens; identical to SEQ ID NO: 821527

SEQ ID NO: 821537 - protein, 175 aa, Homo sapiens
MKRLVCVLLVCSSAVAQLHKDPTLDHHWHLWKKTYGKQYKEKNEEAVRRLIWEKNLKFVMLHNLEHSMGMHSYDLGMNHLGDMTSEEVMSLMSSLRVPSQWQRNITYKSNPNRILPDSVDWREKGCVTEVKYQGSCGACWAFSAVGALEAQLKLKTGKLVSLSAQNLVDCSTVHH

SEQ ID NO: 821538 - protein, 220 aa, Homo sapiens
MKRLVCVLLVCSSAVAQLHKDPTLDHHWHLWKKTYGKQYKEKNEEAVRRLIWEKNLKFVMLHNLEHSMGMHSYDLGMNHLGDMTSEEVMSLMSSLRVPSQWQRNITYKSNPNRILPDSVDWREKGCVTEVKYQGSCGACWAFSAVGALEAQLKLKTGKLVSLSAQNLVDCSTEKYGNKGCNGGFMTTAFQYIIDNKGIDSDASYPYKAMVSTMNHPVLRM

SEQ ID NO: 821539 - protein, 321 aa, Homo sapiens
MVARASELHKDPTLDHHWHLWKKTYGKQYKEKNEEAVRRLIWEKNLKFVMLHNLEHSMGMHSYDLGMNHLGDMTSEEVMSLMSSLRVPSQWQRNITYKSNPNRILPDSVDWREKGCVTEVKYQGSCGACWAFSAVGALEAQLKLKTGKLVSLSAQNLVDCSTEKYGNKGCNGGFMTTAFQYIIDNKGIDSDASYPYKAMDQKCQYDSKYRAATCSKYTELPYGREDVLKEAVANKGPVSVGVDARHPSFFLYRSGVYYEPSCTQNVNHGVLVVGYGDLNGKEYWLVKNSWGHNFGEEGYIRMARNKGNHCGIASFPSYPEI

SEQ ID NO: 821540 - protein, 331 aa, Homo sapiens; identical to SEQ ID NO: 821527

SEQ ID NO: 821541 - protein, 313 aa, Homo sapiens
MKRLVCVLLVCSSAVAQLHKDPTLDHHWHLWKKTYGKQYKEKNEEAVRRLIWDSYDLGMNHLGDMTSEEVMSLMSSLRVPSQWQRNITYKSNPNRILPDSVDWREKGCVTEVKYQGSCGACWAFSAVGALEAQLKLKTGKLVSLSAQNLVDCSTEKYGNKGCNGGFMTTAFQYIIDNKGIDSDASYPYKAMDQKCQYDSKYRAATCSKYTELPYGREDVLKEAVANKGPVSVGVDARHPSFFLYRSGVYYEPSCTQNVNHGVLVVGYGDLNGKEYWLVKNSWGHNFGEEGYIRMARNKGNHCGIASFPSYPEI

SEQ ID NO: 821542 - protein, 134 aa, Homo sapiens
PRVRPTRRYKAMDQKCQYDSKYRAATCSKYTELPYGREDVLKEAVANKGPVSVGVDARHPSFFLYRSGVYYEPSCTQNVNHGVLVVGYGDLNGKEYWLVKNSWGHNFGEEGYIRMARNKGNHCGIASFPSYPEI

SEQ ID NO: 821543 - protein, 331 aa, Homo sapiens; identical to SEQ ID NO: 821527

SEQ ID NO: 821544 - protein, 129 aa, Homo sapiens
MKRLVCVLLVCSSAVAQLHKDPTLDHHWHLWKKTYGKQYKEKNEEAVRRLIWEKNLKFVMLHNLEHSMGMHSYDLGMNHLGDMTSEEVMSLMSSLRVPSQWQRNITPLYSSLDDRVETLFQKNRKENIV

SEQ ID NO: 821545 - protein, 225 aa, Homo sapiens
MKRLVCVLLVCSSAVAQLHKDPTLDHHWHLWKKTYGKQYKEKNEEAVRRLIWEKNLKFVMLHNLEHSMGMHSYDLGMNHLGDMTSEEVMSLMSSLRVPSQWQRNITYKSNPNRILPDSVDWREKGCVTEVKYQGSCGACWAFSAVGALEAQLKLKTGKLVSLSAQNLVDCSTEKYGNKGCNGGFMTTAFQYIIDNKGIDSDASYPYKAMISVNMTQKSEEAVAMA

SEQ ID NO: 821546 - protein, 141 aa, Homo sapiens
MKRLVCVLLVCSSAVAQLHKDPTLDHHWHLWKKTYGKQYKEKNEEAVRRLIWEKNLKFVMLHNLEHSMGMHSYDLGMNHLGDMTSEEVMSLMSSLRVPSQWQRNITYKSNPNRILPDSVDWREKGCVTEVKYQVSITIPSL

SEQ ID NO: 821547 - protein, 134 aa, Homo sapiens
MKRLVCVLLVCSSAVAQLHKDPTLDHHWHLWKKTYGKQYKEKNEEAVRRLIWEKNLKFVMLHNLEHSMGMHSYDLGMNHLGDMTSEEVMSLMSSLRVPSQWQRNITYKSNPNRILPDSVDWREKGVAVVSDPLE

SEQ ID NO: 821548 - protein, 328 aa, Homo sapiens
MLPRVGCPALPLPPPPLLPLLPLLLLLLGASGGGGGARAEVLFRCPPCTPERLAACGPPPVAPPAAVAAVAGGARMPCAELVREPGCGCCSVCARLEGEACGVYTPRCGQGLRCYPHPGSELPLQALVMGEGTCEKRRDAEYGASPEQVADNGDDHSEGGLVENHVDSTMNMLGGGGSAGRKPLKSGMKELAVFREKVTEQHRQMGKGGKHHLGLEEPKKLRPPPARTPCQQELDQVLERISTMRLPDERGPLEHLYSLHIPNCDKHGLYNLKQCKMSLNGQRGECWCVNPNTGKLIQGAPTIRGDPECHLFYNEQQEARGVHTQRMQ

SEQ ID NO: 821549 - protein, 249 aa, Homo sapiens
RKKRRRRLPRSQGRATCPPARSLARPPRCGQGLRCYPHPGSELPLQALVMGEGTCEKRRDAEYGASPEQVADNGDDHSEGGLVENHVDSTMNMLGGGGSAGRKPLKSGMKELAVFREKVTEQHRQMGKGGKHHLGLEEPKKLRPPPARTPCQQELDQVLERISTMRLPDERGPLEHLYSLHIPNCDKHGLYNLKQCKMSLNGQRGECWCVNPNTGKLIQGAPTIRGDPECHLFYNEQQEARGVHTQRMQ

SEQ ID NO: 821550 - protein, 328 aa, Homo sapiens; identical to SEQ ID NO: 821548

SEQ ID NO: 821551 - protein, 328 aa, Homo sapiens; identical to SEQ ID NO: 821548

SEQ ID NO: 821552 - protein, 317 aa, Homo sapiens
MLPRVGCPALPLPPPPLLPLLPLLLLLLGASGGGGGARAEVLFRCPPCTPERLAACGPPPVAPPAAVAAVAGGARMPCAELVREPGCGCCSVCARLEGEACGVYTPRCGQGLRCYPHPGSELPLQALVMGEGTCEKRRDAEYGASPEQVADNGDDHSEGGLVENHVDSTMNMLGGGGSAGRKPLKSGMKELAVFREKVTEQHRQMGKGGKHHLGLEEPKKLRPPPARTPCQQELDQVLERISTMRLPDERGPLEHLYSLHIPNCDKHGLYNLKQCWCVNPNTGKLIQGAPTIRGDPECHLFYNEQQEARGVHTQRMQ

SEQ ID NO: 821553 - protein, 328 aa, Homo sapiens; identical to SEQ ID NO: 821548

SEQ ID NO: 821554 - protein, 328 aa, Homo sapiens; identical to SEQ ID NO: 821548

SEQ ID NO: 821555 - protein, 317 aa, Homo sapiens; identical to SEQ ID NO: 821552

SEQ ID NO: 821556 - protein, 280 aa, Homo sapiens
MLPRVGCPALPLPPPPLLPLLPLLLLLLGASGGGGGARAEVLFRCPPCTPERLAACGPPPVAPPAAVAAVAGGARMPCAELVREPGCGCCSVCARLEGEACGVYTPRCGQGLRCYPHPGSELPLQALVMGEGTCEKRRDAEYGASPEQVADNGDDHSEGGLVENHVDSTMNMLGGGGSAGRKPLKSGMKELAVFREKVTEQHRQMGKGGKHHLGLEEPKKLRPPPARTPCQQELDQVLERISTMRLPDERGPLEHLYSLHIPNCDKHGLYNLKQVSMVPA

SEQ ID NO: 821557 - protein, 181 aa, Homo sapiens
MPCNNGDDHSEGGLVENHVDSTMNMLGGGGSAGRKPLKSGMKELAVFREKVTEQHRQMGKGGKHHLGLEEPKKLRPPPARTPCQQELDQVLERISTMRLPDERGPLEHLYSLHIPNCDKHGLYNLKQCKMSLNGQRGECWCVNPNTGKLIQGAPTIRGDPECHLFYNEQQEARGVHTQRMQ

SEQ ID NO: 821558 - protein, 77 aa, Homo sapiens
MQAQQYQQQRRKFAAAFLAFIFILAAVDTAEAGKKEKPGNQKKKVRVLLWECMDFFSHHGSWSAQGAMAGLIQPPWP

SEQ ID NO: 821559 - protein, 168 aa, Homo sapiens
MQAQQYQQQRRKFAAAFLAFIFILAAVDTAEAGKKEKPEKKVKKSDCGEWQWSVCVPTSGDCGLGTREGTRTGAECKQTMKTQRCKIPCNWKKQFGAECKYQFQAWGECDLNTALKTRTGSLKRALHNAECQKTVTISKPCGKLTKPKPQAESKKKKKEGKKQEKMLD

SEQ ID NO: 821560 - protein, 168 aa, Homo sapiens; identical to SEQ ID NO: 821559

SEQ ID NO: 821561 - protein, 168 aa, Homo sapiens; identical to SEQ ID NO: 821559

SEQ ID NO: 821562 - protein, 101 aa, Homo sapiens
LQDSARVNTSLLLSSSWKPSRLPCSSPLCSSSACCRRGSTSSKPEEPPASRALEAPEAASSSKSRESFLPIFTVSQLTSSSPSSLSLSESRSLSDSALAVV

SEQ ID NO: 821563 - protein, 163 aa, Homo sapiens
MQAQQYQQQRRKFAAAFLAFIFILAAVDTAEAGKKEKPEKKVKKSDCGEWQWSVCVPTSGDCGLGTREGTRTGAECKQTMKTQRCKIPCNWKKQFGAECKYQFQAWGECLKTRTGSLKRALHNAECQKTVTISKPCGKLTKPKPQAESKKKKKEGKKQEKMLD

SEQ ID NO: 821564 - protein, 75 aa, Homo sapiens
WIVNEEEHITGLFPLNDLNTALKTRTGSLKRALHNAECQKTVTISKPCGKLTKPKPQAESKKKKKEGKKQEKMLD

SEQ ID NO: 821565 - protein, 222 aa, Homo sapiens
MAEKPKLHYFNARGRMESTRWLLAAAGVEFEEKFIKSAEDLDKLRNDGYLMFQQVPMVEIDGMKLVQTRAILNYIASKYNLYGKDIKERALIDMYIEGIADLGEMILLLPVCPPEEKDAKLALIKEKIKNRYFPAFEKVLKSHGQDYLVGNKLSRADIHLVELLYYVEELDSSLISSFPLLKALKTRISNLPTVKKFLQPGSPRKPPMDEKSLEEARKIFRF

SEQ ID NO: 821566 - protein, 222 aa, Homo sapiens; identical to SEQ ID NO: 821565

SEQ ID NO: 821567 - protein, 222 aa, Homo sapiens; identical to SEQ ID NO: 821565

SEQ ID NO: 821568 - protein, 192 aa, Homo sapiens
MAEKPKLHYFNARGRMESTRWLLAAAGVEFEEKFIKSAEDLDKLRNDGYLMFQQVPMVEIDGMKLVQTRAILNYIASKYNLYGKDIKERALIDMYIEGIADLGEMILLLPVCPPEEKDAKLALIKEKIKNRYFPAFEKVLKSHGQDYLVGNKLSRADIHLVELLYYVEELDSSLISSFPLLKAWQPKEASHG

SEQ ID NO: 821569 - protein, 139 aa, Homo sapiens
MAEKPKLHYFNARGRMESTRWLLAAAGVEFEEKFIKSAEDLDKLRNDGYLMFQQVPMVEIDGMKLVQTRAILNYIASKYNLYGKDIKERALIDMYIEGIADLGEMILLLPVCPPEEKDAKLALIKEKIKNRYFPAFEKG

SEQ ID NO: 821570 - protein, 139 aa, Homo sapiens; identical to SEQ ID NO: 821569

SEQ ID NO: 821571 - protein, 222 aa, Homo sapiens; identical to SEQ ID NO: 821565

SEQ ID NO: 821572 - protein, 139 aa, Homo sapiens; identical to SEQ ID NO: 821569

SEQ ID NO: 821573 - protein, 228 aa, Homo sapiens
MAEKPKLHYFNARGRMESTRWLLAAAGVEFEEKFIKSAEDLDKLRNDGYLMFQQVPMVEIDGMKLVQTRAILNYIASKYNLYGKDIKERALIDMYIEGIADLGEMILLLPVCPPEEKDAKLALIKEKIKNRYFPAFEKVLKSHGQDYLVGNKLSRADIHLVELLYYVEELDSSLISSFPLLKLSRTLAPHTVSLTEKRWSHGPENQNQQPAHSEEVSTAWQPKEASHG

SEQ ID NO: 821574 - protein, 172 aa, Homo sapiens
MFQQVPMVEIDGMKLVQTRAILNYIASKYNLYGKDIKERALIDMYIEGIADLGEMILLLPVCPPEEKDAKLALIKEKIKNRYFPAFEKVLKSHGQDYLVGNKLSRADIHLVELLYYVEELDSSLISSFPLLKALKTRISNLPTVKKFLQPGSPRKPPMDEKSLEEARKIFRF

SEQ ID NO: 821575 - protein, 129 aa, Homo sapiens
MYIEGIADLGEMILLLPVCPPEEKDAKLALIKEKIKNRYFPAFEKVLKSHGQDYLVGNKLSRADIHLVELLYYVEELDSSLISSFPLLKALKTRISNLPTVKKFLQPGSPRKPPMDEKSLEEARKIFRF

SEQ ID NO: 821576 - protein, 139 aa, Homo sapiens; identical to SEQ ID NO: 821569

SEQ ID NO: 821577 - protein, 157 aa, Homo sapiens
MYIEGIADLGEMILLLPVCPPEEKDAKLALIKEKIKNRYFPAFEKVLKSHGQDYLVGNKLSRADIHLVELLYYVEELDSSLISSFPLLKALKTRISNLPTVKKFLQPGSPRKPPMDEKSLEEARSNTNVLKFCNNKVLYLSVDCACCEANELFQIIC

SEQ ID NO: 821578 - protein, 1022 aa, Homo sapiens
SSETNMKVRQAIPVTSELGDISKLAKFDGEVICEPPNNKLDKFSGTLYWKENKFPLSNQNMLLRGCVLRNTEWCFGLVIFAGPDTKLMQNSGRTKFKRTSIDRLMNTLVLWIFGFLVCMGVILAIGNAIWEHEVGMRFQVYLPWDEAVDSAFFSGFLSFWSYIIILNTVVPISLYVSVEVIRLGHSYFINWDKKMFCMKKRTPAEARTTTLNEELGQVEYIFSDKTGTLTQNIMVFNKCSINGHSYGDVFDVLGHKAELGERPEPVDFSFNPLADKKFLFWDPSLLEAVKIGDPHTHEFFRLLSLCHTVMSEEKNEGELYYKAQSPDEGALVTAARNFGFVFRSRTPKTITVHEMGTAITYQLLAILDFNNIRKRMSVIVRNPEGKIRLYCKGADTILLDRLHHSTQELLNTTMDHLNEYAGEGLRTLVLAYKDLDEEYYEEWAERRLQASLAQDSREDRLASIYEEVENNMMLLGATAIEDKLQQGVPETIALLTLANIKIWVLTGDKQETAVNIGYSCKMLTDDMTEVFIVTGHTVLEVREELRKAREKMMDSSRSVGNGFTYQDKLSSSKLTSVLEAVAGEYALVINGHSLAHALEADMELEFLETACACKAVICCRVTPLQKAQVVELVKKYKKAVTLAIGDGANDVSMIKTAHIGVGISGQEGIQAVLASDYSFSQFKFLQRLLLVHGRWSYLRMCKFLCYFFYKNFAFTMVHFWFGFFCGFSAQTVYDQYFITLYNIVYTSLPVLAMGVFDQDVPEQRSMEYPKLYEPGQLNLLFNKREFFICIAQGIYTSVLMFFIPYGVFADATRDDGTQLADYQSFAVTVATSLVIVVSVQIGLDTGYWTAINHFFIWGSLAVYFAILFAMHSNGLFDMFPNQFRFVGNAQNTLAQPTVWLTIVLTTVVCIMPVVAFRFLRLNLKPDLSDTVRYTQLVRKKQKAQHRCMRRVGRTGSRRSGYAFSHQEGFGELIMSGKNMRLSSLALSSFTTRSSSSWIESLRRKKSDSASSPSGGADKPLKG

SEQ ID NO: 821579 - protein, 962 aa, Homo sapiens
MLLRGCVLRNTEWCFGLVIFAGPDTKLMQNSGRTKFKRTSIDRLMNTLVLWIFGFLVCMGVILAIGNAIWEHEVGMRFQVYLPWDEAVDSAFFSGFLSFWSYIIILNTVVPISLYVSVEVIRLGHSYFINWDKKMFCMKKRTPAEARTTTLNEELGQVEYIFSDKTGTLTQNIMVFNKCSINGHSYGDVFDVLGHKAELGERPEPVDFSFNPLADKKFLFWDPSLLEAVKIGDPHTHEFFRLLSLCHTVMSEEKNEGELYYKAQSPDEGALVTAARNFGFVFRSRTPKTITVHEMGTAITYQLLAILDFNNIRKRMSVIVRNPEGKIRLYCKGADTILLDRLHHSTQELLNTTMDHLNEYAGEGLRTLVLAYKDLDEEYYEEWAERRLQASLAQDSREDRLASIYEEVENNMMLLGATAIEDKLQQGVPETIALLTLANIKIWVLTGDKQETAVNIGYSCKMLTDDMTEVFIVTGHTVLEVREELRKAREKMMDSSRSVGNGFTYQDKLSSSKLTSVLEAVAGEYALVINGHSLAHALEADMELEFLETACACKAVICCRVTPLQKAQVVELVKKYKKAVTLAIGDGANDVSMIKTAHIGVGISGQEGIQAVLASDYSFSQFKFLQRLLLVHGRWSYLRMCKFLCYFFYKNFAFTMVHFWFGFFCGFSAQTVYDQYFITLYNIVYTSLPVLAMGVFDQDVPEQRSMEYPKLYEPGQLNLLFNKREFFICIAQGIYTSVLMFFIPYGVFADATRDDGTQLADYQSFAVTVATSLVIVVSVQIGLDTGYWTAINHFFIWGSLAVYFAILFAMHSNGLFDMFPNQFRFVGNAQNTLAQPTVWLTIVLTTVVCIMPVVAFRFLRLNLKPDLSDTVRYTQLVRKKQKAQHRCMRRVGRTGSRRSGYAFSHQEGFGELIMSGKNMRLSSLALSSFTTRSSSSWIESLRRKKSDSASSPSGGADKPLKG

SEQ ID NO: 821580 - protein, 937 aa, Homo sapiens [sequence omitted]

SEQ ID NO: 821581 - protein, 877 aa, Homo sapiens
LSPGGGPAAKAHVGGAPPLLPDPSLTSCPLCSVEVIRLGHSYFINWDKKMFCMKKRTPAEARTTTLNEELGQVEYIFSDKTGTLTQNIMVFNKCSINGHSYGDVFDVLGHKAELGERPEPVDFSFNPLADKKFLFWDPSLLEAVKIGDPHTHEFFRLLSLCHTVMSEEKNEGELYYKAQSPDEGALVTAARNFGFVFRSRTPKTITVHEMGTAITYQLLAILDFNNIRKRMSVIVRNPEGKIRLYCKGADTILLDRLHHSTQELLNTTMDHLNEYAGEGLRTLVLAYKDLDEEYYEEWAERRLQASLAQDSREDRLASIYEEVENNMMLLGATAIEDKLQQGVPETIALLTLANIKIWVLTGDKQETAVNIGYSCKMLTDDMTEVFIVTGHTVLEVREELRKAREKMMDSSRSVGNGFTYQDKLSSSKLTSVLEAVAGEYALVINGHSLAHALEADMELEFLETACACKAVICCRVTPLQKAQVVELVKKYKKAVTLAIGDGANDVSMIKTAHIGVGISGQEGIQAVLASDYSFSQFKFLQRLLLVHGRWSYLRMCKFLCYFFYKNFAFTMVHFWFGFFCGFSAQTVYDQYFITLYNIVYTSLPVLAMGVFDQDVPEQRSMEYPKLYEPGQLNLLFNKREFFICIAQGIYTSVLMFFIPYGVFADATRDDGTQLADYQSFAVTVATSLVIVVSVQIGLDTGYWTAINHFFIWGSLAVYFAILFAMHSNGLFDMFPNQFRFVGNAQNTLAQPTVWLTIVLTTVVCIMPVVAFRFLRLNLKPDLSDTVRYTQLVRKKQKAQHRCMRRVGRTGSRRSGYAFSHQEGFGELIMSGKNMRLSSLALSSFTTRSSSSWIESLRRKKSDSASSPSGGADKPLKG

SEQ ID NO: 821582 - protein, 134 aa, Homo sapiens [sequence omitted]

SEQ ID NO: 821583 - protein, 159 aa, Homo sapiens
MLLRGCVLRNTEWCFGLVIFAGPDTKLMQNSGRTKFKRTSIDRLMNTLVLWIFGFLVCMGVILAIGNAIWEHEVGMRFQVYLPWDEAVDSAFFSGFLSFWSYIIILNTVVPISLYVRYVPSLTWGLSRESGGPIELFFSMKMKSLRSNEKSSSSCTVNI

SEQ ID NO: 821584 - protein, 568 aa, Homo sapiens
MLPGLAAAAAHRCSWSSLCRLRLRCRAAACNPSDRQEWQNLVTFGSFSNVVPCSHPYIGTLSQVKLYSTNVQKEGQGSQTLRVEKVPSFETAEGIGAELKAPLKQEPLQVRVKAVLKKREYGSKYTQNNFITGVRAINEFCLKSSDLEQLRKIRRRSPHEDTESFTVYLRSDVEAKSLEVWGSPEALAREKKLRKEAEIEYRERLFRNQKILREYRDFLGNTKPRSRTASVFFKGPGKVVMVAICINGLNCFFKFLAWIYTGSASMFSEAIHSLSDTCNQGLLALGISKSVQTPDPSHPYGFSNMRYISSLISGVGIFMMGAGLSWYHGVMGLLHPQPIESLLWAYCILAGSLVSEGATLLVAVNELRRNARAKGMSFYKYVMESRDPSTNVILLEDTAAVLGVIIAATCMGLTSITGNPLYDSLGSLGVGTLLGMVSAFLIYTNTEALLGRSIQPEQVQRLTELLENDPSVRAIHDVKATDLGLGKVRFKAEVDFDGRVVTRSYLEKQDFDQMLQEIQEVKTPEELETFMLKHGENIIDTLGAEVDRLEKELKKRNPEVRHVDLEIL

SEQ ID NO: 821585 - protein, 145 aa, Homo sapiens
MLPGLAAAAAHRCSWSSLCRLRLRCRAAACNPSDRQEWQNLVTFGSFSNVVPCSHPYIGTLSQVKLYSTNVQKEGQGSQTLRVEKVPSFETAEGIGAELKAPLKQEPLQVRVKAVLKKREYGSKYTQNNFITGVRAINEFCLKSR

SEQ ID NO: 821586 - protein, 568 aa, Homo sapiens; identical to SEQ ID NO: 821584

SEQ ID NO: 821587 - protein, 568 aa, Homo sapiens; identical to SEQ ID NO: 821584

SEQ ID NO: 821588 - protein, 568 aa, Homo sapiens; identical to SEQ ID NO: 821584

SEQ ID NO: 821589 - protein, 242 aa, Homo sapiens
SRGSPVRTILNQFNPFYEAYCILAGSLVSEGATLLVAVNELRRNARAKGMSFYKYVMESRDPSTNVILLEDTAAVLGVIIAATCMGLTSITGNPLYDSLGSLGVGTLLGMVSAFLIYTNTEALLGRSIQPEQVQRLTELLENDPSVRAIHDVKATDLGLGKVRFKAEVDFDGRVVTRSYLEKQDFDQMLQEIQEVKTPEELETFMLKHGENIIDTLGAEVDRLEKELKKRNPEVRHVDLEIL

SEQ ID NO: 821590 - protein, 556 aa, Homo sapiens
MLPGLAAAAAHRCSWSSLCRLRLRCRAAACNPSDRQEWQNLVTFGSFSNVVPCSHPYIGTLSQVKLYSTNVQKEGQGSQTLRVEKVPSFETAEGIGAELKAPLKQEPLQVRVKAVLKKREYGSKYTQNNFITGVRAINEFCLKSSDLEQLRKIRRRSPHEDTESFTVYLRSDVEAKSLEVWGSPEALAREKKLRKEAEIEYRERLFRNQKILREYRDFLGNTKPRSRTASVFFKGPGKVVMVAICINGLNCFFKFLAWIYTGSASMFSEAIHSLSDTCNQGLLALGISKSVQTPDPSHPYGFSNMRYISSLISGVGIFMMGAGLSWYHGVMGLLHPQPIESLLWAYCILAGSLVSEGATLLVAVNELRRNARAKGMSFYKYVMESRDPSTNVILLEDTAAVLGVIIAATCMGLTSITGNPLYDSLGSLGVGTLLGMVSAFLIYTNTEALLGRSIQPEQVQRLTELLENDPSVRAIHDVKATDLGLGKVRFKAEVDFDGRVVTRSYLEKQDFDQMLQIKICQSSIFWLNLGMWFLNSHSVSKSVFPYRMWKLFLHTL

SEQ ID NO: 821591 - protein, 184 aa, Homo sapiens
MDIAKRNGLFIMSFFCIGVSNLNVLRNFTYVMTGNPLYDSLGSLGVGTLLGMVSAFLIYTNTEALLGRSIQPEQVQRLTELLENDPSVRAIHDVKATDLGLGKVRFKAEVDFDGRVVTRSYLEKQDFDQMLQEIQEVKTPEELETFMLKHGENIIDTLGAEVDRLEKELKKRNPEVRHVDLEIL

SEQ ID NO: 821592 - protein, 555 aa, Homo sapiens
MLPGLAAAAAHRCSWSSLCRLRLRCRAAACNPSDRQEWQNLVTFGSFSNVVPCSHPYIGTLSQVKLYSTNVQKEGQGSQTLRVEKVPSFETAEGIGAELKAPLKQEPLQVRVKAVLKKREYGSKYTQNNFITGVRAINEFCLKSSDLEQLRKIRRRSPHEDTESFTVYLRSDVEAKSLEVWGSPEALAREKKLRKEAEIEYRERLFRNQKILREYRDFLGNTKPRSRTASVFFKGPGKVVMVAICINGLNCFFKFLAWIYTGSASMFSEAIHSLSDTCNQGLLALGISKSVQTPDPSHPYGFSNMRYISSLISGVGIFMMGAGLSWYHGVMGLLHPQPIESLLWAYCILAGSLVSEGATLLVAVNELRRNARAKGMSFYKYVMESRDPSTNVILLEDTAAVLGVIIAATCMGLTSITGNPLYDSLGSLGVGTLLGMVSAFLIYTNTEALLGRSIQPEQVQRLTELLENDPSVRAIHDVKATDLGLGKVRFKAEVDFDGRVVTRSYLEKQDFDQMLQEIQEVKTPEELETFMLKHGENIIDTLGAEVDRLEKELKK

SEQ ID NO: 821593 - protein, 559 aa, Homo sapiens
MLPGLAAAAAHRCSWSSLCRLRLRCRAAACNPSDRQEWQNLVTFGSFSNVVPCSHPYIGTLSQVKLYSTNVQKEGQGSQTLRVEKVPSFETAEGIGAELKAPLKQEPLQVRVKAVLKKREYGSKYTQNNFITGVRAINEFCLKSSDLEQLRKIRRRSPHEDTESFTVYLRSDVEAKSLEVWGSPEALAREKKLRKEAEIEYRERLFRNQKILREYRDFLGNTKPRSRTASVFFKGPGKVVMVAICINGLNCFFKFLAWIYTGSASMFSEAIHSLSDTCNQGLLALGISKSVQTPDPSHPYGFSNMRYISSLISGVGIFMMGAGLSWYHGVMGLLHPQPIESLLWAYCILAGSLVSEGATLLVAVNELRRNARAKGMSFYKYVMESRDPSTNVILLEDTAAVLGVIIAATCMGLTSITGNPLYDSLGSLGVGTLLGMVSAFLIYTNTEALLGRSIQPEQVQRLTELLENDPSVRAIHDVKATDLGLGKVRFKAEVDFDGRVVTRSYLEKQDFDQMLQEIQEVKTPEELETFMLKHGENIIDTLGAEVDRLEKELKFILCL

SEQ ID NO: 821594 - protein, 401 aa, Homo sapiens
MLPGLAAAAAHRCSWSSLCRLRLRCRAAACNPSDRQEWQNLVTFGSFSNVVPCSHPYIGTLSQVKLYSTNVQKEGQGSQTLRVEKVPSFETAEGIGAELKAPLKQEPLQVRVKAVLKKREYGSKYTQNNFITGVRAINEFCLKSSDLEQLRKIRRRSPHEDTESFTVYLRSDVEAKSLEVWGSPEALAREKKLRKEAEIEYRERLFRNQKILREYRDFLGNTKPRSRTASVFFKGPGKVVMVAICINGLNCFFKFLAWIYTGSASMFSEAIHSLSDTCNQGLLALGISKSVQTPDPSHPYGFSNMRYISSLISGVGIFMMGAGLSWYHGVMGLLHPQPIESLLWAYCILAGSLVSEGATLLVAVNELRRNARAKGMSFYKYVIEVRPMQVAAIITPKNCSS

SEQ ID NO: 821595 - protein, 299 aa, Homo sapiens
MLPGLAAAAAHRCSWSSLCRLRLRCRAAACNPSDRQEWQNLVTFGSFSNVVPCSHPYIGTLSQVKLYSTNVQKEGQGSQTLRVEKVPSFETAEGIGAELKAPLKQEPLQVRVKAVLKKREYGSKYTQNNFITGVRAINEFCLKSSDLEQLRKIRRRSPHEDTESFTVYLRSDVEAKSLEVWGSPEALAREKKLRKEAEIEYRERLFRNQKILREYRDFLGNTKPRSRTASVFFKGPGKVVMVAICINGLNCFFKFLAWIYTGSASMFSEAIHSLSDTCNQGLLALGISKSVQTPDPSHP

SEQ ID NO: 821596 - protein, 213 aa, Homo sapiens
MLPGLAAAAAHRCSWSSLCRLRLRCRAAACNPSDRQEWQNLVTFGSFSNVVPCSHPYIGTLSQVKLYSTNVQKEGQGSQTLRVEKVPSFETAEGIGAELKAPLKQEPLQVRVKAVLKKREYGSKYTQNNFITGVRAINEFCLKSSDLEQLRKIRRRSPHEDTESFTVYLRSDVEAKSLEVWGSPEALAREKKLRKEAEIEYRERPQQNGETHF

SEQ ID NO: 821597 - protein, 203 aa, Homo sapiens
ETSLELSPTDLSFTGIQTVMFETVYLRRSRDSPSSPKAHCNWPSAPFKLDFWFLLSFCPWILKSFFLRSFCRFSFSSSSFCLALKCSLFAGGYATCRLFDLRADQELMTYSHDNIICGITSVSFSKSGRLLLAGYDDFNCNVWDALKADRAGTWPWGLSVSCGHLRGIFRANTEWLHKLQCFSIGGTVAWRSRSDSRKLMAQL

SEQ ID NO: 821598 - protein, 118 aa, Homo sapiens
  misc_feature (1)..(1): Xaa can be any naturally occurring amino acid
  misc_feature (28)..(28): Xaa can be any naturally occurring amino acid
  misc_feature (43)..(43): Xaa can be any naturally occurring amino acid
XKGITTWNIMPRVNRKGSCKEHRSSMYXGCAGINVAHKEPSKXRSGQSRNGYNCKRLFLKRKRTPKDCLPYWVGLLLESHAVEMLKSAYGTQSSVLEHFTRRVYISQIAVPAALKKNP

SEQ ID NO: 821599 - protein, 340 aa, Homo sapiens [sequence omitted]

SEQ ID NO: 821600 - protein, 340 aa, Homo sapiens [sequence omitted]

SEQ ID NO: 821601 - protein, 340 aa, Homo sapiens [sequence omitted]

SEQ ID NO: 821602 - protein, 340 aa, Homo sapiens [sequence omitted]

SEQ ID NO: 821603 - protein, 327 aa, Homo sapiens
MSELDQLRQEAEQLKNQIRITNNIDPVGRIQMRTRRTLRGHLAKIYAMHWGTDSRLLVSASQDGKLIIWDSYTTNKVHAIPLRSSWVMTCAYAPSGNYVACGGLDNICSIYNLKTREGNVRVSRELAGHTGYLSCCRFLDDNQIVTSSGDTTCALWDIETGQQTTTFTGHTGDVMSLSLAPDTRLFVSGACDASAKLWDVREGMCRQTFTGHESDINAICFFPNGNAFATGSDDATCRLFDLRADQELMTYSHDNIICGITSVSFSKSGRLLLAGYDDFNCNVWDALKADRAGVLAGHDNRVSCLGVTDDGMAVATGSWDSFLKIWN

SEQ ID NO: 821604 - protein, 382 aa, Homo sapiens
MSELDQLRQEAEQLKNQIRDARKACADATLSQITNNIDPVGRIQMRTRRTLRGHLAKIYAMHWGTDSRLLVSASQDGKLIIWDSYTTNKPRHPSALLAKIYAMHWGKTPGFSSVPRRMVNLSSGTATPPNKVHAIPLRSSWVMTCAYAPSGNYVACGGLDNICSIYNLKTREGNVRVSRELAGHTGYLSCCRFLDDNQIVTSSGDTTCALWDIETGQQTTTFTGHTGDVMSLSLAPDTRLFVSGACDASAKLWDVREGMCRQTFTGHESDINAICFFPNGNAFATGSDDATCRLFDLRADQELMTYSHDNIICGITSVSFSKSGRLLLAGYDDFNCNVWDALKADRAGVLAGHDNRVSCLGVTDDGMAVATGSWDSFLKIWN

SEQ ID NO: 821605 - protein, 340 aa, Homo sapiens [sequence omitted]

SEQ ID NO: 821606 - protein, 264 aa, Homo sapiens
RGSPIVQRGRWDKFTCIGDQTRSPSELRYAPSGNYVACGGLDNICSIYNLKTREGNVRVSRELAGHTGYLSCCRFLDDNQIVTSSGDTTCALWDIETGQQTTTFTGHTGDVMSLSLAPDTRLFVSGACDASAKLWDVREGMCRQTFTGHESDINAICFFPNGNAFATGSDDATCRLFDLRADQELMTYSHDNIICGITSVSFSKSGRLLLAGYDDFNCNVWDALKADRAGVLAGHDNRVSCLGVTDDGMAVATGSWDSFLKIWN

SEQ ID NO: 821607 - protein, 340 aa, Homo sapiens [sequence omitted]

SEQ ID NO: 821608 - protein, 340 aa, Homo sapiens [sequence omitted]

SEQ ID NO: 821609 - protein, 340 aa, Homo sapiens [sequence omitted]

SEQ ID NO: 821610 - protein, 340 aa, Homo sapiens [sequence omitted]

SEQ ID NO: 821611 - protein, 409 aa, Homo sapiens
MSELDQLRQEAEQLKNQIRDARKACADATLSQITNNIDPVGRIQMRTRRTLRGHLAKIYAMHWGTDSRLLVSASQDGKLIIWDSYTTNKVHAIPLRSSWVMTCAYAPSGNYVACGGLDNICSIYNLKTREGNVRVSRELAGHTGYLSCCRFLDDNQIVTSSGDTTCALWDIETGQQTTTFTGHTGDVMSLSLAPDTRLFVSGACDASAKLWDVREGMCRQTFTGHESDINAICFFPNGNAFATGSDDATCRLFDLRADQELMTYSHDNIICGITSVSFSKSGRLLLAGYDDFNCNVWDALKADRAGVLAGHDNRVSCLGVTDDACGCHGDWKTIPTWTRYHESISYPTVLTWTPYTSPQNFKRARSFFLHLLLKPRAQFPLRERSLCCKLKQIVHSFRGHRLCFLFCLE

SEQ ID NO: 821612 - protein, 340 aa, Homo sapiens [sequence omitted]

SEQ ID NO: 821613 - protein, 340 aa, Homo sapiens [sequence omitted]

SEQ ID NO: 821614 - protein, 340 aa, Homo sapiens [sequence omitted]

SEQ ID NO: 821615 - protein, 340 aa, Homo sapiens [sequence omitted]

SEQ ID NO: 821616 - protein, 340 aa, Homo sapiens [sequence omitted]

SEQ ID NO: 821617 - protein, 340 aa, Homo sapiens [sequence omitted]

SEQ ID NO: 821618 - protein, 340 aa, Homo sapiens [sequence omitted]

SEQ ID NO: 821619 - protein, 340 aa, Homo sapiens [sequence omitted]

SEQ ID NO: 821620 - protein, 340 aa, Homo sapiens [sequence omitted]

SEQ ID NO: 821621 - protein, 340 aa, Homo sapiens [sequence omitted]

SEQ ID NO: 821622 - protein, 340 aa, Homo sapiens [sequence omitted]

SEQ ID NO: 821623 - protein, 340 aa, Homo sapiens [sequence omitted]

SEQ ID NO: 821624 - protein, 357 aa, Homo sapiens
MSELDQLRQEAEQLKNQIRDARKACADATLSQITNNIDPVGRIQMRTRRTLRGHLAKIYAMHWGTDSRLLVSASQDGKLIIWDSYTTNKVHAIPLRSSWVMTCAYAPSGNYVACGGLDNICSIYNLKTREGNVRVSRELAGHTGYLSCCRFLDDNQIVTSSGDTTCALWDIETGQQTTTFTGHTGDVMSLSLAPDTRLFVSGACDASAKLWDVREGMCRQTFTGHESDINAICFFPNGNAFATGSDDATCRLFDLRADQELMTYSHDNIICGITSVSFSKSGRLLLAGYDDFNCNVWDALKADRAGTWPWGLSVSCGHLRGIFRANTEWLHKLQCFSIGGTVAWRSRSDSRKLMAQL

SEQ ID NO: 821625 - protein, 272 aa, Homo sapiens
MSELDQLRQEAEQLKNQIRDARKACADATLSQITNNIDPVGRIQMRTRRTLRGHLAKIYAMHWGTDSRLLVSASQDGKLIIWDSYTTNKVHAIPLRSSWVMTCAYAPSGNYVACGGLDNICSIYNLKTREGNVRVSRELAGHTGYLSCCRFLDDNQIVTSSGDTTCALWDIETGQQTTTFTGHTGDVMSLSLAPDTRLFVSGACDASAKLWDVREGMCRQTFTGHESDINAICFFNGKHCHWLDEAPARCLTLGDRIRYQNIGENGYKGTWE

SEQ ID NO: 821626 - protein, 151 aa, Homo sapiens
MSELDQLRQEAEQLKNQIRDARKACADATLSQITNNIDPVGRIQMRTRRTLRGHLAKIYAMHWGTDSRLLVSASQDGKLIIWDSYTTNKVHAIPLRSSWVMTCAYAPSGNYVACGGLDNICSIYNLKTREGNVRVSRELAGHTARQLPGRD

SEQ ID NO: 821627 - protein, 1241 aa, Homo sapiens
MSSAPRRPAKGADSFCTPEPESLGPGTPGFPEQEEDELHRTLGVERFEEILQEAGSRGGEEPGRSYGEEDFEYHRQSSHHIHHPLSTHLPPDARRRKTPQGPGRKPRRRPGASPTGETPTIEEGEEDEDEASEAEGARALTQPSPVSTPSSVQFFLQEDDSADRKAERTSPSSPAPLPHQEATPRASKGAQAGTQVEEAEAEAVAVASGTAGGDDGGASGRPLPKAQPGHRSYNLQERRRIGSMTGAEQALLPRVPTDEIEAQTLATADLDLMKSHRFEDVPGVRRHLVRKNAKGSTQSGREGREPGPTPRARPRAPHKPHEVFVELNELLLDKNQEPQWRETARWIKFEEDVEEETERWGKPHVASLSFRSLLELRRTLAHGAVLLDLDQQTLPGVAHQVVEQMVISDQIKAEDRANVLRALLLKHSHPSDEKDFSFPRNISAGSLGSLLGHHHGQGAESDPHVTEPLMGGVPETRLEVERERELPPPAPPAGITRSKSKHELKLLEKIPENAEATVVLVGCVEFLSRPTMAFVRLREAVELDAVLEVPVPVRFLFLLLGPSSANMDYHEIGRSISTLMSDKQFHEAAYLADEREDLLTAINAFLDCSVVLPPSEVQGEELLRSVAHFQRQMLKKREEQGRLLPTGAGLEPKSAQDKALLQMVEAAGAAEDDPLRRTGRPFGGLIRDVRRRYPHYLSDFRDALDPQCLAAVIFIYFAALSPAITFGGLLGEKTQDLIGVSELIMSTALQGVVFCLLGAQPLLVIGFSGPLLVFEEAFFSFCSSNHLEYLVGRVWIGFWLVFLALLMVALEGSFLVRFVSRFTQEIFAFLISLIFIYETFYKLVKIFQEHPLHGCSASNSSEVDGGENMTWAGARPTLGPGNRSLAGQSGQGKPRGQPNTALLSLVLMAGTFFIAFFLRKFKNSRFFPGRIRRVIGDFGVPIAILIMVLVDYSIEDTYTQKLSVPSGFSVTAPEKRGWVINPLGEKSPFPVWMMVASLLPAILVFILIFMETQITTLIISKKERMLQKGSGFHLDLLLIVAMGGICALFGLPWLAAATVRSVTHANALTVMSKAVAPGDKPKIQEVKEQRVTGLLVALLVGLSIVIGDLLRQIPLAVLFGIFLYMGVTSLNGIQFYERLHLLLMPPKHHPDVTYVKKVRTLRMHLFTALQLLCLALLWAVMSTAASLAFPFILILTVPLRMVVLTRIFTDREMKCLDANEAEPVFDEREGVDEYNEMPMPV

SEQ ID NO: 821628 - protein, 1227 aa, Homo sapiens
MTQPEPESLGPGTPGFPEQEEDELHRTLGVERFEEILQEAGSRGGEEPGRSYGEEDFEYHRQSSHHIHHPLSTHLPPDARRRKTPQGPGRKPRRRPGASPTGETPTIEEGEEDEDEASEAEGARALTQPSPVSTPSSVQFFLQEDDSADRKAERTSPSSPAPLPHQEATPRASKGAQAGTQVEEAEAEAVAVASGTAGGDDGGASGRPLPKAQPGHRSYNLQERRRIGSMTGAEQALLPRVPTDEIEAQTLATADLDLMKSHRFEDVPGVRRHLVRKNAKGSTQSGREGREPGPTPRARPRAPHKPHEVFVELNELLLDKNQEPQWRETARWIKFEEDVEEETERWGKPHVASLSFRSLLELRRTLAHGAVLLDLDQQTLPGVAHQVVEQMVISDQIKAEDRANVLRALLLKHSHPSDEKDFSFPRNISAGSLGSLLGHHHGQGAESDPHVTEPLMGGVPETRLEVERERELPPPAPPAGITRSKSKHELKLLEKIPENAEATVVLVGCVEFLSRPTMAFVRLREAVELDAVLEVPVPVRFLFLLLGPSSANMDYHEIGRSISTLMSDKQFHEAAYLADEREDLLTAINAFLDCSVVLPPSEVQGEELLRSVAHFQRQMLKKREEQGRLLPTGAGLEPKSAQDKALLQMVEAAGAAEDDPLRRTGRPFGGLIRDVRRRYPHYLSDFRDALDPQCLAAVIFIYFAALSPAITFGGLLGEKTQDLIGVSELIMSTALQGVVFCLLGAQPLLVIGFSGPLLVFEEAFFSFCSSNHLEYLVGRVWIGFWLVFLALLMVALEGSFLVRFVSRFTQEIFAFLISLIFIYETFYKLVKIFQEHPLHGCSASNSSEVDGGENMTWAGARPTLGPGNRSLAGQSGQGKPRGQPNTALLSLVLMAGTFFIAFFLRKFKNSRFFPGRIRRVIGDFGVPIAILIMVLVDYSIEDTYTQKLSVPSGFSVTAPEKRGWVINPLGEKSPFPVWMMVASLLPAILVFILIFMETQITTLIISKKERMLQKGSGFHLDLLLIVAMGGICALFGLPWLAAATVRSVTHANALTVMSKAVAPGDKPKIQEVKEQRVTGLLVALLVGLSIVIGDLLRQIPLAVLFGIFLYMGVTSLNGIQFYERLHLLLMPPKHHPDVTYVKKVRTLRMHLFTALQLLCLALLWAVMSTAASLAFPFILILTVPLRMVVLTRIFTDREMKCLDANEAEPVFDEREGVDEYNEMPMPV

SEQ ID NO: 821629 - protein, 998 aa, Homo sapiens [sequence omitted]

SEQ ID NO: 821630 - protein, 1241 aa, Homo sapiens; identical to SEQ ID NO: 821627

SEQ ID NO: 821631 - protein, 1241 aa, Homo sapiens; identical to SEQ ID NO: 821627

SEQ ID NO: 821632 - protein, 1236 aa, Homo sapiens
PLPAMDFLLRPQPEPESLGPGTPGFPEQEEDELHRTLGVERFEEILQEAGSRGGEEPGRSYGEEDFEYHRQSSHHIHHPLSTHLPPDARRRKTPQGPGRKPRRRPGASPTGETPTIEEGEEDEDEASEAEGARALTQPSPVSTPSSVQFFLQEDDSADRKAERTSPSSPAPLPHQEATPRASKGAQAGTQVEEAEAEAVAVASGTAGGDDGGASGRPLPKAQPGHRSYNLQERRRIGSMTGAEQALLPRVPTDEIEAQTLATADLDLMKSHRFEDVPGVRRHLVRKNAKGSTQSGREGREPGPTPRARPRAPHKPHEVFVELNELLLDKNQEPQWRETARWIKFEEDVEEETERWGKPHVASLSFRSLLELRRTLAHGAVLLDLDQQTLPGVAHQVVEQMVISDQIKAEDRANVLRALLLKHSHPSDEKDFSFPRNISAGSLGSLLGHHHGQGAESDPHVTEPLMGGVPETRLEVERERELPPPAPPAGITRSKSKHELKLLEKIPENAEATVVLVGCVEFLSRPTMAFVRLREAVELDAVLEVPVPVRFLFLLLGPSSANMDYHEIGRSISTLMSDKQFHEAAYLADEREDLLTAINAFLDCSVVLPPSEVQGEELLRSVAHFQRQMLKKREEQGRLLPTGAGLEPKSAQDKALLQMVEAAGAAEDDPLRRTGRPFGGLIRDVRRRYPHYLSDFRDALDPQCLAAVIFIYFAALSPAITFGGLLGEKTQDLIGVSELIMSTALQGVVFCLLGAQPLLVIGFSGPLLVFEEAFFSFCSSNHLEYLVGRVWIGFWLVFLALLMVALEGSFLVRFVSRFTQEIFAFLISLIFIYETFYKLVKIFQEHPLHGCSASNSSEVDGGENMTWAGARPTLGPGNRSLAGQSGQGKPRGQPNTALLSLVLMAGTFFIAFFLRKFKNSRFFPGRIRRVIGDFGVPIAILIMVLVDYSIEDTYTQKLSVPSGFSVTAPEKRGWVINPLGEKSPFPVWMMVASLLPAILVFILIFMETQITTLIISKKERMLQKGSGFHLDLLLIVAMGGICALFGLPWLAAATVRSVTHANALTVMSKAVAPGDKPKIQEVKEQRVTGLLVALLVGLSIVIGDLLRQIPLAVLFGIFLYMGVTSLNGIQFYERLHLLLMPPKHHPDVTYVKKVRTLRMHLFTALQLLCLALLWAVMSTAASLAFPFILILTVPLRMVVLTRIFTDREMKCLDANEAEPVFDEREGVDEYNEMPMPV

SEQ ID NO: 821633 - protein, 1294 aa, Homo sapiens
MSSAPRRPAKGADSFCTPEPESLGPGTPGFPEQEEDELHRTLGVERFEEILQEAGSRGGEEPGRSYGEEDFECEGAGRGGGGGGIRFDLSSKEGTGVLVGGVGLGGRMAGEGHCACHSQVPLLPADHRQSSHHIHHPLSTHLPPDARRRKTPQGPGRKPRRRPGASPTGETPTIEEGEEDEDEASEAEGARALTQPSPVSTPSSVQFFLQEDDSADRKAERTSPSSPAPLPHQEATPRASKGAQAGTQVEEAEAEAVAVASGTAGGDDGGASGRPLPKAQPGHRSYNLQERRRIGSMTGAEQALLPRVPTDEIEAQTLATADLDLMKSHRFEDVPGVRRHLVRKNAKGSTQSGREGREPGPTPRARPRAPHKPHEVFVELNELLLDKNQEPQWRETARWIKFEEDVEEETERWGKPHVASLSFRSLLELRRTLAHGAVLLDLDQQTLPGVAHQVVEQMVISDQIKAEDRANVLRALLLKHSHPSDEKDFSFPRNISAGSLGSLLGHHHGQGAESDPHVTEPLMGGVPETRLEVERERELPPPAPPAGITRSKSKHELKLLEKIPENAEATVVLVGCVEFLSRPTMAFVRLREAVELDAVLEVPVPVRFLFLLLGPSSANMDYHEIGRSISTLMSDKQFHEAAYLADEREDLLTAINAFLDCSVVLPPSEVQGEELLRSVAHFQRQMLKKREEQGRLLPTGAGLEPKSAQDKALLQMVEAAGAAEDDPLRRTGRPFGGLIRDVRRRYPHYLSDFRDALDPQCLAAVIFIYFAALSPAITFGGLLGEKTQDLIGVSELIMSTALQGVVFCLLGAQPLLVIGFSGPLLVFEEAFFSFCSSNHLEYLVGRVWIGFWLVFLALLMVALEGSFLVRFVSRFTQEIFAFLISLIFIYETFYKLVKIFQEHPLHGCSASNSSEVDGGENMTWAGARPTLGPGNRSLAGQSGQGKPRGQPNTALLSLVLMAGTFFIAFFLRKFKNSRFFPGRIRRVIGDFGVPIAILIMVLVDYSIEDTYTQKLSVPSGFSVTAPEKRGWVINPLGEKSPFPVWMMVASLLPAILVFILIFMETQITTLIISKKERMLQKGSGFHLDLLLIVAMGGICALFGLPWLAAATVRSVTHANALTVMSKAVAPGDKPKIQEVKEQRVTGLLVALLVGLSIVIGDLLRQIPLAVLFGIFLYMGVTSLNGIQFYERLHLLLMPPKHHPDVTYVKKVRTLRMHLFTALQLLCLALLWAVMSTAASLAFPFILILTVPLRMVVLTRIFTDREMKCLDANEAEPVFDEREGVDEYNEMPMPV

SEQ ID NO: 821634 - protein, 998 aa, Homo sapiens [sequence omitted]

SEQ ID NO: 821635 - protein, 1241 aa, Homo sapiens; identical to SEQ ID NO: 821627

SEQ ID NO: 821636 - protein, 1241 aa, Homo sapiens; identical to SEQ ID NO: 821627

SEQ ID NO: 821637 - protein, 1241 aa, Homo sapiens; identical to SEQ ID NO: 821627

SEQ ID NO: 821638 - protein, 1211 aa, Homo sapiens
MSSAPRRPAKGADSFCTPEPESLGPGTPGFPEQEEDELHRTLGVERFEEILQEAGSRGGEEPGRSYGEEDFEYHRQSSHHIHHPLSTHLPPDARRRKTPQGPGRKPRRRPGASPTGETPTIEEGEEDEDEASEAEGARALTQPSPVSTPSSVQFFLQEDDSADRKAERTSPSSPAPLPHQEATPRASKGAQAGTQVEEAEAEAVAVASGTAGGDDGGASGRPLPKAQPGHRSYNLQERRRIGSMTGAEQALLPRVPTDEIEAQTLATADLDLMKSHRFEDVPGVRRHLVRKNAKGSTQSGREGREPGPTPRARPRAPHKPHEVFVELNELLLDKNQEPQWRETARWIKFEEDVEEETERWGKPHVASLSFRSLLELRRTLAHGAVLLDLDQQTLPGVAHQVVEQMVISDQIKAEDRANVLRALLLKHSHPSDEKDFSFPRNISAGSLGSLLGHHHGQGAESDPHVTEPLMGGVPETRLEVERERELPPPAPPAGITRSKSKHELKLLEKIPENAEATVVLVGCVEFLSRPTMAFVRLREAVELDAVLEVPVPVRFLFLLLGPSSANMDYHEIGRSISTLMSDKQFHEAAYLADEREDLLTAINAFLDCSVVLPPSEVQGEELLRSVAHFQRQMLKKREEQGRLLPTGAGLEPKSAQDKALLQMVEAAGAAEDDPLRRTGRPFGGLIRDVRRRYPHYLSDFRDALDPQCLAAVIFIYFAALSPAITFGGLLGEKTQDLIGVSELIMSTALQGVVFCLLGAQPLLVIGFSGPLLVFEEAFFSFCSSNHLEYLVGRVWIGFWLVFLALLMVALEGSFLVRFVSRFTQEIFAFLISLIFIYETFYKLVKIFQEHPLHGCSASNSSEVDGGENMTWAGARPTLGPGNRSLAGQSGQGKPRGQPNTALLSLVLMAGTFFIAFFLRKFKNSRFFPGRKLSVPSGFSVTAPEKRGWVINPLGEKSPFPVWMMVASLLPAILVFILIFMETQITTLIISKKERMLQKGSGFHLDLLLIVAMGGICALFGLPWLAAATVRSVTHANALTVMSKAVAPGDKPKIQEVKEQRVTGLLVALLVGLSIVIGDLLRQIPLAVLFGIFLYMGVTSLNGIQFYERLHLLLMPPKHHPDVTYVKKVRTLRMHLFTALQLLCLALLWAVMSTAASLAFPFILILTVPLRMVVLTRIFTDREMKCLDANEAEPVFDEREGVDEYNEMPMPV

SEQ ID NO: 821639 - protein, 722 aa, Homo sapiens
GTLVFTAVHKGDSGQYYCIASNDAGSARCEQQEEDVLLLLLGPSSANMDYHEIGRSISTLMSDKQFHEAAYLADEREDLLTAINAFLDCSVVLPPSEVQGEELLRSVAHFQRQMLKKREEQGRLLPTGAGLEPKSAQDKALLQMVEAAGAAEDDPLRRTGRPFGGLIRDVRRRYPHYLSDFRDALDPQCLAAVIFIYFAALSPAITFGGLLGEKTQDLIGVSELIMSTALQGVVFCLLGAQPLLVIGFSGPLLVFEEAFFSFCSSNHLEYLVGRVWIGFWLVFLALLMVALEGSFLVRFVSRFTQEIFAFLISLIFIYETFYKLVKIFQEHPLHGCSASNSSEVDGGENMTWAGARPTLGPGNRSLAGQSGQGKPRGQPNTALLSLVLMAGTFFIAFFLRKFKNSRFFPGRIRRVIGDFGVPIAILIMVLVDYSIEDTYTQKLSVPSGFSVTAPEKRGWVINPLGEKSPFPVWMMVASLLPAILVFILIFMETQITTLIISKKERMLQKGSGFHLDLLLIVAMGGICALFGLPWLAAATVRSVTHANALTVMSKAVAPGDKPKIQEVKEQRVTGLLVALLVGLSIVIGDLLRQIPLAVLFGIFLYMGVTSLNGIQFYERLHLLLMPPKHHPDVTYVKKVRTLRMHLFTALQLLCLALLWAVMSTAASLAFPFILILTVPLRMVVLTRIFTDREMKCLDANEAEPVFDEREGVDEYNEMPMPV

SEQ ID NO: 821640 - protein, 719 aa, Homo sapiens
ETESHSVTQAGVQWHDLGSLQPPPPRFKQFSCLSLLLLGPSSANMDYHEIGRSISTLMSDKQFHEAAYLADEREDLLTAINAFLDCSVVLPPSEVQGEELLRSVAHFQRQMLKKREEQGRLLPTGAGLEPKSAQDKALLQMVEAAGAAEDDPLRRTGRPFGGLIRDVRRRYPHYLSDFRDALDPQCLAAVIFIYFAALSPAITFGGLLGEKTQDLIGVSELIMSTALQGVVFCLLGAQPLLVIGFSGPLLVFEEAFFSFCSSNHLEYLVGRVWIGFWLVFLALLMVALEGSFLVRFVSRFTQEIFAFLISLIFIYETFYKLVKIFQEHPLHGCSASNSSEVDGGENMTWAGARPTLGPGNRSLAGQSGQGKPRGQPNTALLSLVLMAGTFFIAFFLRKFKNSRFFPGRIRRVIGDFGVPIAILIMVLVDYSIEDTYTQKLSVPSGFSVTAPEKRGWVINPLGEKSPFPVWMMVASLLPAILVFILIFMETQITTLIISKKERMLQKGSGFHLDLLLIVAMGGICALFGLPWLAAATVRSVTHANALTVMSKAVAPGDKPKIQEVKEQRVTGLLVALLVGLSIVIGDLLRQIPLAVLFGIFLYMGVTSLNGIQFYERLHLLLMPPKHHPDVTYVKKVRTLRMHLFTALQLLCLALLWAVMSTAASLAFPFILILTVPLRMVVLTRIFTDREMKCLDANEAEPVFDEREGVDEYNEMPMPV

SEQ ID NO: 821641 - protein, 667 aa, Homo sapiens
SPIPMLLWQQFHEAAYLADEREDLLTAINAFLDCSVVLPPSEVQGEELLRSVAHFQRQMLKKREEQGRLLPTGAGLEPKSAQDKALLQMVEAAGAAEDDPLRRTGRPFGGLIRDVRRRYPHYLSDFRDALDPQCLAAVIFIYFAALSPAITFGGLLGEKTQDLIGVSELIMSTALQGVVFCLLGAQPLLVIGFSGPLLVFEEAFFSFCSSNHLEYLVGRVWIGFWLVFLALLMVALEGSFLVRFVSRFTQEIFAFLISLIFIYETFYKLVKIFQEHPLHGCSASNSSEVDGGENMTWAGARPTLGPGNRSLAGQSGQGKPRGQPNTALLSLVLMAGTFFIAFFLRKFKNSRFFPGRIRRVIGDFGVPIAILIMVLVDYSIEDTYTQKLSVPSGFSVTAPEKRGWVINPLGEKSPFPVWMMVASLLPAILVFILIFMETQITTLIISKKERMLQKGSGFHLDLLLIVAMGGICALFGLPWLAAATVRSVTHANALTVMSKAVAPGDKPKIQEVKEQRVTGLLVALLVGLSIVIGDLLRQIPLAVLFGIFLYMGVTSLNGIQFYERLHLLLMPPKHHPDVTYVKKVRTLRMHLFTALQLLCLALLWAVMSTAASLAFPFILILTVPLRMVVLTRIFTDREMKCLDANEAEPVFDEREGVDEYNEMPMPV

SEQ ID NO: 821642 - protein, 1320 aa, Homo sapiens
MSSAPRRPAKGADSFCTPEPESLGPGTPGFPEQEEDELHRTLGVERFEEILQEAGSRGGEEPGRSYGEEDFEYHRQSSHHIHHPLSTHLPPDARRRKTPQGPGRKPRRRPGASPTGETPTIEEGEEDEDEASEAEGARALTQPSPVSTPSSVQFFLQEDDSADRKAERTSPSSPAPLPHQEATPRASKGAQAGTQVEEAEAEAVAVASGTAGGDDGGASGRPLPKAQPGHRSYNLQERRRIGSMTGAEQALLPRVPTDEIEAQTLATADLDLMKSHRFEDVPGVRRHLVRKNAKGSTQSGREGREPGPTPRARPRAPHKPHEVFVELNELLLDKNQEPQWRETARWIKFEEDVEEETERWGKPHVASLSFRSLLELRRTLAHGAVLLDLDQQTLPGVAHQVVEQMVISDQIKAEDRANVLRALLLKHSHPSDEKDFSFPRNISAGSLGSLLGHHHGQGAESDPHVTEPLMGGVPETRLEVERERELPPPAPPAGITRSKSKHELKLLEKIPENAEATVVLVGCVEFLSRPTMAFVRLREAVELDAVLEVPVPVRFLFLLLGPSSANMDYHEIGRSISTLMSDKQFHEAAYLADEREDLLTAINAFLDCSVVLPPSEVQGEELLRSVAHFQRQMLKKREEQGRLLPTGAGLEPKSAQDKALLQMVEAAGAAEDDPLRRTGRPFGGLIRDVRRRYPHYLSDFRDALDPQCLAAVIFIYFAALSPAITFGGLLGEKTQDLIGVSELIMSTALQGVVFCLLGAQPLLVIGFSGPLLVFEEAFFSFCSSNHLEYLVGRVWIGFWLVFLALLMVALEGSFLVRFVSRFTQEIFAFLISLIFIYETFYKLVKIFQEHPLHGCSASNSSEVDGGENMTWAGARPTLGPGNRSLAGQSGQGKPRGQPNTALLSLVLMAGTFFIAFFLRKFKNSRFFPGRIRRVIGDFGVPIAILIMVLVDYSIEDTYTQKLSVPSGFSVTAPEKRGWVINPLGEKSPFPVWMMVASLLPAILVFILIFMETQITTLIISKKERMLQKGSGFHLDLLLIVAMGGICALFGLPWLAAATVRSVTHANALTVMSKAVAPGDKPKIQEVKEQRVTGLLVALLVGLSIVIGDLLRQIPLAVLFGIFLYMGVTSLNGIQFYERLHLLLMPPKHHPDVTYVKKVSPPAPHRKGCASGHPGLLGSLSSCPLPSAQFSQPPPPLCTNPALAPRNVLPSPPPKKREALPSSRLGRKLGSPVSAPQVRTLRMHLFTALQLLCLALLWAVMSTAASLAFPFILILTVPLRMVVLTRIFTDREMKCLDANEAEPVFDEREGVDEYNEMPMPV

SEQ ID NO: 821643 - protein, 1251 aa, Homo sapiens
MSSAPRRPAKGADSFCTPEPESLGPGTPGFPEQEEDELHRTLGVERFEEILQEAGSRGGEEPGRSYGEEDFEYHRQSSHHIHHPLSTHLPPDARRRKTPQGPGRKPRRRPGASPTGETPTIEEGEEDEDEASEAEGARALTQPSPVSTPSSVQFFLQEDDSADRKAERTSPSSPAPLPHQEATPRASKGAQAGTQVEEAEAEAVAVASGTAGGDDGGASGRPLPKAQPGHRSYNLQERRRIGSMTGAEQALLPRVPTDEIEAQTLATADLDLMKSHRFEDVPGVRRHLVRKNAKGSTQSGREGREPGPTPRARPRAPHKPHEVFVELNELLLDKNQEPQWRETARWIKFEEDVEEETERWGKPHVASLSFRSLLELRRTLAHGAVLLDLDQQTLPGVAHQVVEQMVISDQIKAEDRANVLRALLLKHSHPSDEKDFSFPRNISAGSLGSLLGHHHGQGAESDPHVTEPLMGGVPETRLEVERERELPPPAPPAGITRSKSKHELKLLEKIPENAEATVVLVGCVEFLSRPTMAFVRLREAVELDAVLEVPVPVRFLFLLLGPSSANMDYHEIGRSISTLMSDKQFHEAAYLADEREDLLTAINAFLDCSVVLPPSEVQGEELLRSVAHFQRQMLKKREEQGRLLPTGAGLEPKSAQDKALLQMVEAAGAAEDDPLRRTGRPFGGLIRDVRRRYPHYLSDFRDALDPQCLAAVIFIYFAALSPAITFGGLLGEKTQDLIGVSELIMSTALQGVVFCLLGAQPLLVIGFSGPLLVFEEAFFSFCSSNHLEYLVGRVWIGFWLVFLALLMVALEGSFLVRFVSRFTQEIFAFLISLIFIYETFYKLVKIFQEHPLHGCSASNSSEVDGGENMTWAGARPTLGPGNRSLAGQSGQGKPRGQPNTALLSLVLMAGTFFIAFFLRKFKNSRFFPGRIRRVIGDFGVPIAILIMVLVDYSIEDTYTQKLSVPSGFSVTAPEKRGWVINPLGEKSPFPVWMMVASLLPAILVFILIFMETQITTLIISKKERMLQKGSGFHLDLLLIVAMGGICALFGLPWLAAATVRSVTHANALTVMSKAVAPGDKPKIQEVKEQRVTGLLVALLVGLSIVIGDLLRQIPLAVLFGIFLYMGVTSLNGIQFYERLHLLLMPPKHHPDVTYVKKVRTLRMHLFTALQLLCLALLWAVMSTAASLAFPFILILTVPLRMVVLTRIFTDREMKCVSPPVCLPRFLLPPCGSGKAPPLPFLTATSPHTAGC

SEQ ID NO: 821644 - protein, 1330 aa, Homo sapiens
MSSAPRRPAKGADSFCTPEPESLGPGTPGFPEQEEDELHRTLGVERFEEILQEAGSRGGEEPGRSYGEEDFEYHRQSSHHIHHPLSTHLPPDARRRKTPQGPGRKPRRRPGASPTGETPTIEEGEEDEDEASEAEGARALTQPSPVSTPSSVQFFLQEDDSADRKAERTSPSSPAPLPHQEATPRASKGAQAGTQVEEAEAEAVAVASGTAGGDDGGASGRPLPKAQPGHRSYNLQERRRIGSMTGAEQALLPRVPTDEIEAQTLATADLDLMKSHRFEDVPGVRRHLVRKNAKGSTQSGREGREPGPTPRARPRAPHKPHEVFVELNELLLDKNQEPQWRETARWIKFEEDVEEETERWGKPHVASLSFRSLLELRRTLAHGAVLLDLDQQTLPGVAHQVVEQMVISDQIKAEDRANVLRALLLKHSHPSDEKDFSFPRNISAGSLGSLLGHHHGQGAESDPHVTEPLMGGVPETRLEVERERELPPPAPPAGITRSKSKHELKLLEKIPENAEATVVLVGCVEFLSRPTMAFVRLREAVELDAVLEVPVPVRFLFLLLGPSSANMDYHEIGRSISTLMSDKQFHEAAYLADEREDLLTAINAFLDCSVVLPPSEVQGEELLRSVAHFQRQMLKKREEQGRLLPTGAGLEPKSAQDKALLQMVEAAGAAEDDPLRRTGRPFGGLIRDVRRRYPHYLSDFRDALDPQCLAAVIFIYFAALSPAITFGGLLGEKTQDLIGVSELIMSTALQGVVFCLLGAQPLLVIGFSGPLLVFEEAFFSFCSSNHLEYLVGRVWIGFWLVFLALLMVALEGSFLVRFVSRFTQEIFAFLISLIFIYETFYKLVKIFQEHPLHGCSASNSSEVDGGENMTWAGARPTLGPGNRSLAGQSGQGKPRGQPNTALLSLVLMAGTFFIAFFLRKFKNSRFFPGRIRRVIGDFGVPIAILIMVLVDYSIEDTYTQKLSVPSGFSVTAPEKRGWVINPLGEKSPFPVWMMVASLLPAILVFILIFMETQITTLIISKKERMLQKGSGFHLDLLLIVAMGGICALFGLPWLAAATVRSVTHANALTVMSKAVAPGDKPKIQEVKEQRVTGLLVALLVGLSIVIGDLLRQIPLAVLFGIFLYMGVTSLNGIQFYERLHLLLMPPKHHPDVTYVKKVSPPAPHRKGCASGHPGLLGSLSSCPLPSAQFSQPPPPLCTNPALAPRNVLPSPPPKKREALPSSRLGRKLGSPVSAPQVRTLRMHLFTALQLLCLALLWAVMSTAASLAFPFILILTVPLRMVVLTRIFTDREMKCVSPPVCLPRFLLPPCGSGKAPPLPFLTATSPHTAGC

SEQ ID NO: 821645 - protein, 1216 aa, Homo sapiens
MSSAPRRPAKGADSFCTPEPESLGPGTPGFPEQEEDELHRTLGVERFEEILQEAGSRGGEEPGRSYGEEDFEYHRQSSHHIHHPLSTHLPPDARRRKTPQGPGRKPRRRPGASPTGETPTIEEGEEDEDEASEAEGARALTQPSPVSTPSSVQFFLQEDDSADRKAERTSPSSPAPLPHQEATPRASKGAQAGTQVEEAEAEAVAVASGTAGGDDGGASGRPLPKAQPGHRSYNLQERRRIGSMTGAEQALLPRVPTDEIEAQTLATADLDLMKSHRFEDVPGVRRHLVRKNAKGSTQSGREGREPGPTPRARPRAPHKPHEVFVELNELLLDKNQEPQWRETARWIKFEEDVEEETERWGKPHVASLSFRSLLELRRTLAHGAVLLDLDQQTLPGVAHQVVEQMVISDQIKAEDRANVLRALLLKHSHPSDEKDFSFPRNISAGSLGSLLGHHHGQGAESDPHVTEPLMGGVPETRLEVERERELPPPAPPAGITRSKSKHELKLLEKIPENAEATVVLVGCVEFLSRPTMAFVRLREAVELDAVLEVPVPVRFLFLLLGPSSANMDYHEIGRSISTLMSDKQFHEAAYLADEREDLLTAINAFLDCSVVLPPSEVQGEELLRSVAHFQRQMLKKREEQGRLLPTGAGLEPKSAQDKALLQMVEAAGAAEDDPLRRTGRPFGGLIRDVRRRYPHYLSDFRDALDPQCLAAVIFIYFAALSPAITFGGLLGEKTQDLIGVSELIMSTALQGVVFCLLGAQPLLVIGFSGPLLVFEEAFFSFCSSNHLEYLVGRVWIGFWLVFLALLMVALEGSFLVRFVSRFTQEIFAFLISLIFIYETFYKLVKIFQEHPLHGCSASNSSEVDGGENMTWAGARPTLGPGNRSLAGQSGQGKPRGQPNTALLSLVLMAGTFFIAFFLRKFKNSRFFPGRIRRVIGDFGVPIAILIMVLVDYSIEDTYTQKLSVPSGFSVTAPEKRGWVINPLGEKSPFPVWMMVASLLPAILVFILIFMETQITTLIISKKERMLQKGSGFHLDLLLIVAMGGICALFGLPWLAAATVRSVTHANALTVMSKAVAPGDKPKIQEVKEQRVTGLLVALLVGLSIVIGDLLRQIPLAVLFGIFLYMGVTSLNGIQFYERLHLLLMPPKHHPDVTYVKKVPDLRMPWSRPAGVLLAWSGPALHSLLPGLPLISSHSAVRWCVTQFFRRKMKLVLPGTG

SEQ ID NO: 821646 - protein, 842 aa, Homo sapiens
MSSAPRRPAKGADSFCTPEPESLGPGTPGFPEQEEDELHRTLGVERFEEILQEAGSRGGEEPGRSYGEEDFEYHRQSSHHIHHPLSTHLPPDARRRKTPQGPGRKPRRRPGASPTGETPTIEEGEEDEDEASEAEGARALTQPSPVSTPSSVQFFLQEDDSADRKAERTSPSSPAPLPHQEATPRASKGAQAGTQVEEAEAEAVAVASGTAGGDDGGASGRPLPKAQPGHRSYNLQERRRIGSMTGAEQALLPRVPTDEIEAQTLATADLDLMKSHRFEDVPGVRRHLVRKNAKGSTQSGREGREPGPTPRARPRAPHKPHEVFVELNELLLDKNQEPQWRETARWIKFEEDVEEETERWGKPHVASLSFRSLLELRRTLAHGAVLLDLDQQTLPGVAHQVVEQMVISDQIKAEDRANVLRALLLKHSHPSDEKDFSFPRNISAGSLGSLLGHHHGQGAESDPHVTEPLMGGVPETRLEVERERELPPPAPPAGITRSKSKHELKLLEKIPENAEATVVLVGCVEFLSRPTMAFVRLREAVELDAVLEVPVPVRFLFLLLGPSSANMDYHEIGRSISTLMSDKQFHEAAYLADEREDLLTAINAFLDCSVVLPPSEVQGEELLRSVAHFQRQMLKKREEQGRLLPTGAGLEPKSAQDKALLQMVEAAGAAEDDPLRRTGRPFGGLIRDVRRRYPHYLSDFRDALDPQCLAAVIFIYFAALSPAITFGGLLGEKTQDLIGVSELIMSTALQGVVFCLLGAQPLLVIGFSGPLLVFEEAFFSFCSSNHLEYPAVAGAHGRHLLHRLLPAQIQEQPVLSWPDPAGDWGLWGAHRHPHHGACGLQY

SEQ ID NO: 821647 - protein, 411 aa, Homo sapiens
MSQSPGCKFQYQGEEIFQEHPLHGCSASNSSEVDGGENMTWAGARPTLGPGNRSLAGQSGQGKPRGQPNTALLSLVLMAGTFFIAFFLRKFKNSRFFPGRIRRVIGDFGVPIAILIMVLVDYSIEDTYTQKLSVPSGFSVTAPEKRGWVINPLGEKSPFPVWMMVASLLPAILVFILIFMETQITTLIISKKERMLQKGSGFHLDLLLIVAMGGICALFGLPWLAAATVRSVTHANALTVMSKAVAPGDKPKIQEVKEQRVTGLLVALLVGLSIVIGDLLRQIPLAVLFGIFLYMGVTSLNGIQFYERLHLLLMPPKHHPDVTYVKKVRTLRMHLFTALQLLCLALLWAVMSTAASLAFPFILILTVPLRMVVLTRIFTDREMKCLDANEAEPVFDEREGVDEYNEMPMPV

SEQ ID NO: 821648 - protein, 373 aa, Homo sapiens [sequence omitted]

SEQ ID NO: 821649 - protein, 471 aa, Homo sapiens
MSSAPRRPAKGADSFCTPEPESLGPGTPGFPEQEEDELHRTLGVERFEEILQEAGSRGGEEPGRSYGEEDFEYHRQSSHHIHHPLSTHLPPDARRRKTPQGPGRKPRRRPGASPTGETPTIEEGEEDEDEASEAEGARALTQPSPVSTPSSVQFFLQEDDSADRKAERTSPSSPAPLPHQEATPRASKGAQAGTQVEEAEAEAVAVASGTAGGDDGGASGRPLPKAQPGHRSYNLQERRRIGSMTGAEQALLPRVPTDEIEAQTLATADLDLMKSHRFEDVPGVRRHLVRKNAKGSTQSGREGREPGPTPRARPRAPHKPHEVFVELNELLLDKNQEPQWRETARWIKFEEDVEEETERWGKPHVASLSFRSLLELRRTLAHGAVLLDLDQQTLPGVAHQVVEQMVISDQIKAEDRANVLRALLLKHRREDTGPDRGVGADYVHSAPGRGLLPAGCPAPVGDRLLRAPAGL

SEQ ID NO: 821650 - protein, 127 aa, Homo sapiens
NTALLSLVLMAGTFFIAFFLRKFKNSRFFPGRVRGLKGQEGVRGRKGGGRKSAAVVAGLWALCLPTQIRRVIGDFGVPIAILIMVLVDYSIEDTYTQVRCCPQQASAAASATPGLGVPLQPPNPACP

SEQ ID NO: 821651 - protein, 736 aa, Homo sapiens
MGNPENIEDAYVAVIRPKNTASLNSREYRAKSYEILLHEVPIEGQKKKRKKVLLETKLQGNSEITQGILDYVVETTKPISPANQGIRGKRVVLMKKFPLDGEKMGREASLFIVPSVVKDNTKYTYTPGCPIFYCLQDIMRVCSESSTHFATLTARMLIALDKWLDERHAQSHFIPALFRPSPLERIKTNVINPAYATESGQTENSLHMGYSALEIKSKMLALEKADTCIYNPLFGSDLQYTNRVDKVVINPYFGLGAPDYSKIQIPKQEKWQRSMSSVTEDKERQWVDDFPLHRSACEGDSELLSRLLSERFSVNQLDSDHWAPIHYACWYGKVEATRILLEKGKCNPNLLNGQLSSPLHFAAGGGHAEIVQILLNHPETDRHITDQQGRSPLNICEENKQNNWEEAAKLLKEAINKPYEKVRIYRMDGSYRSVELKHGNNTTVQQIMEGMRLSQETQQYFTIWICSENLSLQLKPYHKPLQHVRDWPEILAELTNLDPQRETPQLFLRRDVRLPLEVEKQIEDPLAILILFDEARYNLLKGFYTAPDAKLITLASLLLQIVYGNYESKKHKQGFLNEENLKSIVPVTKLKSKAPHWTNRILHEYKNLSTSEGVSKEMHHLQRMFLQNCWEIPTYGAAFFTGQIFTKASPSNHKVIPVYVGVNIKGLHLLNMETKALLISLKYGCFMWQLGDTDTCFQIHSMENKMSFIVHTKQAGLVVKLLMKLNGQLMPTERNS

SEQ ID NO: 821652 - protein, 736 aa, Homo sapiens; identical to SEQ ID NO: 821651

SEQ ID NO: 821653 - protein, 736 aa, Homo sapiens; identical to SEQ ID NO: 821651

SEQ ID NO: 821654 - protein, 736 aa, Homo sapiens; identical to SEQ ID NO: 821651

SEQ ID NO: 821655 - protein, 736 aa, Homo sapiens; identical to SEQ ID NO: 821651

SEQ ID NO: 821656 - protein, 736 aa, Homo sapiens; identical to SEQ ID NO: 821651

SEQ ID NO: 821657 - protein, 736 aa, Homo sapiens; identical to SEQ ID NO: 821651

SEQ ID NO: 821658 - protein, 736 aa, Homo sapiens; identical to SEQ ID NO: 821651

SEQ ID NO: 821659 - protein, 736 aa, Homo sapiens; identical to SEQ ID NO: 821651

SEQ ID NO: 821660 - protein, 608 aa, Homo sapiens
MGNPENIEDAYVAVIRPKNTASLNSREYRAKSYEILLHEVPIEGQKKKRKKVLLETKLQGNSEITQGILDYVVETTKPISPANQGIRGKRVVLMKKFPLDGEKMGREASLFIVPSVVKDNTKYTYTPGCPIFYCLQDIMRVCSESSTHFATLTARMLIALDKWLDERHAQSHFIPALFRPSPLERIKTNVINPAYATESGQTENSLHMGYSALEIKSKMLALEKADTCIYNPLFGSDLQYTNRVDKVVINPYFGLGAPDYSKIQIPKQEKWQRSMSSVTEDKERQWVDDFPLHRSACEGDSELLSRLLSERFSVNQLDSDHWAPIHYACWYGKVEATRILLEKGKCNPNLLNGQLSSPLHFAAGGGHAEIVQILLNHPETDRHITDQQGRSPLNICEENKQNNWEEAAKLLKEAINKPYEKVRIYRMDGSYRSVELKHGNNTTVQQIMEGMRLSQETQQYFTIWICSENLSLQLKPYHKPLQHVRDWPEILAELTNLDPQRETPQLFLRRDVRLPLEVEKQIEDPLAILILFDEARYNLLKGFYTAPDAKLITLASLLLQIVYGNYESKKHKQGFLNEENLKSIVPVTKLKSKAPHWTNRILHEYKES

SEQ ID NO: 821661 - protein, 345 aa, Homo sapiens
MDGEDIPDFSSLKEETAYWKELSLKYKQSFQEARDELVEFQEGSRELEAELEAQLVQAEQRNRDLQADNQRLKYEVEALKEKLEHQYAQSYKQVSVLEDDLSQTRAIKEQLHKYVRELEQANDDLERAKRATIVSLEDFEQRLNQAIERNAFLESELDEKESLLVSVQRLKDEARDLRQELAVRERQQEVTRKSAPSSPTLDCEKMDSAVQASLSLPATPVGKGTENTFPSPKAIPNGFGTSPLTPSARISALNIVGDLLRKVGALESKLAACRNFAKDQASRKSYISGNVNCGVLNGNGTKFSRSGHTSFFDKGAVNGFDPAPPPPGLGSSRPSSAPGMLPLSV

SEQ ID NO: 821662 - protein, 377 aa, Homo sapiens
VPETVNLEDPERETSVERRRTCAFDTLEAFLIMDGEDIPDFSSLKEETAYWKELSLKYKQSFQEARDELVEFQEGSRELEAELEAQLVQAEQRNRDLQADNQRLKYEVEALKEKLEHQYAQSYKQVSVLEDDLSQTRAIKEQLHKYVRELEQANDDLERAKRATIVSLEDFEQRLNQAIERNAFLESELDEKESLLVSVQRLKDEARDLRQELAVRERQQEVTRKSAPSSPTLDCEKMDSAVQASLSLPATPVGKGTENTFPSPKAIPNGFGTSPLTPSARISALNIVGDLLRKVGALESKLAACRNFAKDQASRKSYISGNVNCGVLNGNGTKFSRSGHTSFFDKGAVNGFDPAPPPPGLGSSRPSSAPGMLPLSV

SEQ ID NO: 821663 - protein, 345 aa, Homo sapiens; identical to SEQ ID NO: 821661

SEQ ID NO: 821664 - protein, 328 aa, Homo sapiens
MDGEDIPDFSSLKEETAYWKELSLKYKQSFQEARDELVEFQEGSRELEAELEAQLVQAEQRNRDLQADNQRLKYEVEALKEKLEHQYAQSYKQVSVLEDDLSQTRAIKEQLHKYVRELEQANDDLERAKRATIVSLEDFEQRLNQAIERNAFLESELDEKESLLVSVQRLKDEARDLRQELAVRERQQEVTRKSAPSSPTLDCEKMDSAVQASLSLPATPVGKGTENTFPSPKAIPNGFGTSPLTPSARISALNIVGDLLRKVGALESKLAACRNFAKDQASRKSYISGNVNCGVLNGNGTKFSRSGHTSFFDKGQEKVIFPTLFMGQ

SEQ ID NO: 821665 - protein, 347 aa, Homo sapiens
MDGEDIPDFSSLKEETAYWKELSLKYKQSFQEARDELVEFQEGSRELEAELEAQLVQAEQRNRDLQADNQRLKYEVEALKEKLEHQYAQSYKQVSVLEDDLSQTRAIKEQLHKYVRELEQANDDLERAKRATIVSLEDFEQRLNQAIERNAFLESELDEKESLLVSVQRLKDEARDLRQELAVRERQQEVTRKSAPSSPTLDCEKMDSAVQASLSLPATPVGKGTENTFPSPKAIPNGFGTSPLTPSARISALNIVGDLLRKVGALESKLAACRNFAKDQASRKSYISGNVNCGVLNGNGTKFSRSGHTSFFDKGAVAATGPCPAPELCAISILAIFSSRRSAVGFT

SEQ ID NO: 821666 - protein, 345 aa, Homo sapiens; identical to SEQ ID NO: 821661

SEQ ID NO: 821667 - protein, 345 aa, Homo sapiens; identical to SEQ ID NO: 821661

SEQ ID NO: 821668 - protein, 285 aa, Homo sapiens
MDGEDIPDFSSLKEETAYWKELSLKYKQSFQEARDELVEFQEGSRELEAELEAQLVQAEQRNRDLQADNQRLKYEVEALKEKLEHQYAQSYKQVSVLEDDLSQTRAIKEQLHKYVRELEQANDDLERAKRATIVSLEDFEQRLNQAIERNAFLESELDEKESLLVSVQRLKDEARDLRQELAVRERQQEVTRKSAPSSPTLDCEKMDSAVQASLSLPATPVGKGTENTFPSPKAIPNGFGTSPLTPSARISALNIVGDLLRKVGVSFNYLSLGVSTDKVLNYFLI

SEQ ID NO: 821669 - protein, 235 aa, Homo sapiens
MDGEDIPDFSSLKEETAYWKELSLKYKQSFQEARDELVEFQEGSRELEAELEAQLVQAEQRNRDLQADNQRLKYEVEALKEKLEHQYAQSYKQVSVLEDDLSQTRAIKEQLHKYVRELEQANDDLERAKRATIVSLEDFEQRLNQAIERNAFLESELDEKESLLVSVQRLKDEARDLRQELAVRERQQEVTRKSAPSSPTLDCEKMDSAVQASLSLPATPVGKGTENTFPSPKGL

SEQ ID NO: 821670 - protein, 474 aa, Homo sapiens
MNKLSGGGGRRTRVEGGQLGGEEWTRHGSFVNKPTRGWLHPNDKVMGPGVSYLVRYMGCVEVLQSMRALDFNTRTQVTREAISLVCEAVPGAKGATRRRKPCSRPLSSILGRSNLKFAGMPITLTVSTSSLNLMAADCKQIIANHHMQSISFASGGDPDTAEYVAYVAKDPVNQRACHILECPEGLAQDVISTIGQAFELRFKQYLRNPPKLVTPHDRMAGFDGSAWDEEEEEPPDHQYYNDFPGKEPPLGGVVDMRLREGAAPGAARPTAPNAQTPSHLGATLPVGQPVGGDPEVRKQMPPPPPCPAGRELFDDPSYVNVQNLDKARQAVGGAGPPNPAINGSAPRDLFDMKPFEDALRVPPPPQSVSMAEQLRGEPWFHGKLSRREAEALLQLNGDFLVRESTTTPGQYVLTGLQSGQPKHLLLVDPEGVVRTKDHRFESVSHLISYHMDNHLPIISAGSELCLQQPVERKL

SEQ ID NO: 821671 - protein, 186 aa, Homo sapiens
MDLLPPKPKYNPLRNESLSSLEEGASGSTPPEELPSPSASSLGPILPPLPGDDSPTTLCSFFPRMSNLRLANPAGGRPGSKGEPGRAADDGEGIVGAAMPDSGPLPLLQDMNKLSGGGGRRTRVEGGQLGGEEWTRHGSFVNKPTRGWLHPNDKVMGPGSTLGGPGGEAPARSRRHRVGPGPPGWA

SEQ ID NO: 821672 - protein, 668 aa, Homo sapiens
MFPRVSLIPKGKLFIKVRISSTSASEPFWEAYCVRRGPSAADGEAGGRGRPGKLGVCRVWVRQSGAFRATVPMGMSCPQRGLAPGGSRREPGLPGAPAPAPGLPGPPGCAFGSRAPLRGGSTARDGTVRQPGRALPPLGELVWAAASGDDPFHSRGAVVSLVPRPPPVFRRSVSSGPCSPSPQRSVVVAADEFRFRLLPPLAGGESGESAQFARRLGASLSSHFVVAAARGPGLPLTPLLGDGAAQGRLHPPPLPLTRVPHSMAASAPPPPDKLEGGGGPAPPPAPPSTGRKQGKAGLQMKSPEKKRRKSNTQGPAYSHLTEFAPPPTPMVDHLVASNPFEDDFGAPKVGVAAPPFLGSPVPFGGFRVQGGMAGQVPPGYSTGGGGGPQPLRRQPPPFPPNPMGPAFNMPPQGPGYPPPGNMNFPSQPFNQPLGQNFSPPSGQMMPGPVGGFGPMISPTMGQPPRAELGPPSLSQRFAQPGAPFGPSPLQRPGQGLPSLPPNTSPFPGPDPGFPGPGGEDGGKPLNPPASTAFPQEPHSGSPAAAVNGNQPSFPPNSSGRGGGTPDANSLAPPGKAGGGSGPQPPPGLVYPCGACRSEVNDDQDAILCEASCQKWFHRECTGMTESAYGLLTTEASAVWACDLCLKTKEIQSVYIREGMGQLVAANDG

SEQ ID NO: 821673 - protein, 625 aa, Homo sapiens
MAGGRGRPGKLGVCRVWVRQSGAFRATVPMGMSCPQRGLAPGGSRREPGLPGAPAPAPGLPGPPGCAFGSRAPLRGGSTARDGTVRQPGRALPPLGELVWAAASGDDPFHSRGAVVSLVPRPPPVFRRSVSSGPCSPSPQRSVVVAADEFRFRLLPPLAGGESGESAQFARRLGASLSSHFVVAAARGPGLPLTPLLGDGAAQGRLHPPPLPLTRVPHSMAASAPPPPDKLEGGGGPAPPPAPPSTGRKQGKAGLQMKSPEKKRRKSNTQGPAYSHLTEFAPPPTPMVDHLVASNPFEDDFGAPKVGVAAPPFLGSPVPFGGFRVQGGMAGQVPPGYSTGGGGGPQPLRRQPPPFPPNPMGPAFNMPPQGPGYPPPGNMNFPSQPFNQPLGQNFSPPSGQMMPGPVGGFGPMISPTMGQPPRAELGPPSLSQRFAQPGAPFGPSPLQRPGQGLPSLPPNTSPFPGPDPGFPGPGGEDGGKPLNPPASTAFPQEPHSGSPAAAVNGNQPSFPPNSSGRGGGTPDANSLAPPGKAGGGSGPQPPPGLVYPCGACRSEVNDDQDAILCEASCQKWFHRECTGMTESAYGLLTTEASAVWACDLCLKTKEIQSVYIREGMGQLVAANDG

SEQ ID NO: 821674 - protein, 594 aa, Homo sapiens
MSCPQRGLAPGGSRREPGLPGAPAPAPGLPGPPGCAFGSRAPLRGGSTARDGTVRQPGRALPPLGELVWAAASGDDPFHSRGAVVSLVPRPPPVFRRSVSSGPCSPSPQRSVVVAADEFRFRLLPPLAGGESGESAQFARRLGASLSSHFVVAAARGPGLPLTPLLGDGAAQGRLHPPPLPLTRVPHSMAASAPPPPDKLEGGGGPAPPPAPPSTGRKQGKAGLQMKSPEKKRRKSNTQGPAYSHLTEFAPPPTPMVDHLVASNPFEDDFGAPKVGVAAPPFLGSPVPFGGFRVQGGMAGQVPPGYSTGGGGGPQPLRRQPPPFPPNPMGPAFNMPPQGPGYPPPGNMNFPSQPFNQPLGQNFSPPSGQMMPGPVGGFGPMISPTMGQPPRAELGPPSLSQRFAQPGAPFGPSPLQRPGQGLPSLPPNTSPFPGPDPGFPGPGGEDGGKPLNPPASTAFPQEPHSGSPAAAVNGNQPSFPPNSSGRGGGTPDANSLAPPGKAGGGSGPQPPPGLVYPCGACRSEVNDDQDAILCEASCQKWFHRECTGMTESAYGLLTTEASAVWACDLCLKTKEIQSVYIREGMGQLVAANDG

SEQ ID NO: 821675 - protein, 594 aa, Homo sapiens; identical to SEQ ID NO: 821674

SEQ ID NO: 821676 - protein, 584 aa, Homo sapiens
MDLLPPKPKYNPLRNESLSSLEEGASGSTPPEELPSPSASSLGPILPPLPGDDSPTTLCSFFPRMSNLRLANPAGGRPGSKGEPGRAADDGEGIVGAAMPDSGPLPLLQDMNKLSGGGGRRTRVEGGQLGGEEWTRHGSFVNKPTRGWLHPNDKVMGPGVSYLVRYMGCVEVLQSMRALDFNTRTQVTREAISLVCEAVPGAKGATRRRKPCSRPLSSILGRSNLKFAGMPITLTVSTSSLNLMAADCKQIIANHHMQSISFASGGDPDTAEYVAYVAKDPVNQRACHILECPEGLAQDVISTIGQAFELRFKQYLRNPPKLVTPHDRMAGFDGSAWDEEEEEPPDHQYYNDFPGKEPPLGGVVDMRLREGAAPGAARPTAPNAQTPSHLGATLPVGQPVGGDPEVRKQMPPPPPCPAGRELFDDPSYVNVQNLDKARQAVGGAGPPNPAINGSAPRDLFDMKPFEDALRVPPPPQSVSMAEQLRGEPWFHGKLSRREAEALLQLNGDFLVRESTTTPGQYVLTGLQSGQPKHLLLVDPEGVVRTKDHRFESVSHLISYHMDNHLPIISAGSELCLQQPVERKL

SEQ ID NO: 821677 - protein, 594 aa, Homo sapiens; identical to SEQ ID NO: 821674

SEQ ID NO: 821678 - protein, 572 aa, Homo sapiens
MDLLPPKPKYNPLRNESLSSLEEGASGSTPPEELPSPSASSLGPILPPLPGDDSPTTLCSFFPRMSNLRLANPAGGRPGSKGEPGRAADDGEGIVGAAMPDSGPLPLLQDMNKLSGGGGRRTRVEGGQLGGEEWTRHGSFVNKPTRGWLHPNDKVMGPGVSYLVRYMGCVEVLQSMRALDFNTRTQVTREAISLVCEAVPGAKGATRRRKPCSRPLSSILGRSNLKFAGMPITLTVSTSSLNLMAADCKQIIANHHMQSISFASGGDPDTAEYVAYVAKDPVNQRACHILECPEGLAQDVISTIGQAFELRFKQYLRNPPKLVTPHDRMAGFDGSAWDEEEEEPPDHQYYNDFPGKEPPLGGVVDMRLREGAAPGAARPTAPNAQTPSHLGATLPVGQPVGGDPEVRKQMPPPPPCPAGRELFDDPSYVNVQNLDKARQAVGGAGPPNPAINGSAPRDLFDMKPFEDALRVPPPPQSVSMAEQLRGEPWFHGKLSRREAEALLQLNGDFLVRESTTTPGQYVLTGLQSGQPKHLLLVDPEGVGECGRGVGEGWQKGRYSTLQCIPLPSLIAL

SEQ ID NO: 821679 - protein, 87 aa, Homo sapiens
VGAAMPDSGPLPLLQDMNKLSGGGGRRTRVEGGQLGGEEWTRHGSFVNKPTRGWLHPNDKVMGPGVSYLVRVSEHPPLHSPADPLQF

SEQ ID NO: 821680 - protein, 584 aa, Homo sapiens; identical to SEQ ID NO: 821676

SEQ ID NO: 821681 - protein, 395 aa, Homo sapiens
MDLLPPKPKYNPLRNESLSSLEEGASGSTPPEELPSPSASSLGPILPPLPGDDSPTTLCSFFPRMSNLRLANPAGGRPGSKGEPGRAADDGEGIVGAAMPDSGPLPLLQDMNKLSGGGGRRTRVEGGQLGGEEWTRHGSFVNKPTRGWLHPNDKVMGPGVSYLVRYMGCYVLEEGQPCQTQAPYPSPELPTEAPPGDALADPPSGTTEEEEEQPGKAPDPQDPQDAESDSATGSQRQSVIQQPAPDRGTAKLGTKRPHPEDGDGQSLEGVSSSGDSAGLEAGQGPGADEPGLSRGKPYACGECGEAFAWLSHLMEHHSSHGGRKRYACQGCWKTFHFSLALAEHQKTHEKEKSYALGGARGPQPSTREAQAGARAGGPPESVEGEAPPAPPEAQR

SEQ ID NO: 821682 - protein, 584 aa, Homo sapiens; identical to SEQ ID NO: 821676

SEQ ID NO: 821683 - protein, 594 aa, Homo sapiens; identical to SEQ ID NO: 821674

SEQ ID NO: 821684 - protein, 584 aa, Homo sapiens; identical to SEQ ID NO: 821676

SEQ ID NO: 821685 - protein, 584 aa, Homo sapiens; identical to SEQ ID NO: 821676

SEQ ID NO: 821686 - protein, 596 aa, Homo sapiens
MGMSCPQRGLAPGGSRREPGLPGAPAPAPGLPGPPGCAFGSRAPLRGGSTARDGTVRQPGRALPPLGELVWAAASGDDPFHSRGAVVSLVPRPPPVFRRSVSSGPCSPSPQRSVVVAADEFRFRLLPPLAGGESGESAQFARRLGASLSSHFVVAAARGPGLPLTPLLGDGAAQGRLHPPPLPLTRVPHSMAASAPPPPDKLEGGGGPAPPPAPPSTGRKQGKAGLQMKSPEKKRRKSNTQGPAYSHLTEFAPPPTPMVDHLVASNPFEDDFGAPKVGVAAPPFLGSPVPFGGFRVQGGMAGQVPPGYSTGGGGGPQPLRRQPPPFPPNPMGPAFNMPPQGPGYPPPGNMNFPSQPFNQPLGQNFSPPSGQMMPGPVGGFGPMISPTMGQPPRAELGPPSLSQRFAQPGAPFGPSPLQRPGQGLPSLPPNTSPFPGPDPGFPGPGGEDGGKPLNPPASTAFPQEPHSGSPAAAVNGNQPSFPPNSSGRGGGTPDANSLAPPGKAGGGSGPQPPPGLVYPCGACRSEVNDDQDAILCEASCQKWFHRECTGMTESAYGLLTTEASAVWACDLCLKTKEIQSVYIREGMGQLVAANDG

SEQ ID NO: 821687 - protein, 584 aa, Homo sapiens; identical to SEQ ID NO: 821676

SEQ ID NO: 821688 - protein, 423 aa, Homo sapiens
MDLLPPKPKYNPLRNESLSSLEEGASGSTPPEELPSPSASSLGPILPPLPGDDSPTTLCSFFPRMSNLRLANPAGGRPGSKGEPGRAADDGEGIVGAAMPDSGPLPLLQDMNKLSGGGGRRTRVEGGQLGGEEWTRHGSFVNKPTRGWLHPNDKVMGPGVSYLVRYMGCVEVLQSMRALDFNTRTQVTREAISLVCEAVPGAKGATRRRKPCSRPLSSILGRSNLKFAGMPITLTVSTSSLNLMAADCKQIIANHHMQSISFASGGDPDTAEYVAYVAKDPVNQRACHILECPEGLAQDVISTIGQAFELRFKQYLRNPPKLVTPHDRMAGFDGSAWDEEEEEPPDHQYYNDFPGKEPPLGGVVDMRLREGAAPGAARPTAPNAQTPSHLGATLACRTASSGRSRSARYSAAALSNTIFLVTA

SEQ ID NO: 821689 - protein, 811 aa, Homo sapiens
RETEVLALLRSPENRASPCWAAGPGQSLGALPRSGAMKRSGTLRLLSDLSAFGGAARLRELVAGDSAVRVRGSPDGRHLLLLRPPGAVAPQLLVASRGPGAELERAWPAGQPSPLDAFFLPWPARPALVLVWESGLAEVWGAGVGPGWRPLQSTELCPGGGARVVAVAALRGRLVWCEERQARAEGPSGSPAAAFSHCVCVRTLEPSGEASTSLGRTHVLLHHCPAFGLLASCRQLFLVPTATTWPGVAHVLLIWSPGKGKVMVAAPRLGLSYSKSLNPGRGDTWDFRTLLRGLPGLLSPREPLAVHTWAPTPQGLLLLDFGGTVSLLQSHGGTRAVGTLQEAPVGPWGSAALGTFQGTLACVLGSTLELLDMGSGQLLERKVLSTDRVHLLEPPAPGMEDEEELETRGNLRLLSALGLFCVGWEAPQGVELPSAKDLVFEEACGYYQRRSLRGAQLTPEELRHSSTFRAPQALASILQGHLPPSALLTMLRTELRDYRGLEQLKAQLVAGDDEEAGWTELAEQEVARLLRTELIGDQLAQLNTVFQALPTAAWGATLRALQLQLDGNGKLRSQAPPDVWKKVLGGITAGKEPPNGILPPFELLCQCLCQLEPRWLPPFVELAQQQGGPGWGAGGPGLPLYRRALAVLGEEGTRPEALELELLLSSGRPKAVLQAVGQLVQKEQWDRALDAGLALGPSSPLLRSEIFKLLLAEFAQHRRLDAHLPLLCRLCPPELAPAELLLLLRTYLPDEVGPPTPFPEPGAEPPLTVGLLKALLEQTGAQGWLSGPVLSPYEDILWDPSTPPPTPPRDL

SEQ ID NO: 821690 - protein, 759 aa, Homo sapiens
RETEVLALLRSPENRASPCWAAGPGQSLGALPRSGAMKRSGTLRLLSDLSAFGGAARLRELVAGDSAVRVRGSPDGRHLLLLRPPGAVAPQLLVASRGPGAELERAWPAGQPSPLDAFFLPWPARPALVLVWESGLAEVWGAGVGPGWRPLQSTELCPGGGARVVAVAALRGRLVWCEERQARAEGPSGSPAAAFSHCVCVRTLEPKGKVMVAAPRLGLSYSKSLNPGRGDTWDFRTLLRGLPGLLSPREPLAVHTWAPTPQGLLLLDFGGTVSLLQSHGGTRAVGTLQEAPVGPWGSAALGTFQGTLACVLGSTLELLDMGSGQLLERKVLSTDRVHLLEPPAPGMEDEEELETRGNLRLLSALGLFCVGWEAPQGVELPSAKDLVFEEACGYYQRRSLRGAQLTPEELRHSSTFRAPQALASILQGHLPPSALLTMLRTELRDYRGLEQLKAQLVAGDDEEAGWTELAEQEVARLLRTELIGDQLAQLNTVFQALPTAAWGATLRALQLQLDGNGKLRSQAPPDVWKKVLGGITAGKEPPNGILPPFELLCQCLCQLEPRWLPPFVELAQQQGGPGWGAGGPGLPLYRRALAVLGEEGTRPEALELELLLSSGRPKAVLQAVGQLVQKEQWDRALDAGLALGPSSPLLRSEIFKLLLAEFAQHRRLDAHLPLLCRLCPPELAPAELLLLLRTYLPDEVGPPTPFPEPGAEPPLTVGLLKALLEQTGAQGWLSGPVLSPYEDILWDPSTPPPTPPRDL

SEQ ID NO: 821691 - protein, 793 aa, Homo sapiens
RETEVLALLRSPENRASPCWAAGPGQSLGALPRSGAMKRSGTLRLLSDLSAFGGAARLRELVAGDSAVRVRGSPDGRHLLLLRPPGAVAPQLLVASRGPGAELERAWPAGQPSPLDAFFLPWPARPALVLVWESGLAEVWGAGVGPGWRPLQSTELCPGGGARVVAVAALRGRLVWCEERQARAEGPSGSPAAAFSHCVCVRTLEPSGEASTSLGRTHVLLHHCPAFGLLASCRQLFLVPTATTWPGVAHVLLIWSPGKGKVMVAAPRLGLSYSKSLNPGRGDTWDFRTLLRGLPGLLSPREPLAVHTWAPTPQGLLLLDFGGTVSLLQSHGGTRAVGTLQEAPVGPWGSAALGTFQGTLACVLGSTLELLDMGSGQLLERKVLSTDRVHLLEPPAPGMEDEEELETRGNLRLLSALGLFCVGWEAPQGVELPSAKDLVFEEACGYYQRRSLRGAQLTPEELRHSSTFRAPQALASILQGHLPPSALLTMLRTELRDYRGLEQLKAQLVAGDDEEAGWTELAEQEVARLLRTELIGDQLAQLNTVFQALPTAAWGATLRALQLQLDGNGKLRSQAPPDVWKKVLGGITAGKEPPNGILPPFELLCQCLCQLEPRWLPPFVELAQQQGGPGWGAGGPGLPLYRRALAVLGEEGTRPEALELELLLSSGRPKAVLQAVGQLVHPLLRSEIFKLLLAEFAQHRRLDAHLPLLCRLCPPELAPAELLLLLRTYLPDEVGPPTPFPEPGAEPPLTVGLLKALLEQTGAQGWLSGPVLSPYEDILWDPSTPPPTPPRDL

SEQ ID NO: 821692 - protein, 811 aa, Homo sapiens; identical to SEQ ID NO: 821689

SEQ ID NO: 821693 - protein, 720 aa, Homo sapiens
RETEVLALLRSPENRASPCWAAGPGQSLGALPRSGAMKRSGTLRLLSDLSAFGGAARLRELVAGDSAVRVRGSPDGRHLLLLRPPGAVAPQLLVASRGPGAELERAWPAGQPSPLDAFFLPWPARPALVLVWESGLAEVWGAGVGPGWRPLQSTELCPGGGARVVAVAALRGRLVWCEERQARAEGPSGSPAAAFSHCVCVRTLEPSGEASTSLGRTHVLLHHCPAFGLLASCRQLFLVPTATTWPGVAHVLLIWSPGKGKVMVAAPRLGLSYSKSLNPGRGDTWDFRTLLRGLPGLLSPREPLAVHTWAPTPQGLLLLDFGGTVSLLQSHGGTRAVGTLQEAPVGPWGSAALGTFQGTLACVLGSTLELLDMGSGQLLERKVLSTDRVHLLEPPAPGMEDEEELETRGNLRLLSALGLFCVGWEAPQGVELPSAKDLVFEEACGYYQRRSLRGAQLTPEELRHSSTFRAPQALASILQGHLPPSALLTMLRTELRDYRGLEQLKAQLVAGDDEEAGWTELAEQEVARLLRTELIGDQLAQLNTVFQALPTAAWGATLRALQLQLDGNGKLRSQAPPDVWKKVLGGITAGKEPPNGILPPFELLCQCLCQLEPRWLPPFVELAQQQGGPGWGAGGPGLPLYRRALAVLGEEGTRPEALELELLLSSGRPKAVLQAVGQLVQKEQWDRALDAGLALGPSSPLLRSEIFKLLLAEFAQHRLA

SEQ ID NO: 821694 - protein, 1712 aa, Homo sapiens
MERNVLTTFSQEMSQLILNEMPKAEYSSLFNDFVESEFFLIDGDSLLITCICEISFKPGQNLHFFYLVERYLVDLISKGGQFTIVFFKDAEYAYFNFPELLSLRTALILHLQKNTTIDVRTTFSRCLSKEWGSFLEESYPYFLIVADEGLNDLQTQLFNFLIIHSWARKVNVVLSSGQESDVLCLYAYLLPSMYRHQIFSWKNKQNIKDAYTTLLNQLERFKLSALAPLFGSLKWNNITEEAHKTVSLLTQVWPEGSDIRRVFCVTSCSLSLRMYHRFLGNREPSSGQETEIQQVNSNCLTLQEMEDLCKLHCLTVVFLLHLPLSQRACARVITSHWAEDMKPLLQMKKWCEYFILRNIHTFEFWNLNLIHLSDLNDELLLKNIAFYYENENVKGLHLNLGDTIMKDYEYLWNTVSKLVRDFEVGQPFPLRTTKVCFLEKKPSPIKDSSNEMVPNLGFIPTSSFVVDKFAGDILKDLPFLKSDDPIVTSLVKQKEFDELVHWHSHKPLSDDYDRSRCQFDEKSRDPRVLRSVQKYHVFQRFYGNSLETVSSKIIVTQTIKSKKDFSGPKSKKAHETKAEIIARENKKRLFAREEQKEEQKWNALSFSIEEQLKENLHSGIKSLEDFLKSCKSSCVKLQVEMVGLTACLKAWKEHCRSEEGKTTKDLSIAVQVMKRIHSLMEKYSELLQEDDRQLIARCLKYLGFDELASSLHPAQDAENDVKVKKRNKYSVGIGPARFQLQYMGHYLIRDERKDPDPRVQDFIPDTWQRELLDVVDKNESAVIVAPTSSGKTYASYYCMEKVLKESDDGVVVYVAPTKALVNQVAATVQNRFTKNLPSGEVLCGVFTREYRHDALNCQVLITVPACFEILLLAPHRQNWVKKIRYVIFDEVHCLGGEIGAEIWEHLLVMIRCPFLALSATISNPEHLTEWLQSVKWYWKQEDKIIENNTASKRHVGRQAGFPKDYLQVKQSYKVRLVLYGERYNDLEKHVCSIKHGDIHFDHFHPCAALTTDHIERYGFPPDLTLSPRESIQLYDAMFQIWKSWPRAQELCPENFIHFNNKLVIKKMDARKYEESLKAELTSWIKNGNVEQARMVLQNLSPEADLSPENMITMFPLLVEKLRKMEKLPALFFLFKLGAVENAAESVSTFLKKKQETKRPPKADKEAHVMANKLRKVKKSIEKQKIIDEKSQKKTRNVDQSLIHEAEHDNLVKCLEKNLEIPQDCTYADQKAVDTETLQKVFGRVKFERKGEELKALAERGIGYHHSAMSFKEKQLVEILFRKGYLRVVTATGTLALGVNMPCKSVVFAQNSVYLDALNYRQMSGRAGRRGQDLMGDVYFFDIPFPKIGKLIKSNVPELRGHFPLSITLVLRLMLLASKGDDPEDAKAKVLSVLKHSLLSFKQPRVMDMLKLYFLFSLQFLVKEGYLDQEGNPMGFAGLVSHLHYHEPSNLVFVSFLVNGLFHDLCQPTRKGSKHFSQDVMEKLVLVLAHLFGRRYFPPKFQDAHFEFYQSKVFLDDLPEDFSDALDEYNMKIMEDFTTFLRIVSKLADMNQEYQLPLSKIKFTGKECEDSQLVSHLMSCKEGRVAISPFVCLSGNFDDDLLRLETPNHVTLGTIGVNRSQAPVLLSQKFDNRGRKMSLNAYALDFYKHGSLIGLVQDNRMNEGDAYYLLKDFALTIKSISVSLRELCENEDDNVVLAFEQLSTTFWEKLNKV

SEQ ID NO: 821695 - protein, 1698 aa, Homo sapiens
MERNVLTTFSQEMSQLILNEMPKAEYSSLFNDFVESEFFLIDGDSLLITCICEISFKPGQNLHFFYLVERYLVDLISKGGQFTIVFFKDAEYAYFNFPELLSLRTALILHLQKNTTIDVRTTFSRCLSKEWGSFLEESYPYFLIVADEGLNDLQTQLFNFLIIHSWARKVNVVLSSGQESDVLCLYAYLLPSMYRHQIFSWKNKQNIKDAYTTLLNQLERFKLSALAPLFGSLKWNNITEEAHKTVSLLTQVWPEGSDIRRVFCVTSCSLSLRMYHRFLGNREPSSGQETEIQQVNSNCLTLQEMEDLCKLHCLTVVFLLHLPLSQRACARVITSHWAEDMKPLLQMKKWCEYFILRNIHTFEFWNLNLIHLSDLNDELLLKNIAFYYENENVKGLHLNLGDTIMKDYEYLWNTVSKLVRDFEVGQPFPLRTTKVCFLEKKPSPIKDSSNEMVPNLGFIPTSSFVVDKFAGDILKDLPFLKSDDPIVTSLVKQKEFDELVHWHSHKPLSDDYDRSRCQFDEKSRDPRVLRSVQKYHVFQRFYGNSLETVSSKIIVTQTIKSKKDFSGPKSKKAHETKAEIIARENKKRLFAREEQKEEQKWNALSFSIEEQLKENLHSGIKSLEDFLKSCKSSCVKLQVEMVGLTACLKAWKEHCRSEEGKTTKDLSIAVQVMKRIHSLMEKYSELLQEDDRQLIARCLKYLGFDELASSLHPAQDAENDVKVKKRNKYSVGIGPARFQLQYMGHYLIRDERKDPDPRVQDFIPDTWQRELLDVVDKNESAVIVAPTSSGKTYASYYCMEKVLKESDDGVVVYVAPTKALVNQVAATVQNRFTKNLPSGEVLCGVFTREYRHDALNCQVLITVPACFEILLLAPHRQNWVKKIRYVIFDEVHCLGGEIGAEIWEHLLVMIRCPFLALSATISNPEHLTEWLQSVKWYWKQEDKIIENNTASKRHVGRQAGFPKDYLQVKQSYKVRLVLYGERYNDLEKHVCSIKHGDIHFDHFHPCAALTTDHIERYGFPPDLTLSPRESIQLYDAMFQIWKSWPRAQELCPENFIHFNNKLVIKKMDARKYEESLKAELTSWIKNGNVEQARMVLQNLSPEADLSPENMITMFPLLVEKLRKMEKLPALFFLFKLGAVENAAESVSTFLKKKQETKRPPKADKEAHVMANKLRKVKKSIEKQKIIDEKSQKKTRNVDQSLIHEAEHDNLVKCLEKNLEIPQDCTYADQKAVDTETLQKVFGRVKFERKGEELKALAERGIGYHHSAMSFKEKQLVEILFRKGYLRVVTATGTLALGVNMPCKSVVFAQNSVYLDALNYRQMSGRAGRRGQDLMGDVYFFDIPFPKIGKLIKSNVPELRGHFPLSITLVLRLMLLASKGDDPEDAKAKVLSVLKHSLLSFKQPRVMDMLKLYFLFSLQFLVKEGYLDQEGNPMGFAGLVSHLHYHEPSNLVFVSFLVNGLFHDLCQPTRKGSKHFSQDVMEKLVLVLAHLFGRRYFPPKFQDAHFEFYQSKVFLDDLPEDFSDALDEYNMKIMEDFTTFLRIVSKLADMNQEYQLPLSKIKFTGKECEDSQLVSHLMSCKEGRVAISPFVCLSGNFDDDLLRLETPNHVTLGTIGVNRSQAPVLLSQKFDNRGRKMSLNAYALDFYKHGSLIGLVQDNRMNEGDAYYLLKDFALTIKSIRCVIYLNIDFRFFNNLFII

SEQ ID NO: 821696 - protein, 1145 aa, Homo sapiens
MFFPLGQETKAEIIARENKKRLFAREEQKEEQKWNALSFSIEEQLKENLHSGIKSLEDFLKSCKSSCVKLQVEMVGLTACLKAWKEHCRSEEGKTTKDLSIAVQVMKRIHSLMEKYSELLQEDDRQLIARCLKYLGFDELASSLHPAQDAENDVKVKKRNKYSVGIGPARFQLQYMGHYLIRDERKDPDPRVQDFIPDTWQRELLDVVDKNESAVIVAPTSSGKTYASYYCMEKVLKESDDGVVVYVAPTKALVNQVAATVQNRFTKNLPSGEVLCGVFTREYRHDALNCQVLITVPACFEILLLAPHRQNWVKKIRYVIFDEVHCLGGEIGAEIWEHLLVMIRCPFLALSATISNPEHLTEWLQSVKWYWKQEDKIIENNTASKRHVGRQAGFPKDYLQVKQSYKVRLVLYGERYNDLEKHVCSIKHGDIHFDHFHPCAALTTDHIERYGFPPDLTLSPRESIQLYDAMFQIWKSWPRAQELCPENFIHFNNKLVIKKMDARKYEESLKAELTSWIKNGNVEQARMVLQNLSPEADLSPENMITMFPLLVEKLRKMEKLPALFFLFKLGAVENAAESVSTFLKKKQETKRPPKADKEAHVMANKLRKVKKSIEKQKIIDEKSQKKTRNVDQSLIHEAEHDNLVKCLEKNLEIPQDCTYADQKAVDTETLQKVFGRVKFERKGEELKALAERGIGYHHSAMSFKEKQLVEILFRKGYLRVVTATGTLALGVNMPCKSVVFAQNSVYLDALNYRQMSGRAGRRGQDLMGDVYFFDIPFPKIGKLIKSNVPELRGHFPLSITLVLRLMLLASKGDDPEDAKAKVLSVLKHSLLSFKQPRVMDMLKLYFLFSLQFLVKEGYLDQEGNPMGFAGLVSHLHYHEPSNLVFVSFLVNGLFHDLCQPTRKGSKHFSQDVMEKLVLVLAHLFGRRYFPPKFQDAHFEFYQSKVFLDDLPEDFSDALDEYNMKIMEDFTTFLRIVSKLADMNQEYQLPLSKIKFTGKECEDSQLVSHLMSCKEGRVAISPFVCLSGNFDDDLLRLETPNHVTLGTIGVNRSQAPVLLSQKFDNRGRKMSLNAYALDFYKHGSLIGLVQDNRMNEGDAYYLLKDFALTIKSISVSLRELCENEDDNVVLAFEQLSTTFWEKLNKV

SEQ ID NO: 821697 - protein, 1700 aa, Homo sapiens
MERNVLTTFSQEMSQLILNEMPKAEYSSLFNDFVESEFFLIDGDSLLITCICEISFKPGQNLHFFYLVERYLVDLISKGGQFTIVFFKDAEYAYFNFPELLSLRTALILHLQKNTTIDVRTTFSRCLSKEWGSFLEESYPYFLIVADEGLNDLQTQLFNFLIIHSWARKVNVVLSSGQESDVLCLYAYLLPSMYRHQIFSWKNKQNIKDAYTTLLNQLERFKLSALAPLFGSLKWNNITEEAHKTVSLLTQVWPEGSDIRRVFCVTSCSLSLRMYHRFLGNREPSSGQETEIQQVNSNCLTLQEMEDLCKLHCLTVVFLLHLPLSQRACARVITSHWAEDMKPLLQMKKWCEYFILRNIHTFEFWNLNLIHLSDLNDELLLKNIAFYYENENVKGLHLNLGDTIMKDYEYLWNTVSKLVRDFEVGQPFPLRTTKVCFLEKKPSPIKDSSNEMVPNLGFIPTSSFVVDKFAGDILKDLPFLKSDDPIVTSLVKQKEFDELVHWHSHKPLSDDYDRSRCQFDEKSRDPRVLRSVQKYHVFQRFYGNSLETVSSKIIVTQTIKSKKDFSGPKSKKAHETKAEIIARENKKRLFAREEQKEEQKWNALSFSIEEQLKENLHSGIKSLEDFLKSCKSSCVKLQVEMVGLTACLKAWKEHCRSEEGKTTKDLSIAVQVMKRIHSLMEKYSELLQEDDRQLIARCLKYLGFDELASSLHPAQDAENDVKVKKRNKYSVGIGPARFQLQYMGHYLIRDERKDPDPRVQDFIPDTWQRELLDVVDKNESAVIVAPTSSGKTYASYYCMEKVLKESDDGVVVYVAPTKALVNQVAATVQNRFTKNLPSGEVLCGVFTREYRHDALNCQVLITVPACFEILLLAPHRQNWVKKIRYVIFDEVHCLGGEIGAEIWEHLLVMIRCPFLALSATISNPEHLTEWLQSVKWYWKQEDKIIENNTASKRHVGRQAGFPKDYLQVKQSYKVRLVLYGERYNDLEKHVCSIKHGDIHFDHFHPCAALTTDHIERYGFPPDLTLSPRESIQLYDAMFQIWKSWPRAQELCPENFIHFNNKLVIKKMDARKYEESLKAELTSWIKNGNVEQARMVLQNLSPEADLSPENMITMFPLLVEKLRKMEKLPALFFLFKLGAVENAAESVSTFLKKKQETKRPPKADKEAHVMANKLRKVKKSIEKQKIIDEKSQKKTRNVDQSLIHEAEHDNLVKCLEKNLEIPQDCTYADQKAVDTETLQKVFGRVKFERKGEELKALAERGIGYHHSAMSFKEKQLVEILFRKGYLRVVTATGTLALGVNMPCKSVVFAQNSVYLDALNYRQMSGRAGRRGQDLMGDVYFFDIPFPKIGKLIKSNVPELRGHFPLSITLVLRLMLLASKGDDPEDAKAKVLSVLKHSLLSFKQPRVMDMLKLYFLFSLQFLVKEGYLDQEGNPMGFAGLVSHLHYHEPSNLVFVSFLVNGLFHDLCQPTRKGSKHFSQDVMEKLVLVLAHLFGRRYFPPKFQDAHFEFYQSKVFLDDLPEDFSDALDEYNMKIMEDFTTFLRIVSKLADMNQEYQLPLSKIKFTGKECEDSQLVSHLMSCKEGRVAISPFVCLSGNFDDDLLRLETPNHAPVLLSQKFDNRGRKMSLNAYALDFYKHGSLIGLVQDNRMNEGDAYYLLKDFALTIKSISVSLRELCENEDDNVVLAFEQLSTTFWEKLNKV

SEQ ID NO: 821698 - protein, 1336 aa, Homo sapiens
MERNVLTTFSQEMSQLILNEMPKAEYSSLFNDFVESEFFLIDGDSLLITCICEISFKPGQNLHFFYLVERYLVDLISKGGQFTIVFFKDAEYAYFNFPELLSLRTALILHLQKNTTIDVRTTFSRCLSKEWGSFLEESYPYFLIVADEGLNDLQTQLFNFLIIHSWARKVNVVLSSGQESDVLCLYAYLLPSMYRHQIFSWKNKQNIKDAYTTLLNQLERFKLSALAPLFGSLKWNNITEEAHKTVSLLTQVWPEGSDIRRVFCVTSCSLSLRMYHRFLGNREPSSGQETEIQQVNSNCLTLQEMEDLCKLHCLTVVFLLHLPLSQRACARVITSHWAEDMKPLLQMKKWCEYFILRNIHTFEFWNLNLIHLSDLNDELLLKNIAFYYENENVKGLHLNLGDTIMKDYEYLWNTVSKLVRDFEVGQPFPLRTTKVCFLEKKPSPIKDSSNEMVPNLGFIPTSSFVVDKFAGDILKDLPFLKSDDPIVTSLVKQKEFDELVHWHSHKPLSDDYDRSRCQFDEKSRDPRVLRSVQKYHVFQRFYGNSLETVSSKIIVTQTIKSKKDFSGPKSKKAHETKAEIIARENKKRLFAREEQKEEQKWNALSFSIEEQLKENLHSGIKSLEDFLKSCKSSCVKLQVEMVGLTACLKAWKEHCRSEEGKTTKDLSIAVQVMKRIHSLMEKYSELLQEDDRQLIARCLKYLGFDELASSLHPAQDAENDVKVKKRNKYSVGIGPARFQLQYMGHYLIRDERKDPDPRVQDFIPDTWQRELLDVVDKNESAVIVAPTSSGKTYASYYCMEKVLKESDDGVVVYVAPTKALVNQVAATVQNRFTKNLPSGEVLCGVFTREYRHDALNCQVLITVPACFEILLLAPHRQNWVKKIRYVIFDEVHCLGGEIGAEIWEHLLVMIRCPFLALSATISNPEHLTDQQCLTHPAQHMVTGTHQAQHTTSISTHHITLLLKQHHDKSQIKAQAYFPEQHSTLPQFNTPTSVITSSSTYVSFHNLRTPRKRTSHRIHQASTQTIDTLLNTHLSQHNRGRTAAIKLLMDFKIITSDQMIRLGERYQHKQDFNTIVKHRGTGDIFTIALDIIYHTCYNPIPHSNRDENHKSVGYLGTAPMDPPKPLRGAHHTRGGTIQSTPHRRQPLGLKPPANNQQDHVQTSVENDNIHTHEEYTLTTQRASRKRLRDHTQMPNDRQAPTTAGPGTIHTARLEVHCTINVGNNRHPHTRGPRARGTKSEKHSRRARGQAHSQSEAHEQQRLPHAQVEPATHRAAQLKHTCERSTTAQTTRTITEEEPDTNKPRRSNRCTNTARQTAERQHRRRPSNRKTGNSKQNR

SEQ ID NO: 821699 - protein, 283 aa, Homo sapiens
QGRPLRRRTSDGRRERFLLPAAALAMAAPAPGLISVFSSSQELGAALAQLVAQRAACCLAGARARFALGLSGGSLVSMLARELPAAVAPAGPASLARWTLGFCDERLVPFDHAESTYGLYRTHLLSRLPIPESQVITINPELPVEEAAEDYAKKLRQAFQGDSIPVFDLLILGVGPDGHTCSLFPDHPLLQEREKIVAPISDSPKPPPQRVTLTLPVLNAARTVIFVATGEGKAAVLKRILEDQEENPLPAALVQPHTGKLCWFLDEAAARLLTVPFEKHSTL

SEQ ID NO: 821700 - protein, 283 aa, Homo sapiens; identical to SEQ ID NO: 821699

SEQ ID NO: 821701 - protein, 174 aa, Homo sapiens
LISQMEKLRPEETHLLSRLPIPESQVITINPELPVEEAAEDYAKKLRQAFQGDSIPVFDLLILGVGPDGHTCSLFPDHPLLQEREKIVAPISDSPKPPPQRVTLTLPVLNAARTVIFVATGEGKAAVLKRILEDQEENPLPAALVQPHTGKLCWFLDEAAARLLTVPFEKHSTL

SEQ ID NO: 821702 - protein, 225 aa, Homo sapiens
  misc_feature (18)..(18): Xaa can be any naturally occurring amino acid
  misc_feature (27)..(27): Xaa can be any naturally occurring amino acid
  misc_feature (47)..(47): Xaa can be any naturally occurring amino acid
ITFPDAFKAIIPKVSQMXNRICYINQXCAFQMTYYSGDRPQSPQAYXPGTDPLEEGHGAGLYRTHLLSRLPIPESQVITINPELPVEEAAEDYAKKLRQAFQGDSIPVFDLLILGVGPDGHTCSLFPDHPLLQEREKIVAPISDSPKPPPQRVTLTLPVLNAARTVIFVATGEGKAAVLKRILEDQEENPLPAALVQPHTGKLCWFLDEAAARLLTVPFEKHSTL

SEQ ID NO: 821703 - protein, 318 aa, Homo sapiens
QGRPLRRRTSDGRRERFLLPAAALAMAAPAPGLISVFSSSQELGAALAQLVAQRAACCLAGARARFALGLSGGSLVSMLARELPAAVAPAGPASLARWTLGFCDERLVPFDHAESTYGLYRTHLLSRLPIPESQVITINPELPVEEAAEDYAKKLRQELPQGSLADPFEESPLRGHSPALGSLKATLASVAQAFQGDSIPVFDLLILGVGPDGHTCSLFPDHPLLQEREKIVAPISDSPKPPPQRVTLTLPVLNAARTVIFVATGEGKAAVLKRILEDQEENPLPAALVQPHTGKLCWFLDEAAARLLTVPFEKHSTL

SEQ ID NO: 821704 - protein, 279 aa, Homo sapiens
QGRPLRRRTSDGRRERFLLPAAALAMAAPAPGLISVFSSSQELGAALAQLVAQRAACCLAGARARFALGLSGGSLVSMLARELPAAVAPAGPASLARWTLGFCDERLVPFDHAESTYGLYRTHLLSRLPIPESQVITINPELPVEEAAEDYAKKLRQAFQGDSIPVFDLLILGVGPDGHTCSLFPDHPLLQEREKIVAPISDSPKPPPQRVTLTLPVLNAARTVIFVATGEGKAAVLKVTAEGSSPGKFMGMWAPGTENGPRHYCAEASDLKKTQSFLG

SEQ ID NO: 821705 - protein, 64 aa, Homo sapiens
MVTPATLYEVVEVNGVCVEGKQHGDVVSAIRAGGDETKLLVVDRETDEFFKKCRVIPSHEHLNV

SEQ ID NO: 821706 - protein, 233 aa, Homo sapiens
QGRPLRRRTSDGRRERFLLPAAALAMAAPAPGLISVFSSSQELGAALAQLVAQRAACCLAGARARFALGLSGGSLVSMLARELPAAVAPAGPASLARWTLGFCDERLVPFDHAESTYGLYRVRATGAAGDHAERATATAYTPATEAAGGHAERAAPTVCTSATGATGYHAKRAVPTACTSATWVAGGHAKRAGPPVALGYGGHWGSCRDGHAHCLHLDYGGRWGSSRQGSPAS

SEQ ID NO: 821707 - protein, 182 aa, Homo sapiens
NCSSSNPVAFLLCLLVEGYLHSKCVNGVGPSGACPQEVCEETGTVARADAARDKYTATPLLLDSVLPPRGHGWVYGEADYPPHTESSGGRPAKGQSARPQAQAQGQVREPRPQDMLPFCQERLFWGPGWDWAPETKTPCLTQPGPSWSLLGVLWLGTRQAPVPCQAWCPPGPPARASLPPAS

SEQ ID NO: 821708 - protein, 784 aa, Homo sapiens
GGRRRHVVRCRGSGVSVLLRCVESWGGYMGQACSGLLSPWYRSLGGLARSPPAFQLLPCTCSPPVAGGMEEVIVAQVDHGLGSAWVPSHRRVNPPTLRMKKLNWQKLPSNVAREHNSMWASLSSPDAEAVEPDFSSIERLFSFPAAKPKEPTMVAPRARKEPKEITFLDAKKSLNLNIFLKQFKCSNEEVAAMIRAGDTTKFDVEVLKQLLKLLPEKHEIENLRAFTEERAKLASADHFYLLLLAIPCYQLRIECMLLCEGAAAVLDMVRPKAQLVLAACESLLTSRQLPIFCQLILRIGNFLNYGSHTGDADGFKISTLLKLTETKSQQNRVTLLHHVLEEAEKSHPDLLQLPRDLEQPSQAAGINLEIIRSEASSNLKKLLETERKVSASVAEVQEQYTERLQASISAFRALDELFEAIEQKQRELADYLCEDAQQLSLEDTFSTMKAFRDLFLRALKENKDRKEQAAKAERRKQQLAEEEARRPRGEDGKPVRKGPGKQEEVCVIDALLADIRKGFQLRKTARGRGDTDGGSKAASMDPPRATEPVATSNPAGDPVGSTRCPASEPGLDATTASESRGWDLVDAVTPGPQPTLEQLEEGGPRPLERRSSWYVDASDVLTTEDPQCPQPLEGAWPVTLGDAQALKPLKFSSNQPPAAGSSRQDAKDPTSLLGVLQAEADSTSEGLEDAVHSRGARPPAAGPGGDEDEDEEDTAPESALDTSLDKSFSEDAVTDSSGSGTLPRARGRASKGTGKRRKKRPSRSQEEVPPDSDDNKTKKLCVIQ

SEQ ID NO: 821709 - protein, 812 aa, Homo sapiens
GGRRRHVVRCRGSGVSVLLRCVESWGGYMGQACSGLLSPWYRSLGGLARSPPAFQLLPCTCSPPVAGGMEEVIVAQVDHGLGSAWVPSHRRVNPPTLRMKKLNWQKLPSNVAREHNSMWASLSSPDAEAVEPDFSSIERLFSFPAAKPKEPTMVAPRARKEPKEVGTGRGLRPGPPAWPPSGTSLLGGGFSQITFLDAKKSLNLNIFLKQFKCSNEEVAAMIRAGDTTKFDVEVLKQLLKLLPEKHEIENLRAFTEERAKLASADHFYLLLLAIPCYQLRIECMLLCEGAAAVLDMVRPKAQLVLAACESLLTSRQLPIFCQLILRIGNFLNYGSHTGDADGFKISTLLKLTETKSQQNRVTLLHHVLEEAEKSHPDLLQLPRDLEQPSQAAGINLEIIRSEASSNLKKLLETERKVSASVAEVQEQYTERLQASISAFRALDELFEAIEQKQRELADYLCEDAQQLSLEDTFSTMKAFRDLFLRALKENKDRKEQAAKAERRKQQLAEEEARRPRGEDGKPVRKGPGKQEEVCVIDALLADIRKGFQLRKTARGRGDTDGGSKAASMDPPRATEPVATSNPAGDPVGSTRCPASEPGLDATTASESRGWDLVDAVTPGPQPTLEQLEEGGPRPLERRSSWYVDASDVLTTEDPQCPQPLEGAWPVTLGDAQALKPLKFSSNQPPAAGSSRQDAKDPTSLLGVLQAEADSTSEGLEDAVHSRGARPPAAGPGGDEDEDEEDTAPESALDTSLDKSFSEDAVTDSSGSGTLPRARGRASKGTGKRRKKRPSRSQEEVPPDSDDNKTKKLCVIQ

SEQ ID NO: 821710 - protein, 775 aa, Homo sapiens
GGRRRHVVRCRGSGVSVLLRCVESWGGYMGQACSGLLSPWYRSLGGLARSPPAFQLLPCTCSPPVAGGMEEVIVAQVDHGLGSAWVPSHRRVNPPTLRMKKLNWQKLPSNVAREHNSMWASLSSPDAEAVEPDFSSIERLFSFPAAKPKEPTMVAPRARKEPKEITFLDAKKSLNLNIFLKQFKCSNEEVAAMIRAGDTTKFDVEVLKQLLKLLPEKHEIENLRAFTEERAKLASADHFYLLLLAIPCYQLRIECMLLCEGAAAVLDMVRPKAQLVLAACESLLTSRQLPIFCQLILRIGNFLNYGSHTGDADGFKISTLLKLTETKSQQNRVTLLHHVLEEAEKSHPDLLQLPRDLEQPSQAAGINLEIIRSEASSNLKKLLETERKVSASVAEVQEQYTERLQASISAFRALDELFEAIEQKQRELADYLCEDAQQLSLEDTFSTMKAFRDLFLRALKENKDRKEQAAKAERRKQQLAEEEARRPRGEDGKPVRKGPGKQEEVCVIDALLADIRKGFQLRKTARGRGDTDGGSKAASMDPPRATEPVATSNPAGDPVGSTRCPASEPGLDATTASESRGWDLVDAVTPGPQPTLEQLEEGGPRPLERRSSWYVDASDVLTTEDPQCPQPLEGAWPVTLGDAQALKPLKFSSNQPPAAGSSRQDAKDPTSLLGVLQAEADSTSEGLEDAVHSRGARPPAAGPGGDEDEDEEDTAPESALDTSLDKSFSEDAVTDSSGSGTLPRARGRASKGTGKRRKKRPSRSQEGLRPRPKAK

SEQ ID NO: 821711 - protein, 803 aa, Homo sapiens
GGRRRHVVRCRGSGVSVLLRCVESWGGYMGQACSGLLSPWYRSLGGLARSPPAFQLLPCTCSPPVAGGMEEVIVAQVDHGLGSAWVPSHRRVNPPTLRMKKLNWQKLPSNVAREHNSMWASLSSPDAEAVEPDFSSIERLFSFPAAKPKEPTMVAPRARKEPKEITFLDAKKSLNLNIFLKQFKCSNEEVAAMIRAGDTTKFDVEVLKQLLKLLPEKHEIENLRAFTEERAKLASADHFYLLLLAIPCYQLRIECMLLCEGAAAVLDMVRPKAQLVLAACESLLTSRQLPIFCQLILRIGNFLNYGSHTGDADGFKISTLLKLTETKSQQNRVTLLHHVLEEAEKSHPDLLQLPRDLEQPSQAAGINLEIIRSEASSNLKKLLETERKVSASVAEVQEQYTERLQASISAFRALDELFEAIEQKQRELADYLCEDAQQLSLEDTFSTMKAFRDLFLRALKENKDRKEQAAKAERRKQQLAEEEARRPRGEDGKPVRKGPGKQEEVCVIDALLADIRKGFQLRKTARGRGDTDGGSKAASMDPPRATEPVATSNPAGDPVGSTRCPASEPGLDATTASESRGWDLVDAVTPGPQPTLEQLEEGGPRPLERRSSWYVDASDVLTTEDPQCPQPLEGAWPVTLGDAQALKPLKFSSNQPPAAGSSRQDAKDPTSLLGVLQAEADSTSEGLEDAVHSRGARPPAAGPGGDEDEDEEDTAPESALDTSLDKSFSEDAVTDSSGSGTLPRARGRASKGTGKRRKKRPSRSQEGNSGRGPGHRPTPGRWHPAGPSPSPLGTASSSGTQER

SEQ ID NO: 821712 - protein, 822 aa, Homo sapiens
GGRRRHVVRCRGSGVSVLLRCVESWGGYMGQACSGLLSPWYRSLGGLARSPPAFQLLPCTCSPPVAGGMEEVIVAQVDHGLGSAWVPSHRRVNPPTLRMKKLNWQKLPSNVAREHNSMWASLSSPDAEAVEPDFSSIERLFSFPAAKPKEPTMVAPRARKEPKEITFLDAKKSLNLNIFLKQFKCSNEEVAAMIRAGDTTKFDVEVLKQLLKLLPEKHEIENLRAFTEERAKLASADHFYLLLLAIPCYQLRIECMLLCEGAAAVLDMVRPKAQLVLAACESLLTSRQLPIFCQLILRIGNFLNYGSHTGDADGFKISTLLKLTETKSQQNRVTLLHHVLEEAEKSHPDLLQLPRDLEQPSQAAGINLEIIRSEASSNLKKLLETERKVSASVAEVQEQYTERLQASISAFRALDELFEAIEQKQRELADYLCEDAQQLSLEDTFSTMKAFRDLFLRALKENKDRKEQAAKAERRKQQLAEEEARRPRGEDGKPVRKGPGKQEEVCVIDALLADIRKGFQLRKTARGRGDTDGGSKAASMDPPRATEPGPALSAEAAVQPAGLQRDEARPTDQMPLGSEGARGGRKVATSNPAGDPVGSTRCPASEPGLDATTASESRGWDLVDAVTPGPQPTLEQLEEGGPRPLERRSSWYVDASDVLTTEDPQCPQPLEGAWPVTLGDAQALKPLKFSSNQPPAAGSSRQDAKDPTSLLGVLQAEADSTSEGLEDAVHSRGARPPAAGPGGDEDEDEEDTAPESALDTSLDKSFSEDAVTDSSGSGTLPRARGRASKGTGKRRKKRPSRSQEEVPPDSDDNKTKKLCVIQ

SEQ ID NO: 821713 - protein, 437 aa, Homo sapiens
MQAAPGTWSSPRKARQGLINLEIIRSEASSNLKKLLETERKVSASVAEVQEQYTERLQASISAFRALDELFEAIEQKQRELADYLCEDAQQLSLEDTFSTMKAFRDLFLRALKENKDRKEQAAKAERRKQQLAEEEARRPRGEDGKPVRKGPGKQEEVCVIDALLADIRKGFQLRKTARGRGDTDGGSKAASMDPPRATEPVATSNPAGDPVGSTRCPASEPGLDATTASESRGWDLVDAVTPGPQPTLEQLEEGGPRPLERRSSWYVDASDVLTTEDPQCPQPLEGAWPVTLGDAQALKPLKFSSNQPPAAGSSRQDAKDPTSLLGVLQAEADSTSEGLEDAVHSRGARPPAAGPGGDEDEDEEDTAPESALDTSLDKSFSEDAVTDSSGSGTLPRARGRASKGTGKRRKKRPSRSQEEVPPDSDDNKTKKLCVIQ

SEQ ID NO: 821714 - protein, 113 aa, Homo sapiens
GGRRRHVVRCRGSGVSVLLRCVESWGGYMGQACSGLLSPWYRSLGGLARSPPAFQLAALHLQPPRGGRHGGGHRGPGGPWLGLSMGPQPSAGEPTHTAHEEAELAEAAIQRGT

SEQ ID NO: 821715 - protein, 1264 aa, Homo sapiens
WNTETPTECSESPPPPTLYVQLHGETTRRLEAEEKPLQIQNDYLFQLGFGELWRVQEEGMDSEIGCLIRFYAGKPHSTGSSERIQLSGMYNVRKGKMQLPVNRWTRRQVILCGTCLIVSSVKDSLTGKMHVLPLIGGKVEEVKKHQHCLAFSSSGPQSQTYYICFDTFTEYLRWLRQVSKVASQRISSVDLSCCSLEHLPANLFYSQDLTHLNLKQNFLRQNPSLPAARGLNELQRFTKLKSLNLSNNHLGDFPLAVCSIPTLAELNVSCNALRSVPAAVGVMHNLQTFLLDGNFLQSLPAELENMKQLSYLGLSFNEFTDIPEVLEKLTAVDKLCMSGNCVETLRLQALRKMPHIKHVDLRLNVIRKLIADEVDFLQHVTQLDLRDNKLGDLDAMIFNNIEVLHCERNQLVTLDICGYFLKALYASSNELVQLDVYPVPNYLSYMDVSRNRLENVPEWVCESRKLEVLDIGHNQICELPARLFCNSSLRKLLAGHNQLARLPERLERTSVEVLDVQHNQLLELPPNLLMKADSLRFLNASANKLESLPPATLSEETNSILQELYLTNNSLTDKCVPLLTGHPHLKILHMAYNRLQSFPASKMAKLEELEEIDLSGNKLKAIPTTIMNCRRMHTVIAHSNCIEVFPEVMQLPEIKCVDLSCNELSEVTLPENLPPKLQELDLTGNPRLVLDHKTLELLNNIRCFKIDQPSTGDASGAPAVWSHGYTEASGVKNKLCVAALSVNNFCDNREALYGVFDGDRNVEVPYLLQCTMSDILAEELQKTKNEEEYMVNTFIVMQRKLGTAGQKLGGAAVLCHIKHDPVDPGGSFTLTSANVGKCQTVLCRNGKPLPLSRSYIMSCEEELKRIKQHKAIITEDGKVNGVTESTRILGYTFLHPSVVPRPHVQSVLLTPQDEFFILGSKGLWDSLSVEEAVEAVRNVPDALAAAKKLCTLAQSYGCHDSISAVVVQLSVTEDSFCCCELSAGGAVPPPSPGIFPPSVNMVIKDRPSDGLGVPSSSSGMASEISSELSTSEMSSEVGSTASDEPPPGALSENSPAYPSEQRCMLHPICLSNSFQRQLSSATFSSAFSDNGLDSDDEEPIEGVFTNGSRVEVEVDIHCSRAKEKEKQQHLLQVPAEASDEGIVISANEDEPGLPRKADFSAVGTIGRRRANGSVAPQERSHNVIEVATDAPLRKPGGYFAAPAQPDPDDQFIIPPELEEEVKEIMKHHQEQQQQQQPPPPPQLQPQLPRHYQLDQLPDYYDTPL

SEQ ID NO: 821716 - protein, 1116 aa, Homo sapiens
MPTGNLTWIRMIVTSSFSFQFPPSIVICSSSYVASQRISSVDLSCCSLEHLPANLFYSQDLTHLNLKQNFLRQNPSLPAARGLNELQRFTKLKSLNLSNNHLGDFPLAVCSIPTLAELNVSCNALRSVPAAVGVMHNLQTFLLDGNFLQSLPAELENMKQLSYLGLSFNEFTDIPEVLEKLTAVDKLCMSGNCVETLRLQALRKMPHIKHVDLRLNVIRKLIADEVDFLQHVTQLDLRDNKLGDLDAMIFNNIEVLHCERNQLVTLDICGYFLKALYASSNELVQLDVYPVPNYLSYMDVSRNRLENVPEWVCESRKLEVLDIGHNQICELPARLFCNSSLRKLLAGHNQLARLPERLERTSVEVLDVQHNQLLELPPNLLMKADSLRFLNASANKLESLPPATLSEETNSILQELYLTNNSLTDKCVPLLTGHPHLKILHMAYNRLQSFPASKMAKLEELEEIDLSGNKLKAIPTTIMNCRRMHTVIAHSNCIEVFPEVMQLPEIKCVDLSCNELSEVTLPENLPPKLQELDLTGNPRLVLDHKTLELLNNIRCFKIDQPSTGDASGAPAVWSHGYTEASGVKNKLCVAALSVNNFCDNREALYGVFDGDRNVEVPYLLQCTMSDILAEELQKTKNEEEYMVNTFIVMQRKLGTAGQKLGGAAVLCHIKHDPVDPGGSFTLTSANVGKCQTVLCRNGKPLPLSRSYIMSCEEELKRIKQHKAIITEDGKVNGVTESTRILGYTFLHPSVVPRPHVQSVLLTPQDEFFILGSKGLWDSLSVEEAVEAVRNVPDALAAAKKLCTLAQSYGCHDSISAVVVQLSVTEDSFCCCELSAGGAVPPPSPGIFPPSVNMVIKDRPSDGLGVPSSSSGMASEISSELSTSEMSSEVGSTASDEPPPGALSENSPAYPSEQRCMLHPICLSNSFQRQLSSATFSSAFSDNGLDSDDEEPIEGVFTNGSRVEVEVDIHCSRAKEKEKQQHLLQVPAEASDEGIVISANEDEPGLPRKADFSAVGTIGRRRANGSVAPQERSHNVIEVATDAPLRKPGGYFAAPAQPDPDDQFIIPPELEEEVKEIMKHHQEQQQQQQPPPPPQLQPQLPRHYQLDQLPDYYDTPL

SEQ ID NO: 821717 - protein, 1264 aa, Homo sapiens; identical to SEQ ID NO: 821715

SEQ ID NO: 821718 - protein, 611 aa, Homo sapiens
MIFLTSALIELNKVAFLNNSLPDCMSSTYLQSCAYLLDWKTLAVLNNIRCFKIDQPSTGDASGAPAVWSHGYTEASGVKNKLCVAALSVNNFCDNREALYGVFDGDRNVEVPYLLQCTMSDILAEELQKTKNEEEYMVNTFIVMQRKLGTAGQKLGGAAVLCHIKHDPVDPGGSFTLTSANVGKCQTVLCRNGKPLPLSRSYIMSCEEELKRIKQHKAIITEDGKVNGVTESTRILGYTFLHPSVVPRPHVQSVLLTPQDEFFILGSKGLWDSLSVEEAVEAVRNVPDALAAAKKLCTLAQSYGCHDSISAVVVQLSVTEDSFCCCELSAGGAVPPPSPGIFPPSVNMVIKDRPSDGLGVPSSSSGMASEISSELSTSEMSSEVGSTASDEPPPGALSENSPAYPSEQRCMLHPICLSNSFQRQLSSATFSSAFSDNGLDSDDEEPIEGVFTNGSRVEVEVDIHCSRAKEKEKQQHLLQVPAEASDEGIVISANEDEPGLPRKADFSAVGTIGRRRANGSVAPQERSHNVIEVATDAPLRKPGGYFAAPAQPDPDDQFIIPPELEEEVKEIMKHHQEQQQQQQPPPPPQLQPQLPRHYQLDQLPDYYDTPL

SEQ ID NO: 821719 - protein, 779 aa, Homo sapiens
WNTETPTECSESPPPPTLYVQLHGETTRRLEAEEKPLQIQNDYLFQLGFGELWRVQEEGMDSEIGCLIRFYAGKPHSTGSSERIQLSGMYNVRKGKMQLPVNRWTRRQVILCGTCLIVSSVKDSLTGKMHVLPLIGGKVEEVKKHQHCLAFSSSGPQSQTYYICFDTFTEYLRWLRQVSKVASQRISSVDLSCCSLEHLPANLFYSQDLTHLNLKQNFLRQNPSLPAARGLNELQRFTKLKSLNLSNNHLGDFPLAVCSIPTLAELNVSCNALRSVPAAVGVMHNLQTFLLDGNFLQSLPAELENMKQLSYLGLSFNEFTDIPEVLEKLTAVDKLCMSGNCVETLRLQALRKMPHIKHVDLRLNVIRKLIADEVDFLQHVTQLDLRDNKLGDLDAMIFNNIEVLHCERNQLVTLDICGYFLKALYASSNELVQLDVYPVPNYLSYMDVSRNRLENVPEWVCESRKLEVLDIGHNQICELPARLFCNSSLRKLLAGHNQLARLPERLERTSVEVLDVQHNQLLELPPNLLMKADSLRFLNASANKLESLPPATLSEETNSILQELYLTNNSLTDKCVPLLTGHPHLKILHMAYNRLQSFPASKMAKLEELEEIDLSGNKLKAIPTTIMNCRRMHTVIAHSNCIEVFPEVMQLPEIKCVDLSCNELSEVTLPENLPPKLQELDLTGNPRLVLDHKTLELLNNIRCFKIDQPSTGDASGAPAVWSHGYTEASGVKNKKIEGPHPLSEEKTYGDKPRKAPERGGLTGDTERGGGALTFSPVGP

SEQ ID NO: 821720 - protein, 791 aa, Homo sapiens
MPLYDNQKARSVMNECERHVIFARTDADAPPPPEDWEEHVNRTGWTMAQNKLFNKILKALQSDRLARLANEGACNEPVLRRVAVDKCARRVRQALASVSWDTKLIQWLHTTLVETLSLPMLAAYLDALQTLKGKIPTLIDRMLVSSNTKTGAAGAEALSLLLKRPWDPAVGVLSHNKPSKLPGSPLILIASSGPSSSVFPTSRRHRFWQSQLSCLGKVIPVATHLLNNGSGVGVLQCLEHMIGAVRSKVLEIHSHFPHKPIILIGWNTGALVACHVSVMEYVTAVVCLGFPLLTVDGPRGDVDDPLLDMKTPVLFVIGQNSLQCHPEAMEDFREKIRAENSLVVVGGADDNLRISKAKKKSEGLTQSMVDRCIQDEIVDFLTGVLTRAEGHMGSEPRDQDAEKKKKPRDVARRDLAFEVPERGSRPASPAAKLPASPSGSEDLSSVSSSPTSSPKTKVTTVTSAQKSSQIGSSQLLKRHVQRTEAVLTHKQAQVPISSEPPEEGEKEDLRVQLKRHHPSSPLPGSKTSKRPKIKVSLISQGDTAGGPCAPSQGSAPEAAGGKPITMTLGQASAGAKELTGLLTTAKSSSSEGGVSASPVPSVVSSSTAPSALHTLQSRLVATSPGSSLPGATSASSLLQGLSFSLQDISSKTSGLPANPSPGPAPQATSVKLPTPMQSLGAITTGTSTIVRTIPVATTLSSLGATPGGKPTAIHQLLTNGGLAKLASSLPGLAQISNQASGLKVPTTITLTLRGQPSRITTLSPMGSGAAPSEESSSQVLPSSSQRLPPAP

SEQ ID NO: 821721 - protein, 903 aa, Homo sapiens
MNGSWTWFFWIIAMPSLGVPTQMPVVPAPPACSLSLPGGSTKVPCESDVPIDVETVTSTPMPLYDNQKARSVMNECERHVIFARTDADAPPPPEDWEEHVNRVSLCHPDCSAVARSRLTTSLDLQELSLLVDHHPSVMTLPHCHRLMLTHHLFWTGWTMAQNKLFNKILKALQSDRLARLANEGACNEPVLRRVAVDKCARRVRQALASVSWDTKLIQWLHTTLVETLSLPMLAAYLDALQTLKGKIPTLIDRMLVSSNTKTGAAGAEALSLLLKRPWDPAVGVLSHNKPSKLPGSPLILIASSGPSSSVFPTSRRHRFWQSQLSCLGKVIPVATHLLNNGSGVGVLQCLEHMIGAVRSKVLEIHSHFPHKPIILIGWNTGALVACHVSVMEYVTAVVCLGFPLLTVDGPRGDVDDPLLDMKTPVLFVIGQNSLQCHPEAMEDFREKIRAENSLVVVGGADDNLRISKAKKKSEGLTQSMVDRCIQDEIVDFLTGVLTRAEGHMGSEPRDQDAEKKKKPRDVARRDLAFEVPERGSRPASPAAKLPASPSGSEDLSSVSSSPTSSPKTKVTTVTSAQKSSQIGSSQLLKRHVQRTEAVLTHKQAQVPISSEPPEEGEKEDLRVQLKRHHPSSPLPGSKTSKRPKIKVSLISQGDTAGGPCAPSQGSAPEAAGGKPITMTLGQASAGAKELTGLLTTAKSSSSEGGVSASPVPSVVSSSTAPSALHTLQSRLVATSPGSSLPGATSASSLLQGLSFSLQDISSKTSGLPANPSPGPAPQATSVKLPTPMQSLGAITTGTSTIVRTIPVATTLSSLGATPGGKPTAIHQLLTNGGLAKLASSLPGLAQISNQASGLKVPTTITLTLRGQPSRITTLSPMGSGAAPSEESSSQVLPSSSQRLPPAP

SEQ ID NO: 821722 - protein, 766 aa, Homo sapiens
MTLPHCHRLMLTHHLFWTGWTMAQNKLFNKILKALQSDRLARLANEGACNEPVLRRVAVDKCARRVRQALASVSWDTKLIQWLHTTLVETLSLPMLAAYLDALQTLKGKIPTLIDRMLVSSNTKTGAAGAEALSLLLKRPWDPAVGVLSHNKPSKLPGSPLILIASSGPSSSVFPTSRRHRFWQSQLSCLGKVIPVATHLLNNGSGVGVLQCLEHMIGAVRSKVLEIHSHFPHKPIILIGWNTGALVACHVSVMEYVTAVVCLGFPLLTVDGPRGDVDDPLLDMKTPVLFVIGQNSLQCHPEAMEDFREKIRAENSLVVVGGADDNLRISKAKKKSEGLTQSMVDRCIQDEIVDFLTGVLTRAEGHMGSEPRDQDAEKKKKPRDVARRDLAFEVPERGSRPASPAAKLPASPSGSEDLSSVSSSPTSSPKTKVTTVTSAQKSSQIGSSQLLKRHVQRTEAVLTHKQAQVPISSEPPEEGEKEDLRVQLKRHHPSSPLPGSKTSKRPKIKVSLISQGDTAGGPCAPSQGSAPEAAGGKPITMTLGQASAGAKELTGLLTTAKSSSSEGGVSASPVPSVVSSSTAPSALHTLQSRLVATSPGSSLPGATSASSLLQGLSFSLQDISSKTSGLPANPSPGPAPQATSVKLPTPMQSLGAITTGTSTIVRTIPVATTLSSLGATPGGKPTAIHQLLTNGGLAKLASSLPGLAQISNQASGLKVPTTITLTLRGQPSRITTLSPMGSGAAPSEESSSQVLPSSSQRLPPAP

SEQ ID NO: 821723 - protein, 753 aa, Homo sapiens
MNGSWTWFFWIIAMPSLGVPTQMPVVPAPPACSLSLPGGSTKVPCESDVPIDVETVTSTPMPLYDNQKARSVMNECERHVIFARTDADAPPPPEDWEEHVNRTGWTMAQNKLFNKILKALQSDRLARLANEGACNEPVLRRVAVDKCARRVRQALASVSWDTKLIQWLHTTLVETLSLPMLAAYLDALQTLKGKIPTLIDRMLVSSNTKTGAAGAEALSLLLKRPWDPAVGVLSHNKPSKLPGSPLILIASSGPSSSVFPTSRRHRFWQSQLSCLGKVIPVATHLLNNGSGVGVLQCLEHMIGAVRSKVLEIHSHFPHKPIILIGWNTGALVACHVSVMEYVTAVVCLGFPLLTVDGPRGDVDDPLLDMKTPVLFVIGQNSLQCHPEAMEDFREKIRAENSLVVVGGADDNLRISKAKKKSEGLTQSMVDRCIQDEIVDFLTGVLTRAEGHMGSEPRDQDAEKKKKPRDVARRDLAFEVPERGSRPASPAAKLPASPSGSEDLSSVSSSPTSSPKTKVTTVTSAQKSSQIGSSQLLKRHVQRTEAVLTHKQAQAQFAAFLKQNMLVRKALPPGTSSCLFVPISSEPPEEGEKEDLRVQLKRHHPSSPLPGSKTSKRPKIKVSLISQGDTAGGPCAPSQGSAPEAAGGKPITMTLGQASAGAKELTGLLTTAKSSSSEGGVSASPVPSVVSSSTAPSALHTLQSRLVATSPGSSLPGATSASSLLQGLSFSLQDISSKTSGLPANPSPGPAPQA

SEQ ID NO: 821724 - protein, 791 aa, Homo sapiens; identical to SEQ ID NO: 821720

SEQ ID NO: 821725 - protein, 742 aa, Homo sapiens
RGGVNAHALRDPAVAERAAVRPRACNEPVLRRVAVDKCARRVRQALASVSWDTKLIQWLHTTLVETLSLPMLAAYLDALQTLKGKIPTLIDRMLVSSNTKTGAAGAEALSLLLKRPWDPAVGVLSHNKPSKLPGSPLILIASSGPSSSVFPTSRRHRFWQSQLSCLGKVIPVATHLLNNGSGVGVLQCLEHMIGAVRSKVLEIHSHFPHKPIILIGWNTGALVACHVSVMEYVTAVVCLGFPLLTVDGPRGDVDDPLLDMKTPVLFVIGQNSLQCHPEAMEDFREKIRAENSLVVVGGADDNLRISKAKKKSEGLTQSMVDRCIQDEIVDFLTGVLTRAEGHMGSEPRDQDAEKKKKPRDVARRDLAFEVPERGSRPASPAAKLPASPSGSEDLSSVSSSPTSSPKTKVTTVTSAQKSSQIGSSQLLKRHVQRTEAVLTHKQAQVPISSEPPEEGEKEDLRVQLKRHHPSSPLPGSKTSKRPKIKVSLISQGDTAGGPCAPSQGSAPEAAGGKPITMTLGQASAGAKELTGLLTTAKSSSSEGGVSASPVPSVVSSSTAPSALHTLQSRLVATSPGSSLPGATSASSLLQGLSFSLQDISSKTSGLPANPSPGPAPQATSVKLPTPMQSLGAITTGTSTIVRTIPVATTLSSLGATPGGKPTAIHQLLTNGGLAKLASSLPGLAQISNQASGLKVPTTITLTLRGQPSRITTLSPMGSGAAPSEESSSQVLPSSSQRLPPAP

SEQ ID NO: 821726 - protein, 729 aa, Homo sapiens
MFYYFHLHPSACNEPVLRRVAVDKCARRVRQALASVSWDTKLIQWLHTTLVETLSLPMLAAYLDALQTLKGKIPTLIDRMLVSSNTKTGAAGAEALSLLLKRPWDPAVGVLSHNKPSKLPGSPLILIASSGPSSSVFPTSRRHRFWQSQLSCLGKVIPVATHLLNNGSGVGVLQCLEHMIGAVRSKVLEIHSHFPHKPIILIGWNTGALVACHVSVMEYVTAVVCLGFPLLTVDGPRGDVDDPLLDMKTPVLFVIGQNSLQCHPEAMEDFREKIRAENSLVVVGGADDNLRISKAKKKSEGLTQSMVDRCIQDEIVDFLTGVLTRAEGHMGSEPRDQDAEKKKKPRDVARRDLAFEVPERGSRPASPAAKLPASPSGSEDLSSVSSSPTSSPKTKVTTVTSAQKSSQIGSSQLLKRHVQRTEAVLTHKQAQVPISSEPPEEGEKEDLRVQLKRHHPSSPLPGSKTSKRPKIKVSLISQGDTAGGPCAPSQGSAPEAAGGKPITMTLGQASAGAKELTGLLTTAKSSSSEGGVSASPVPSVVSSSTAPSALHTLQSRLVATSPGSSLPGATSASSLLQGLSFSLQDISSKTSGLPANPSPGPAPQATSVKLPTPMQSLGAITTGTSTIVRTIPVATTLSSLGATPGGKPTAIHQLLTNGGLAKLASSLPGLAQISNQASGLKVPTTITLTLRGQPSRITTLSPMGSGAAPSEESSSQVLPSSSQRLPPAP

SEQ ID NO: 821727 - protein, 833 aa, Homo sapiens
MPLYDNQKARSVMNECERHVIFARTDADAPPPPEDWEEHVNRTGWTMAQNKLFNKILKALQSDRLARLANEGVRHQQSAHSGLFVVQASLADRLVPLLVNQVVLMFYYFHLHPSACNEPVLRRVAVDKCARRVRQALASVSWDTKLIQWLHTTLVETLSLPMLAAYLDALQTLKGKIPTLIDRMLVSSNTKTGAAGAEALSLLLKRPWDPAVGVLSHNKPSKLPGSPLILIASSGPSSSVFPTSRRHRFWQSQLSCLGKVIPVATHLLNNGSGVGVLQCLEHMIGAVRSKVLEIHSHFPHKPIILIGWNTGALVACHVSVMEYVTAVVCLGFPLLTVDGPRGDVDDPLLDMKTPVLFVIGQNSLQCHPEAMEDFREKIRAENSLVVVGGADDNLRISKAKKKSEGLTQSMVDRCIQDEIVDFLTGVLTRAEGHMGSEPRDQDAEKKKKPRDVARRDLAFEVPERGSRPASPAAKLPASPSGSEDLSSVSSSPTSSPKTKVTTVTSAQKSSQIGSSQLLKRHVQRTEAVLTHKQAQVPISSEPPEEGEKEDLRVQLKRHHPSSPLPGSKTSKRPKIKVSLISQGDTAGGPCAPSQGSAPEAAGGKPITMTLGQASAGAKELTGLLTTAKSSSSEGGVSASPVPSVVSSSTAPSALHTLQSRLVATSPGSSLPGATSASSLLQGLSFSLQDISSKTSGLPANPSPGPAPQATSVKLPTPMQSLGAITTGTSTIVRTIPVATTLSSLGATPGGKPTAIHQLLTNGGLAKLASSLPGLAQISNQASGLKVPTTITLTLRGQPSRITTLSPMGSGAAPSEESSSQVLPSSSQRLPPAP

SEQ ID NO: 821728 - protein, 791 aa, Homo sapiens; identical to SEQ ID NO: 821720

SEQ ID NO: 821729 - protein, 672 aa, Homo sapiens
MLAAYLDALQTLKGKIPTLIDRMLVSSNTKTGAAGAEALSLLLKRPWDPAVGVLSHNKPSKLPGSPLILIASSGPSSSVFPTSRRHRFWQSQLSCLGKVIPVATHLLNNGSGVGVLQCLEHMIGAVRSKVLEIHSHFPHKPIILIGWNTGALVACHVSVMEYVTAVVCLGFPLLTVDGPRGDVDDPLLDMKTPVLFVIGQNSLQCHPEAMEDFREKIRAENSLVVVGGADDNLRISKAKKKSEGLTQSMVDRCIQDEIVDFLTGVLTRAEGHMGSEPRDQDAEKKKKPRDVARRDLAFEVPERGSRPASPAAKLPASPSGSEDLSSVSSSPTSSPKTKVTTVTSAQKSSQIGSSQLLKRHVQRTEAVLTHKQAQVPISSEPPEEGEKEDLRVQLKRHHPSSPLPGSKTSKRPKIKVSLISQGDTAGGPCAPSQGSAPEAAGGKPITMTLGQASAGAKELTGLLTTAKSSSSEGGVSASPVPSVVSSSTAPSALHTLQSRLVATSPGSSLPGATSASSLLQGLSFSLQDISSKTSGLPANPSPGPAPQATSVKLPTPMQSLGAITTGTSTIVRTIPVATTLSSLGATPGGKPTAIHQLLTNGGLAKLASSLPGLAQISNQASGLKVPTTITLTLRGQPSRITTLSPMGSGAAPSEESSSQVLPSSSQRLPPAP

SEQ ID NO: 821730 - protein, 650 aa, Homo sapiens
MLVSSNTKTGAAGAEALSLLLKRPWDPAVGVLSHNKPSKLPGSPLILIASSGPSSSVFPTSRRHRFWQSQLSCLGKVIPVATHLLNNGSGVGVLQCLEHMIGAVRSKVLEIHSHFPHKPIILIGWNTGALVACHVSVMEYVTAVVCLGFPLLTVDGPRGDVDDPLLDMKTPVLFVIGQNSLQCHPEAMEDFREKIRAENSLVVVGGADDNLRISKAKKKSEGLTQSMVDRCIQDEIVDFLTGVLTRAEGHMGSEPRDQDAEKKKKPRDVARRDLAFEVPERGSRPASPAAKLPASPSGSEDLSSVSSSPTSSPKTKVTTVTSAQKSSQIGSSQLLKRHVQRTEAVLTHKQAQVPISSEPPEEGEKEDLRVQLKRHHPSSPLPGSKTSKRPKIKVSLISQGDTAGGPCAPSQGSAPEAAGGKPITMTLGQASAGAKELTGLLTTAKSSSSEGGVSASPVPSVVSSSTAPSALHTLQSRLVATSPGSSLPGATSASSLLQGLSFSLQDISSKTSGLPANPSPGPAPQATSVKLPTPMQSLGAITTGTSTIVRTIPVATTLSSLGATPGGKPTAIHQLLTNGGLAKLASSLPGLAQISNQASGLKVPTTITLTLRGQPSRITTLSPMGSGAAPSEESSSQVLPSSSQRLPPAP

SEQ ID NO: 821731 - protein, 265 aa, Homo sapiens
LVEPGSNRTRLISQGDTAGGPCAPSQGSAPEAAGGKPITMTLGQASAGAKELTGLLTTAKSSSSEGGVSASPVPSVVSSSTAPSALHTLQSRLVATSPGSSLPGATSASSLLQGLSFSLQDISSKTSGLPANPSPGPAPQATSVKLPTPMQSLGAITTGTSTIVRTIPVATTLSSLGATPGGKPTAIHQLLTNGGLAKLASSLPGLAQISNQASGLKVPTTITLTLRGQPSRITTLSPMGSGAAPSEESSSQVLPSSSQRLPPAP

SEQ ID NO: 821732 - protein, 229 aa, Homo sapiens
TVGRPTRRASAGAKELTGLLTTAKSSSSEGGVSASPVPSVVSSSTAPSALHTLQSRLVATSPGSSLPGATSASSLLQGLSFSLQDISSKTSGLPANPSPGPAPQATSVKLPTPMQSLGAITTGTSTIVRTIPVATTLSSLGATPGGKPTAIHQLLTNGGLAKLASSLPGLAQISNQASGLKVPTTITLTLRGQPSRITTLSPMGSGAAPSEESSSQVLPSSSQRLPPAP

SEQ ID NO: 821733 - protein, 791 aa, Homo sapiens; identical to SEQ ID NO: 821720

SEQ ID NO: 821734 - protein, 791 aa, Homo sapiens; identical to SEQ ID NO: 821720

SEQ ID NO: 821735 - protein, 805 aa, Homo sapiens
MPLYDNQKARSVMNECERHVIFARTDADAPPPPEDWEEHVNRTGWTMAQNKLFNKILKALQSDRLARLANEGACNEPVLRRVAVDKCARRVRQALASVSWDTKLIQWLHTTLVETLSLPMLAAYLDALQTLKGKIPTLIDRMLVSSNTKTGAAGAEALSLLLKRPWDPAVGVLSHNKPSKLPGSPLILIASSGPSSSVFPTSRRHRFWQSQLSCLGKVIPVATHLLNNGSGVGVLQCLEHMIGAVRSKVLEIHSHFPHKPIILIGWNTGALVACHVSVMEYVTAVVCLGFPLLTVDGPRGDVDDPLLDMKTPVLFVIGQNSLQCHPEAMEDFREKIRAENSLVVVGGADDNLRISKAKKKSEGLTQSMVDRCIQDEIVDFLTGVLTRAEGHMGSEPRDQDAEKKKKPRDVARRDLAFEVPERGSRPASPAAKLPASPSGSEDLSSVSSSPTSSPKTKVTTVTSAQKSSQIGSSQLLKRHVQRTEAVLTHKQAQVPISSEPPEEGEKEDLRVQLKRHHPSSPLPGSKTSKRPKIKVSLISQGDTAGGPCAPSQGSAPEAAGGKPITMTLGQASAGAKELTGLLTTAKSSSSEGGVSASPVPSVVSSSTAPSALHTLQSRLVATSPGSSLPGATSASSLLQGLSFSLQDISSKTSGLPANPSPGPAPQATSVKLPTPMQSLGAITTGTSTIVRTIPVATTLSSLGATPGGKPTAIHQLLTNGGLAKLASSLPGLAQISNQASGLKVPTTITLTLRGQPSRITTLSPMGSGAAPSEESSSQVLPSSSQVSLPGRTEDMGFIIGKFKTS

SEQ ID NO: 821736 - protein, 805 aa, Homo sapiens; identical to SEQ ID NO: 821735

SEQ ID NO: 821737 - protein, 530 aa, Homo sapiens
MPLYDNQKARSVMNECERHVIFARTDADAPPPPEDWEEHVNRTGWTMAQNKLFNKILKALQSDRLARLANEGACNEPVLRRVAVDKCARRVRQALASVSWDTKLIQWLHTTLVETLSLPMLAAYLDALQTLKGKIPTLIDRMLVSSNTKTGAAGAEALSLLLKRPWDPAVGVLSHNKPSKLPGSPLILIASSGPSSSVFPTSRRHRFWQSQLSCLGKVIPVATHLLNNGSGVGVLQCLEHMIGAVRSKVLEIHSHFPHKPIILIGWNTGALVACHVSVMEYVTAVVCLGFPLLTVDGPRGDVDDPLLDMKTPVLFVIGQNSLQCHPEAMEDFREKIRAENSLVVVGGADDNLRISKAKKKSEGLTQSMVDRCIQDEIVDFLTGVLTRAEGHMGSEPRDQDAEKKKKPRDVARRDLAFEVPERGSRPASPAAKLPASPSGSEDLSSVSSSPTSSPKTKVTTVTSAQKSSQIGSSQLLKRHVQRTEAVLTHKQAQVPISSEPPEEGEKEDLRVQLKRHHPSSPLPVYSWFHH

SEQ ID NO: 821738 - protein, 484 aa, Homo sapiens
MPLYDNQKARSVMNECERHVIFARTDADAPPPPEDWEEHVNRTGWTMAQNKLFNKILKALQSDRLARLANEGACNEPVLRRVAVDKCARRVRQALASVSWDTKLIQWLHTTLVETLSLPMLAAYLDALQTLKGKIPTLIDRMLVSSNTKTGAAGAEALSLLLKRPWDPAVGVLSHNKPSKLPGSPLILIASSGPSSSVFPTSRRHRFWQSQLSCLGKVIPVATHLLNNGSGVGVLQCLEHMIGAVRSKVLEIHSHFPHKPIILIGWNTGALVACHVSVMEYVTAVVCLGFPLLTVDGPRGDVDDPLLDMKTPVLFVIGQNSLQCHPEAMEDFREKIRAENSLVVVGGADDNLRISKAKKKSEGLTQSMVDRCIQDEIVDFLTGVLTRAEGHMGSEPRDQDAEKKKKPRDVARRDLAFEVPERGSRPASPAAKLPASPSGSEDLSSVSSSPTSSSLRKLYFLERERKLYLFHRRPGIHNLRRQYY

SEQ ID NO: 821739 - protein, 794 aa, Homo sapiens
MPLYDNQKARSVMNECERHVIFARTDADAPPPPEDWEEHVNRTGWTMAQNKLFNKILKALQSDRLARLANEGACNEPVLRRVAVDKCARRVRQALASVSWDTKLIQWLHTTLVETLSLPMLAAYLDALQTLKGKIPTLIDRMLVSSNTKTGAAGAEALSLLLKRPWDPAVGVLSHNKPSKLPGSPLILIASSGPSSSVFPTSRRHRFWQSQLSCLGKVIPVATHLLNNGSGVGVLQCLEHMIGAVRSKVLEIHSHFPHKPIILIGWNTGALVACHVSVMEYVTAVVCLGFPLLTVDGPRGDVDDPLLDMKTPVLFVIGQNSLQCHPEAMEDFREKIRAENSLVVVGGADDNLRISKAKKKSEGLTQSMVDRCIQDEIVDFLTGVLTRAEGHMGSEPRDQDAEKKKKPRDVARRDLAFEVPERGSRPASPAAKLPASPSGSEDLSSVSSSPTSSPKTKVTTVTSAQKSSQIGSSQLLKRHVQRTEAVLTHKQAQVPISSEPPEEGEKEDLRVQLKRHHPSSPLPGSKTSKRPKIKVSLISQGDTAGGPCAPSQGSAPEAAGGKPITMTLGQASAGAKELTGLLTTAKSSSSEGGVSASPVPSVVSSSTAPSALHTLQSRLVATSPGSSLPGATSASSLLQGLSFSLQDISSKTSGLPANPSPGPAPQATSVKLPTPMQSLGAITTGTSTIVRTIPVATTLSSLGATPGGKPTAIHQLLTNGGLAKLASSLPGLAQISNQASGLKVPTTITLTLRGQPSRITTLSPMGSGAAPSEESSSQVLPSSSQGKYCTEVNT

SEQ ID NO: 821740 - protein, 788 aa, Homo sapiens
MPLYDNQKARSVMNECERHVIFARTDADAPPPPEDWEEHVNRTGWTMAQNKLFNKILKALQSDRLARLANEGACNEPVLRRVAVDKCARRVRQALASVSWDTKLIQWLHTTLVETLSLPMLAAYLDALQTLKGKIPTLIDRMLVSSNTKTGAAGAEALSLLLKRPWDPAVGVLSHNKPSKLPGSPLILIASSGPSSSVFPTSRRHRFWQSQLSCLGKVIPVATHLLNNGSGVGVLQCLEHMIGAVRSKVLEIHSHFPHKPIILIGWNTGALVACHVSVMEYVTAVVCLGFPLLTVDGPRGDVDDPLLDMKTPVLFVIGQNSLQCHPEAMEDFREKIRAENSLVVVGGADDNLRISKAKKKSEGLTQSMVDRCIQDEIVDFLTGVLTRAEGHMGSEPRDQDAEKKKKPRDVARRDLAFEVPERGSRPASPAAKLPASPSGSEDLSSVSSSPTSSPKTKVTTVTSAQKSSQIGSSQLLKRHVQRTEAVLTHKQAQVPISSEPPEEGEKEDLRVQLKRHHPSSPLPGSKTSKRPKIKVSLISQGDTAGGPCAPSQGSAPEAAGGKPITMTLGQASAGAKELTGLLTTAKSSSSEGGVSASPVPSVVSSSTAPSALHTLQSRLVATSPGSSLPGATSASSLLQGLSFSLQDISSKTSGLPANPSPGPAPQATSVKLPTPMQSLGAITTGTSTIVRTIPVATTLSSLGATPGGKPTAIHQLLTNGGLAKLASSLPGLAQISNQASGLKVPTTITLTLRGQPSRITTLSPMGSGAAPSEESSSQVLPSSSQQHG

SEQ ID NO: 821741 - protein, 788 aa, Homo sapiens; identical to SEQ ID NO: 821740

SEQ ID NO: 821742 - protein, 661 aa, Homo sapiens
MPLYDNQKARSVMNECERHVIFARTDADAPPPPEDWEEHVNRTGWTMAQNKLFNKILKALQSDRLARLANEGACNEPVLRRVAVDKCARRVRQALASVSWDTKLIQWLHTTLVETLSLPMLAAYLDALQTLKGKIPTLIDRMLVSSNTKTGAAGAEALSLLLKRPWDPAVGVLSHNKPSKLPGSPLILIASSGPSSSVFPTSRRHRFWQSQLSCLGKVIPVATHLLNNGSGVGVLQCLEHMIGAVRSKVLEIHSHFPHKPIILIGWNTGALVACHVSVMEYVTAVVCLGFPLLTVDGPRGDVDDPLLDMKTPVLFVIGQNSLQCHPEAMEDFREKIRAENSLVVVGGADDNLRISKAKKKSEGLTQSMVDRCIQDEIVDFLTGVLTRAEGHMGSEPRDQDAEKKKKPRDVARRDLAFEVPERGSRPASPAAKLPASPSGSEDLSSVSSSPTSSPKTKVTTVTSAQKSSQIGSSQLLKRHVQRTEAVLTHKQAQVPISSEPPEEGEKEDLRVQLKRHHPSSPLPGSKTSKRPKIKVSLISQGDTAGGPCAPSQGSAPEAAGGKPITMTLGQASAGAKELTGLLTTAKSSSSEGGVSASPVPSVVSSSTAPSALHTLQSRLVATSPGSSLPGILWPSILPFQHRIFGLLLLGGPGKASLELNP

SEQ ID NO: 821743 - protein, 495 aa, Homo sapiens
MPLYDNQKARSVMNECERHVIFARTDADAPPPPEDWEEHVNRTGWTMAQNKLFNKILKALQSDRLARLANEGACNEPVLRRVAVDKCARRVRQALASVSWDTKLIQWLHTTLVETLSLPMLAAYLDALQTLKGKIPTLIDRMLVSSNTKTGAAGAEALSLLLKRPWDPAVGVLSHNKPSKLPGSPLILIASSGPSSSVFPTSRRHRFWQSQLSCLGKVIPVATHLLNNGSGVGVLQCLEHMIGAVRSKVLEIHSHFPHKPIILIGWNTGALVACHVSVMEYVTAVVCLGFPLLTVDGPRGDVDDPLLDMKTPVLFVIGQNSLQCHPEAMEDFREKIRAENSLVVVGGADDNLRISKAKKKSEGLTQSMVDRCIQDEIVDFLTGVLTRAEGHMGSEPRDQDAEKKKKPRDVARRDLAFEVPERGSRPASPAAKLPASPSGSEDLSSVSSSPTSSPKTKVTTVTSAQKSSQIGSSQLLKRHVQRKPKADNCSDILHY

SEQ ID NO: 821744 - protein, 385 aa, Homo sapiens
MPLYDNQKARSVMNECERHVIFARTDADAPPPPEDWEEHVNRTGWTMAQNKLFNKILKALQSDRLARLANEGACNEPVLRRVAVDKCARRVRQALASVSWDTKLIQWLHTTLVETLSLPMLAAYLDALQTLKGKIPTLIDRMLVSSNTKTGAAGAEALSLLLKRPWDPAVGVLSHNKPSKLPGSPLILIASSGPSSSVFPTSRRHRFWQSQLSCLGKVIPVATHLLNNGSGVGVLQCLEHMIGAVRSKVLEIHSHFPHKPIILIGWNTGALVACHVSVMEYVTAVVCLGFPLLTVDGPRGDVDDPLLDMKTPVLFVIGQNSLQCHPEAMEDFREKIRAENSLVVVGGADDNLRWVDSPRAARELCYSVRDKPGSWQCNYRPVWFS

SEQ ID NO: 821745 - protein, 137 aa, Homo sapiens
MNGSWTWFFWIIAMPSLGVPTQMPVVPAPPACSLSLPGGSTKVPCESDVPIDVETVTSTPMPLYDNQKARSVMNECERHVIFARTDADAPPPPEDWEEHVNRVSLCHPDCSAVARSRLTTSLDLQDSVSLWTTTLLL

SEQ ID NO: 821746 - protein, 111 aa, Homo sapiens
ALASRGVAGRGDRGRGWDGRGSRRGLQGSRGMRGPGLGPAAGAGRAGRVGPGAGWQGPRLGLRDADAEPCPREREAGGGGQAAPPRRELWMTLAKSLQFPELATSSVKCES

SEQ ID NO: 821747 - protein, 484 aa, Homo sapiens
MRHSKRTYCPDWDDKDWDYGKWRSSSSHKRRKRSHSSAQENKRCKYNHSKMCDSHYLESRSINEKDYHSRRYIDEYRNDYTQGCEPGHRQRDHESRYQNHSSKSSGRSGRSSYKSKHRIHHSTSHRRSHGKSHRRKRTRSVEDDEEGHLICQSGDVLSARYEIVDTLGEGAFGKVVECIDHKAGGRHVAVKIVKNVDRYCEAARSEIQVLEHLNTTDPNSTFRCVQMLEWFEHHGHICIVFELLGLSTYDFIKENGFLPFRLDHIRKMAYQICKSVNFLHSNKLTHTDLKPENILFVQSDYTEAYNPKIKRDERTLINPDIKVVDFGSATYDDEHHSTLVSTRHYRAPEVILALGWSQPCDVWSIGCILIEYYLGFTVFPTHDSKEHLAMMERILGPLPKHMIQKTRKRKYFHHDRLDWDEHSSAGRYVSRRCKPLKEFMLSQDVEHERLFDLIQKMLEYDPAKRITLREALKHPFFDLLKKSI

SEQ ID NO: 821748 - protein, 136 aa, Homo sapiens
MRHSKRTYCPDWDDKDWDYGKWRSSSSHKRRKRSHSSAQENKRCKYNHSKMCDSHYLESRSINEKDYHSRRYIDEYRNDYTQGCEPGHRQRDHESRYQNHSSKSSGRSGRSSYKSKHRIHHSTSHRRSHGMKLLIL

SEQ ID NO: 821749 - protein, 107 aa, Homo sapiens
GRLLLLLLLLIRRRVEILGPLPKHMIQKTRKRKYFHHDRLDWDEHSSAGRYVSRRCKPLKEFMLSQDVEHERLFDLIQKMLEYDPAKRITLREALKHPFFDLLKKSI

SEQ ID NO: 821750 - protein, 178 aa, Homo sapiens
IECFRDESRRSSCQLHFVVGARRSQLRDSRDCVTSFVSFDLESLSRTMRHSKRTYCPDWDDKDWDYGKWRSSSSHKRRKRSHSSAQENKRCKYNHSKMCDSHYLESRSINEKDYHSRRYIDEYRNDYTQGCEPGHRQRDHESRYQNHSSKSSGRSGRSSYKSKHRIHHSTSHRRSHGV

SEQ ID NO: 821751 - protein, 178 aa, Homo sapiens; identical to SEQ ID NO: 821750

SEQ ID NO: 821752 - protein, 106 aa, Homo sapiens
MTRIGIMENGGAAAVIKEGRDHIAVPRRTSAANTITLKCVIDHSRRYIDEYRNDYTQGCEPGHRQRDHESRYQNHSSKSSGRSGRSSYKSKHRIHHSTSHRRSHGV

SEQ ID NO: 821753 - protein, 183 aa, Homo sapiens
CCEPPRRSCKMAAGRRPASALWPERRGSPLRGDLLGFQNVREPSSCGETLSGMRHSKRTYCPDWDDKDWDYGKWRSSSSHKRRKRSHSSAQENKRCKYNHSKMCDSHYLESRSINEKDYHSRRYIDEYRNDYTQGCEPGHRQRDHESRYQNHSSKSSGRSGRSSYKSKHRIHHSTSHRRSHGV

SEQ ID NO: 821754 - protein, 131 aa, Homo sapiens
MRHSKRTYCPDWDDKDWDYGKWRSSSSHKRRKRSHSSAQENKRCKYNHSKMCDSHYLESRSINEKDYHSRRYIDEYRNDYTQGCEPGHRQRDHESRYQNHSSKSSGRSGRSSYKSKHRIHHSTSHRRSHGV

SEQ ID NO: 821755 - protein, 225 aa, Homo sapiens
IECFRDESRRSSCQLHFVVGARRSQLRDSRDCVTSFVSFDLESLSRTMRHSKRTYCPDWDDKDWDYGKWRSSSSHKRRKRSHSSAQENKRCKYNHSKMCDSHYLESRSINEKDYHSRRYIDEYRNDYTQGCEPGHRQRDHESRYQNHSSKSSGRSGRSSYKSKHRIHHSTSHRRSHGKSHRRKRTRSVEDDEEGHLICQSGDVLSARCIEYFSTLINFSDNIIYI

SEQ ID NO: 821756 - protein, 178 aa, Homo sapiens; identical to SEQ ID NO: 821750

SEQ ID NO: 821757 - protein, 531 aa, Homo sapiens
IECFRDESRRSSCQLHFVVGARRSQLRDSRDCVTSFVSFDLESLSRTMRHSKRTYCPDWDDKDWDYGKWRSSSSHKRRKRSHSSAQENKRCKYNHSKMCDSHYLESRSINEKDYHSRRYIDEYRNDYTQGCEPGHRQRDHESRYQNHSSKSSGRSGRSSYKSKHRIHHSTSHRRSHGKSHRRKRTRSVEDDEEGHLICQSGDVLSARYEIVDTLGEGAFGKVVECIDHKAGGRHVAVKIVKNVDRYCEAARSEIQVLEHLNTTDPNSTFRCVQMLEWFEHHGHICIVFELLGLSTYDFIKENGFLPFRLDHIRKMAYQICKSVNFLHSNKLTHTDLKPENILFVQSDYTEAYNPKIKRDERTLINPDIKVVDFGSATYDDEHHSTLVSTRHYRAPEVILALGWSQPCDVWSIGCILIEYYLGFTVFPTHDSKEHLAMMERILGPLPKHMIQKTRKRKYFHHDRLDWDEHSSAGRYVSRRCKPLKEFMLSQDVEHERLFDLIQKMLEYDPAKRITLREALKHPFFDLLKKSI

SEQ ID NO: 821758 - protein, 183 aa, Homo sapiens
IECFRDESRRSSCQLHFVVGARRSQLRDSRDCVTSFVSFDLESLSRTMRHSKRTYCPDWDDKDWDYGKWRSSSSHKRRKRSHSSAQENKRCKYNHSKMCDSHYLESRSINEKDYHSRRYIDEYRNDYTQGCEPGHRQRDHESRYQNHSSKSSGRSGRSSYKSKHRIHHSTSHRRSHGMKLLIL

SEQ ID NO: 821759 - protein, 346 aa, Homo sapiens
MSTEMTTLKDVNLDIAKETMKADEIVDTLGEGAFGKVVECIDHKAGGRHVAVKIVKNVDRYCEAARSEIQVLEHLNTTDPNSTFRCVQMLEWFEHHGHICIVFELLGLSTYDFIKENGFLPFRLDHIRKMAYQICKSVNFLHSNKLTHTDLKPENILFVQSDYTEAYNPKIKRDERTLINPDIKVVDFGSATYDDEHHSTLVSTRHYRAPEVILALGWSQPCDVWSIGCILIEYYLGFTVFPTHDSKEHLAMMERILGPLPKHMIQKTRKRKYFHHDRLDWDEHSSAGRYVSRRCKPLKEFMLSQDVEHERLFDLIQKMLEYDPAKRITLREALKHPFFDLLKKSI

SEQ ID NO: 821760 - protein, 178 aa, Homo sapiens; identical to SEQ ID NO: 821750

SEQ ID NO: 821761 - protein, 178 aa, Homo sapiens; identical to SEQ ID NO: 821750

SEQ ID NO: 821762 - protein, 307 aa, Homo sapiens
MHLSNRGGRHVAVKIVKNVDRYCEAARSEIQVLEHLNTTDPNSTFRCVQMLEWFEHHGHICIVFELLGLSTYDFIKENGFLPFRLDHIRKMAYQICKSVNFLHSNKLTHTDLKPENILFVQSDYTEAYNPKIKRDERTLINPDIKVVDFGSATYDDEHHSTLVSTRHYRAPEVILALGWSQPCDVWSIGCILIEYYLGFTVFPTHDSKEHLAMMERILGPLPKHMIQKTRKRKYFHHDRLDWDEHSSAGRYVSRRCKPLKEFMLSQDVEHERLFDLIQKMLEYDPAKRITLREALKHPFFDLLKKSI

SEQ ID NO: 821763 - protein, 258 aa, Homo sapiens
MLEWFEHHGHICIVFELLGLSTYDFIKENGFLPFRLDHIRKMAYQICKSVNFLHSNKLTHTDLKPENILFVQSDYTEAYNPKIKRDERTLINPDIKVVDFGSATYDDEHHSTLVSTRHYRAPEVILALGWSQPCDVWSIGCILIEYYLGFTVFPTHDSKEHLAMMERILGPLPKHMIQKTRKRKYFHHDRLDWDEHSSAGRYVSRRCKPLKEFMLSQDVEHERLFDLIQKMLEYDPAKRITLREALKHPFFDLLKKSI

SEQ ID NO: 821764 - protein, 178 aa, Homo sapiens; identical to SEQ ID NO: 821750

SEQ ID NO: 821765 - protein, 178 aa, Homo sapiens; identical to SEQ ID NO: 821750

SEQ ID NO: 821766 - protein, 178 aa, Homo sapiens; identical to SEQ ID NO: 821750

SEQ ID NO: 821767 - protein, 178 aa, Homo sapiens; identical to SEQ ID NO: 821750

SEQ ID NO: 821768 - protein, 178 aa, Homo sapiens; identical to SEQ ID NO: 821750

SEQ ID NO: 821769 - protein, 86 aa, Homo sapiens
AGPPVTTARKRKYFHHDRLDWDEHSSAGRYVSRRCKPLKEFMLSQDVEHERLFDLIQKMLEYDPAKRITLREALKHPFFDLLKKSI

SEQ ID NO: 821770 - protein, 178 aa, Homo sapiens; identical to SEQ ID NO: 821750

SEQ ID NO: 821771 - protein, 624 aa, Homo sapiens
MSDNQSWNSSGSEEDPETESGPPVERCGVLSKWTNYIHGWQDRWVVLKNNALSYYKSEDETEYGCRGSICLSKAVITPHDFDECRFDISVNDSVWYLRAQDPDHRQQWIDAIEQHKTESGYGSESSLRRHGSMVSLVSGASGYSATSTSSFKKGHSLREKLAEMETFRDILCRQVDTLQKYFDACADAVSKDELQRDKVVEDDEDDFPTTRSDGDFLHSTNGNKEKLFPHVTPKGINGIDFKGEAITFKATTAGILATLSHCIELMVKREDSWQKRLDKETEKKRRTEEAYKNAMTELKKKSHFGGPDYEEGPNSLINEEEFFDAVEAALDRQDKIEEQSQSEKVRLHWPTSLPSGDAFSSVGTHRFVQKPYSRSSSMSSIDLVSASDDVHRFSSQVEEMVQNHMTYSLQDVGGDANWQLVVEEGEMKVYRREVEENGIVLDPLKATHAVKGVTGHEVCNYFWNVDVRNDWETTIENFHVVETLADNAIIIYQTHKRVWPASQRDVLYLSVIRKIPALTENDPETWIVCNFSVDHDSAPLNNRCVRAKINVAMICQTLVSPPEGNQEISRDNILCKITYVANVNPGGWAPASVLRAVAKREYPKFLKRFTSYVQEKTAGKPILF

SEQ ID NO: 821772 - protein, 598 aa, Homo sapiens
MSDNQSWNSSGSEEDPETESGPPVERCGVLSKWTNYIHGWQDRWVVLKNNALSYYKSEDETEYGCRGSICLSKAVITPHDFDECRFDISVNDSVWYLRAQDPDHRQQWIDAIEQHKTESGYGSESSLRRHGSMVSLVSGASGYSATSTSSFKKGHSLREKLAEMETFRDILCRQVDTLQKYFDACADAVSKDELQRDKVVEDDEDDFPTTRSDGDFLHSTNGNKEKLFPHVTPKGINGIDFKGEAITFKATTAGILATLSHCIELMVKREDSWQKRLDKETEKKRRTEEAYKNAMTELKKKSHFGGPDYEEGPNSLINEEEFFDAVEAALDRQDKIEEQSQSEKVRLHWPTSLPSGDAFSSVGTHRFVQKVEEMVQNHMTYSLQDVGGDANWQLVVEEGEMKVYRREVEENGIVLDPLKATHAVKGVTGHEVCNYFWNVDVRNDWETTIENFHVVETLADNAIIIYQTHKRVWPASQRDVLYLSVIRKIPALTENDPETWIVCNFSVDHDSAPLNNRCVRAKINVAMICQTLVSPPEGNQEISRDNILCKITYVANVNPGGWAPASVLRAVAKREYPKFLKRFTSYVQEKTAGKPILF

SEQ ID NO: 821773 - protein, 370 aa, Homo sapiens
MSDNQSWNSSGSEEDPETESGPPVERCGVLSKWTNYIHGWQDRWVVLKNNALSYYKSEDETEYGCRGSICLSKAVITPHDFDECRFDISVNDSVWYLRAQDPDHRQQWIDAIEQHKTESGYGSESSLRRHGSMVSLVSGASGYSATSTSSFKKGHSLREKLAEMETFRDILCRQVDTLQKYFDACADAVSKDELQRDKVVEDDEDDFPTTRSDGDFLHSTNGNKEKLFPHVTPKGINGIDFKGEAITFKATTAGILATLSHCIELMVKREDSWQKRLDKETEKKRRTEEAYKNAMTELKKKSHFGGPDYEEGPNSLINEEEFFDAVEAALDRQDKIEEQSQSEKVRLHWPTSLPSGDAFSSVGTHRFVQK

SEQ ID NO: 821774 - protein, 598 aa, Homo sapiens; identical to SEQ ID NO: 821772

SEQ ID NO: 821775 - protein, 598 aa, Homo sapiens; identical to SEQ ID NO: 821772

SEQ ID NO: 821776 - protein, 624 aa, Homo sapiens; identical to SEQ ID NO: 821771

SEQ ID NO: 821777 - protein, 558 aa, Homo sapiens
MSDNQSWNSSGSEEDPETESGPPVERCGVLSKWTNYIHGWQDRWVVLKNNALSYYKSEDETEYGCRGSICLSKAVITPHDFDECRFDISVNDSVWYLRAQDPDHRQQWIDAIEQHKTESGYGSESSLRRHGSMVSLVSGASGYSATSTSSFKKGHSLREKLAEMETFRDILCRQVDTLQKYFDACADAVSKDELQRDKVVEDDEDDFPTTRSDGDFLHSTNGNKEKLFPHVTPKGINGIDFKGEAITFKATTAGILATLSHCIELMVKREDSWQKRLDKETEKKRRTEEAYKNAMTELKKKSHFGGPDYEEGPNSLINEEEFFDAVEAALDRQDKIEEQSQSEKVRLHWPTSLPSGDAFSSVGTHRFVQKPYSRSSSMSSIDLVSASDDVHRFSSQVEEMVQNHMTYSLQDVGGDANWQLVVEEGEMKVYRREVEENGIVLDPLKATHAVKGVTGHEVCNYFWNVDVRNDWETTIENFHVVETLADNAIIIYQTHKRVWPASQRDVLYLSVIRKIPALTENDPETWIVCNFSVDHDSAPLNNRCVRAKINVAMICQTL

SEQ ID NO: 821778 - protein, 598 aa, Homo sapiens; identical to SEQ ID NO: 821772

SEQ ID NO: 821779 - protein, 598 aa, Homo sapiens; identical to SEQ ID NO: 821772

SEQ ID NO: 821780 - protein, 644 aa, Homo sapiens
MSDNQSWNSSGSEEDPETESGPPVERCGVLSKWTNYIHGWQDRWVVLKNNALSYYKSEDETEYGCRGSICLSKAVITPHDFDECRFDISVNDSVWYLRAQDPDHRQQWIDAIEQHKTESGYGSESSLRRHGSMVSLVSGASGYSATSTSSFKKGHSLREKLAEMETFRDILCRQVDTLQKYFDACADAVSKDELQRDKVVEDDEDDFPTTRSDGDFLHSTNGNKEKLFPHVTPKGINGIDFKGEAITFKATTAGILATLSHCIELMVKREDSWQKRLDKETEKKRRTEEAYKNAMTELKKKSHFGGPDYEEGPNSLINEEEFFDAVEAALDRQDKIEEQSQSEKVRLHWPTSLPSGDAFSSVGTHRFVQKPYSRSSSMSSIDLVSASDDVHRFSSQVEEMVQNHMTYSLQDVGGDANWQLVVEEGEMKVYRREVEENGIVLDPLKATHAVKGVTGHEVCNYFWNVDVRNDWETTIENFHVVETLADNAIIIYQTHKRVWPASQRDVLYLSVIRKIPALTENDPETWIVCNFSVDHDSAPLNNRCVRAKINVAMICQTLVSPPEGNQEISRDNILCKITYVANVNPGGWAPASVLRAVAKREFMIVRLYAKHYKYSTLQLTMGLRSDKPVIYGKYPQRMKQETES

SEQ ID NO: 821781 - protein, 525 aa, Homo sapiens
  misc_feature (523)..(523): Xaa can be any naturally occurring amino acid
MSDNQSWNSSGSEEDPETESGPPVERCGVLSKWTNYIHGWQDRWVVLKNNALSYYKSEDETEYGCRGSICLSKAVITPHDFDECRFDISVNDSVWYLRAQDPDHRQQWIDAIEQHKTESGYGSESSLRRHGSMVSLVSGASGYSATSTSSFKKGHSLREKLAEMETFRDILCRQVDTLQKYFDACADAVSKDELQRDKVVEDDEDDFPTTRSDGDFLHSTNGNKEKLFPHVTPKGINGIDFKGEAITFKATTAGILATLSHCIELMVKREDSWQKRLDKETEKKRRTEEAYKNAMTELKKKSHFGGPDYEEGPNSLINEEEFFDAVEAALDRQDKIEEQSQSEKVRLHWPTSLPSGDAFSSVGTHRFVQKPYSRSSSMSSIDLVSASDDVHRFSSQVEEMVQNHMTYSLQDVGGDANWQLVVEEGEMKVYRREVEENGIVLDPLKATHAVKGVTGHEVCNYFWNVDVRNDWETTIENFHVVDSLAGCEPASRIVCNFPVGHDSAPLITRCVVQNKCAVCFGGXLE

SEQ ID NO: 821782 - protein, 228 aa, Homo sapiens
VKTKADGSFRLENITTGTYTIHAQKEHLYFETVTIKIAPNTPQLADIIATGFSVCGQISIIRFPDTVKQMNKYKVVLSSQDKDKSLVTVETDAHGSFCFKAKPGTYKVQVMVPEAETRAGLTLKPQTFPLTVTNRPMMDVAFVQFLASVSGKVSCLDTCGDLLVTLQSLSRQGEKRSLQLSGKVNAMTFTFDNVLPGKYKIKHHCIEGLVAGKKQRNPGKVGKIAGEG

SEQ ID NO: 821783 - protein, 1222 aa, Homo sapiens
MLVGQGAGPLGPAVVTAAVVLLLSGVGPAHGSEDIVVGCGGFVKSDVEINYSLIEIKLYTKHGTLKYQTDCAPNNGYFMIPLYDKGDFILKIEPPLGWSFEPTTVELHVDGVSDICTKGGDINFVFTGFSVNGKVLSKGQPLGPAGVQVSLRNTGTEAKIQSTVTQPGGKFAFFKVLPGDYEILATHPTWALKEASTTVRVTNSNANAASPLIVAGYNVSGSVRSDGEPMKGVKFLLFSSLVTKEDVLGCNVSPVPGFQPQDESLVYLCYTVSREDGSFSFYSLPSGGYTVIPFYRGERITFDVAPSRLDFTVEHDSLKIEPVFHVMGFSVTGRVLNGPEGDGVPEAVVTLNNQIKVKTKADGSFRLENITTGTYTIHAQKEHLYFETVTIKIAPNTPQLADIIATGFSVCGQISIIRFPDTVKQMNKYKVVLSSQDKDKSLVTVETDAHGSFCFKAKPGTYKVQVMVPEAETRAGLTLKPQTFPLTVTNRPMMDVAFVQFLASVSGKVSCLDTCGDLLVTLQSLSRQGEKRSLQLSGKVNAMTFTFDNVLPGKYKISIMHEDWCWKNKSLEVEVLEDDMSAVEFRQTGYMLRCSLSHAITLEFYQDGNGRENVGIYNLSKGVNRFCLSKPGVYKVTPRSCHRFEQAFYTYDTSSPSILTLTAIRHHVLGTITTDKMMDVTVTIKSSIDSEPALVLGPLKSVQELRREQQLAEIEARRQEREKNGNEEGEERMTKPPVQEMVDELQGPFSYDFSYWARSGEKITVTPSSKELLFYPPSMEAVVSGESCPGKLIEIHGKAGLFLEGQIHPELEGVEIVISEKGASSPLITVFTDDKGAYSVGPLHSDLEYTVTSQKEGYVLTAVEGTIGDFKAYALAGVSFEIKAEDDQPLPGVLLSLSGGLFRSNLLTQDNGILTFSNLSPGQYYFKPMMKEFRFEPSSQMIEVQEGQNLKITITGYRTAYSCYGTVSSLNGEPEQGVAMEAVGQNDCSIYGEDTVTDEEGKFRLRGLLPGCVYHVQLKAEGNDHIERALPHHRVIEVGNNDIDDVNIIVFRQINQFDLSGNVITSSEYLPTLWVKLYKSENLDNPIQTVSLGQSLFFHFPPLLRDGENYVVLLDSTLPRSQYDYILPQVSFTAVGYHKHTTLIFNPTRKLPEQDIAQGSYIALPLTLLVLLAGYNHDKLIPLLLQLTSRLQGVRALGQAASDNSGPEDAKRQAKKQKTRRT

SEQ ID NO: 821784 - protein, 662 aa, Homo sapiens
MLVGQGAGPLGPAVVTAAVVLLLSGVGPAHGSEDIVVGCGGFVKSDVEINYSLIEIKLYTKHGTLKYQTDCAPNNGYFMIPLYDKGDFILKIEPPLGWSFEPTTVELHVDGVSDICTKGGDINFVFTGFSVNGKVLSKGQPLGPAGVQVSLRNTGTEAKIQSTVTQPGGKFAFFKVLPGDYEILATHPTWALKEASTTVRVTNSNANAASPLIVAGYNVSGSVRSDGEPMKGVKFLLFSSLVTKEDVLGCNVSPVPGFQPQDESLVYLCYTVSREDGSFSFYSLPSGGYTVIPFYRGERITFDVAPSRLDFTVEHDSLKIEPVFHVMGFSVTGRVLNGPEGDGVPEAVVTLNNQIKVKTKADGSFRLENITTGTYTIHAQKEHLYFETVTIKIAPNTPQLADIIATGFSVCGQISIIRFPDTVKQMNKYKVVLSSQDKDKSLVTVETDAHGSFCFKAKPGTYKVQVMVPEAETRAGLTLKPQTFPLTVTNRPMMDVAFVQFLASVSGKVSCLDTCGDLLVTLQSLSRQGEKRSLQLSGKVNAMTFTFDNVLPGKYKISIMHEDWCWKNKSLEVEVLEDDMSAVEFRQTGYMLRCSLSHAITLEFYQDGNGRENVGIYNLSKGVNRFCLSKPEAVSFDIPTSNARGFRFLHLLRQHLLLSVLL

SEQ ID NO: 821785 - protein, 677 aa, Homo sapiens
MLVGQGAGPLGPAVVTAAVVLLLSGVGPAHGSEDIVVGCGGFVKSDVEINYSLIEIKLYTKHGTLKYQTDCAPNNGYFMIPLYDKGDFILKIEPPLGWSFEPTTVELHVDGVSDICTKGGDINFVFTGFSVNGKVLSKGQPLGPAGVQVSLRNTGTEAKIQSTVTQPGGKFAFFKVLPGDYEILATHPTWALKEASTTVRVTNSNANAASPLIVAGYNVSGSVRSDGEPMKGVKFLLFSSLVTKEDVLGCNVSPVPGFQPQDESLVYLCYTVSREDGSFSFYSLPSGGYTVIPFYRGERITFDVAPSRLDFTVEHDSLKIEPVFHVMGFSVTGRVLNGPEGDGVPEAVVTLNNQIKVKTKADGSFRLENITTGTYTIHAQKEHLYFETVTIKIAPNTPQLADIIATGFSVCGQISIIRFPDTVKQMNKYKVVLSSQDKDKSLVTVETDAHGSFCFKAKPGTYKVQVMVPEAETRAGLTLKPQTFPLTVTNRPMMDVAFVQFLASVSGKVSCLDTCGDLLVTLQSLSRQGEKRSLQLSGKVNAMTFTFDNVLPGKYKKKKKNTLSGRGSGGRRKKGFLKTNSRLGGAVGRPHGRFTRRPVGQNTRLSPRERTRGGKRHTRVGGVSLPKIKKKPGAVGDTRSGVSWNRTTQEEEVRGGATFTRELLLQAGEVPEERHDN

SEQ ID NO: 821786 - protein, 1281 aa, Homo sapiens
MLVGQGAGPLGPAVVTAAVVLLLSGVGPAHGSEDIVVGCGGFVKSDVEINYSLIEQVLNMIDVNLYNHMKRSGSVSTSEETEHELAQGHATRGRLRWHLGILLGYHFVSGNAQNIKLYTKHGTLKYQTDCAPNNGYFMIPLYDKGDFILKIEPPLGWSFEPTTVELHVDGVSDICTKGGDINFVFTGFSVNGKVLSKGQPLGPAGVQVSLRNTGTEAKIQSTVTQPGGKFAFFKVLPGDYEILATHPTWALKEASTTVRVTNSNANAASPLIVAGYNVSGSVRSDGEPMKGVKFLLFSSLVTKEDVLGCNVSPVPGFQPQDESLVYLCYTVSREDGSFSFYSLPSGGYTVIPFYRGERITFDVAPSRLDFTVEHDSLKIEPVFHVMGFSVTGRVLNGPEGDGVPEAVVTLNNQIKVKTKADGSFRLENITTGTYTIHAQKEHLYFETVTIKIAPNTPQLADIIATGFSVCGQISIIRFPDTVKQMNKYKVVLSSQDKDKSLVTVETDAHGSFCFKAKPGTYKVQVMVPEAETRAGLTLKPQTFPLTVTNRPMMDVAFVQFLASVSGKVSCLDTCGDLLVTLQSLSRQGEKRSLQLSGKVNAMTFTFDNVLPGKYKISIMHEDWCWKNKSLEVEVLEDDMSAVEFRQTGYMLRCSLSHAITLEFYQDGNGRENVGIYNLSKGVNRFCLSKPGVYKVTPRSCHRFEQAFYTYDTSSPSILTLTAIRHHVLGTITTDKMMDVTVTIKSSIDSEPALVLGPLKSVQELRREQQLAEIEARRQEREKNGNEEGEERMTKPPVQEMVDELQGPFSYDFSYWARSGEKITVTPSSKELLFYPPSMEAVVSGESCPGKLIEIHGKAGLFLEGQIHPELEGVEIVISEKGASSPLITVFTDDKGAYSVGPLHSDLEYTVTSQKEGYVLTAVEGTIGDFKAYALAGVSFEIKAEDDQPLPGVLLSLSGGLFRSNLLTQDNGILTFSNLSPGQYYFKPMMKEFRFEPSSQMIEVQEGQNLKITITGYRTAYSCYGTVSSLNGEPEQGVAMEAVGQNDCSIYGEDTVTDEEGKFRLRGLLPGCVYHVQLKAEGNDHIERALPHHRVIEVGNNDIDDVNIIVFRQINQFDLSGNVITSSEYLPTLWVKLYKSENLDNPIQTVSLGQSLFFHFPPLLRDGENYVVLLDSTLPRSQYDYILPQVSFTAVGYHKHTTLIFNPTRKLPEQDIAQGSYIALPLTLLVLLAGYNHDKLIPLLLQLTSRLQGVRALGQAASDNSGPEDAKRQAKKQKTRRT

SEQ ID NO: 821787 - protein, 183 aa, Homo sapiens
MRAAYLFLLFLPAGLLAQGQYDLDPLPPFPDHVQYTHYSDQIDNPDYYDYQEVTPRPSEEQFQFQSQQQVQQEVIPAPTPEPGNAELEPTEPGPLDCREEQYPCTRLYSIHRPCKQCLNEVCFYSLRRVYVINKEICVRTVCAHEELLRADLCRDKFSKCGVMASSGLCQSVAASCARSCGSC

SEQ ID NO: 821788 - protein, 221 aa, Homo sapiens
IATWSCIWQGQGGSSERSHKRNFSAVLSDTTPACLFVAMRAAYLFLLFLPAGLLAQGQYDLDPLPPFPDHVQYTHYSDQIDNPDYYDYQEVTPRPSEEQFQFQSQQQVQQEVIPAPTPEPGNAELEPTEPGPLDCREEQYPCTRLYSIHRPCKQCLNEVCFYSLRRVYVINKEICVRTVCAHEELLRADLCRDKFSKCGVMASSGLCQSVAASCARSCGSC

SEQ ID NO: 821789 - protein, 183 aa, Homo sapiens; identical to SEQ ID NO: 821787

SEQ ID NO: 821790 - protein, 147 aa, Homo sapiens
IATWSCIWQGQGGSSERSHKRNFSAVLSDTTPACLFVAMRAAYLFLLFLPAGLLAQGQYDLDPLPPFPDHVQYTHYSDQIDNPDYYDYQEVTPRPSEEQFQFQSQQQVQQEVIPAPTPEPGNAELEPTEPGPLGKGFLDSWKNGGTP

SEQ ID NO: 821791 - protein, 40 aa, Homo sapiens
MTWTFDPRYRYSSSRYTKCGSRLDKSNTMISRETHRHIED

SEQ ID NO: 821792 - protein, 206 aa, Homo sapiens
FKRGGVTRTAVLSDTTPACLFVAMRAAYLFLLFLPAGLLAQGQYDLDPLPPFPDHVQYTHYSDQIDNPDYYDYQEVTPRPSEEQFQFQSQQQVQQEVIPAPTPEPGNAELEPTEPGPLDCREEQYPCTRLYSIHRPCKQCLNEVCFYSLRRVYVINKEICVRTVCAHEELLRADLCRDKFSKCGVMASSGLCQSVAASCARSCGSC

SEQ ID NO: 821793 - protein, 217 aa, Homo sapiens
MRAAYLFLLFLPAGLLAQGQYDLDPLPPFPDHVQYTHYSDQIDNPDYYDYQGNGLGVGEDGPAAGVGRPPGRGRGSRPPYPPLAAEVTPRPSEEQFQFQSQQQVQQEVIPAPTPEPGNAELEPTEPGPLDCREEQYPCTRLYSIHRPCKQCLNEVCFYSLRRVYVINKEICVRTVCAHEELLRADLCRDKFSKCGVMASSGLCQSVAASCARSCGSC

SEQ ID NO: 821794 - protein, 153 aa, Homo sapiens
MRAAYLFLLFLPDNPDYYDYQEVTPRPSEEQFQFQSQQQVQQEVIPAPTPEPGNAELEPTEPGPLDCREEQYPCTRLYSIHRPCKQCLNEVCFYSLRRVYVINKEICVRTVCAHEELLRADLCRDKFSKCGVMASSGLCQSVAASCARSCGSC

SEQ ID NO: 821795 - protein, 169 aa, Homo sapiens
PELSSVGEEGAGLREAAGLAGEAEGKPRQESVLEAGRRQREIEAYFLAEGPRVSHFGRLDFLLCEMGNTPTLAHLTPLTPSTSSESSCEEEEALHRREDGPGRLYPGDTPPPRRWNPEGTAWRPMRAARVRTQRLRGWRAGASPVGGPEGDSERAKGRLRRADSERAAE

SEQ ID NO: 821796 - protein, 183 aa, Homo sapiens; identical to SEQ ID NO: 821787

SEQ ID NO: 821797 - protein, 183 aa, Homo sapiens; identical to SEQ ID NO: 821787

SEQ ID NO: 821798 - protein, 206 aa, Homo sapiens; identical to SEQ ID NO: 821792

SEQ ID NO: 821799 - protein, 415 aa, Homo sapiens
MVHFCGLLTLHREPVPLKSISVSVNIYEFVAGVSATLNYENEEKVPLEAFFVFPMDEDSAVYSFEALVDGKKIVAELQDKMKARTNYEKAISQGHQAFLLEGDSSSRDVFSCNVGNLQPGSKAAVTLKYVQELPLEADGALRFVLPAVLNPRYQFSGSSKDSCLNVKTPIVPVEDLPYTLSMVATIDSQHGIEKVQSNCPLSPTEYLGEDKTSAQVSLAAGHKFDRDVELLIYYNEVHTPSVVLEMGMPNMKPGHLMGDPSAMVSFYPNIPEDQPSNTCGEFIFLMDRSGSMQSPMSSQDTSQLRIQAAKETLILLLKSLPIGCYFNIYGFGSSYEACFPESVKYTQQTMEEALGRVKLMQADLGGTEILAPLQNIYRGPSIPGHPLQLFVFTDGEVTDTFSVIKEVRINRQKHR

SEQ ID NO: 821800 - protein, 786 aa, Homo sapiens
MVHFCGLLTLHREPVPLKSISVSVNIYEFVAGVSATLNYENEEKVPLEAFFVFPMDEDSAVYSFEALVDGKKIVAELQDKMKARTNYEKAISQGHQAFLLEGDSSSRDVFSCNVGNLQPGSKAAVTLKYVQELPLEADGALRFVLPAVLNPRYQFSGSSKDSCLNVKTPIVPVEDLPYTLSMVATIDSQHGIEKVQSNCPLSPTEYLGEDKTSAQVSLAAGHKFDRDVELLIYYNEVHTPSVVLEMGMPNMKPGHLMGDPSAMVSFYPNIPEDQPSNTCGEFIFLMDRSGSMQSPMSSQDTSQLRIQAAKETLILLLKSLPIGCYFNIYGFGSSYEACFPESVKYTQQTMEEALGRVKLMQADLGGTEILAPLQNIYRGPSIPGHPLQLFVFTDGEVTDTFSVIKEVRINRQKHRCFSFGIGEGTSTSLIKGIARASGGTSEFITGKDRMQSKALRTLKRSLQPVVEDVSLSWHLPPGLSAKMLSPEQTVIFRGQRLISYAQLTGRMPAAETTGEVCLKYTLQGKTFEDKVTFPLQPKPDVNLTIHRLAAKSLLQTKDMGLRETPASDKKDALNLSLESGVISSFTAFIAINKELNKPVQGPLAHRDVPRPILLGASAPLKIKCQSGFRKALHSDRPPSASQPRGELMCYKAKTFQMDDYSLCGLISHKDQHSPGFGENHLVQLIYHQNANGSWDLNEDLAKILGMSLEEIMAAQPAELVDSSGWATILAVIWLHSNGKDLKCEWELLERKAVAWMRAHAGSTMPSVVKAAITFLKSSVDPAIFAF

SEQ ID NO: 821801 - protein, 856 aa, Homo sapiens
AVLSGNYDCSCFHSAVTQSAPGCRRGSPACSTRELAQVRGLRRSPFLSILSSPHTCHCPLRCCRIKSCITMVHFCGLLTLHREPVPLKSISVSVNIYEFVAGVSATLNYENEEKVPLEAFFVFPMDEDSAVYSFEALVDGKKIVAELQDKMKARTNYEKAISQGHQAFLLEGDSSSRDVFSCNVGNLQPGSKAAVTLKYVQELPLEADGALRFVLPAVLNPRYQFSGSSKDSCLNVKTPIVPVEDLPYTLSMVATIDSQHGIEKVQSNCPLSPTEYLGEDKTSAQVSLAAGHKFDRDVELLIYYNEVHTPSVVLEMGMPNMKPGHLMGDPSAMVSFYPNIPEDQPSNTCGEFIFLMDRSGSMQSPMSSQDTSQLRIQAAKETLILLLKSLPIGCYFNIYGFGSSYEACFPESVKYTQQTMEEALGRVKLMQADLGGTEILAPLQNIYRGPSIPGHPLQLFVFTDGEVTDTFSVIKEVRINRQKHRCFSFGIGEGTSTSLIKGIARASGGTSEFITGKDRMQSKALRTLKRSLQPVVEDVSLSWHLPPGLSAKMLSPEQTVIFRGQRLISYAQLTGRMPAAETTGEVCLKYTLQGKTFEDKVTFPLQPKPDVNLTIHRLAAKSLLQTKDMGLRETPASDKKDALNLSLESGVISSFTAFIAINKELNKPVQGPLAHRDVPRPILLGASAPLKIKCQSGFRKALHSDRPPSASQPRGELMCYKAKTFQMDDYSLCGLISHKDQHSPGFGENHLVQLIYHQNANGSWDLNEDLAKILGMSLEEIMAAQPAELVDSSGWATILAVIWLHSNGKDLKCEWELLERKAVAWMRAHAGSTMPSVVKAAITFLKSSVDPAIFAF

SEQ ID NO: 821802 - protein, 786 aa, Homo sapiens; identical to SEQ ID NO: 821800

SEQ ID NO: 821803 - protein, 263 aa, Homo sapiens
MVHFCGLLTLHREPVPLKSISVSVNIYEFVAGVSATLNYENEEKVPLEAFFVFPMDEDSAVYSFEALVDGKKIVAELQDKMKARTNYEKAISQGHQAFLLEGDSSSRDVFSCNVGNLQPGSKAAVTLKYVQELPLEADGALRFVLPAVLNPRYQFSGSSKDSCLNVKTPIVPVEDLPYTLSMVATIDSQHGIEKVQSNCPLSPTEYLGEDKTSAQVSLAAGHKFDRDVELLIYYNEVHTPSVVLEMGMPNMKPGSGCTAMVRT

SEQ ID NO: 821804 - protein, 333 aa, Homo sapiens
AVLSGNYDCSCFHSAVTQSAPGCRRGSPACSTRELAQVRGLRRSPFLSILSSPHTCHCPLRCCRIKSCITMVHFCGLLTLHREPVPLKSISVSVNIYEFVAGVSATLNYENEEKVPLEAFFVFPMDEDSAVYSFEALVDGKKIVAELQDKMKARTNYEKAISQGHQAFLLEGDSSSRDVFSCNVGNLQPGSKAAVTLKYVQELPLEADGALRFVLPAVLNPRYQFSGSSKDSCLNVKTPIVPVEDLPYTLSMVATIDSQHGIEKVQSNCPLSPTEYLGEDKTSAQVSLAAGHKFDRDVELLIYYNEVHTPSVVLEMGMPNMKPGSGCTAMVRT

SEQ ID NO: 821805 - protein, 549 aa, Homo sapiens
MVHFCGLLTLHREPVPLKSISVSVNIYEFVAGVSATLNYENEEKVPLEAFFVFPMDEDSAVYSFEALVDGKKIVAELQDKMKARTNYEKAISQGHQAFLLEGDSSSRDVFSCNVGNLQPGSKAAVTLKYVQELPLEADGALRFVLPAVLNPRYQFSGSSKDSCLNVKTPIVPVEDLPYTLSMVATIDSQHGIEKVQSNCPLSPTEYLGEDKTSAQVSLAAGHKFDRDVELLIYYNEVHTPSVVLEMGMPNMKPGHLMGDPSAMVSFYPNIPEDQPSNTCGEFIFLMDRSGSMQSPMSSQDTSQLRIQAAKETLILLLKSLPIGCYFNIYGFGSSYEACFPESVKYTQQTMEEALGRVKLMQADLGGTEILAPLQNIYRGPSIPGHPLQLFVFTDGEVTDTFSVIKEVRINRQKHRCFSFGIGEGTSTSLIKGIARASGGTSEFITGKDRMQSKALRTLKRSLQPVVEDVSLSWHLPPGLSAKMLSPEQTVIFRGQRLISYAQLTGRMPPAETTGEVSRNTKGERKSKCQGPETRRDGRGLLCSKRIHGS

SEQ ID NO: 821806 - protein, 1346 aa, Homo sapiens
MKSPRRTTLCLMFIVIYSSKAALNWNYESTIHPLSLHEHEPAGEEALRQKRAVATKSPTAEEYTVNIEISFENASFLDPIKAYLNSLSFPIHGNNTDQITDILSINVTTVCRPAGNEIWCSCETGYGWPRERCLHNLICQERDVFLPGHHCSCLKELPPNGPFCLLQEDVTLNMRVRLNVGFQEDLMNTSSALYRSYKTDLETAFRKGYGILPGFKGVTVTGFKSGSVVVTYEVKTTPPSLELIHKANEQVVQSLNQTYKMDYNSFQAVTINESNFFVTPEIIFEGDTVSLVCEKEVLSSNVSWRYEEQQLEIQNSSRFSIYTALFNNMTSVSKLTIHNITPGDAGEYVCKLILDIFEYECKKKIDVMPIQILANEEMKVMCDNNPVSLNCCSQGNVNWSKVEWKQEGKINIPGTPETDIDSSCSRYTLKADGTQCPSGSSGTTVIYTCEFISAYGARGSANIKVTFISVANLTITPDPISVSEGQNFSIKCISDVSNYDEVYWNTSAGIKIYQRFYTTRRYLDGAESVLTVKTSTREWNGTYHCIFRYKNSYSIATKDVIVHPLPLKLNIMVDPLEATVSCSGSHHIKCCIEEDGDYKVTFHMGSSSLPAAKEVNKKQVCYKHNFNASSVSWCSKTVDVCCHFTNAANNSVWSPSMKLNLVPGENITCQDPVIGVGEPGKVIQKLCRFSNVPSSPESPIGGTITYKCVGSQWEEKRNDCISAPINSLLQMAKALIKSPSQDEMLPTYLKDLSISIDKAEHEISSSPGSLGAIINILDLLSTVPTQVNSEMMTHVLSTVNVILGKPVLNTWKVLQQQWTNQSSQLLHSVERFSQALQSGDSPPLSFSQTNVQMSSTVIKSSHPETYQQRFVFPYFDLWGNVVIDKSYLENLQSDSSIVTMAFPTLQAILAQDIQENNFAESLVMTTTVSHNTTMPFRISMTFKNNSPSGGETKCVFWNFRLANNTGGWDSSGCYVEEGDGDNVTCICDHLTSFSILMSPDSPDPSSLLGILLDIISYVGVGFSILSLAACLVVEAVVWKSVTKNRTSYMRHTCIVNIAASLLVANTWFIVVAAIQDNRYILCKTACVAATFFIHFFYLSVFFWMLTLGLMLFYRLVFILHETSRSTQKAIAFCLGYGCPLAISVITLGATQPREVYTRKNVCWLNWEDTKALLAFAIPALIIVVVNITITIVVITKILRPSIGDKPCKQEKSSLFQISKSIGVLTPLLGLTWGFGLTTVFPGTNLVFHIIFAILNVFQGLFILLFGCLWDLKVQEALLNKFSLSRWSSQHSKSTSLGSSTPVFSMSSPISRRFNNLFGKTGTYNVSTPEATSSSLENSSSASSLLN

SEQ ID NO: 821807 - protein, 1173 aa, Homo sapiens
MRVRLNVGFQEDLMNTSSALYRSYKTDLETAFRKGYGILPGFKGVTVTGFKSGSVVVTYEVKTTPPSLELIHKANEQVVQSLNQTYKMDYNSFQAVTINESNFFVTPEIIFEGDTVSLVCEKEVLSSNVSWRYEEQQLEIQNSSRFSIYTALFNNMTSVSKLTIHNITPGDAGEYVCKLILDIFEYECKKKIDVMPIQILANEEMKVMCDNNPVSLNCCSQGNVNWSKVEWKQEGKINIPGTPETDIDSSCSRYTLKADGTQCPSGSSGTTVIYTCEFISAYGARGSANIKVTFISVANLTITPDPISVSEGQNFSIKCISDVSNYDEVYWNTSAGIKIYQRFYTTRRYLDGAESVLTVKTSTREWNGTYHCIFRYKNSYSIATKDVIVHPLPLKLNIMVDPLEATVSCSGSHHIKCCIEEDGDYKVTFHMGSSSLPAAKEVNKKQVCYKHNFNASSVSWCSKTVDVCCHFTNAANNSVWSPSMKLNLVPGENITCQDPVIGVGEPGKVIQKLCRFSNVPSSPESPIGGTITYKCVGSQWEEKRNDCISAPINSLLQMAKALIKSPSQDEMLPTYLKDLSISIDKAEHEISSSPGSLGAIINILDLLSTVPTQVNSEMMTHVLSTVNVILGKPVLNTWKVLQQQWTNQSSQLLHSVERFSQALQSGDSPPLSFSQTNVQMSSTVIKSSHPETYQQRFVFPYFDLWGNVVIDKSYLENLQSDSSIVTMAFPTLQAILAQDIQENNFAESLVMTTTVSHNTTMPFRISMTFKNNSPSGGETKCVFWNFRLANNTGGWDSSGCYVEEGDGDNVTCICDHLTSFSILMSPDSPDPSSLLGILLDIISYVGVGFSILSLAACLVVEAVVWKSVTKNRTSYMRHTCIVNIAASLLVANTWFIVVAAIQDNRYILCKTACVAATFFIHFFYLSVFFWMLTLGLMLFYRLVFILHETSRSTQKAIAFCLGYGCPLAISVITLGATQPREVYTRKNVCWLNWEDTKALLAFAIPALIIVVVNITITIVVITKILRPSIGDKPCKQEKSSLFQISKSIGVLTPLLGLTWGFGLTTVFPGTNLVFHIIFAILNVFQGLFILLFGCLWDLKVQEALLNKFSLSRWSSQHSKSTSLGSSTPVFSMSSPISRRFNNLFGKTGTYNVSTPEATSSSLENSSSASSLLN

SEQ ID NO: 821808 - protein, 1369 aa, Homo sapiens
IIPALWEAEMGGSLEANQLKLEDMKSPRRTTLCLMFIVIYSSKAALNWNYESTIHPLSLHEHEPAGEEALRQKRAVATKSPTAEEYTVNIEISFENASFLDPIKAYLNSLSFPIHGNNTDQITDILSINVTTVCRPAGNEIWCSCETGYGWPRERCLHNLICQERDVFLPGHHCSCLKELPPNGPFCLLQEDVTLNMRVRLNVGFQEDLMNTSSALYRSYKTDLETAFRKGYGILPGFKGVTVTGFKSGSVVVTYEVKTTPPSLELIHKANEQVVQSLNQTYKMDYNSFQAVTINESNFFVTPEIIFEGDTVSLVCEKEVLSSNVSWRYEEQQLEIQNSSRFSIYTALFNNMTSVSKLTIHNITPGDAGEYVCKLILDIFEYECKKKIDVMPIQILANEEMKVMCDNNPVSLNCCSQGNVNWSKVEWKQEGKINIPGTPETDIDSSCSRYTLKADGTQCPSGSSGTTVIYTCEFISAYGARGSANIKVTFISVANLTITPDPISVSEGQNFSIKCISDVSNYDEVYWNTSAGIKIYQRFYTTRRYLDGAESVLTVKTSTREWNGTYHCIFRYKNSYSIATKDVIVHPLPLKLNIMVDPLEATVSCSGSHHIKCCIEEDGDYKVTFHMGSSSLPAAKEVNKKQVCYKHNFNASSVSWCSKTVDVCCHFTNAANNSVWSPSMKLNLVPGENITCQDPVIGVGEPGKVIQKLCRFSNVPSSPESPIGGTITYKCVGSQWEEKRNDCISAPINSLLQMAKALIKSPSQDEMLPTYLKDLSISIDKAEHEISSSPGSLGAIINILDLLSTVPTQVNSEMMTHVLSTVNVILGKPVLNTWKVLQQQWTNQSSQLLHSVERFSQALQSGDSPPLSFSQTNVQMSSTVIKSSHPETYQQRFVFPYFDLWGNVVIDKSYLENLQSDSSIVTMAFPTLQAILAQDIQENNFAESLVMTTTVSHNTTMPFRISMTFKNNSPSGGETKCVFWNFRLANNTGGWDSSGCYVEEGDGDNVTCICDHLTSFSILMSPDSPDPSSLLGILLDIISYVGVGFSILSLAACLVVEAVVWKSVTKNRTSYMRHTCIVNIAASLLVANTWFIVVAAIQDNRYILCKTACVAATFFIHFFYLSVFFWMLTLGLMLFYRLVFILHETSRSTQKAIAFCLGYGCPLAISVITLGATQPREVYTRKNVCWLNWEDTKALLAFAIPALIIVVVNITITIVVITKILRPSIGDKPCKQEKSSLFQISKSIGVLTPLLGLTWGFGLTTVFPGTNLVFHIIFAILNVFQGLFILLFGCLWDLKVQEALLNKFSLSRWSSQHSKSTSLGSSTPVFSMSSPISRRFNNLFGKTGTYNVSTPEATSSSLENSSSASSLLN

SEQ ID NO: 821809 - protein, 1346 aa, Homo sapiens; identical to SEQ ID NO: 821806

SEQ ID NO: 821810 - protein, 1346 aa, Homo sapiens; identical to SEQ ID NO: 821806

SEQ ID NO: 821811 - protein, 719 aa, Homo sapiens
SSDYRSQVHVESREGLWKIKGKIKKLGSSEKVTESKGENITCQDPVIGVGEPGKVIQKLCRFSNVPSSPESPIGGTITYKCVGSQWEEKRNDCISAPINSLLQMAKALIKSPSQDEMLPTYLKDLSISIDKAEHEISSSPGSLGAIINILDLLSTVPTQVNSEMMTHVLSTVNVILGKPVLNTWKVLQQQWTNQSSQLLHSVERFSQALQSGDSPPLSFSQTNVQMSSTVIKSSHPETYQQRFVFPYFDLWGNVVIDKSYLENLQSDSSIVTMAFPTLQAILAQDIQENNFAESLVMTTTVSHNTTMPFRISMTFKNNSPSGGETKCVFWNFRLANNTGGWDSSGCYVEEGDGDNVTCICDHLTSFSILMSPDSPDPSSLLGILLDIISYVGVGFSILSLAACLVVEAVVWKSVTKNRTSYMRHTCIVNIAASLLVANTWFIVVAAIQDNRYILCKTACVAATFFIHFFYLSVFFWMLTLGLMLFYRLVFILHETSRSTQKAIAFCLGYGCPLAISVITLGATQPREVYTRKNVCWLNWEDTKALLAFAIPALIIVVVNITITIVVITKILRPSIGDKPCKQEKSSLFQISKSIGVLTPLLGLTWGFGLTTVFPGTNLVFHIIFAILNVFQGLFILLFGCLWDLKVQEALLNKFSLSRWSSQHSKSTSLGSSTPVFSMSSPISRRFNNLFGKTGTYNVSTPEATSSSLENSSSASSLLN

SEQ ID NO: 821812 - protein, 1346 aa, Homo sapiens; identical to SEQ ID NO: 821806

SEQ ID NO: 821813 - protein, 1365 aa, Homo sapiens
  misc_feature (1305)..(1305): Xaa can be any naturally occurring amino acid
  misc_feature (1356)..(1356): Xaa can be any naturally occurring amino acid
MKSPRRTTLCLMFIVIYSSKAALNWNYESTIHPLSLHEHEPAGEEALRQKRAVATKSPTAEEYTVNIEISFENASFLDPIKAYLNSLSFPIHGNNTDQITDILSINVTTVCRPAGNEIWCSCETGYGWPRERCLHNLICQERDVFLPGHHCSCLKELPPNGPFCLLQEDVTLNMRVRLNVGFQEDLMNTSSALYRSYKTDLETAFRKGYGILPGFKGVTVTGFKSGSVVVTYEVKTTPPSLELIHKANEQVVQSLNQTYKMDYNSFQAVTINESNFFVTPEIIFEGDTVSLVCEKEVLSSNVSWRYEEQQLEIQNSSRFSIYTALFNNMTSVSKLTIHNITPGDAGEYVCKLILDIFEYECKKKIDVMPIQILANEEMKVMCDNNPVSLNCCSQGNVNWSKVEWKQEGKINIPGTPETDIDSSCSRYTLKADGTQCPSGSSGTTVIYTCEFISAYGARGSANIKVTFISVANLTITPDPISVSEGQNFSIKCISDVSNYDEVYWNTSAGIKIYQRFYTTRRYLDGAESVLTVKTSTREWNGTYHCIFRYKNSYSIATKDVIVHPLPLKLNIMVDPLEATVSCSGSHHIKCCIEEDGDYKVTFHMGSSSLPAAKEVNKKQVCYKHNFNASSVSWCSKTVDVCCHFTNAANNSVWSPSMKLNLVPGENITCQDPVIGVGEPGKVIQKLCRFSNVPSSPESPIGGTITYKCVGSQWEEKRNDCISAPINSLLQMAKALIKSPSQDEMLPTYLKDLSISIDKAEHEISSSPGSLGAIINILDLLSTVPTQVNSEMMTHVLSTVNVILGKPVLNTWKVLQQQWTNQSSQLLHSVERFSQALQSGDSPPLSFSQTNVQMSSTVIKSSHPETYQQRFVFPYFDLWGNVVIDKSYLENLQSDSSIVTMAFPTLQAILAQDIQENNFAESLVMTTTVSHNTTMPFRISMTFKNNSPSGGETKCVFWNFRLANNTGGWDSSGCYVEEGDGDNVTCICDHLTSFSILMSPDSPDPSSLLGILLDIISYVGVGFSILSLAACLVVEAVVWKSVTKNRTSYMRHTCIVNIAASLLVANTWFIVVAAIQDNRYILCKTACVAATFFIHFFYLSVFFWMLTLGLMLFYRLVFILHETSRSTQKAIAFCLGYGCPLAISVITLGATQPREVYTRKNVCWLNWEDTKALLAFAIPALIIVVVNITITIVVITKILRPSIGDKPCKQEKSSLFQISKSIGVLTPLLGLTWGFGLTTVFPGTNLVFHIIFAILNVFQGLFILLFGCLWDLKVQEALLNKFSLSRWSSQHSKSTSLEARAEFGRXSIPASTGAAKAVGKVIPELNGKLTGMAFRVPTANVSVVDLTCRLEKPAKYXAIKKVVKQA

SEQ ID NO: 821814 - protein, 151 aa, Homo sapiens
MKSPRRTTLCLMFIVIYSSKAALNWNYESTIHPLSLHEHEPAGEEALRQKRAVATKSPTAEEYTVNIEISFENASFLDPIKAYLNSLSFPIHGNNTDQITDILSINVTTDKLLGPLPCVLLPWYINGHNKDWFKILRWDDFKRLHHLKNLG

SEQ ID NO: 821815 - protein, 233 aa, Homo sapiens
RTLCLFLTPAERKCSRLCEAESSFKYESGLFVQGLLKDSTGSFVLPFRQVMYAPYPTTHIDVDVNTVKQMPPCHEHIYNQRRYMRSELTAFWRATSEEDMAQDTIIYTDESFTPDLNIFQDVLHRDTLVKAFLDQVFQLKPGLSLRSTFLAQFLLVLHRKALTLIKYIEDDTQKGKKPFKSLRNLKIDLDLTAEGDLNIIMALAEKIKPGLHSFIFGRPFYTSVQERDVLMTF

SEQ ID NO: 821816 - protein, 233 aa, Homo sapiens; identical to SEQ ID NO: 821815

SEQ ID NO: 821817 - protein, 548 aa, Homo sapiens
MATGANATPLDFPSKKRKRSRWNQDTMEQKTVIPGMPTVIPPGLTREQERAYIVQLQIEDLTRKLRTGDLGIPPNPEDRSPSPEPIYNSEGKRLNTREFRTRKKLEEERHNLITEMVALNPDFKPPADYKPPATRVSDKVMIPQDEYPEINFVGLLIGPRGNTLKNIEKECNAKIMIRGKGSVKEGKVGRKDGQMLPGEDEPLHALVTANTMENVKKAVEQIRNILKQGIETPEDQNDLRKMQLRELARLNGTLREDDNRILRPWQSSETRSITNTTVCTKCGGAGHIASDCKFQRPGDPQSAQDKARMDKEYLSLMAELGEAPVPASVGSTSGPATTPLASAPRPAAPANNPPPPSLMSTTQSRPPWMNSGPSESRPYHGMHGGGPGGPGGGPHSFPHPLPSLTGGHGGHPMQHNPNGPPPPWMQPPPPPMNQGPHPPGHHGPPPMDQYLGSTPVGSGVYRLHQGKGMMPPPPMGMMPPPPPPPSGQPPPPPSGPLPPWQQQQQQPPPPPPPSSSMASSTPLPWQQRSLPAAAMARAMRVRTFRAHW

SEQ ID NO: 821818 - protein, 622 aa, Homo sapiens
MATGANATPLDFPSKKRKRSRWNQDTMEQKTVIPGMPTVIPPGLTREQERAYIVQLQIEDLTRKLRTGDLGIPPNPEDRSPSPEPIYNSEGKRLNTREFRTRKKLEEERHNLITEMVALNPDFKPPADYKPPATRVSDKVMIPQDEYPEINFVGLLIGPRGNTLKNIEKECNAKIMIRGKGSVKEGKVGRKDGQMLPGEDEPLHALVTANTMENVKKAVEQIRNILKQGIETPEDQNDLRKMQLRELARLNGTLREDDNRILRPWQSSETRSITNTTVCTKCGGAGHIASDCKFQRPGDPQSAQDKARMDKEYLSLMAELGEAPVPASVGSTSGPATTPLASAPRPAAPANNPPPPSLMSTTQSRPPWMNSGPSESRPYHGMHGGGPGGPGGGPHSFPHPLPSLTGGHGGHPMQHNPNGPPPPWMQPPPPPMNQGPHPPGHHGPPPMDQYLGSTPVGSGVYRLHQGKGMMPPPPMGMMPPPPPPPSGQPPPPPSGPLPPWQQQQQQPPPPPPPSSSMASSTPLPWQQNTTTTTTSAGTGSIPPWQQQQAAAAASPGAPQMQGNPTMVPLPPGVQPPLPPGAPPPPRSIECLLCLLSLLTQLPLPLPKPGRQDPSPRRRWPEP

SEQ ID NO: 821819 - protein, 639 aa, Homo sapiens
MATGANATPLDFPSKKRKRSRWNQDTMEQKTVIPGMPTVIPPGLTREQERAYIVQLQIEDLTRKLRTGDLGIPPNPEDRSPSPEPIYNSEGKRLNTREFRTRKKLEEERHNLITEMVALNPDFKPPADYKPPATRVSDKVMIPQDEYPEINFVGLLIGPRGNTLKNIEKECNAKIMIRGKGSVKEGKVGRKDGQMLPGEDEPLHALVTANTMENVKKAVEQIRNILKQGIETPEDQNDLRKMQLRELARLNGTLREDDNRILRPWQSSETRSITNTTVCTKCGGAGHIASDCKFQRPGDPQSAQDKARMDKEYLSLMAELGEAPVPASVGSTSGPATTPLASAPRPAAPANNPPPPSLMSTTQSRPPWMNSGPSESRPYHGMHGGGPGGPGGGPHSFPHPLPSLTGGHGGHPMQHNPNGPPPPWMQPPPPPMNQGPHPPGHHGPPPMDQYLGSTPVGSGVYRLHQGKGMMPPPPMGMMPPPPPPPSGQPPPPPSGPLPPWQQQQQQPPPPPPPSSSMASSTPLPWQQNTTTTTTSAGTGSIPPWQQQQAAAAASPGAPQMQGNPTMVPLPPGVQPPLPPGAPPPPPPPPPGSAGMMYAPPPPPPPPMDPSNFVTMMGMGVAGMPPFGMPPAPPPPPPQN

SEQ ID NO: 821820 - protein, 80 aa, Homo sapiens
MATGANATPLDFPSKKRKRSRWNQDTMEQKTVIPGMPTVIPPGLTREQERAYIGKYTFCIQMHFEIVTIYSEQDLHFLKV

SEQ ID NO: 821821 - protein, 206 aa, Homo sapiens
MEQKTVIPGMPTVIPPGLTREQERAYIAVKLREQEQKGGQKLRLQQQEERRRLAGGRELRRVEEDKERALGLQREKMRELRERMLSILLSKKPDTANTHDELGVAHADLLQPVLDILQTDVVRLCERDQRLNAPRGPGPRPVAPKGEAGTNPKGPTGHPKKGETGQRGEGGPTRREGQTDRSTSAPRMTPESKGRTDEKQHETRKR

SEQ ID NO: 821822 - protein, 100 aa, Homo sapiens
HPVIQQARAYLLPSVPKPIWQPTAASTFYDHTPQQPDHSSHISLLLKIEEEKQEAEDQNDLRKMQLRELARLNGTLREDDNRIFKTWQKQEARSRKRQKR

SEQ ID NO: 821823 - protein, 639 aa, Homo sapiens; identical to SEQ ID NO: 821819

SEQ ID NO: 821824 - protein, 639 aa, Homo sapiens; identical to SEQ ID NO: 821819

SEQ ID NO: 821825 - protein, 613 aa, Homo sapiens
MEQKTVIPGMPTVIPPGLTREQERAYIVQLQIEDLTRKLRTGDLGIPPNPEDRSPSPEPIYNSEGKRLNTREFRTRKKLEEERHNLITEMVALNPDFKPPADYKPPATRVSDKVMIPQDEYPEINFVGLLIGPRGNTLKNIEKECNAKIMIRGKGSVKEGKVGRKDGQMLPGEDEPLHALVTANTMENVKKAVEQIRNILKQGIETPEDQNDLRKMQLRELARLNGTLREDDNRILRPWQSSETRSITNTTVCTKCGGAGHIASDCKFQRPGDPQSAQDKARMDKEYLSLMAELGEAPVPASVGSTSGPATTPLASAPRPAAPANNPPPPSLMSTTQSRPPWMNSGPSESRPYHGMHGGGPGGPGGGPHSFPHPLPSLTGGHGGHPMQHNPNGPPPPWMQPPPPPMNQGPHPPGHHGPPPMDQYLGSTPVGSGVYRLHQGKGMMPPPPMGMMPPPPPPPSGQPPPPPSGPLPPWQQQQQQPPPPPPPSSSMASSTPLPWQQNTTTTTTSAGTGSIPPWQQQQAAAAASPGAPQMQGNPTMVPLPPGVQPPLPPGAPPPPPPPPPGSAGMMYAPPPPPPPPMDPSNFVTMMGMGVAGMPPFGMPPAPPPPPPQN

SEQ ID NO: 821826 - protein, 524 aa, Homo sapiens
MVALNPDFKPPADYKPPATRVSDKVMIPQDEYPEINFVGLLIGPRGNTLKNIEKECNAKIMIRGKGSVKEGKVGRKDGQMLPGEDEPLHALVTANTMENVKKAVEQIRNILKQGIETPEDQNDLRKMQLRELARLNGTLREDDNRILRPWQSSETRSITNTTVCTKCGGAGHIASDCKFQRPGDPQSAQDKARMDKEYLSLMAELGEAPVPASVGSTSGPATTPLASAPRPAAPANNPPPPSLMSTTQSRPPWMNSGPSESRPYHGMHGGGPGGPGGGPHSFPHPLPSLTGGHGGHPMQHNPNGPPPPWMQPPPPPMNQGPHPPGHHGPPPMDQYLGSTPVGSGVYRLHQGKGMMPPPPMGMMPPPPPPPSGQPPPPPSGPLPPWQQQQQQPPPPPPPSSSMASSTPLPWQQNTTTTTTSAGTGSIPPWQQQQAAAAASPGAPQMQGNPTMVPLPPGVQPPLPPGAPPPPPPPPPGSAGMMYAPPPPPPPPMDPSNFVTMMGMGVAGMPPFGMPPAPPPPPPQN

SEQ ID NO: 821827 - protein, 524 aa, Homo sapiens; identical to SEQ ID NO: 821826

SEQ ID NO: 821828 - protein, 586 aa, Homo sapiens
MATGANATPLDFPSKKRKRSRWNQDTMEQKTVIPGMPTVIPPGLTREQERAYIVQLQIEDLTRKLRTGDLGIPPNPEDRSPSPEPIYNSEGKRLNTREFRTRKKLEEERHNLITEMVALNPDFKPPADYKPPATRVSDKVMIPQDEYPEINFVGLLIGPRGNTLKNIEKECNAKIMIRGKGSVKEGKVGRKDGQMLPGEDEPLHALVTANTMENVKKAVEQIRNILKQGIETPEDQNDLRKMQLRELARLNGTLREDDNRILRPWQSSETRSITNTTVCTKCGGAGHIASDCKFQRPGDPQSAQDKARMDKEYLSLMAELGEAPVPASVGSTSGPATTPLASAPRPAAPANNPPPPSLMSTTQSRPPWMNSGPSESRPYHGMHGGGPGGPGGGPHSFPHPLPSLTGGHGGHPMQHNPNGPPPPWMQPPPPPMNQGPHPPGHHGPPPMDQYLGSTPVGSGVYRLHQGKGMMPPPPMGMMPPPPPPPSGQPPPPPSGPLPPWQQQQQQPPPPPPPSSSMASSTPLPWQQNTTTTTTSAGTGSIPPWQQQQAAAAASPGAPQMQGNPTMVPLPRPLLLRLPWTLLTLSP

SEQ ID NO: 821829 - protein, 524 aa, Homo sapiens; identical to SEQ ID NO: 821826

SEQ ID NO: 821830 - protein, 608 aa, Homo sapiens
MATGANATPLDFPSKKRKRSRWNQDTMEQKTVIPGMPTVIPPGLTREQERAYIVQLQIEDLTRKLRTGDLGIPPNPEDRSPSPEPIYNSEGKRLNTREFRTRKKLEEERHNLITEMVALNPDFKPPADYKPPATRVSDKVMIPQDEYPEINFVGLLIGPRGNTLKNIEKECNAKIMIRGKGSVKEGKVGRKDGQMLPGEDEPLHALVTANTMENVKKAVEQIRNILKQGIETPEDQNDLRKMQLRELARLNGTLREDDNRILRPWQSSETRSITNTTVCTKCGGAGHIASDCKFQRPGDPQSAQDKARMDKEYLSLMAELGEAPVPASVGSTSGPATTPLASAPRPAAPANNPPPPSLMSTTQSRPPWMNSGPSESRPYHGMHGGGPGGPGGGPHSFPHPLPSLTGGHGGHPMQHNPNGPPPPWMQPPPPPMNQGPHPPGHHGPPPMDQYLGSTPVGSGVYRLHQGKGMMPPPPMGMMPPPPPPPSGQPPPPPSGPLPPWQQQQQQPPPPPPPSSSMASSTPLPWQQNTTTTTTSAGTGSIPPWQQQQAAAAASPGAPQMQGNPTMVPLPPGVQPPLPPGAPPPPPPPPPGSAGMMYDPSPRRRWPEP

SEQ ID NO: 821831 - protein, 543 aa, Homo sapiens
MATGANATPLDFPSKKRKRSRWNQDTMEQKTVIPGMPTVIPPGLTREQERAYIVQLQIEDLTRKLRTGDLGIPPNPEDRSPSPEPIYNSEGKRLNTREFRTRKKLEEERHNLITEMVALNPDFKPPADYKPPATRVSDKVMIPQDEYPEINFVGLLIGPRGNTLKNIEKECNAKIMIRGKGSVKEGKVGRKDGQMLPGEDEPLHALVTANTMENVKKAVEQIRNILKQGIETPEDQNDLRKMQLRELARLNGTLREDDNRILRPWQSSETRSITNTTVCTKCGGAGHIASDCKFQRPGDPQSAQDKARMDKEYLSLMAELGEAPVPASVGSTSGPATTPLASAPRPAAPANNPPPPSLMSTTQSRPPWMNSGPSESRPYHGMHGGGPGGPGGGPHSFPHPLPSLTGGHGGHPMQHNPNGPPPPWMQPPPPPMNQGPHPPGHHGPPPMDQYLGSTPVGSGVYRLHQGKGMMPPPPMGMMPPPPPPPSGLTGTIEPHTSRQVSWDEPLGSAGVVNRKGLSAASTAWFRRHDVCPAPSSSASHGPF

SEQ ID NO: 821832 - protein, 632 aa, Homo sapiens
MATGANATPLDFPSKKRKRSRWNQDTMEQKTVIPGMPTVIPPGLTREQERAYIVQLQIEDLTRKLRTGDLGIPPNPEDRSPSPEPIYNSEGKRLNTREFRTRKKLEEERHNLITEMVALNPDFKPPADYKPPATRVSDKVMIPQDEYPEINFVGLLIGPRGNTLKNIEKECNAKIMIRGKGSVKEGKVGRKDGQMLPGEDEPLHALVTANTMENVKKAVEQIRNILKQGIETPEDQNDLRKMQLRELARLNGTLREDDNRILRPWQSSETRSITNTTVCTKCGGAGHIASDCKFQRPGDPQSAQDKARMDKEYLSLMAELGEAPVPASVGSTSGPATTPLASAPRPAAPANNPPPPSRPPWMNSGPSESRPYHGMHGGGPGGPGGGPHSFPHPLPSLTGGHGGHPMQHNPNGPPPPWMQPPPPPMNQGPHPPGHHGPPPMDQYLGSTPVGSGVYRLHQGKGMMPPPPMGMMPPPPPPPSGQPPPPPSGPLPPWQQQQQQPPPPPPPSSSMASSTPLPWQQNTTTTTTSAGTGSIPPWQQQQAAAAASPGAPQMQGNPTMVPLPPGVQPPLPPGAPPPPPPPPPGSAGMMYAPPPPPPPPMDPSNFVTMMGMGVAGMPPFGMPPAPPPPPPQN

SEQ ID NO: 821833 - protein, 496 aa, Homo sapiens
GTSWWCCCLVVLLIGPRGNTLKNIEKECNAKIMIRGKGSVKEGKVGRKDGQMLPGEDEPLHALVTANTMENVKKAVEQIRNILKQGIETPEDQNDLRKMQLRELARLNGTLREDDNRILRPWQSSETRSITNTTVCTKCGGAGHIASDCKFQRPGDPQSAQDKARMDKEYLSLMAELGEAPVPASVGSTSGPATTPLASAPRPAAPANNPPPPSLMSTTQSRPPWMNSGPSESRPYHGMHGGGPGGPGGGPHSFPHPLPSLTGGHGGHPMQHNPNGPPPPWMQPPPPPMNQGPHPPGHHGPPPMDQYLGSTPVGSGVYRLHQGKGMMPPPPMGMMPPPPPPPSGQPPPPPSGPLPPWQQQQQQPPPPPPPSSSMASSTPLPWQQNTTTTTTSAGTGSIPPWQQQQAAAAASPGAPQMQGNPTMVPLPPGVQPPLPPGAPPPPPPPPPGSAGMMYAPPPPPPPPMDPSNFVTMMGMGVAGMPPFGMPPAPPPPPPQN

SEQ ID NO: 821834 - protein, 302 aa, Homo sapiens
MATGANATPLDFPSKKRKRSRWNQDTMEQKTVIPGMPTVIPPGLTREQERAYIVQLQIEDLTRKLRTGDLGIPPNPEDRSPSPEPIYNSEGKRLNTREFRTRKKLEEERHNLITEMVALNPDFKPPADYKPPATRVSDKVMIPQDEYPEINFVGLLIGPRGNTLKNIEKECNAKIMIRGKGSVKEGKVGRKDGQMLPGEDEPLHALVTANTMENVKKAVEQIRNILKQGIETPEDQNDLRKMQLRELARLNGTLREDDNRILRPWQSSETRSITNTTVVLLLPPTTHLHRLSCLPPRAAHPG

SEQ ID NO: 821835 - protein, 493 aa, Homo sapiens
MATGANATPLDFPSKKRKRSRWNQDTMEQKTVIPGMPTVIPPGLTREQERAYIVQLQIEDLTRKLRTGDLGIPPNPEDRSPSPEPIYNSEGKRLNTREFRTRKKLEEERHNLITEMVALNPDFKPPADYKPPATRVSDKVMIPQDEYPEINFVGLLIGPRGNTLKNIEKECNAKIMIRGKGSVKEGKVGRKDGQMLPGEDEPLHALVTANTMENVKKAVEQIRNILKQGIETPEDQNDLRKMQLRELARLNGTLREDDNRILRPWQSSETRSITNTTVQLPTPITQPDRWAWWTSHAAQPQWTPTPLDAATTTTDEPGPPPSWAPWPSSNGSVPGKYACGLWGLSPASRKRYDAATTYGHDAAAAAASQWAAPTPSLWSSSPMATTAAAASATPSAQQQYGFQYPLAMAAKYDDYHHERWHRVHPAMATAAGGCRSFSRSPSDARQPHYGAPAPRGPAASAAWGPSPSAASTAWFRRHDVCPAPSSSASHGPF

SEQ ID NO: 821836 - protein, 298 aa, Homo sapiens
MATGANATPLDFPSKKRKRSRWNQDTMEQKTVIPGMPTVIPPGLTREQERAYIVQLQIEDLTRKLRTGDLGIPPNPEDRSPSPEPIYNSEGKRLNTREFRTRKKLEEERHNLITEMVALNPDFKPPADYKPPATRVSDKVMIPQDEYPEINFVGLLIGPRGNTLKNIEKECNAKIMIRGKGSVKEGKVGRKDGQMLPGEDEPLHALVTANTMENVKKAVEQIRNILKQGIETPEDQNDLRKMQLRELARLNGTLREDDNRILRPWQSSETRSITNTTVVAGMPPFGMPPAPPPPPPQN

SEQ ID NO: 821837 - protein, 639 aa, Homo sapiens; identical to SEQ ID NO: 821819

SEQ ID NO: 821838 - protein, 639 aa, Homo sapiens; identical to SEQ ID NO: 821819

SEQ ID NO: 821839 - protein, 565 aa, Homo sapiens
MATGANATPLDFPSKKRKRSRWNQDTMEQKTVIPGMPTVIPPGLTREQERAYIVQLQIEDLTRKLRTGDLGIPPNPEDRSPSPEPIYNSEGKRLNTREFRTRKKLEEERHNLITEMVALNPDFKPPADYKPPATRVSDKVMIPQDEYPEINFVGLLIGPRGNTLKNIEKECNAKIMIRGKGSVKEGKVGRKDGQMLPGEDEPLHALVTANTMENVKKAVEQIRNILKQGIETPEDQNDLRKMQLRELARLNGTLREDDNRILRPWQSSETRSITNTTVCTKCGGAGHIASDCKFQRPGDPQSAQDKARMDKEYLSLMAELGEAPVPASVGSTSGPATTPLASAPRPAAPANNPPPPSLMSTTQSRPPWMNSGPSESRPYHGMHGGGPGGPGGGPHSFPHPLPSLTGGHGGHPMQHNPNGPPPPWMQPPPPPMNQGPHPPGHHGPPPMDQYLGSTPVGSGVYRLHQGKGMMPPPPMGMMPPPPPPPSGQPQGASMVVLLHGYGNKEQSSSATTVRQKKYGTKLPPAMEERYSPEEARPRQEEGGFPGLGTLTEKVRTPRGQEVGDS

SEQ ID NO: 821840 - protein, 517 aa, Homo sapiens
MATGANATPLDFPSKKRKRSRWNQDTMEQKTVIPGMPTVIPPGLTREQERAYIVQLQIEDLTRKLRTGDLGIPPNPEDRSPSPEPIYNSEGKRLNTREFRTRKKLEEERHNLITEMVALNPDFKPPADYKPPATRVSDKVMIPQDEYPEINFVGLLIGPRGNTLKNIEKECNAKIMIRGKGSVKEGKVGRKDGQMLPGEDEPLHALVTANTMENVKKAVEQIRNILKQGIETPEDQNDLRKMQLRELARLNGTLREDDNRILRPWQSSETRSITNTTVCTKCGGAGHIASDCKFQRPGDPQSAQDKARMDKEYLSLMAELGEAPVPASVGSTSGPATTPLASAPRPAAPANNPPPPSLMSTTQSRPPWMNSGPSESRPYHGMHGGGPGGPGGGPHSFPHPLPSLTGGHGGHPMQQKEQQPHARQQNTKEKKKQQVSTRRNTPHKHENKQKERKRAEQKERGTGAKQETERRRRQRGEQEKTQDKKNGEENERQSRRTKSERGQGEKEEREEEEEDRK

SEQ ID NO: 821841 - protein, 452 aa, Homo sapiens
  misc_feature (418)..(418): Xaa can be any naturally occurring amino acid
MATGANATPLDFPSKKRKRSRWNQDTMEQKTVIPGMPTVIPPGLTREQERAYIVQLQIEDLTRKLRTGDLGIPPNPEDRSPSPEPIYNSEGKRLNTREFRTRKKLEEERHNLITEMVALNPDFKPPADYKPPATRVSDKVMIPQDEYPEINFVGLLIGPRGNTLKNIEKECNAKIMIRGKGSVKEGKVGRKDGQMLPGEDEPLHALVTANTMENVKKAVEQIRNILKQGIETPEDQNDLRKMQLRELARLNGTLREDDNRILRPWQSSETRSITNTTVCTKCGGAGHIASDCKFQRPGDPQSAQDKARMDKEYLSLMAELGEAPVPASVGSTSGPATTPLASAPRPAAPANNPPPPSLMSTTQSRPPWMNSGPSESRPYHGMHGGGPGGPGGGPHSFPHPLPSLTGGHGGHPMQHLKXIEKECHAKIMIRGKGSVKEGKVGRQDGQMLPGRC

SEQ ID NO: 821842 - protein, 410 aa, Homo sapiens
MATGANATPLDFPSKKRKRSRWNQDTMEQKTVIPGMPTVIPPGLTREQERAYIVQLQIEDLTRKLRTGDLGIPPNPEDRSPSPEPIYNSEGKRLNTREFRTRKKLEEERHNLITEMVALNPDFKPPADYKPPATRVSDKVMIPQDEYPEINFVGLLIGPRGNTLKNIEKECNAKIMIRGKGSVKEGKVGRKDGQMLPGEDEPLHALVTANTMENVKKAVEQIRNILKQGIETPEDQNDLRKMQLRELARLNGTLREDDNRILRPWQSSETRSITNTTVCTKCGGAGHIASDCKFQRPGDPQSAQDKARMDKEYLSLMAELGEAPVPASVGSTSGPATTPLASAPRPAAPANNPPPPSLMSTTQSRPPWMNSGPSESRPYHGMHGGGPGGPGGGPHSFPHPLPSLTGCGHP

SEQ ID NO: 821843 - protein, 410 aa, Homo sapiens
MATGANATPLDFPSKKRKRSRWNQDTMEQKTVIPGMPTVIPPGLTREQERAYIVQLQIEDLTRKLRTGDLGIPPNPEDRSPSPEPIYNSEGKRLNTREFRTRKKLEEERHNLITEMVALNPDFKPPADYKPPATRVSDKVMIPQDEYPEINFVGLLIGPRGNTLKNIEKECNAKIMIRGKGSVKEGKVGRKDGQMLPGEDEPLHALVTANTMENVKKAVEQIRNILKQGIETPEDQNDLRKMQLRELARLNGTLREDDNRILRPWQSSETRSITNTTVCTKCGGAGHIASDCKFQRPGDPQSAQDKARMDKEYLSLMAELGEAPVPASVGSTSGPATTPLASAPRPAAPANNPPPPSLMSTTQSRPPWMNSGPSESRPYHGMHGGGPGGPGGGPHSFPHPLPSLTGRLHR

SEQ ID NO: 821844 - protein, 558 aa, Homo sapiens
MATGANATPLDFPSKKRKRSRWNQDTMEQKTVIPGMPTVIPPGLTREQERAYIVQLQIEDLTRKLRTGDLGIPPNPEDRSPSPEPIYNSEGKRLNTREFRTRKKLEEERHNLITEMVALNPDFKPPADYKPPATRVSDKVMIPQDEYPEINFVGLLIGPRGNTLKNIEKECNAKIMIRGKGSVKEGKVGRKDGQMLPGEDEPLHALVTANTMENVKKAVEQIRNILKQGIETPEDQNDLRKMQLRELARLNGTLREDDNRILRPWQSSETRSITNTTVCTKCGGAGHIASDCKFQRPGDPQSAQDKARMDKEYLSLMAELGEAPVPASVGSTSGPATTPLASAPRPAAPANNPPPPSRPPWMNSGPSESRPYHGMHGGGPGGPGGGPHSFPHPLPSLTGGHGGHPMQHNPNGPPPPWMQPPPPPMNQGPHPPGHHGPPPMDQYLGSTPVGSGVYRLHQGKGMMPPPPMGMMPPPPPPPSGQPQGASMVVLLHGYGNKEQSSSATTVRQKKYGTKLPPAMEERYSPEEARPRQEEGGFPGLGTLTEKVRTPRGQEVGDS

SEQ ID NO: 821845 - protein, 363 aa, Homo sapiens
MATGANATPLDFPSKKRKRSRWNQDTMEQKTVIPGMPTVIPPGLTREQERAYIVQLQIEDLTRKLRTGDLGIPPNPEDRSPSPEPIYNSEGKRLNTREFRTRKKLEEERHNLITEMVALNPDFKPPADYKPPATRVSDKVMIPQDEYPEINFVGLLIGPRGNTLKNIEKECNAKIMIRGKGSVKEGKVGRKDGQMLPGEDEPLHALVTANTMENVKKAVEQIRNILKQGIETPEDQNDLRKMQLRELARLNGTLREDDNRILRPWQSSETRSITNTTVCTKCGGAGHIASDCKFQRPGDPQSAQDKARMDKEYLSLMAELGEAPVPASVGSTSGPATTPLASAPLVVRKNHSRSHVYTRAAPW

SEQ ID NO: 821846 - protein, 111 aa, Homo sapiens
MATGANATPLDFPSKKRKRSRWNQDTMEQKTVIPGMPTVIPPGLTREQERAYIVQLQIEDLTRKLRTGDLGIPPNPEDRLGNSFNQLTVTLLPFSQYVLLVATYCVSSIKS

SEQ ID NO: 821847 - protein, 124 aa, Homo sapiens
PGDPQSAQDKARMDKEYLSLMAELGEAPVPASVGSTSGPATTPLASAPRPAAPANNPPPPVSLGAGSLGLASPFSTAETGSYGHVVWVEQTMDVDGNIVLPGSQASLGTSHFGKTLFLCSGPVS

SEQ ID NO: 821848 - protein, 493 aa, Homo sapiens
MAAATGPSFWLGNETLKVPLALFALNRQRLCERLRKNPAVQAGSIVVLQGGEETQRYCTDTGVLFRQESFFHWAFGVTEPGCYGVIDVDTGKSTLFVPRLPASHATWMGKIHSKEHFKEKYAVDDVQYVDEIASVLTSQKPSVLLTLRGVNTDSGSVCREASFDGISKFEVNNTILHPEIVECRVFKTDMELEVLRYTNKISSEAHREVMKAVKVGMKEYELESLFEHYCYSRGGMRHSSYTCICGSGENSAVLHYGHAGAPNDRTIQNGDMCLFDMGGEYYCFASDITCSFPANGKFTADQKAVYEAVLRSSRAVMGAMKPGVWWPDMHRLADRIHLEELAHMGILSGSVDAMVQAHLGAVFMPHGLGHFLGIDVHDVGGYPEGVERIDEPGLRSLRTARHLQPGMVLTVEPGIYFIDHLLDEALADPARASFLNREVLQRFRGFGGVRIEEDVVVTDSGIELLTCVPRTVEEIEACMAGCDKAFTPFSGPK

SEQ ID NO: 821849 - protein, 307 aa, Homo sapiens
QAVRPGIMGWANMAAATGPSFWLGNETLKVPLALFALNRQRLCERLRKNPAVQAGSIVVLQGGEETQRYCTDTGVLFRQESFFHWAFGVTEPGCYGVIDVDTGKSTLFVPRLPASHATWMGKIHSKEHFKEKYAVDDVQYVDEIASVLTSQKPSVLLTLRGVNTDSGSVCREASFDGISKFEVNNTILHPEIVECRVFKTDMELEVLRYTNKISSEAHREVMKAVKSGNEKIELEKLFEALIGTSRRDWPQFQNQLWGVVKSTLFNKDPDPSDKAKGYSVDGGIRGAKLAFEEYGTRLEGPTDNVEP

SEQ ID NO: 821850 - protein, 529 aa, Homo sapiens
GGTSRDAGAGRTWRRPPGECCASLALSRWRGEGHVVSRPDRGPSFWLGNETLKVPLALFALNRQRLCERLRKNPAVQAGSIVVLQGGEETQRYCTDTGVLFRQESFFHWAFGVTEPGCYGVIDVDTGKSTLFVPRLPASHATWMGKIHSKEHFKEKYAVDDVQYVDEIASVLTSQKPSVLLTLRGVNTDSGSVCREASFDGISKFEVNNTILHPEIVECRVFKTDMELEVLRYTNKISSEAHREVMKAVKVGMKEYELESLFEHYCYSRGGMRHSSYTCICGSGENSAVLHYGHAGAPNDRTIQNGDMCLFDMGGEYYCFASDITCSFPANGKFTADQKAVYEAVLRSSRAVMGAMKPGVWWPDMHRLADRIHLEELAHMGILSGSVDAMVQAHLGAVFMPHGLGHFLGIDVHDVGGYPEGVERIDEPGLRSLRTARHLQPGMVLTVEPGIYFIDHLLDEALADPARASFLNREVLQRFRGFGGVRIEEDVVVTDSGIELLTCVPRTVEEIEACMAGCDKAFTPFSGPK

SEQ ID NO: 821851 - protein, 452 aa, Homo sapiens
MAAATGPSFWLGNETLKVPLALFALNRQRLCERLRKNPAVQAGSIVVLQGGEETQRYCTDTGVLFRQESFFHWAFGVTEPGCYGVIDVDTGKSTLFVPRLPASHATWMGKIHSKEHFKEKYAVDDVQYVDEIASVLTSQKPSVLLTLRGVNTDSGSVCREASFDGISKFEVNNTILHPEIVECLFEHYCYSRGGMRHSSYTCICGSGENSAVLHYGHAGAPNDRTIQNGDMCLFDMGGEYYCFASDITCSFPANGKFTADQKAVYEAVLRSSRAVMGAMKPGVWWPDMHRLADRIHLEELAHMGILSGSVDAMVQAHLGAVFMPHGLGHFLGIDVHDVGGYPEGVERIDEPGLRSLRTARHLQPGMVLTVEPGIYFIDHLLDEALADPARASFLNREVLQRFRGFGGVRIEEDVVVTDSGIELLTCVPRTVEEIEACMAGCDKAFTPFSGPK

SEQ ID NO: 821852 - protein, 493 aa, Homo sapiens; identical to SEQ ID NO: 821848

SEQ ID NO: 821853 - protein, 304 aa, Homo sapiens [sequence omitted]

SEQ ID NO: 821854 - protein, 339 aa, Homo sapiens
MGVCREASFDGISKFEVNNTILHPEIVECRVFKTDMELEVLRYTNKISSEAHREVMKAVKVGMKEYELESLFEHYCYSRGGMRHSSYTCICGSGENSAVLHYGHAGAPNDRTIQNGDMCLFDMGGEYYCFASDITCSFPANGKFTADQKAVYEAVLRSSRAVMGAMKPGVWWPDMHRLADRIHLEELAHMGILSGSVDAMVQAHLGAVFMPHGLGHFLGIDVHDVGGYPEGVERIDEPGLRSLRTARHLQPGMVLTVEPGIYFIDHLLDEALADPARASFLNREVLQRFRGFGGVRIEEDVVVTDSGIELLTCVPRTVEEIEACMAGCDKAFTPFSGPK

SEQ ID NO: 821855 - protein, 357 aa, Homo sapiens
MPWALTWGPSLCLQLLPAASLWTVLSAFLGSRFEVNNTILHPEIVECRVFKTDMELEVLRYTNKISSEAHREVMKAVKVGMKEYELESLFEHYCYSRGGMRHSSYTCICGSGENSAVLHYGHAGAPNDRTIQNGDMCLFDMGGEYYCFASDITCSFPANGKFTADQKAVYEAVLRSSRAVMGAMKPGVWWPDMHRLADRIHLEELAHMGILSGSVDAMVQAHLGAVFMPHGLGHFLGIDVHDVGGYPEGVERIDEPGLRSLRTARHLQPGMVLTVEPGIYFIDHLLDEALADPARASFLNREVLQRFRGFGGVRIEEDVVVTDSGIELLTCVPRTVEEIEACMAGCDKAFTPFSGPK

SEQ ID NO: 821856 - protein, 348 aa, Homo sapiens
MLWHAVCRRMGSVRDGSFDGISKFEVNNTILHPEIVECRVFKTDMELEVLRYTNKISSEAHREVMKAVKVGMKEYELESLFEHYCYSRGGMRHSSYTCICGSGENSAVLHYGHAGAPNDRTIQNGDMCLFDMGGEYYCFASDITCSFPANGKFTADQKAVYEAVLRSSRAVMGAMKPGVWWPDMHRLADRIHLEELAHMGILSGSVDAMVQAHLGAVFMPHGLGHFLGIDVHDVGGYPEGVERIDEPGLRSLRTARHLQPGMVLTVEPGIYFIDHLLDEALADPARASFLNREVLQRFRGFGGVRIEEDVVVTDSGIELLTCVPRTVEEIEACMAGCDKAFTPFSGPK

SEQ ID NO: 821857 - protein, 186 aa, Homo sapiens
MAAATGPSFWLGNETLKVPLALFALNRQRLCERLRKNPAVQAGSIVVLQGGEETQRYCTDTGVLFRQESFFHWAFGVTEPGCYGVIDVDTGKSTLFVPRLPASHATWMGKIHSKEHFKEKYAVDDVQYVDEIASVLTSQKPSVLLTLRGVNTDSGSVCREASFDGISKFEVNNTILHPEIVECWEL

SEQ ID NO: 821858 - protein, 114 aa, Homo sapiens
MAAATGPSFWLGNETLKVPLALFALNRQRLCERLRKNPAVQAGSIVVLQGGEETQRYCTDTGVLFRQESFFHWAFGVTEPGCYGVIDVDTGKSTLFVPRLPASHATWMGKLPAS

SEQ ID NO: 821859 - protein, 126 aa, Homo sapiens
MKLLVPGIVLFDPFKCLCSTLHLGLRLTSSSNRSSGLASWFDLMGPPSSPYPLACREEELVVDSGPHLSTQPIPLGPWSSWMVGPGPLQVWLLGVPGLGSVPFGLSLGLRPPSTSPDQGQAACCLQ

SEQ ID NO: 821860 - protein, 256 aa, Homo sapiens
MREIVHIQAGQCGNQIGAKFWEVISDEHGIDPTGSYHGDSDLQLERINVYYNEAAGNKYVPRAILVDLEPGTMDSVRSGPFGQIFRPDNFVFGQSGAGNNWAKGHYTEGAELVDSVLDVVRKESESCDCLQGFQLTHSLGGGTGSGMGTLLISKIREEYPDRIMNTFSVMPSPKVSDTVVEPYNATLSVHQLVENTDETYSIDNEALYDILLPHPEADHPPHYGDLNHLVSATMSGVTTCLRFPGQLNADLRKLGR

SEQ ID NO: 821861 - protein, 255 aa, Homo sapiens
  misc_feature (197)..(197): Xaa can be any naturally occurring amino acid
  misc_feature (199)..(199): Xaa can be any naturally occurring amino acid
  misc_feature (203)..(203): Xaa can be any naturally occurring amino acid
  misc_feature (218)..(218): Xaa can be any naturally occurring amino acid
  misc_feature (243)..(243): Xaa can be any naturally occurring amino acid
MREIVHIQAGQCGNQIGAKFWEVISDEHGIDPTGSYHGDSDLQLERINVYYNEAAGNKYVPRAILVDLEPGTMDSVRSGPFGQIFRPDNFVFGQSGAGNNWAKGHYTEGAELVDSVLDVVRKESESCDCLQGFQLTHSLGGGTGSGMGTLLISKIREEYPDRIMNTFSVMPSPKVSDTVVEPYNATLSVHTAVNTDXLXIDTXPDTLSHLSYTHYGTXTVGTYWYTLLRHYNSTRNVSRYLSXAYTGQTPSHTQL

SEQ ID NO: 821862 - protein, 124 aa, Homo sapiens
MDQVLPERRAMRVQGYPLPRKQDMAREEGKECCAAARQLELMNSPKMEKLMKVTVLSLIKILNGLGAVAYTCNPSTLQGEFEEEEGEDEALKNFSDQSCILSELLLSSSMVFLLVNYGAQFCLC

SEQ ID NO: 821863 - protein, 256 aa, Homo sapiens; identical to SEQ ID NO: 821860

SEQ ID NO: 821864 - protein, 256 aa, Homo sapiens; identical to SEQ ID NO: 821860

SEQ ID NO: 821865 - protein, 256 aa, Homo sapiens; identical to SEQ ID NO: 821860

SEQ ID NO: 821866 - protein, 256 aa, Homo sapiens; identical to SEQ ID NO: 821860

SEQ ID NO: 821867 - protein, 256 aa, Homo sapiens; identical to SEQ ID NO: 821860

SEQ ID NO: 821868 - protein, 256 aa, Homo sapiens; identical to SEQ ID NO: 821860

SEQ ID NO: 821869 - protein, 256 aa, Homo sapiens; identical to SEQ ID NO: 821860

SEQ ID NO: 821870 - protein, 256 aa, Homo sapiens; identical to SEQ ID NO: 821860

SEQ ID NO: 821871 - protein, 256 aa, Homo sapiens; identical to SEQ ID NO: 821860

SEQ ID NO: 821872 - protein, 187 aa, Homo sapiens
MFDSKNMMAACDPRHGRYLTVAAIFRGRMSMKEVDEQMLNVQNKNSSYFVEWIPNNVKTAVCDIPPRGLKMSATFIGNSTAIQELFKRISEQFTAMFRRKAFLHWYTGEGMDEMEFTEAESNMNDLVSEYQQYQDATADEQGEFEEEEGEDEALKNFSDQSCILSELLLSSSMVFLLVNYGAQFCLC

SEQ ID NO: 821873 - protein, 187 aa, Homo sapiens; identical to SEQ ID NO: 821872

SEQ ID NO: 821874 - protein, 143 aa, Homo sapiens
MEVLESGEQGVLQWDRKLSELSEPGDGEALMYHTHFSELLDEFSQNVLGQLLNDPFLSEKSVSMEVEPSPTSPAPLIQAEHSYSLCEEPRAQSPFTHIPPVTASMTMRWKVRNGTCLQTSLQHPSRQSQLQTNHPQDSFRLSL

SEQ ID NO: 821875 - protein, 106 aa, Homo sapiens
FVSGAVAASGLAAKGFSWDESGSSAFILDAHPALAPAAFGPARVPGDSRISEDTGRERLAILSPAEEQTFAFQVQNYRHARAHTQAHAEREEPCRSEAALRVPSCA

SEQ ID NO: 821876 - protein, 40 aa, Homo sapiens
MTVNSEEEEDLDLSAFGSELLRVWSVYYIKEGVSTLISEI

SEQ ID NO: 821877 - protein, 286 aa, Homo sapiens
MEVLESGEQGVLQWDRKLSELSEPGDGEALMYHTHFSELLDEFSQNVLGQLLNDPFLSEKSVSMEVEPSPTSPAPLIQAEHSYSLCEEPRAQSPFTHITTSDSFNDDEVESEKWYLSTDFPSTSIKTEPITDEPPPGLVPSVTLTITAISTPLEKEEPPLEMNTGVDSSCQTIIPKIKLEPHEVDQFLNFSPKEAPVDHLHLPPTPPSSHGSDSEGSLSPNPRLHPFSLPQTHSPSRAAPRAPSALSSSPLLTAPHKLQGSGPLVLTEEEKRTLIAEGYPIPTKLP

SEQ ID NO: 821878 - protein, 111 aa, Homo sapiens
MEVLESGEQGVLQWDRKLSELSEPGDGEALMYHTHFSELLDEFSQNVLGQLLNDPFLSEKSVSMEVEPSPTSPAPLIQAEHSYSLCEEPRAQSPFTHITTSDSFNDDMLHK

SEQ ID NO: 821879 - protein, 223 aa, Homo sapiens
MEVEPSPTSPAPLIQAEHSYSLCEEPRAQSPFTHITTSDSFNDDEVESEKWYLSTDFPSTSIKTEPITDEPPPGLVPSVTLTITAISTPLEKEEPPLEMNTGVDSSCQTIIPKIKLEPHEVDQFLNFSPKEAPVDHLHLPPTPPSSHGSDSEGSLSPNPRLHPFSLPQTHSPSRAAPRAPSALSSSPLLTAPHKLQGSGPLVLTEEEKRTLIAEGYPIPTKLP

SEQ ID NO: 821880 - protein, 240 aa, Homo sapiens
CSRGSQQHWTRESGPQWKGPKPAFGQQHQQQPKSQAEPLSGNKEPLADTSSNQQKNFKMQSAAFSIAADVKDVKAAQSNENLSDSQQEPPKSEVSEGPVEPSNWDQNVQSMETQIDKAQAVTQPVPLANKPVPAQSTFPSKTGGMEGGTAVATSSLTADNDFKPVGIGLPHSENNQDKGLPRPDNRDNRLEGNRGNSSSYRGPGQSRMEDTRDKGLVNRGRGQAISRVQCCWDPLDTSRH

SEQ ID NO: 821881 - protein, 1520 aa, Homo sapiens
ATPPPGIPPPGVPQGIPPQLTAAPVPPASSSQSSQVPEKPRPALLPTPVSFGSAPPTTYHPPLQSAGPSEQVNSKAPLSKSALPYSSFSSDQGLGESSAAPSQPITAVKDMPVRSGGLLPDPPRSSYLESPRGPRFDGPRRFEDLGSRCEGPRPKGPRFEGNRPDGPRPRYEGHPAEGTKSKWGMIPRGPASQFYITPSTSLSPRQSGPQWKGPKPAFGQQHQQQPKSQAEPLSGNKEPLADTSSNQQKNFKMQSAAFSIAADVKDVKAAQSNENLSDSQQEPPKSEVSEGPVEPSNWDQNVQSMETQIDKAQAVTQPVPLANKPVPAQSTFPSKTGGMEGGTAVATSSLTADNDFKPVGIGLPHSENNQDKGLPRPDNRDNRLEGNRGNSSSYRGPGQSRMEDTRDKGLVNRGRGQAISRGPGLVKQEDFRDKMMGRREDSREKMNRGEGSRDRGLVRPGSSREKVPGGLQGSQDRGAAGSRERGPPRRAGSQERGPLRRAGSRERIPPRRAGSRERGPPRGPGSRERGLGRSDFGRDRGPFRPEPGDGGEKMYPYHRDEPPRAPWNHGEERGHEEFPLDGRNAPMERERLDDWDRERYWRECERDYQDDTLELYNREDRFSAPPSRSHDGDRRGPWWDDWERDQDMDEDYNREMERDMDRDVDRISRPMDMYDRSLDNEWDRDYGRPLDEQESQFRERDIPSLPPLPPLPPLPPLDRYRDDRWREERNREHGYDRDFRDRGELRIREYPERGDTWREKRDYVPDRMDWERERLSDRWYPSDVDRHSPMAEHMPSSHHSSEMMGSDASLDSDQGLGGVMVLSQRQHEIILKAAQELKMLREQKEQLQKMKDFGSEPQMADHLPPQESRLQNTSSRPGMYPPPGSYRPPPPMGKPPGSIVRPSAPPARSSVPVTRPPVPIPPPPPPPPLPPPPPVIKPQTSAVEQERWDEDSFYGLWDTNDEQGLNSEFKSETAAIPSAPVLPPPPVHSSIPPPGPVPMGMPPMSKPPPVQQTVDYGHGRDISTNKVEQIPYGERITLRPDPLPERSTFETEHAGQRDRYDRERDREPYFDRQSNVIADHRDFKRDRETHRDRDRDRGVIDYDRDRFDRERRPRDDRAQSYRDKKDHSSSRRGGFDRPSYDRKSDRPVYEGPSMFGGERRTYPEERMPLPAPSLSHQPPPAPRVEKKPESKNVDDILKPPGRESRPERIVVIMRGLPGSGKTHVAKLIRDKEVEFGGPAPRVLSLDDYFITEVEKEEKDPDSGKKVKKKVMEYEYEAEMEETYRTSMFKTFKKTLDDGFFPFIILDAINDRVRHFDQFWSAAKTKGFEVYLAEMSADNQTCGKRNIHGRKLKEINKMADHWETAPRHMMRLDIRSLLQDAAIEEVEMEDFDANIEEQKEEKKDAEEEESELGYIPKSKWEMDTSEAKLDKLDGLRTGTKRKRDWEAIASRMEDYLQLPDDYDTRASEPGKKRVRWADLEEKKDADRKRAIGFVVGQTDWEKITDESGHLAEKALNRTKYI

SEQ ID NO: 821882 - protein, 1326 aa, Homo sapiens
CSRGSQQHWTRESGPQWKGPKPAFGQQHQQQPKSQAEPLSGNKEPLADTSSNQQKNFKMQSAAFSIAADVKDVKAAQSNENLSDSQQEPPKSEVSEGPVEPSNWDQNVQSMETQIDKAQAVTQPVPLANKPVPAQSTFPSKTGGMEGGTAVATSSLTADNDFKPVGIGLPHSENNQDKGLPRPDNRDNRLEGNRGNSSSYRGPGQSRMEDTRDKGLVNRGRGQAISRGPGLVKQEDFRDKMMGRREDSREKMNRGEGSRDRGLVRPGSSREKVPGGLQGSQDRGAAGSRERGPPRRAGSQERGPLRRAGSRERIPPRRAGSRERGPPRGPGSRERGLGRSDFGRDRGPFRPEPGDGGEKMYPYHRDEPPRAPWNHGEERGHEEFPLDGRNAPMERERLDDWDRERYWRECERDYQDDTLELYNREDRFSAPPSRSHDGDRRGPWWDDWERDQDMDEDYNREMERDMDRDVDRISRPMDMYDRSLDNEWDRDYGRPLDEQESQFRERDIPSLPPLPPLPPLPPLDRYRDDRWREERNREHGYDRDFRDRGELRIREYPERGDTWREKRDYVPDRMDWERERLSDRWYPSDVDRHSPMAEHMPSSHHSSEMMGSDASLDSDQGLGGVMVLSQRQHEIILKAAQELKMLREQKEQLQKMKDFGSEPQMADHLPPQESRLQNTSSRPGMYPPPGSYRPPPPMGKPPGSIVRPSAPPARSSVPVTRPPVPIPPPPPPPPLPPPPPVIKPQTSAVEQERWDEDSFYGLWDTNDEQGLNSEFKSETAAIPSAPVLPPPPVHSSIPPPGPVPMGMPPMSKPPPVQQTVDYGHGRDISTNKVEQIPYGERITLRPDPLPERSTFETEHAGQRDRYDRERDREPYFDRQSNVIADHRDFKRDRETHRDRDRDRGVIDYDRDRFDRERRPRDDRAQSYRDKKDHSSSRRGGFDRPSYDRKSDRPVYEGPSMFGGERRTYPEERMPLPAPSLSHQPPPAPRVEKKPESKNVDDILKPPGRESRPERIVVIMRGLPGSGKTHVAKLIRDKEVEFGGPAPRVLSLDDYFITEVEKEEKDPDSGKKVKKKVMEYEYEAEMEETYRTSMFKTFKKTLDDGFFPFIILDAINDRVRHFDQFWSAAKTKGFEVYLAEMSADNQTCGKRNIHGRKLKEINKMADHWETAPRHMMRLDIRSLLQDAAIEEVEMEDFDANIEEQKEEKKDAEEEESELGYIPKSKWEMDTSEAKLDKLDGLRTGTKRKRDWEAIASRMEDYLQLPDDYDTRASEPGKKRVRWADLEEKKDADRKRAIGFVVGQTDWEKITDESGHLAEKALNRTKYI

SEQ ID NO: 821883 - protein, 1520 aa, Homo sapiens; identical to SEQ ID NO: 821881

SEQ ID NO: 821884 - protein, 1431 aa, Homo sapiens
ATPPPGIPPPGVPQGIPPQLTAAPVPPASSSQSSQVPEKPRPALLPTPVSFGSAPPTTYHPPLQSAGPSEQVNSKAPLSKSALPYSSFSSDQGLGESSAAPSQPITAVKDMPVRSGGLLPDPPRSSYLESPRGPRFDGPRRFEDLGSRCEGPRPKGPRFEGNRPDGPRPRYEGHPAEGTKSKWGMIPRGPASQFYITPSTSLSPRQSGPQWKGPKPAFGQQHQQQPKSQAEPLSGNKEPLADTSSNQQKNFKMQSAAFSIAADVKDVKAAQSNENLSDSQQEPPKSEVSEGPVEPSNWDQNVQSMETQIDKAQAVTQPVPLANKPVPAQSTFPSKTGGMEGGTAVATSSLTADNDFKPVGIGLPHSENNQDKGLPRPDNRDNRLEGNRGNSSSYRGPGQSRMEDTRDKGLVNRGRGQAISRGPGLVKQEDFRDKMMGRREDSREKMNRGEGSRDRGLVRPGSSREKVPGGLQGSQDRGAAGSRERGPPRRAGSQERGPLRRAGSRERIPPRRAGSRERGPPRGPGSRERGLGRSDFGRDRGPFRPEPGDGGEKMYPYHRDEPPRAPWNHGEERGHEEFPLDGRNAPMERERLDDWDRERYWRECERDYQDDTLELYNREDRFSAPPSRSHDGDRRGPWWDDWERDQDMDEDYNREMERDMDRDVDRISRPMDMYDRSLDNEWDRDYGRPLDEQESQFRERDIPSLPPLPPLPPLPPLDRYRDDRWREERNREHGYDRDFRDRGELRIREYPERGDTWREKRDYVPDRMDWERERLSDRWYPSDVDRHSPMAEHMPSSHHSSEMMGSDASLDSDQGLGGVMVLSQRQHEIILKAAQELKMLREQKEQLQKMKDFGSEPQMADHLPPQESRLQNTSSRPGMYPPPGSYRPPPPMGKPPGSIVRPSAPPARSSVPVTRPPVPIPPPPPPPPLPPPPPVIKPQTSAVEQERWDEDSFYGLWDTNDEQGLNSEFKSETAAIPSAPVLPPPPVHSSIPPPGPVPMGMPPMSKPPPVQQTVDYGHGRDISTNKVEQIPYGERITLRPDPLPERSTFETEHAGQRDRYDRERDREPYFDRQSNVIADHRDFKRDRETHRDRDRDRGVIDYDRDRFDRERRPRDDRAQSYRDKKDHSSSRRGGFDRPSYDRKSDRPVYEGPSMFGGERRTYPEERMPLPAPSLSHQPPPAPRVEKKPESKNVDDILKPPGRESRPERIVVIMRGLPGSGKTHVAKLIRDKEVEFGGPAPRVLSLDDYFITEVEKEEKDPDSGKKVKKKVMEYEYEAEMEETYRTSMFKTFKKTLDDGFFPFIILDAINDRVRHFDQFWSAAKTKGFEVYLAEMSADNQTCGKRNIHGRKLKEINKMADHWETAPRHMMRLDIRSLLQDAAIEEVEMEDFDANIEEQKEEKKDAEEEESELVGDRPTTLNSVSLLKFLKKV

SEQ ID NO: 821885 - protein, 1435 aa, Homo sapiens
ATPPPGIPPPGVPQGIPPQLTAAPVPPASSSQSSQVPEKPRPALLPTPVSFGSAPPTTYHPPLQSAGPSEQVNSKAPLSKSALPYSSFSSDQGLGESSAAPSQPITAVKDMPVRSGGLLPDPPRSSYLESPRGPRFDGPRRFEDLGSRCEGPRPKGPRFEGNRPDGPRPRYEGHPAEGTKSKWGMIPRGPASQFYITPSTSLSPRQSGPQWKGPKPAFGQQHQQQPKSQAEPLSGNKEPLADTSSNQQKNFKMQSAAFSIAADVKDVKAAQSNENLSDSQQEPPKSEVSEGPVEPSNWDQNVQSMETQIDKAQAVTQPVPLANKPVPAQSTFPSKTGGMEGGTAVATSSLTADNDFKPVGIGLPHSENNQDKGLPRPDNRDNRLEGNRGNSSSYRGPGQSRMEDTRDKGLVNRGRGQAISRGPGLVKQEDFRDKMMGRREDSREKMNRGEGSRDRGLVRPGSSREKVPGGLQGSQDRGAAGSRERGPPRRAGSQERGPLRRAGSRERIPPRRAGSRERGPPRGPGSRERGLGRSDFGRDRGPFRPEPGDGGEKMYPYHRDEPPRAPWNHGEERGHEEFPLDGRNAPMERERLDDWDRERYWRECERDYQDDTLELYNREDRFSAPPSRSHDGDRRGPWWDDWERDQDMDEDYNREMERDMDRDVDRISRPMDMYDRSLDNEWDRDYGRPLDEQESQFRERDIPSLPPLPPLPPLPPLDRYRDDRWREERNREHGYDRDFRDRGELRIREYPERGDTWREKRDYVPDRMDWERERLSDRWYPSDVDRHSPMAEHMPSSHHSSEMMGSDASLDSDQGLGGVMVLSQRQHEIILKAAQELKMLREQKEQLQKMKDFGSEPQMADHLPPQESRLQNTSSRPGMYPPPGSYRPPPPMGKPPGSIVRPSAPPARSSVPVTRPPVPIPPPPPPPPLPPPPPVIKPQTSAVEQERWDEDSFYGLWDTNDEQGLNSEFKSETAAIPSAPVLPPPPVHSSIPPPGPVPMGMPPMSKPPPVQQTVDYGHGRDISTNKVEQIPYGERITLRPDPLPERSTFETEHAGQRDRYDRERDREPYFDRQSNVIADHRDFKRDRETHRDRDRDRGVIDYDRDRFDRERRPRDDRAQSYRDKKDHSSSRRGGFDRPSYDRKSDRPVYEGPSMFGGERRTYPEERMPLPAPSLSHQPPPAPRVEKKPESKNVDDILKPPGRESRPERIVVIMRGLPGSGKTHVAKLIRDKEVEFGGPAPRVLSLDDYFITEVEKEEKDPDSGKKVKKKVMEYEYEAEMEETYRTSMFKTFKKTLDDGFFPFIILDAINDRVRHFDQFWSAAKTKGFEVYLAEMSADNQTCGKRNIHGRKLKEINKMADHWETAPRHMMRLDIRSLLQDAAIEEVEMEDFDANIEEQKEEKKDAEEEESELGYIPKSKWEMDTSEAKLVCHVEEV

SEQ ID NO: 821886 - protein, 434 aa, Homo sapiens
ATPPPGIPPPGVPQGIPPQLTAAPVPPASSSQSSQVPEKPRPALLPTPVSFGSAPPTTYHPPLQSAGPSEQVNSKAPLSKSALPYSSFSSDQGLGESSAAPSQPITAVKDMPVRSGGLLPDPPRSSYLESPRGPRFDGPRRFEDLGSRCEGPRPKGPRFEGNRPDGPRPRYEGHPAEGTKSKWGMIPRGPASQFYITPSTSLSPRQSGPQWKGPKPAFGQQHQQQPKSQAEPLSGNKEPLADTSSNQQKNFKMQSAAFSIAADVKDVKAAQSNENLSDSQQEPPKSEVSEGPVEPSNWDQNVQSMETQIDKAQAVTQPVPLANKPVPAQSTFPSKTGGMEGGTAVATSSLTADNDFKPVGIGLPHSENNQDKGLPRPDNRDNRLEGNRGNSSSYRGPGQSRMEDTRDKGLVNRGRGQAISRVQCCWDPLDTSRH

SEQ ID NO: 821887 - protein, 950 aa, Homo sapiens
ATPPPGIPPPGVPQGIPPQLTAAPVPPASSSQSSQVPEKPRPALLPTPVSFGSAPPTTYHPPLQSAGPSEQVNSKAPLSKSALPYSSFSSDQGLGESSAAPSQPITAVKDMPVRSGGLLPDPPRSSYLESPRGPRFDGPRRFEDLGSRCEGPRPKGPRFEGNRPDGPRPRYEGHPAEGTKSKWGMIPRGPASQFYITPSTSLSPRQSGPQWKGPKPAFGQQHQQQPKSQAEPLSGNKEPLADTSSNQQKNFKMQSAAFSIAADVKDVKAAQSNENLSDSQQEPPKSEVSEGPVEPSNWDQNVQSMETQIDKAQAVTQPVPLANKPVPAQSTFPSKTGGMEGGTAVATSSLTADNDFKPVGIGLPHSENNQDKGLPRPDNRDNRLEGNRGNSSSYRGPGQSRMEDTRDKGLVNRGRGQAISRGPGLVKQEDFRDKMMGRREDSREKMNRGEGSRDRGLVRPGSSREKVPGGLQGSQDRGAAGSRERGPPRRAGSQERGPLRRAGSRERIPPRRAGSRERGPPRGPGSRERGLGRSDFGRDRGPFRPEPGDGGEKMYPYHRDEPPRAPWNHGEERGHEEFPLDGRNAPMERERLDDWDRERYWRECERDYQDDTLELYNREDRFSAPPSRSHDGDRRGPWWDDWERDQDMDEDYNREMERDMDRDVDRISRPMDMYDRSLDNEWDRDYGRPLDEQESQFRERDIPSLPPLPPLPPLPPLDRYRDDRWREERNREHGYDRDFRDRGELRIREYPERGDTWREKRDYVPDRMDWERERLSDRWYPSDVDRHSPMAEHMPSSHHSSEMMGSDASLDSDQGLGGVMVLSQRQHEIILKAAQELKMLREQKEQLQKMKDFGSEPQMADHLPPQESRLQNTSSRPGMYPPPGSYRPPPPMGKPPGSIVRPSAPPAEFLKPSDSFSAGEPRVLGLAMVPGHHIVSIEVQRESLTGPPYL

SEQ ID NO: 821888 - protein, 905 aa, Homo sapiens
ATPPPGIPPPGVPQGIPPQLTAAPVPPASSSQSSQVPEKPRPALLPTPVSFGSAPPTTYHPPLQSAGPSEQVNSKAPLSKSALPYSSFSSDQGLGESSAAPSQPITAVKDMPVRSGGLLPDPPRSSYLESPRGPRFDGPRRFEDLGSRCEGPRPKGPRFEGNRPDGPRPRYEGHPAEGTKSKWGMIPRGPASQFYITPSTSLSPRQSGPQWKGPKPAFGQQHQQQPKSQAEPLSGNKEPLADTSSNQQKNFKMQSAAFSIAADVKDVKAAQSNENLSDSQQEPPKSEVSEGPVEPSNWDQNVQSMETQIDKAQAVTQPVPLANKPVPAQSTFPSKTGGMEGGTAVATSSLTADNDFKPVGIGLPHSENNQDKGLPRPDNRDNRLEGNRGNSSSYRGPGQSRMEDTRDKGLVNRGRGQAISRGPGLVKQEDFRDKMMGRREDSREKMNRGEGSRDRGLVRPGSSREKVPGGLQGSQDRGAAGSRERGPPRRAGSQERGPLRRAGSRERIPPRRAGSRERGPPRGPGSRERGLGRSDFGRDRGPFRPEPGDGGEKMYPYHRDEPPRAPWNHGEERGHEEFPLDGRNAPMERERLDDWDRERYWRECERDYQDDTLELYNREDRFSAPPSRSHDGDRRGPWWDDWERDQDMDEDYNREMERDMDRDVDRISRPMDMYDRSLDNEWDRDYGRPLDEQESQFRERDIPSLPPLPPLPPLPPLDRYRDDRWREERNREHGYDRDFRDRGELRIREYPERGDTWREKRDYVPDRMDWERERLSDRWYPSDVDRHSPMAEHMPSSHHSSEMMGSDASLDSDQGLGGVMVLSQRQHEIILKAAQELKMLREQKEQLQKMKDFGSEPQMADHLPPQESRLQNTSSRPGMYPVWENVCSENEMVSTLYVSMLFDFF

SEQ ID NO: 821889 - protein, 814 aa, Homo sapiens
ATPPPGIPPPGVPQGIPPQLTAAPVPPASSSQSSQVPEKPRPALLPTPVSFGSAPPTTYHPPLQSAGPSEQVNSKAPLSKSALPYSSFSSDQGLGESSAAPSQPITAVKDMPVRSGGLLPDPPRSSYLESPRGPREQKEQLQKMKDFGSEPQMADHLPPQESRLQNTSSRPGMYPPPGSYRPPPPMGKPPGSIVRPSAPPARSSVPVTRPPVPIPPPPPPPPLPPPPPVIKPQTSAVEQERWDEDSFYGLWDTNDEQGLNSEFKSETAAIPSAPVLPPPPVHSSIPPPGPVPMGMPPMSKPPPVQQTVDYGHGRDISTNKVEQIPYGERITLRPDPLPERSTFETEHAGQRDRYDRERDREPYFDRQSNVIADHRDFKRDRETHRDRDRDRGVIDYDRDRFDRERRPRDDRAQSYRDKKDHSSSRRGGFDRPSYDRKSDRPVYEGPSMFGGERRTYPEERMPLPAPSLSHQPPPAPRVEKKPESKNVDDILKPPGRESRPERIVVIMRGLPGSGKTHVAKLIRDKEVEFGGPAPRVLSLDDYFITEVEKEEKDPDSGKKVKKKVMEYEYEAEMEETYRTSMFKTFKKTLDDGFFPFIILDAINDRVRHFDQFWSAAKTKGFEVYLAEMSADNQTCGKRNIHGRKLKEINKMADHWETAPRHMMRLDIRSLLQDAAIEEVEMEDFDANIEEQKEEKKDAEEEESELGYIPKSKWEMDTSEAKLDKLDGLRTGTKRKRDWEAIASRMEDYLQLPDDYDTRASEPGKKRVRWADLEEKKDADRKRAIGFVVGQTDWEKITDESGHLAEKALNRTKYI

SEQ ID NO: 821890 - protein, 671 aa, Homo sapiens
MKDFGSEPQMADHLPPQESRLQNTSSRPGMYPPPGSYRPPPPMGKPPGSIVRPSAPPARSSVPVTRPPVPIPPPPPPPPLPPPPPVIKPQTSAVEQERWDEDSFYGLWDTNDEQGLNSEFKSETAAIPSAPVLPPPPVHSSIPPPGPVPMGMPPMSKPPPVQQTVDYGHGRDISTNKVEQIPYGERITLRPDPLPERSTFETEHAGQRDRYDRERDREPYFDRQSNVIADHRDFKRDRETHRDRDRDRGVIDYDRDRFDRERRPRDDRAQSYRDKKDHSSSRRGGFDRPSYDRKSDRPVYEGPSMFGGERRTYPEERMPLPAPSLSHQPPPAPRVEKKPESKNVDDILKPPGRESRPERIVVIMRGLPGSGKTHVAKLIRDKEVEFGGPAPRVLSLDDYFITEVEKEEKDPDSGKKVKKKVMEYEYEAEMEETYRTSMFKTFKKTLDDGFFPFIILDAINDRVRHFDQFWSAAKTKGFEVYLAEMSADNQTCGKRNIHGRKLKEINKMADHWETAPRHMMRLDIRSLLQDAAIEEVEMEDFDANIEEQKEEKKDAEEEESELGYIPKSKWEMDTSEAKLDKLDGLRTGTKRKRDWEAIASRMEDYLQLPDDYDTRASEPGKKRVRWADLEEKKDADRKRAIGFVVGQTDWEKITDESGHLAEKALNRTKYI

SEQ ID NO: 821891 - protein, 260 aa, Homo sapiens
CSRGSQQHWTRESGPQWKGPKPAFGQQHQQQPKSQAEPLSGNKEPLADTSSNQQKNFKMQSAAFSIAADVKDVKAAQSNENLSDSQQEPPKSEVSEGPVEPSNWDQNVQSMETQIDKAQAVTQPVPLANKPVPAQSTFPSKTGGMEGGTAVATSSLTADNDFKPVGIGLPHSENNQDKGLPRPDNRDNRLEGNRGNSSSYRGPGQSRMEDHLALSPDCFQASPTLCPGYLLLCSSSLDYLLFYPSSYPESLLASPILGLD

SEQ ID NO: 821892 - protein, 338 aa, Homo sapiens
ATPPPGIPPPGVPQGIPPQLTAAPVPPASSSQSSQVPEKPRPALLPTPVSFGSAPPTTYHPPLQSAGPSEQVNSKAPLSKSALPYSSFSSDQGLGESSAAPSQPITAVKDMPVRSGGLLPDPPRSSYLESPRGPRFDGPRRFEDLGSRCEGPRPKGPRFEGNRPDGPRPRYEGHPAEGTKSKWGMIPRGPASQFYITPSTSLSPRQSGPQWKGPKPAFGQQHQQQPKSQAEPLSGNKEPLADTSSNQQKNFKMQSAAFSIAADVKDVKAAQSNENLSDSQQEPPKSEVSEGPVEPSNWDQNVQSMETQIDKAQAVTQPVPLANKPVPAQSTFPRTAVR

SEQ ID NO: 821893 - protein, 107 aa, Homo sapiens
YDRDFRDRGELRIREYPERGDTWREKRDYVPDRMDWERERLSDRWYPSDVDRHSPMAEHMPSSHHSSEMMGSDASLDSDQGLGGVMVLSQRQHEIILKAAQELKMLR

SEQ ID NO: 821894 - protein, 232 aa, Homo sapiens
GVRYTRKCLQGEEAGGLTAMGRNKKKKRDGDDRRPRLVLSFDEEKRREYLTGFHKRKVERKKAAIEEIKQRLKEEQRKLREERHQEYLKMLAEREEALEEADELDRLVTAKTESVQYDHPNHTVTVTTISDLDLSGARLLGLTPPEGGAGDRSEEEASSTEKPTKALPRKSRDPLLSQRISSLTASLHAHSRKKVKRKHPRRAQDSKKPPRAPRTSKAQRRRLTGKARHSGE

SEQ ID NO: 821895 - protein, 232 aa, Homo sapiens; identical to SEQ ID NO: 821894

SEQ ID NO: 821896 - protein, 232 aa, Homo sapiens; identical to SEQ ID NO: 821894

SEQ ID NO: 821897 - protein, 232 aa, Homo sapiens; identical to SEQ ID NO: 821894

SEQ ID NO: 821898 - protein, 232 aa, Homo sapiens; identical to SEQ ID NO: 821894

SEQ ID NO: 821899 - protein, 232 aa, Homo sapiens; identical to SEQ ID NO: 821894

SEQ ID NO: 821900 - protein, 187 aa, Homo sapiens [sequence omitted]

SEQ ID NO: 821901 - protein, 143 aa, Homo sapiens [sequence omitted]

SEQ ID NO: 821902 - protein, 247 aa, Homo sapiens
PETASEAWLQMECPLLDIGEHVPQAALPCPQFTHIDSPPTLADTHRTLGLGPQPGRGKSWGREYLTGFHKRKVERKKAAIEEIKQRLKEEQRKLREERHQEYLKMLAEREEALEEADELDRLVTAKTESVQYDHPNHTVTVTTISDLDLSGARLLGLTPPEGGAGDRSEEEASSTEKPTKALPRKSRDPLLSQRISSLTASLHAHSRKKVKRKHPRRAQDSKKPPRAPRTSKAQRRRLTGKARHSGE

SEQ ID NO: 821903 - protein, 202 aa, Homo sapiens [sequence omitted]

SEQ ID NO: 821904 - protein, 175 aa, Homo sapiens
AACDLEEPVSFQQRLKEEQRKLREERHQEYLKMLAEREEALEEADELDRLVTAKTESVQYDHPNHTVTVTTISDLDLSGARLLGLTPPEGGAGDRSEEEASSTEKPTKALPRKSRDPLLSQRISSLTASLHAHSRKKVKRKHPRRAQDSKKPPRAPRTSKAQRRRLTGKARHSGE

SEQ ID NO: 821905 - protein, 232 aa, Homo sapiens; identical to SEQ ID NO: 821894

SEQ ID NO: 821906 - protein, 232 aa, Homo sapiens; identical to SEQ ID NO: 821894

SEQ ID NO: 821907 - protein, 103 aa, Homo sapiens
HFSSGVAWGAAAWVARWGGAGDRSEEEASSTEKPTKALPRKSRDPLLSQRISSLTASLHAHSRKKVKRKHPRRAQDSKKPPRAPRTSKAQRRRLTGKARHSGE

SEQ ID NO: 821908 - protein, 232 aa, Homo sapiens; identical to SEQ ID NO: 821894

SEQ ID NO: 821909 - protein, 232 aa, Homo sapiens; identical to SEQ ID NO: 821894

SEQ ID NO: 821910 - protein, 248 aa, Homo sapiens
GVRYTRKCLQGEEAGGLTAMGRNKKKKRDGDDRRPRLVLSFDEEKRREYLTGFHKRKVERKKAAIEEIKQRLKEEQRKLREERHQEYLKMLAEREEALEEADELDRLVTAKTESVQYDHPNHTVTVTTISDLDLSGARLLGLTPPEGGAGDRSEEEASSTEKPTKALPRKSRDPLLSQRISSLTASLHAHSRKKVKRKHPRRAQDSKKPPRAPRTSKAQRLCLCVGGGVWWVVWCVGGCVCVVWWWGG

SEQ ID NO: 821911 - protein, 224 aa, Homo sapiens
MAPPAAPGRDRVGREDEDGWETRGDRKARKPLVEKKRRARINESLQELRLLLAGAEVQAKLENAEVLELTVRRVQGVLRGRAREREQLQAEASERFAAGYIQCMHEVHTFVSTCQAIDATVAAELLNHLLESMPLREGSSFQDLLGDALAGPPRAPGRSGWPAGGAPGSPIPSPPGPGDDLCSDLEEAPEAELSQAPAEGPDLVPAALGSLTTAQIARSVWRPW

SEQ ID NO: 821912 - protein, 224 aa, Homo sapiens; identical to SEQ ID NO: 821911

SEQ ID NO: 821913 - protein, 224 aa, Homo sapiens; identical to SEQ ID NO: 821911

SEQ ID NO: 821914 - protein, 121 aa, Homo sapiens
MHEVHTFVSTCQAIDATVAAELLNHLLESMPLREGSSFQDLLGDALAGPPRAPGRSGWPAGGAPGSPIPSPPGPGDDLCSDLEEAPEAELSQAPAEGPDLVPAALGSLTTAQIARSVWRPW

SEQ ID NO: 821915 - protein, 195 aa, Homo sapiens
MAPPAAPGRDRVGREDEDGWETRGDRKVQAKLENAEVLELTVRRVQGVLRGRAREREQLQAEASERFAAGYIQCMHEVHTFVSTCQAIDATVAAELLNHLLESMPLREGSSFQDLLGDALAGPPRAPGRSGWPAGGAPGSPIPSPPGPGDDLCSDLEEAPEAELSQAPAEGPDLVPAALGSLTTAQIARSVWRPW

SEQ ID NO: 821916 - protein, 228 aa, Homo sapiens
MDSVKPAAVNDGSTITLPVPAAPSPCRVPGGAGMAPPAAPGRDRVGREDEDGWETRGDRKVQAKLENAEVLELTVRRVQGVLRGRAREREQLQAEASERFAAGYIQCMHEVHTFVSTCQAIDATVAAELLNHLLESMPLREGSSFQDLLGDALAGPPRAPGRSGWPAGGAPGSPIPSPPGPGDDLCSDLEEAPEAELSQAPAEGPDLVPAALGSLTTAQIARSVWRPW

SEQ ID NO: 821917 - protein, 250 aa, Homo sapiens
MAPPAAPGRDRVGREDEDGWETRGDRKVRAGAMGEQSGREAVRGWDSVPRSPQARKPLVEKKRRARINESLQELRLLLAGAEVQAKLENAEVLELTVRRVQGVLRGRAREREQLQAEASERFAAGYIQCMHEVHTFVSTCQAIDATVAAELLNHLLESMPLREGSSFQDLLGDALAGPPRAPGRSGWPAGGAPGSPIPSPPGPGDDLCSDLEEAPEAELSQAPAEGPDLVPAALGSLTTAQIARSVWRPW

SEQ ID NO: 821918 - protein, 121 aa, Homo sapiens; identical to SEQ ID NO: 821914

SEQ ID NO: 821919 - protein, 121 aa, Homo sapiens; identical to SEQ ID NO: 821914

SEQ ID NO: 821920 - protein, 121 aa, Homo sapiens; identical to SEQ ID NO: 821914

SEQ ID NO: 821921 - protein, 186 aa, Homo sapiens
MAPPAAPGRDRVSWVSRVPAGRVGWATQSPLTARDAALSLPPSGPEREQLQAEASERFAAGYIQCMHEVHTFVSTCQAIDATVAAELLNHLLESMPLREGSSFQDLLGDALAGPPRAPGRSGWPAGGAPGSPIPSPPGPGDDLCSDLEEAPEAELSQAPAEGPDLVPAALGSLTTAQIARSVWRPW

SEQ ID NO: 821922 - protein, 121 aa, Homo sapiens; identical to SEQ ID NO: 821914

SEQ ID NO: 821923 - protein, 214 aa, Homo sapiens
MAPPAAPGRDRVGREDEDGWETRGDRKARKPLVEKKRRARINESLQELRLLLAGAEVQAKLENAEVLELTVRRVQGVLRGRARGEWRRGGRGRRPRAPVTPARRRTSLPAPLSCRRRGLPPEQGAPPRLLGEPRPRGPGGLGHAVAAHRAGRGSLPPTLGPRARAAAGGSERALRCRLHPVHARGAHVRVHVPGHRRYRRCRAPEPSARVHAAA

SEQ ID NO: 821924 - protein, 112 aa, Homo sapiens
MAPPAAPGRDRVGREDEDGWETRGDRKVQAKLENAEVLELTVRRVQGVLRGRAREREQLQAEASERFAAGYIQCMHEVHTFVSTCQAIDATVAAELLNHLLESMPLREGSPW

SEQ ID NO: 821925 - protein, 106 aa, Homo sapiens
MAPPAAPGRDRVGREDEDGWETRGDRKARKPLVEKKRRARINESLQELRLLLAGAEVQAKLENAEVLELRRKNFVELPALSQVHPPRLHQPCAGSGGRGGRNGAGH

SEQ ID NO: 821926 - protein, 248 aa, Homo sapiens
ASDERPIFQHAQEKIYIKVDVFFKWVFALLFSFLPNQAPPGLYTKTQDPAKAPNTPDILEIEFKKGVPVKVTNVKDGTTHQTSLELFMYLNEVAGKHGVGRIDIVENRFIGMKSRGIYETPAGTILYHAHLDIEAFTMDREVRKIKQGLGLKFAELVYTGFWHSPECEFVRHCIAKSQERVEGKVQVSVLKGQVYILGRESPLSLYNEELVSMNVQGDYEPTDATGFININSLRLKEYHRLQSKVTAK

SEQ ID NO: 821927 - protein, 412 aa, Homo sapiens
MSSKGSVVLAYSGGLDTSCILVWLKEQGYDVIAYLANIGQKEDFEEARKKALKLGAKKVFIEDVSREFVEEFIWPAIQSSALYEDRYLLGTSLARPCIARKQVEIAQREGAKYVSHGATGKGNDQVRFELSCYSLAPQIKVIAPWRMPEFYNRFKGRNDLMEYAKQHGIPIPVTPKNPWSMDENLMHISYEAGILENPKNQAPPGLYTKTQDPAKAPNTPDILEIEFKKGVPVKVTNVKDGTTHQTSLELFMYLNEVAGKHGVGRIDIVENRFIGMKSRGIYETPAGTILYHAHLDIEAFTMDREVRKIKQGLGLKFAELVYTGFWHSPECEFVRHCIAKSQERVEGKVQVSVLKGQVYILGRESPLSLYNEELVSMNVQGDYEPTDATGFININSLRLKEYHRLQSKVTAK

SEQ ID NO: 821928 - protein, 195 aa, Homo sapiens
GPRGPLPSLPTLGVPVKVTNVKDGTTHQTSLELFMYLNEVAGKHGVGRIDIVENRFIGMKSRGIYETPAGTILYHAHLDIEAFTMDREVRKIKQGLGLKFAELVYTGFWHSPECEFVRHCIAKSQERVEGKVQVSVLKGQVYILGRESPLSLYNEELVSMNVQGDYEPTDATGFININSLRLKEYHRLQSKVTAK

SEQ ID NO: 821929 - protein, 324 aa, Homo sapiens
MSSKGSVVLAYSGGLDTSCILVWLKEQGYDVIAYLANIGQKEDFEEARKKALKLGAKKVFIEDVSREFVEEFIWPAIQSSALYEDRYLLGTSLARPCIARKQVEIAQREGAKYVSHGATGKGNDQVRFELSCYSLAPQIKVIAPWRMPEFYNRFKGRNDLMEYAKQHGIPIPVTPKNPWSMDENLMHISYEAGILENPKNQAPPGLYTKTQDPAKAPNTPDILEIEFKKGVPVKVTNVKDGTTHQTSLELFMYLNEVAGKHGVAVLTRGNVHWMKSGVLETRAFLPALDGAPGRGATQAGNGRVGWALFSVPRGGVRDRPQGGG

SEQ ID NO: 821930 - protein, 324 aa, Homo sapiens
VPGQIHTQGCARNRYTPARFWHSPECEFVRHCIAKSQERVEGKVQVSVLKGQVYILGRESQLLIVERQPAPWLVGKNKRLTKGGKKGAKKKVVDPFSKKDWYDVKAPAMFNIRNIGKTLVTRTQGTKIASDGLKGRVFEVSLADLQNDEVAFRKFKLITEDVQGKNCLTNFHGMDLTRDKMCSMVKKWQTMIEAHVDVKTTDGYLLRLFCVGFTKKGNNQIRKTSYAQHQQVRKIRKKMMAIMTREVQTNDLKKWSIMIRPAWEDKKGGIYIFRRFVKVNAGSQLMGTWLGEGIAPGHRSDVVNPHCPGTLGNKRSAEKGPGLE

SEQ ID NO: 821931 - protein, 412 aa, Homo sapiens; identical to SEQ ID NO: 821927

SEQ ID NO: 821932 - protein, 412 aa, Homo sapiens; identical to SEQ ID NO: 821927

SEQ ID NO: 821933 - protein, 412 aa, Homo sapiens; identical to SEQ ID NO: 821927

SEQ ID NO: 821934 - protein, 412 aa, Homo sapiens; identical to SEQ ID NO: 821927

SEQ ID NO: 821935 - protein, 412 aa, Homo sapiens; identical to SEQ ID NO: 821927

SEQ ID NO: 821936 - protein, 412 aa, Homo sapiens; identical to SEQ ID NO: 821927

SEQ ID NO: 821937 - protein, 412 aa, Homo sapiens; identical to SEQ ID NO: 821927

SEQ ID NO: 821938 - protein, 412 aa, Homo sapiens; identical to SEQ ID NO: 821927

SEQ ID NO: 821939 - protein, 452 aa, Homo sapiens
MGTPASPALPPATAARARVVHCTVKTDSRRRELTPPIPDAMSSKGSVVLAYSGGLDTSCILVWLKEQGYDVIAYLANIGQKEDFEEARKKALKLGAKKVFIEDVSREFVEEFIWPAIQSSALYEDRYLLGTSLARPCIARKQVEIAQREGAKYVSHGATGKGNDQVRFELSCYSLAPQIKVIAPWRMPEFYNRFKGRNDLMEYAKQHGIPIPVTPKNPWSMDENLMHISYEAGILENPKNQAPPGLYTKTQDPAKAPNTPDILEIEFKKGVPVKVTNVKDGTTHQTSLELFMYLNEVAGKHGVGRIDIVENRFIGMKSRGIYETPAGTILYHAHLDIEAFTMDREVRKIKQGLGLKFAELVYTGFWHSPECEFVRHCIAKSQERVEGKVQVSVLKGQVYILGRESPLSLYNEELVSMNVQGDYEPTDATGFININSLRLKEYHRLQSKVTAK

SEQ ID NO: 821940 - protein, 412 aa, Homo sapiens; identical to SEQ ID NO: 821927

SEQ ID NO: 821941 - protein, 412 aa, Homo sapiens; identical to SEQ ID NO: 821927

SEQ ID NO: 821942 - protein, 412 aa, Homo sapiens; identical to SEQ ID NO: 821927

SEQ ID NO: 821943 - protein, 488 aa, Homo sapiens [sequence omitted]

SEQ ID NO: 821944 - protein, 484 aa, Homo sapiens
MDHGTKLFSDLRFQSDVRRGPWCLVTLGVGHTYRARGLAGIASAMTYHRRVVHCTVKTDSRRRELTPPIPDAMSSKGSVVLAYSGGLDTSCILVWLKEQGYDVIAYLANIGQKEDFEEARKKALKLGAKKVFIEDVSREFVEEFIWPAIQSSALYEDRYLLGTSLARPCIARKQVEIAQREGAKYVSHGATGKGNDQVRFELSCYSLAPQIKVIAPWRMPEFYNRFKGRNDLMEYAKQHGIPIPVTPKNPWSMDENLMHISYEAGILENPKNQAPPGLYTKTQDPAKAPNTPDILEIEFKKGVPVKVTNVKDGTTHQTSLELFMYLNEVAGKHGVGRIDIVENRFIGMKSRGIYETPAGTILYHAHLDIEAFTMDREVRKIKQGLGLKFAELVYTGFWHSPECEFVRHCIAKSQERVEGKVQVSVLKGQVYILGRESPLSLYNEELVSMNVQGDYEPTDATGFININSLRLKEYHRLQSKVTAK

SEQ ID NO: 821945 - protein, 438 aa, Homo sapiens
TRRGLGPRQEGRGSRCSNAWHRIPDAMSSKGSVVLAYSGGLDTSCILVWLKEQGYDVIAYLANIGQKEDFEEARKKALKLGAKKVFIEDVSREFVEEFIWPAIQSSALYEDRYLLGTSLARPCIARKQVEIAQREGAKYVSHGATGKGNDQVRFELSCYSLAPQIKVIAPWRMPEFYNRFKGRNDLMEYAKQHGIPIPVTPKNPWSMDENLMHISYEAGILENPKNQAPPGLYTKTQDPAKAPNTPDILEIEFKKGVPVKVTNVKDGTTHQTSLELFMYLNEVAGKHGVGRIDIVENRFIGMKSRGIYETPAGTILYHAHLDIEAFTMDREVRKIKQGLGLKFAELVYTGFWHSPECEFVRHCIAKSQERVEGKVQVSVLKGQVYILGRESPLSLYNEELVSMNVQGDYEPTDATGFININSLRLKEYHRLQSKVTAK

SEQ ID NO: 821946 - protein, 311 aa, Homo sapiens
MSSKGSVVLAYSGGLDTSCILVWLKEQGYDVIAYLANIGQKEDFEEARKKALKLGAKKVFIEDVSREFVEEFIWPAIQSSALYEDRYLLGTSLARPCIARKQVEIAQREGAKYVSHGATGKGNDQVRFELSCYSLAPQIKVIAPWRMPEFYNRFKGRNDLMEYAKQHGIPIPVTPKNPWSMDENLMHISYEAGILENPKNQAPPGLYTKTQDPAKAPNTPDILEIEFKKGVPVKVTNVKDGTTHQTSLELFMYLNEVAGKHGVGRIDIVENRFIGMKSRGIYETPAGTILYHAHLDIEAFTMDREVFLAQP

SEQ ID NO: 821947 - protein, 400 aa, Homo sapiens
MSSKGSVVLAYSGGLDTSCILVWLKEQGYDVIAYLANIGQKEDFEEARKKALKLGAKKVFIEDVSREFVEEFIWPAIQSSALYEDRYLLGTSLARPCIARKQVEIAQREGAKYVSHGATGKGNDQVRFELSCYSLAPQIKVIAPWRMPEFYNRFKGRNDLMEYAKQHGIPIPVTPKNPWSMDENLMHISYEAGILENPKNQAPPGLYTKTQDPAKAPNTPDILEIEFKKGVPVKVTNVKDGTTHQTSLELFMYLNEVAGKHGVGRIDIVENRFIGMKSRGIYETPAGTILYHAHLDIEAFTMDREVRKIKQGLGLKFAELVYTGFWHSPECEFVRHCIAKSQERVEGKVQVSVLKGQVYILGRESPLSLYNEELVSMNVLGDNITDLSPNTEIFNAGLVV

SEQ ID NO: 821948 - protein, 445 aa, Homo sapiens
MSSKGSVVLAYSGGLDTSCILVWLKEQGYDVIAYLANIGQKEDFEEARKKALKLGAKKVFIEDVSREFVEEFIWPAIQSSALYEDRYLLGTSLARPCIARKQVEIAQREGAKYVSHGATGKGNDQVRFELSCYSLAPQIKVIAPWRMPEFYNRFKGRNDLMEYAKQHGIPIPVTPKNPWSMDENLMHISYEAGILENPKNQAPPGLYTKTQDPAKAPNTPDILEIEFKKGVPVKVTNVKDGTTHQTSLELFMYLNEVACVSAALSGLLGTAVSGEHEPGPLQLMVVAEAQGGKHGVGRIDIVENRFIGMKSRGIYETPAGTILYHAHLDIEAFTMDREVRKIKQGLGLKFAELVYTGFWHSPECEFVRHCIAKSQERVEGKVQVSVLKGQVYILGRESPLSLYNEELVSMNVQGDYEPTDATGFININSLRLKEYHRLQSKVTAK

SEQ ID NO: 821949 - protein, 315 aa, Homo sapiens
MSSKGSVVLAYSGGLDTSCILVWLKEQGYDVIAYLANIGQKEDFEEARKKALKLGAKKVFIEDVSREFVEEFIWPAIQSSALYEDRYLLGTSLARPCIARKQVEIAQREGAKYVSHGATGKGNDQVRFELSCYSLAPQIKVIAPWRMPEFYNRFKGRNDLMEYAKQHGIPIPVTPKNPWSMDENLMHISYEAGILENPKNQAPPGLYTKTQDPAKAPNTPDILEIEFKKGVPVKVTNVKDGTTHQTSLELFMYLNEVAGKHGVGRIDIVENRFIGMKSRGIYETPAGTILYHAHLDIEAFTMDREVHCLSTMRSW

SEQ ID NO: 821950 - protein, 410 aa, Homo sapiens
MSSKGSVVLAYSGGLDTSCILVWLKEQGYDVIAYLANIGQKEDFEEARKKALKLGAKKVFIEDVSREFVEEFIWPAIQSSALYEDRYLLGTSLARPCIARKQVEIAQREGAKYVSHGATGKGNDQVRFELSCYSLAPQIKVIAPWRMPEFYNRFKGRNDLMEYAKQHGIPIPVTPKNPWSMDENLMHISYEAGILENPKNQAPPGLYTKTQDPAKAPNTPDILEIEFKKGVPVKVTNVKDGTTHQTSLELFMYLNEVAGKHGVGRIDIVENRFIGMKSRGIYETPAGTILYHAHLDIEAFTMDREVRKIKQGLGLKFAELVYTVLATALSVKADVFMYLNEVAGKHGVAVLTRGNLFRSELKVPEVSTRTREGTSFTHAHVDIEAFTMDRGTCAKIRQGLGSKLRELVYT

SEQ ID NO: 821951 - protein, 315 aa, Homo sapiens; identical to SEQ ID NO: 821949

SEQ ID NO: 821952 - protein, 266 aa, Homo sapiens [sequence omitted]

SEQ ID NO: 821953 - protein, 237 aa, Homo sapiens
MSSKGSVVLAYSGGLDTSCILVWLKEQGYDVIAYLANIGQKEDFEEARKKALKLGAKKVFIEDVSREFVEEFIWPAIQSSALYEDRYLLGTSLARPCIARKQVEIAQREGAKYVSHGATGKGNDQVRFELSCYSLAPQIKVIAPWRMPEFYNRFKGRNDLMEYAKQHGIPIPVTPKNPWSMDENLMHISYEAGILENPKNQAPPGLYTKTQDPAKAPNTPDILEIEFKKAPWSSSCT

SEQ ID NO: 821954 - protein, 422 aa, Homo sapiens
MSSKGSVVLAYSGGLDTSCILVWLKEQGYDVIAYLANIGQKEDFEEARKKALKLGAKKVFIEDVSREFVEEFIWPAIQSSALYEDRYLLGTSLARPCIARKQVEIAQREGAKYVSHGATGKGNDQVRFELSCYSLAPQIKVIAPWRMPEFYNRFKGRNDLMEYAKQHGIPIPVTPKNPWSMDENLMHISCPCLSFPLRSYEAGILENPKNQAPPGLYTKTQDPAKAPNTPDILEIEFKKGVPVKVTNVKDGTTHQTSLELFMYLNEVAGKHGVGRIDIVENRFIGMKSRGIYETPAGTILYHAHLDIEAFTMDREVRKIKQGLGLKFAELVYTGFWHSPECEFVRHCIAKSQERVEGKVQVSVLKGQVYILGRESPLSLYNEELVSMNVQGDYEPTDATGFININSLRLKEYHRLQSKVTAK

SEQ ID NO: 821955 - protein, 246 aa, Homo sapiens
MDRGEGCRSPREVGCRVSRDWYVICPPLSVFFQNQAPPGLYTKTQDPAKAPNTPDILEIEFKKGVPVKVTNVKDGTTHQTSLELFMYLNEVAGKHGVGRIDIVENRFIGMKSRGIYETPAGTILYHAHLDIEAFTMDREVRKIKQGLGLKFAELVYTGFWHSPECEFVRHCIAKSQERVEGKVQVSVLKGQVYILGRESPLSLYNEELVSMNVQGDYEPTDATGFININSLRLKEYHRLQSKVTAK

SEQ ID NO: 821956 - protein, 326 aa, Homo sapiens
MSSKGSVVLAYSGGLDTSCILVWLKEQGYDVIAYLANIGQKEDFEEARKKALKLGAKKVFIEDVSREFVEEFIWPAIQSSALYEDRYLLGTSLARPCIARKQVEIAQREGAKYVSHGATGKGNDQVRFELSCYSLAPQIKVIAPWRMPEFYNRFKGRNDLMEYAKQHGIPIPVTPKNPWSMDENLMHISYEAGILENPKNQAPPGLYTKTQDPAKAPNTPDILEIEFKKGVPVKVTNVKDGTTHQTSLELFMYLNEVAGKHGVAVLTRGNGPLDEVRGFSRPEAFLPALDGAPGRGATQAGNGRVPVGPCFPSRRGGVRDRPQGGG

SEQ ID NO: 821957 - protein, 161 aa, Homo sapiens [sequence omitted]

SEQ ID NO: 821958 - protein, 310 aa, Homo sapiens
MSSKGSVVLAYSGGLDTSCILVWLKEQGYDVIAYLANIGQKEDFEEARKKALKLGAKKVFIEDVSREFVEEFIWPAIQSSALYEDRYLLGTSLARPCIARKQVEIAQREGAKYVSHGATGKGNDQVRFELSCYSLAPQIKVIAPWRMPEFYNRFKGRNDLMEYAKQHGIPIPVTPKNPWSMDENLMHISYEAGILENPKNQAPPGLYTKTQDPAKAPNTPDILEIEFKKGVPVKVTNVKDGTTHQTSLELFMYLNEVAASWGPVDSGATVLDEPRIETRGTFMALKGYRRGDKRGDGGSVGVVRVSGGGQ

SEQ ID NO: 821959 - protein, 195 aa, Homo sapiens; identical to SEQ ID NO: 821928

SEQ ID NO: 821960 - protein, 189 aa, Homo sapiens
DRRCSRRVPVKVTNVKDGTTHQTSLELFMYLNEVAGKHGVGRIDIVENRFIGMKSRGIYETPAGTILYHAHLDIEAFTMDREVRKIKQGLGLKFAELVYTGFWHSPECEFVRHCIAKSQERVEGKVQVSVLKGQVYILGRESPLSLYNEELVSMNVQGDYEPTDATGFININSLRLKEYHRLQSKVTAK

SEQ ID NO: 821961 - protein, 161 aa, Homo sapiens [sequence omitted]

SEQ ID NO: 821962 - protein, 161 aa, Homo sapiens
WTSSSHRGKHGVGRIDIVENRFIGMKSRGIYETPAGTILYHAHLDIEAFTMDREVRKIKQGLGLKFAELVYTGFWHSPECEFVRHCIAKSQERVEGKVQVSVLKGQVYILGRESPLSLYNEELVSMNVQGDYEPTDATGFININSLRLKEYHRLQSKVTAK

SEQ ID NO: 821963 - protein, 253 aa, Homo sapiens
MSSKGSVVLAYSGGLDTSCILVWLKEQGYDVIAYLANIGQKEDFEEARKKALKLGAKKVFIEDVSREFVEEFIWPAIQSSALYEDRYLLGTSLARPCIARKQVEIAQREGAKYVSHGATGKGNDQVRFELSCYSLAPQIKVIAPWRMPEFYNRFKGRNDLMEYAKQHGIPIPVTPKNPWSMDENLMHISYEAGILENPKNQAPPGLYTKTQDPAKAPNTPDILEIEFKKACEGPRQVDTTDSEALSESRHMVA

SEQ ID NO: 821964 - protein, 268 aa, Homo sapiens
MSSKGSVVLAYSGGLDTSCILVWLKEQGYDVIAYLANIGQKEDFEEARKKALKLGAKKVFIEDVSREFVEEFIWPAIQSSALYEDRYLLGTSLARPCIARKQVEIAQREGAKYVSHGATGKGNDQVRFELSCYSLAPQIKVIAPWRMPEFYNRFKGRNDLMEYAKQHGIPIPVTPKNPWSMDENLMHISYEAGILENPKNQAPPGLYTKTQDPAKAPNTPDILEIEFKKGYVPTCWDSKGVDFWGPGSFPLPAWEPRPSLPPPCIPGS

SEQ ID NO: 821965 - protein, 128 aa, Homo sapiens
VPVKVTNVKDGTTHQTSLELFMEAIQSSALYEDRYLLGTSLARPCIARKQVEIAQREGAKYVSHGATGKGNDQVRFELSCYSLAPQIKVIAPWRMPEFYNRFKGRNDLMEYAKQHGIPIPVTPKNPWT

SEQ ID NO: 821966 - protein, 126 aa, Homo sapiens
MSSKGSVVLAYSGGLDTSCILVWLKEQGYDVIAYLANIGQKEDFEEARKKALKLGAKKVFIEDVSREFVEEFIWPAIQSSALYEDRYLLGTSLARPCIARKQVEIAQREGAKYVSHGATGKHERAG

SEQ ID NO: 821967 - protein, 132 aa, Homo sapiens
MDHGTKLFSDLRFQSDVRRGPWCLVTLGVGHTYRARGLAGIASAMTYHRRVVHCTVKTDSRRRELTPPIPDAMSSKGSVVLAYSGGLDTSCILVWLKEQGYDVIAYLANIGQKEDFEEARKKALKLGAKKVH

SEQ ID NO: 821968 - protein, 143 aa, Homo sapiens
MAMHFIFSDTAVLLFDFWSVHSPAGMALSVLVLLLLAVLYEGIKVGKAKLLNQVLVNLPTSISQQTIAETDGDSAGSDSFPVGRTHHRWYLCHFGQSLIHVIQVVIGYFIMLAVMSYNTWIFLGVVLGSAVGYYLAYPLLSTA

SEQ ID NO: 821969 - protein, 143 aa, Homo sapiens; identical to SEQ ID NO: 821968

SEQ ID NO: 821970 - protein, 118 aa, Homo sapiens
MALSVLVLLLLAVLYEGIKVGKAKLLNQVLVNLPTSISQQTIAETDGDSAGSDSFPVGRTHHRWYLCHFGQSLIHVIQVVIGYFIMLAVMSYNTWIFLGVVLGSAVGYYLAYPLLSTA

SEQ ID NO: 821971 - protein, 93 aa, Homo sapiens
YEDQAKCLSTAFYSLISTPSFLITSSLPGLTCFSFLSRWYLCHFGQSLIHVIQVVIGYFIMLAVMSYNTWIFLGVVLGSAVGYYLAYPLLSTA

SEQ ID NO: 821972 - protein, 143 aa, Homo sapiens; identical to SEQ ID NO: 821968

SEQ ID NO: 821973 - protein, 92 aa, Homo sapiens
AARVAIAAAAAAAVELTRSEETRASRRGPGARPAHSPWRCISSSQIQRCFCLISGVSTVLLAWPFRCWCSCFWLYCMKASRLAKPSCSTRYW

SEQ ID NO: 821974 - protein, 135 aa, Homo sapiens
MAMHFIFSDTAVLLFDFWSVHSPAGMALSVLVLLLLAVLYEGIKVGKAKLLNQVLVNLPTSISQQTIAETDGDSAGSDSFPVGRTHHRYRQWVWERGRSLTFTLRDRLAQTALAPLHREDSEAQGRTRTCQSGYT

SEQ ID NO: 821975 - protein, 54 aa, Homo sapiens
MALSVLVLLLLAVLYEGIKVGKAKLLNQVLVNLPTSISQQTIAETDGDSAGSDS

SEQ ID NO: 821976 - protein, 167 aa, Homo sapiens
MELLRTITYQPAASTKMCEQALGKGCGADSKKKRPPQPPEESQPPQSQAQVPPAAPHHHHHHSHSGPEISRIIVDPTTGKRYCRGKVLGKGGFAKCYEMTDLTNNKVYAAKIIPHSRVAKPHQREKIDKEIELHRILHHKHVVQFYHYFEDKENIYILLEYCSRREG

SEQ ID NO: 821977 - protein, 685 aa, Homo sapiens
MELLRTITYQPAASTKMCEQALGKGCGADSKKKRPPQPPEESQPPQSQAQVPPAAPHHHHHHSHSGPEISRIIVDPTTGKRYCRGKVLGKGGFAKCYEMTDLTNNKVYAAKIIPHSRVAKPHQREKIDKEIELHRILHHKHVVQFYHYFEDKENIYILLEYCSRRSMAHILKARKVLTEPEVRYYLRQIVSGLKYLHEQEILHRDLKLGNFFINEAMELKVGDFGLAARLEPLEHRRRTICGTPNYLSPEVLNKQGHGCESDIWALGCVMYTMLLGRPPFETTNLKETYRCIREARYTMPSSLLAPAKHLIASMLSKNPEDRPSLDDIIRHDFFLQGFTPDRLSSSCCHTVPDFHLSSPAKNFFKKAAAALFGGKKDKARYIDTHNRVSKEDEDIYKLRHDLKKTSITQQPSKHRTDEELQPPTTTVARSGTPAVENKQQIGDAIRMIVRGTLGSCSSSSECLEDSTMGSVADTVARVLRGCLENMPEADCIPKEQLSTSFQWVTKWVDYSNKYGFGYQLSDHTVGVLFNNGAHMSLLPDKKTVHYYAELGQCSVFPATDAPEQFISQVTVLKYFSHYMEENLMDGGDLPSVTDIRRPRLYLLQWLKSDKALMMLFNDGTFQVNFYHDHTKIIICSQNEEYLLTYINEDRISTTFRLTTLLMSGCSSELKNRMEYALNMLLQRCN

SEQ ID NO: 821978 - protein, 685 aa, Homo sapiens; identical to SEQ ID NO: 821977

SEQ ID NO: 821979 - protein, 132 aa, Homo sapiens
MELLRTITYQPAASTKMCEQALGKGCGADSKKKRPPQPPEESQPPQSQAQVPPAAPHHHHHHSHSGPEISRIIVDPTTGKRYCRGKVLGKGGFAKCYEMTDLTNNKVYAAKIIPHSRVAKPHQREKVRMTLE

SEQ ID NO: 821980 - protein, 519 aa, Homo sapiens [sequence omitted]

SEQ ID NO: 821981 - protein, 425 aa, Homo sapiens
MELLRTITYQPAASTKMCEQALGKGCGADSKKKRPPQPPEESQPPQSQAQVPPAAPHHHHHHSHSGPEISRIIVDPTTGKRYCRGKVLGKGGFAKCYEMTDLTNNKVYAAKIIPHSRVAKPHQREKIDKEIELHRILHHKHVVQFYHYFEDKENIYILLEYCSRRSMAHILKARKVLTEPEVRYYLRQIVSGLKYLHEQEILHRDLKLGNFFINEAMELKVGDFGLAARLEPLEHRRRTICGTPNYLSPEVLNKQGHGCESDIWALGCVMYTMLLGRPPFETTNLKETYRCIREARYTMPSSLLAPAKHLIASMLSKNPEDRPSLDDIIRHDFFLQGFTPDRLSSSCCHTVPDFHLSSPAKNFFKKAAAALFGGKKDKARYIDTHNRVSKEDEDIYKLRHDLKKTSITQQPSKHRTDEVCWERVK

SEQ ID NO: 821982 - protein, 387 aa, Homo sapiens [sequence omitted]

SEQ ID NO: 821983 - protein, 115 aa, Homo sapiens
ADLEDPRLVQPYLMDGGDLPSVTDIRRPRLYLLQWLKSDKALMMLFNDGTFQVNFYHDHTKIIICSQNEEYLLTYINEDRISTTFRLTTLLMSGCSSELKNRMEYALNMLLQRCN

SEQ ID NO: 821984 - protein, 207 aa, Homo sapiens
MELLRTITYQPAASTKMCEQALGKGCGADSKKKRPPQPPEESQPPQSQAQVPPAAPHHHHHHSHSGPEISRIIVDPTTGKRYCRGKVLGKGGFAKCYEMTDLTNNKVYAAKIIPHSRVAKPHQREKIDKEIELHRILHHKHVVQFYHYFEDKENIYILLEYCSRRLQGSQKNDLEYVEEDGHVVVRKQFPCGLLDWVEPEQAKAYSS

SEQ ID NO: 821985 - protein, 447 aa, Homo sapiens
MELLRTITYQPAASTKMCEQALGKGCGADSKKKRPPQPPEESQPPQSQAQVPPAAPHHHHHHSHSGPEISRIIVDPTTGKRYCRGKVLGKGGFAKCYEMTDLTNNKVYAAKIIPHSRVAKPHQREKIDKEIELHRILHHKHVVQFYHYFEDKENIYILLEYCSRRSMAHILKARKVLTEPEVRYYLRQIVSGLKYLHEQEILHRDLKLGNFFINEAMELKVGDFGLAARLEPLEHRRRTICGTPNYLSPEVLNKQGHGCESDIWALGCVMYTMLLGRPPFETTNLKETYRCIREARYTMPSSLLAPAKHLIASMLSKNPEDRPSLDDIIRHDFFLQGFTPDRLSSSCCHTVPDFHLSSPAKNFFKKAAAALFGGKKDKARYIDTHNRVSKEDEDIYKLRHDLKKTSITQQPSKHRTDEEAPMLFKGCNWSSFWLRNCELWPYIIFFH

SEQ ID NO: 821986 - protein, 142 aa, Homo sapiens
MGKSEKIALPHGQLVHGIHLYEQPKINRQKSKYNLPLTKITSAKRNENNFWQDSVSSDRIQKQEKKPFKNTENIKNSHLKKSAFLTEVSQKENYAGAKFSDPPSPSVLPKPPSHWMGSTVENSNQNRELMAVHLKTLLKVQT

SEQ ID NO: 821987 - protein, 327 aa, Homo sapiens
MTVVSVPQREPLVLGGRLAPLGFSSRGYFGALPMVTTAPPPLPRIPDPRALPPTLFLPHFLGGDGPCLTPQPRAPAALPNRSLAVAGGTPRAAPKKRRKKKVRASPAGQLPSRFHQYQQHRPSLEGGRSPATGPSGAQEVPGPAAALAPSPAAAAGTEGASPDLAPLRPAAPGQTPLRKEVLKSKMGKSEKIALPHGQLVHGIHLYEQPKINRQKSKYNLPLTKITSAKRNENNFWQDSVSSDRIQKQEKKPFKNTENIKNSHLKKSAFLTEVSQKENYAGAKFSDPPSPSVLPKPPSHWMGSTVENSNQNRELMAVHLKTLLKVQT

SEQ ID NO: 821988 - protein, 327 aa, Homo sapiens; identical to SEQ ID NO: 821987

SEQ ID NO: 821989 - protein, 274 aa, Homo sapiens
  misc_feature (25)..(25): Xaa can be any naturally occurring amino acid
  misc_feature (29)..(29): Xaa can be any naturally occurring amino acid
  misc_feature (33)..(33): Xaa can be any naturally occurring amino acid
TPSYPVRPRTPHLSPHSREWPFYPXSVQXLPTXLRVRSTFGARRARREVRASPAGQLPSRFHQYQQHRPSLEGGRSPATGPSGAQEVPGPAAALAPSPAAAAGTEGASPDLAPLRPAAPGQTPLRKEVLKSKMGKSEKIALPHGQLVHGIHLYEQPKINRQKSKYNLPLTKITSAKRNENNFWQDSVSSDRIQKQEKKPFKNTENIKNSHLKKSAFLTEVSQKENYAGAKFSDPPSPSVLPKPPSHWMGSTVENSNQNRELMAVHLKTLLKVQT

SEQ ID NO: 821990 - protein, 142 aa, Homo sapiens; identical to SEQ ID NO: 821986

SEQ ID NO: 821991 - protein, 278 aa, Homo sapiens
MTVVSVPQREPLVLGGRLAPLGFSSRGYFGALPMVTTAPPPLPRIPDPRALPPTLFLPHFLGGDGPCLTPQPRAPAALPNRSLAVAGGTPRAAPKKRRKKKVRASPAGQLPSRFHQYQQHRPSLEGGRSPATGPSGAQEVPGPAAALAPSPAAAAGTEGASPDLAPLRPAAPGQTPLRKEVLKSKMGKSEKIALPHGQLVHGIHLYEQPKINRQKSKYNLPLTKITSAKRNENNFWQDSVSSDRIQKQEKKPFKNTENIKNSHLKKSAFLTEVSQKEN

SEQ ID NO: 821992 - protein, 327 aa, Homo sapiens; identical to SEQ ID NO: 821987

SEQ ID NO: 821993 - protein, 327 aa, Homo sapiens; identical to SEQ ID NO: 821987

SEQ ID NO: 821994 - protein, 142 aa, Homo sapiens; identical to SEQ ID NO: 821986

SEQ ID NO: 821995 - protein, 327 aa, Homo sapiens; identical to SEQ ID NO: 821987

SEQ ID NO: 821996 - protein, 227 aa, Homo sapiens; identical to SEQ ID NO: 814765

SEQ ID NO: 821997 - protein, 227 aa, Homo sapiens; identical to SEQ ID NO: 814765

SEQ ID NO: 821998 - protein, 227 aa, Homo sapiens; identical to SEQ ID NO: 814765

SEQ ID NO: 821999 - protein, 227 aa, Homo sapiens; identical to SEQ ID NO: 814765

SEQ ID NO: 822000 - protein, 972 aa, Homo sapiens
MAGRVPSLLVLLVFPSSCLAFRSPLSVFKRFKETTRPFSNECLGTTRPVVPIDSSDFALDIRMPGVTPKQTYFCMSMRIPVDEEAFVIDFKPRASMDTVHHMLLFGCNMPSSTGSYWFCDEGTCTDKANILYAWARNAPPTRLPKGVGFRVGGETGSKYFVLQVHYGDISAFRDNNKDCSGVSLHLTRLPQPLIAGMYLMMSVDTVIPAGEKVVNSDISCHYKNYPMHVFAYRVHTHHLGKVVSGYRVRNGQWTLIGRQSPQLPQAFYPVGHPVDVSFGDLLAARCVFTGEGRTEATHIGGTSSDEMCNLYIMYYMEAKHAVSFMTCTQNVAPDMFRTIPPEANIPIPVKSDMVMMHEHHKETEYKDKIPLLQQPKREEEEVLDQGDFYSLLSKLLGEREDVVHVHKYNPTEKAESESDLVAEIANVVQKKDLGRSDAREGAEHERGNAILVRDRIHKFHRLVSTLRPPESRVFSLQQPPPGEGTWEPEHTGDFHMEEALDWPGVYLLPGQVSGVALDPKNNLVIFHRGDHVWDGNSFDSKFVYQQIGLGPIEEDTILVIDPNNAAVLQSSGKNLFYLPHGLSIDKDGNYWVTDVALHQVFKLDPNNKEGPVLILGRSMQPGSDQNHFCQPTDVAVDPGTGAIYVSDGYCNSRIVQFSPSGKFITQWGEESSGSSPLPGQFTVPHSLALVPLLGQLCVADRENGRIQCFKTDTKEFVREIKHSSFGRNVFAISYIPGLLFAVNGKPHFGDQEPVQGFVMNFSNGEIIDIFKPVRKHFDMPHDIVASEDGTVYIGDAHTNTVWKFTLTEKLEHRSVKKAGIEVQEIKEAEAVVETKMENKPTSSELQKMQEKQKLIKEPGSGVPVVLITTLLVIPVVVLLAIAIFIRWKKSRAFGADSEHKLETSSGRVLGRFRGKGSGGLNLGNFFASRKGYSRKGFDRLSTEGSDQEKEDDGSESEEEYSAPLPALAPSSS

SEQ ID NO: 822001 - protein, 867 aa, Homo sapiens
MAGRVPSLLVLLVFPSSCLAFRSPLSVFKRFKETTRPFSNECLGTTRPVVPIDSSDFALDIRMPGVTPKQSDTYFCMSMRIPVDEEAFVIDFKPRASMDTVHHMLLFGCNMPSSTGSYWFCDEGTCTDKANILYAWARNAPPTRLPKGVGFRVGGETGSKYFVLQVHYGDISAFRDNNKDCSGVSLHLTRLPQPLIAGMYLMMSVDTVIPAGEKVVNSDISCHYKNYPMHVFAYRVHTHHLGKVVSGYRVRNGQWTLIGRQSPQLPQAFYPVGHPVDVSFGDLLAARCVFTGEGRTEATHIGGTSSDEMCNLYIMYYMEAKHAVSFMTCTQNVAPDMFRTIPPEANIPIPVKSDMVMMHEHHKETEYKDKIPLLQQPKREEEEVLDQDFHMEEALDWPGVYLLPGQVSGVALDPKNNLVIFHRGDHVWDGNSFDSKFVYQQIGLGPIEEDTILVIDPNNAAVLQSSGKNLFYLPHGLSIDKDGNYWVTDVALHQVFKLDPNNKEGPVLILGRSMQPGSDQNHFCQPTDVAVDPGTGAIYVSDGYCNSRIVQFSPSGKFITQWGEESSGSSPLPGQFTVPHSLALVPLLGQLCVADRENGRIQCFKTDTKEFVREIKHSSFGRNVFAISYIPGLLFAVNGKPHFGDQEPVQGFVMNFSNGEIIDIFKPVRKHFDMPHDIVASEDGTVYIGDAHTNTVWKFTLTEKLEHRSVKKAGIEVQEIKEAEAVVETKMENKPTSSELQKMQEKQKLIKEPGSGVPVVLITTLLVIPVVVLLAIAIFIRWKKSRAFGADSEHKLETSSGRVLGRFRGKGSGGLNLGNFFASRKGYSRKGFDRLSTEGSDQEKEDDGSESEEEYSAPLPALAPSSS

SEQ ID NO: 822002 - protein, 992 aa, Homo sapiens
MAGRVPSLLVLLVFPSSCLAFRSPLSVFKRFKETTRPFSNECLGTTRPVVPIDSSDFALDIRMPGVTPKQSDTYFCMSMRIPVDEEAFVIDFKPRASMDTVHHMLLFGCNMPSSTGSYWFCDEGTCTDKANILYAWARNAPPTRLPKGVGFRVGGETGSKYFVLQVHYGDISAFRDNNKDCSGVSLHLTRLPQPLIAGMYLMMSVDTVIPAGEKVVNSDISCHYKNYPMHVFAYRVHTHHLGKVVSGYRVRNGQWTLIGRQSPQLPQAFYPVGHPVDVSFGDLLAARCVFTGEGRTEATHIGGTSSDEMCNLYIMYYMEAKHAVSFMTCTQNVAPDMFRTIPPEANIPIPVKSDMVMMHEHHKETEYKDKIPLLQQPKREEEEVLDQGDFYSLLSKLLGEREDVVHVHKYNPTEKAESESDLVAEIANVVQKKDLGRSDAREGAEHERGNAILVRDRIHKFHRLVSTLRPPESRVFSLQQPPPGEGTWEPEHTGARREDMKCFQCKEMISVQDFHMEEALDWPGVYLLPGQVSGVALDPKNNLVIFHRGDHVWDGNSFDSKFVYQQIGLGPIEEDTILVIDPNNAAVLQSSGKNLFYLPHGLSIDKDGNYWVTDVALHQVFKLDPNNKEGPVLILGRSMQPGSDQNHFCQPTDVAVDPGTGAIYVSDGYCNSRIVQFSPSGKFITQWGEESSGSSPLPGQFTVPHSLALVPLLGQLCVADRENGRIQCFKTDTKEFVREIKHSSFGRNVFAISYIPGLLFAVNGKPHFGDQEPVQGFVMNFSNGEIIDIFKPVRKHFDMPHDIVASEDGTVYIGDAHTNTVWKFTLTEKLEHRSVKKAGIEVQEIKEAEAVVETKMENKPTSSELQKMQEKQKLIKEPGSGVPVVLITTLLVIPVVVLLAIAIFIRWKKSRAFGADSEHKLETSSGRVLGRFRGKGSGGLNLGNFFASRKGYSRKGFDRLSTEGSDQEKEDDGSESEEEYSAPLPALAPSSS

SEQ ID NO: 822003 - protein, 885 aa, Homo sapiens
MAGRVPSLLVLLVFPSSCLAFRSPLSVFKRFKETTRPFSNECLGTTRPVVPIDSSDFALDIRMPGVTPKQSDTYFCMSMRIPVDEEAFVIDFKPRASMDTVHHMLLFGCNMPSSTGSYWFCDEGTCTDKANILYAWARNAPPTRLPKGVGFRVGGETGSKYFVLQVHYGDISAFRDNNKDCSGVSLHLTRLPQPLIAGMYLMMSVDTVIPAGEKVVNSDISCHYKNYPMHVFAYRVHTHHLGKVVSGYRVRNGQWTLIGRQSPQLPQAFYPVGHPVDVSFGDLLAARCVFTGEGRTEATHIGGTSSDEMCNLYIMYYMEAKHAVSFMTCTQNVAPDMFRTIPPEANIPIPVKSDMVMMHEHHKETEYKDKIPLLQQPKREEEEVLDQARREDMKCFQCKEMISVQDFHMEEALDWPGVYLLPGQVSGVALDPKNNLVIFHRGDHVWDGNSFDSKFVYQQIGLGPIEEDTILVIDPNNAAVLQSSGKNLFYLPHGLSIDKDGNYWVTDVALHQVFKLDPNNKEGPVLILGRSMQPGSDQNHFCQPTDVAVDPGTGAIYVSDGYCNSRIVQFSPSGKFITQWGEESSGSSPLPGQFTVPHSLALVPLLGQLCVADRENGRIQCFKTDTKEFVREIKHSSFGRNVFAISYIPGLLFAVNGKPHFGDQEPVQGFVMNFSNGEIIDIFKPVRKHFDMPHDIVASEDGTVYIGDAHTNTVWKFTLTEKLEHRSVKKAGIEVQEIKEAEAVVETKMENKPTSSELQKMQEKQKLIKEPGSGVPVVLITTLLVIPVVVLLAIAIFIRWKKSRAFGADSEHKLETSSGRVLGRFRGKGSGGLNLGNFFASRKGYSRKGFDRLSTEGSDQEKEDDGSESEEEYSAPLPALAPSSS

SEQ ID NO: 822004 - protein, 906 aa, Homo sapiens
MAGRVPSLLVLLVFPSSCLAFRSPLSVFKRFKETTRPFSNECLGTTRPVVPIDSSDFALDIRMPGVTPKQSDTYFCMSMRIPVDEEAFVIDFKPRASMDTVHHMLLFGCNMPSSTGSYWFCDEGTCTDKANILYAWARNAPPTRLPKGVGFRVGGETGSKYFVLQVHYGDISAFRDNNKDCSGVSLHLTRLPQPLIAGMYLMMSVDTVIPAGEKVVNSDISCHYKNYPMHVFAYRVHTHHLGKVVSGYRVRNGQWTLIGRQSPQLPQAFYPVGHPVDVSFGDLLAARCVFTGEGRTEATHIGGTSSDEMCNLYIMYYMEAKHAVSFMTCTQNVAPDMFRTIPPEANIPIPVKSDMVMMHEHHKETEYKDKIPLLQQPKREEEEVLDQGDFYSLLSKLLGEREDVVHVHKYNPTEKAESESDLVAEIANVVQKKDLGRSDAREGAEHERGNAILVRDRIHKFHRLVSTLRPPESRVFSLQQPPPGEGTWEPEHTGDFHMEEALDWPGVYLLPGQVSGVALDPKNNLVIFHRGDHVWDGNSFDSKFVYQQIGLGPIEEDTILVIDPNNAAVLQSSGKNLFYLPHGLSIDKDGNYWVTDVALHQVFKLDPNNKEGPVLILGRSMQPGSDQNHFCQPTDVAVDPGTGAIYVSDGYCNSRIVQFSPSGKFITQWGEESSGSSPLPGQFTVPHSLALVPLLGQLCVADRENGRIQCFKTDTKEFVREIKHSSFGRNVFAISYIPGLLFAVNGKPHFGDQEPVQGFVMNFSNGEIIDIFKPVRKHFDMPHDIVASEDGTVYIGDAHTNTVWKFTLTEKLEHRSVKKAGIEVQEIKADSEHKLETSSGRVLGRFRGKGSGGLNLGNFFASRKGYSRKGFDRLSTEGSDQEKEDDGSESEEEYSAPLPALAPSSS

SEQ ID NO: 822005 - protein, 848 aa, Homo sapiens
MAGRVPSLLVLLVFPSSCLAFRSPLSVFKRFKETTRPFSNECLGTTRPVVPIDSSDFALDIRMPGVTPKQSDTYFCMSMRIPVDEEAFVIDFKPRASMDTVHHMLLFGCNMPSSTGSYWFCDEGTCTDKANILYAWARNAPPTRLPKGVGFRVGGETGSKYFVLQVHYGDISAFRDNNKDCSGVSLHLTRLPQPLIAGMYLMMSVDTVIPAGEKVVNSDISCHYKNYPMHVFAYRVHTHHLGKVVSGYRVRNGQWTLIGRQSPQLPQAFYPVGHPVDVSFGDLLAARCVFTGEGRTEATHIGGTSSDEMCNLYIMYYMEAKHAVSFMTCTQNVAPDMFRTIPPEANIPIPVKSDMVMMHEHHKETEYKDKIPLLQQPKREEEEVLDQDFHMEEALDWPGVYLLPGQVSGVALDPKNNLVIFHRGDHVWDGNSFDSKFVYQQIGLGPIEEDTILVIDPNNAAVLQSSGKNLFYLPHGLSIDKDGNYWVTDVALHQVFKLDPNNKEGPVLILGRSMQPGSDQNHFCQPTDVAVDPGTGAIYVSDGYCNSRIVQFSPSGKFITQWGEESSGSSPLPGQFTVPHSLALVPLLGQLCVADRENGRIQCFKTDTKEFVREIKHSSFGRNVFAISYIPGLLFAVNGKPHFGDQEPVQGFVMNFSNGEIIDIFKPVRKHFDMPHDIVASEDGTVYIGDAHTNTVWKFTLTEKLEHRSVKKAGIEVQEIKEAEAVVETKMENKPTSSELQKMQEKQKLIKEPGSGVPVVLITTLLVIPVVVLLAIAIFIRWKKSRAFGGKGSGGLNLGNFFASRKGYSRKGFDRLSTEGSDQEKEDDGSESEEEYSAPLPALAPSSS

SEQ ID NO: 822006 - protein, 477 aa, Homo sapiens
MEEALDWPGVYLLPGQVSGVALDPKNNLVIFHRGDHVWDGNSFDSKFVYQQIGLGPIEEDTILVIDPNNAAVLQSSGKNLFYLPHGLSIDKDGNYWVTDVALHQVFKLDPNNKEGPVLILGRSMQPGSDQNHFCQPTDVAVDPGTGAIYVSDGYCNSRIVQFSPSGKFITQWGEESSGSSPLPGQFTVPHSLALVPLLGQLCVADRENGRIQCFKTDTKEFVREIKHSSFGRNVFAISYIPGLLFAVNGKPHFGDQEPVQGFVMNFSNGEIIDIFKPVRKHFDMPHDIVASEDGTVYIGDAHTNTVWKFTLTEKLEHRSVKKAGIEVQEIKEAEAVVETKMENKPTSSELQKMQEKQKLIKEPGSGVPVVLITTLLVIPVVVLLAIAIFIRWKKSRAFGADSEHKLETSSGRVLGRFRGKGSGGLNLGNFFASRKGYSRKGFDRLSTEGSDQEKEDDGSESEEEYSAPLPALAPSSS

SEQ ID NO: 822007 - protein, 791 aa, Homo sapiens
MSMRIPVDEEAFVIDFKPRASMDTVHHMLLFGCNMPSSTGSYWFCDEGTCTDKANILYAWARNAPPTRLPKGVGFRVGGETGSKYFVLQVHYGDISAFRDNNKDCSGVSLHLTRLPQPLIAGMYLMMSVDTVIPAGEKVVNSDISCHYKNYPMHVFAYRVHTHHLGKVVSGYRVRNGQWTLIGRQSPQLPQAFYPVGHPVDVSFGDLLAARCVFTGEGRTEATHIGGTSSDEMCNLYIMYYMEAKHAVSFMTCTQNVAPDMFRTIPPEANIPIPVKSDMVMMHEHHKETEYKDKIPLLQQPKREEEEVLDQDFHMEEALDWPGVYLLPGQVSGVALDPKNNLVIFHRGDHVWDGNSFDSKFVYQQIGLGPIEEDTILVIDPNNAAVLQSSGKNLFYLPHGLSIDKDGNYWVTDVALHQVFKLDPNNKEGPVLILGRSMQPGSDQNHFCQPTDVAVDPGTGAIYVSDGYCNSRIVQFSPSGKFITQWGEESSGSSPLPGQFTVPHSLALVPLLGQLCVADRENGRIQCFKTDTKEFVREIKHSSFGRNVFAISYIPGLLFAVNGKPHFGDQEPVQGFVMNFSNGEIIDIFKPVRKHFDMPHDIVASEDGTVYIGDAHTNTVWKFTLTEKLEHRSVKKAGIEVQEIKEAEAVVETKMENKPTSSELQKMQEKQKLIKEPGSGVPVVLITTLLVIPVVVLLAIAIFIRWKKSRAFGADSEHKLETSSGRVLGRFRGKGSGGLNLGNFFASRKGYSRKGFDRLSTEGSDQEKEDDGSESEEEYSAPLPALAPSSS

SEQ ID NO: 822008 - protein, 770 aa, Homo sapiens
MDTVHHMLLFGCNMPSSTGSYWFCDEGTCTDKANILYAWARNAPPTRLPKGVGFRVGGETGSKYFVLQVHYGDISAFRDNNKDCSGVSLHLTRLPQPLIAGMYLMMSVDTVIPAGEKVVNSDISCHYKNYPMHVFAYRVHTHHLGKVVSGYRVRNGQWTLIGRQSPQLPQAFYPVGHPVDVSFGDLLAARCVFTGEGRTEATHIGGTSSDEMCNLYIMYYMEAKHAVSFMTCTQNVAPDMFRTIPPEANIPIPVKSDMVMMHEHHKETEYKDKIPLLQQPKREEEEVLDQDFHMEEALDWPGVYLLPGQVSGVALDPKNNLVIFHRGDHVWDGNSFDSKFVYQQIGLGPIEEDTILVIDPNNAAVLQSSGKNLFYLPHGLSIDKDGNYWVTDVALHQVFKLDPNNKEGPVLILGRSMQPGSDQNHFCQPTDVAVDPGTGAIYVSDGYCNSRIVQFSPSGKFITQWGEESSGSSPLPGQFTVPHSLALVPLLGQLCVADRENGRIQCFKTDTKEFVREIKHSSFGRNVFAISYIPGLLFAVNGKPHFGDQEPVQGFVMNFSNGEIIDIFKPVRKHFDMPHDIVASEDGTVYIGDAHTNTVWKFTLTEKLEHRSVKKAGIEVQEIKEAEAVVETKMENKPTSSELQKMQEKQKLIKEPGSGVPVVLITTLLVIPVVVLLAIAIFIRWKKSRAFGADSEHKLETSSGRVLGRFRGKGSGGLNLGNFFASRKGYSRKGFDRLSTEGSDQEKEDDGSESEEEYSAPLPALAPSSS

SEQ ID NO: 822009 - protein, 887 aa, Homo sapiens
MAGRVPSLLVLLVFPSSCLAFRSPLSVFKRFKETTRPFSNECLGTTRPVVPIDSSDFALDIRMPGVTPKQSDTYFCMSMRIPVDEEAFVIDFKPRASMDTVHHMLLFGCNMPSSTGSYWFCDEGTCTDKANILYAWARNAPPTRLPKGVGFRVGGETGSKYFVLQVHYGDISAFRDNNKDCSGVSLHLTRLPQPLIAGMYLMMSVDTVIPAGEKVVNSDISCHYKNYPMHVFAYRVHTHHLGKVVSGYRVRNGQWTLIGRQSPQLPQAFYPVGHPVDVSFGDLLAARCVFTGEGRTEATHIGGTSSDEMCNLYIMYYMEAKHAVSFMTCTQNVAPDMFRTIPPEANIPIPVKSDMVMMHEHHKETEYKDKIPLLQQPKREEEEVLDQGDFYSLLSKLLGEREDVVHVHKYNPTEKAESESDLVAEIANVVQKKDLGRSDAREGAEHERGNAILVRDRIHKFHRLVSTLRPPESRVFSLQQPPPGEGTWEPEHTGDFHMEEALDWPGVYLLPGQVSGVALDPKNNLVIFHRGDHVWDGNSFDSKFVYQQIGLGPIEEDTILVIDPNNAAVLQSSGKNLFYLPHGLSIDKDGNYWVTDVALHQVFKLDPNNKEGPVLILGRSMQPGSDQNHFCQPTDVAVDPGTGAIYVSDGYCNSRIVQFSPSGKFITQWGEESSGSSPLPGQFTVPHSLALVPLLGQLCVADRENGRIQCFKTDTKEFVREIKHSSFGRNVFAISYIPGLLFAVNGKPHFGDQEPVQGFVMNFSNGEIIDIFKPVRKHFDMPHDIVASEDGTVYIGDAHTNTVWKFTLTEKLEHRSVKKAGIEVQEIKGKGSGGLNLGNFFASRKGYSRKGFDRLSTEGSDQEKEDDGSESEEEYSAPLPALAPSSS

SEQ ID NO: 822010 - protein, 715 aa, Homo sapiens
MAGRVPSLLVLLVFPSSCLAFRSPLSVFKRFKETTRPFSNECLGTTRPVVPIDSSDFALDIRMPGVTPKQSDTYFCMSMRIPVDEEAFVIDFKPRASMDTVHHMLLFGCNMPSSTGSYWFCDEGTCTDKANILYAWARNAPPTRLPKGVGFRVGGETGSKYFVLQVHYGDISAFRDNNKDCSGVSLHLTRLPQPLIAGMYLMMSVDTVIPAGEKVVNSDISCHYKNYPMHVFAYRVHTHHLGKVVSGYRVRNGQWTLIGRQSPQLPQAFYPVGHPVDVSFGDLLAARCVFTGEGRTEATHIGGTSSDEMCNLYIMYYMEAKHAVSFMTCTQNVAPDMFRTIPPEANIPIPVKSDMVMMHEHHKETEYKDKIPLLQQPKREEEEVLDQDFHMEEALDWPGVYLLPGQVSGVALDPKNNLVIFHRGDHVWDGNSFDSKFVYQQIGLGPIEEDTILVIDPNNAAVLQSSGKNLFYLPHGLSIDKDGNYWVTDVALHQVFKLDPNNKEGPVLILGRSMQPGSDQNHFCQPTDVAVDPGTGAIYVSDGYCNSRIVQFSPSGKFITQWGEESSGSSPLPGQFTVPHSLALVPLLGQLCVADRENGRIQCFKTDTKEFVREIKHSSFGRNVFAISYIPGLLFAVNGKPHFGDQEPVQGFVMNFSNGEIIDIFKPVRKNWNIDQLKRLALRSRKSKKPRQLLKPKWRTNPPPQNCRRCKRNRN

SEQ ID NO: 822011 - protein, 768 aa, Homo sapiens
MAGRVPSLLVLLVFPSSCLAFRSPLSVFKRFKETTRPFSNECLGTTRPVVPIDSSDFALDIRMPGVTPKQSDTYFCMSMRIPVDEEAFVIDFKPRASMDTVHHMLLFGCNMPSSTGSYWFCDEGTCTDKANILYAWARNAPPTRLPKGVGFRVGGETGSKYFVLQVHYGDISAFRDNNKDCSGVSLHLTRLPQPLIAGMYLMMSVDTVIPAGEKVVNSDISCHYKNYPMHVFAYRVHTHHLGKVVSGYRVRNGQWTLIGRQSPQLPQAFYPVGHPVDVSFGDLLAARCVFTGEGRTEATHIGGTSSDEMCNLYIMYYMEAKHAVSFMTCTQNVAPDMFRTIPPEANIPIPVKSDMVMMHEHHKETEYKDKIPLLQQPKREEEEVLDQDFHMEEALDWPGVYLLPGQVSGVALDPKNNLVIFHRGDHVWDGNSFDSKFVYQQIGLGPIEEDTILVIDPNNAAVLQSSGKNLFYLPHGLSIDKDGNYWVTDVALHQVFKLDPNNKEGPVLILGRSMQPGSDQNHFCQPTDVAVDPGTGAIYVSDGYCNSRIVQFSPSGKFITQWGEESSGSSPLPGQFTVPHSLALVPLLGQLCVADRENGRIQCFKTDTKEFVREIKHSSFGRNVFAISYIPGLLFAVNGKPHFGDQEPVQGFVMNFSNGEIIDIFKPVRKHFDMPHDIVASEDGTVYIGDAHTNTVWKFTLTEKLEHRSVKKAGIEVQEIKETETDQRARLGSACCSHYNPSGYSGGCPAGHCHIYSVEKIKGLWSRF

SEQ ID NO: 822012 - protein, 989 aa, Homo sapiens
MAGRVPSLLVLLVFPSSCLAFRSPLSVFKRFKETTRPFSNECLGTTRPVVPIDSSDFALDIRMPGVTPKQTYFCMSMRIPVDEEAFVIDFKPRASMDTVHHMLLFGCNMPSSTGSYWFCDEGTCTDKANILYAWARNAPPTRLPKGVGFRVGGETGSKYFVLQVHYGDISAFRDNNKDCSGVSLHLTRLPQPLIAGMYLMMSVDTVIPAGEKVVNSDISCHYKNYPMHVFAYRVHTHHLGKVVSGYRVRNGQWTLIGRQSPQLPQAFYPVGHPVDVSFGDLLAARCVFTGEGRTEATHIGGTSSDEMCNLYIMYYMEAKHAVSFMTCTQNVAPDMFRTIPPEANIPIPVKSDMVMMHEHHKETEYKDKIPLLQQPKREEEEVLDQGDFYSLLSKLLGEREDVVHVHKYNPTEKAESESDLVAEIANVVQKKDLGRSDAREGAEHERGNAILVRDRIHKFHRLVSTLRPPESRVFSLQQPPPGEGTWEPEHTGDFHMEEALDWPGVYLLPGQVSGVALDPKNNLVIFHRGDHVWDGNSFDSKFVYQQIGLGPIEEDTILVIDPNNAAVLQSSGKNLFYLPHGLSIDKDGNYWVTDVALHQVFKLDPNNKEGPVLILGRSMQPGSDQNHFCQPTDVAVDPGTGAIYVSDGYCNSRIVQFSPSGKFITQWGEESSGSSPLPGQFTVPHSLALVPLLGQLCVADRENGRIQCFKTDTKEFVREIKHSSFGRNVFAISYIPGLLFAVNGKPHFGDQEPVQGFVMNFSNGEIIDIFKPVRKHFDMPHDIVASEDGTVYIGDAHTNTVWKFTLTEKLEHRSVKKAGIEVQEIKEAEAVVETKMENKPTSSELQKMQEKQKLIKEPGSGVPVVLITTLLVIPVVVLLAIAIFIRWKKSRAFGADSEHKLETSSGRVLGRFRGKGSGGLNLGNFFASRKGYSRKGFDRLSTEGSDQEKEDDGSESEEEYSAPLPALAPSSSCFPLARLKFCVFNCKLY

SEQ ID NO: 822013 - protein, 713 aa, Homo sapiens
MAGRVPSLLVLLVFPSSCLAFRSPLSVFKRFKETTRPFSNECLGTTRPVVPIDSSDFALDIRMPGVTPKQSDTYFCMSMRIPVDEEAFVIDFKPRASMDTVHHMLLFGCNMPSSTGSYWFCDEGTCTDKANILYAWARNAPPTRLPKGVGFRVGGETGSKYFVLQVHYGDISAFRDNNKDCSGVSLHLTRLPQPLIAGMYLMMSVDTVIPAGEKVVNSDISCHYKNYPMHVFAYRVHTHHLGKVVSGYRVRNGQWTLIGRQSPQLPQAFYPVGHPVDVSFGDLLAARCVFTGEGRTEATHIGGTSSDEMCNLYIMYYMEAKHAVSFMTCTQNVAPDMFRTIPPEANIPIPVKSDMVMMHEHHKETEYKDKIPLLQQPKREEEEVLDQDFHMEEALDWPGVYLLPGQVSGVALDPKNNLVIFHRGDHVWDGNSFDSKFVYQQIGLGPIEEDTILVIDPNNAAVLQSSGKNLFYLPHGLSIDKDGNYWVTDVALHQVFKLDPNNKEGPVLILGRSMQPGSDQNHFCQPTDVAVDPGTGAIYVSDGYCNSRIVQFSPSGKFITQWGEESSGSSPLPGQFTVPHSLALVPLLGQLCVADRENGRIQCFKTDTKEFVREIKHSSFGRNVFAISYIPGLLFAVNGKPHFGDQEPVQGFVMNFSNGEIIDIFKPVRKNWNIDQLKRLALRSRKSKQILNTNSRRVQEEYWEDLEEREVEA

SEQ ID NO: 822014 - protein, 194 aa, Homo sapiens
MPHDIVASEDGTVYIGDAHTNTVWKFTLTEKLEHRSVKKAGIEVQEIKEAEAVVETKMENKPTSSELQKMQEKQKLIKEPGSGVPVVLITTLLVIPVVVLLAIAIFIRWKKSRAFGADSEHKLETSSGRVLGRFRGKGSGGLNLGNFFASRKGYSRKGFDRLSTEGSDQEKEDDGSESEEEYSAPLPALAPSSS

SEQ ID NO: 822015 - protein, 972 aa, Homo sapiens; identical to SEQ ID NO: 822000

SEQ ID NO: 822016 - protein, 76 aa, Homo sapiens
ARSYAENNCMRGNRDCERKGSGGLNLGNFFASRKGYSRKGFDRLSTEGSDQEKEDDGSESEEEYSAPLPALAPSSS

SEQ ID NO: 822017 - protein, 720 aa, Homo sapiens
MAGRVPSLLVLLVFPSSCLAFRSPLSVFKRFKETTRPFSNECLGTTRPVVPIDSSDFALDIRMPGVTPKQSDTYFCMSMRIPVDEEAFVIDFKPRASMDTVHHMLLFGCNMPSSTGSYWFCDEGTCTDKANILYAWARNAPPTRLPKGVGFRVGGETGSKYFVLQVHYGDISAFRDNNKDCSGVSLHLTRLPQPLIAGMYLMMSVDTVIPAGEKVVNSDISCHYKNYPMHVFAYRVHTHHLGKVVSGYRVRNGQWTLIGRQSPQLPQAFYPVGHPVDVSFGDLLAARCVFTGEGRTEATHIGGTSSDEMCNLYIMYYMEAKHAVSFMTCTQNVAPDMFRTIPPEANIPIPVKSDMVMMHEHHKETEYKDKIPLLQQPKREEEEVLDQDFHMEEALDWPGVYLLPGQVSGVALDPKNNLVIFHRGDHVWDGNSFDSKFVYQQIGLGPIEEDTILVIDPNNAAVLQSSGKNLFYLPHGLSIDKDGNYWVTDVALHQVFKLDPNNKEGPVLILGRSMQPGSDQNHFCQPTDVAVDPGTGAIYVSDGYCNSRIVQFSPSGKFITQWGEESSGSSPLPGQFTVPHSLALVPLLGQLCVADRENGRIQCFKTDTKEFVREIKHSSFGRNVFAISYIPGLLFAVNGKPHFGDQEPVQGFVMNFSNGEIIDIFKPVRKHFDMPHDIVASEDGTVYIGDAHTNTVWKFTLTESMVFTVLLFTFSLSLIA

SEQ ID NO: 822018 - protein, 426 aa, Homo sapiens
MAGRVPSLLVLLVFPSSCLAFRSPLSVFKRFKETTRPFSNECLGTTRPVVPIDSSDFALDIRMPGVTPKQSDTYFCMSMRIPVDEEAFVIDFKPRASMDTVHHMLLFGCNMPSSTGSYWFCDEGTCTDKANILYAWARNAPPTRLPKGVGFRVGGETGSKYFVLQVHYGDISAFRDNNKDCSGVSLHLTRLPQPLIAGMYLMMSVDTVIPAGEKVVNSDISCHYKNYPMHVFAYRVHTHHLGKVVSGYRVRNGQWTLIGRQSPQLPQAFYPVGHPVDVSFGDLLAARCVFTGEGRTEATHIGGTSSDEMCNLYIMYYMEAKHAVSFMTCTQNVAPDMFRTIPPEANIPIPVKSDMVMMHEHHKETEYKDKIPLLQQPKREEEEVLDQDFHMEEALDWPGVYLLPGQVSGVALDPKNNLVIFPRALN

SEQ ID NO: 822019 - protein, 261 aa, Homo sapiens
MAGRVPSLLVLLVFPSSCLAFRSPLSVFKRFKETTRPFSNECLGTTRPVVPIDSSDFALDIRMPGVTPKQSDTYFCMSMRIPVDEEAFVIDFKPRASMDTVHHMLLFGCNMPSSTGSYWFCDEGTCTDKANILYAWARNAPPTRLPKGVGFRVGGETGSKYFVLQVHYGDISAFRDNNKDCSGVSLHLTRLPQPLIAGMYLMMSVDTVIPAGEKVVNSDISCHYKNYPMHVFAYRVHTHHLGKVVSGYRVRNGQWTLIGRQ

SEQ ID NO: 822020 - protein, 245 aa, Homo sapiens
MAGRVPSLLVLLVFPSSCLAFRSPLSVFKRFKETTRPFSNECLGTTRPVVPIDSSDFALDIRMPGVTPKQSDTYFCMSMRIPVDEEAFVIDFKPRASMDTVHHMLLFGCNMPSSTGSYWFCDEGTCTDKANILYAWARNAPPTRLPKGVGFRVGGETGSKYFVLQVHYGDISAFRDNNKDCSGVSLHLTRLPQPLIAGMYLMMSVDTVIPAGEKVVNSDISCHYKNYPMHVFAYRVHTHHLEGRL

SEQ ID NO: 822021 - protein, 150 aa, Homo sapiens
MAGRVPSLLVLLVFPSSCLAFRSPLSVFKRFKETTRPFSNECLGTTRPVVPIDSSDFALDIRMPGVTPKQASLTLSLNLTAEGEKTNSLLGTSWWDIYYTLFEKMDPSSSRSSCAIAGKCLKKIPIQLQEPHGFPYHLCVVSSHGPAYLP

SEQ ID NO: 822022 - protein, 105 aa, Homo sapiens
MFFAGMTWNFTTVTSCEVTRAEKAHCIVAKQFWLSKLQLEVVISKTNHSLWGRYFRNYIYSLSFECLLVYNSSKNKILGYISVEEKQIIDCNSSQGNTELYTNAS

SEQ ID NO: 822023 - protein, 174 aa, Homo sapiens
MAEGGAADLDTQRSDIATLLKTSLRKGDTWYLVDSRWFKQWKKYVGFDSWDKYQMGDQNVYPGPIDNSGLLKDGDAQSLKEHLIDELDYILLPTEGWNKLVSWYTLMEGQEPIARKVVEQGMFVKHCKVEVYLTELKLCENGNMNNVVTRRFSKADTIGNARSCLVFNPLLLDI

SEQ ID NO: 822024 - protein, 952 aa, Homo sapiens
MAEGGAADLDTQRSDIATLLKTSLRKGDTWYLVDSRWFKQWKKYVGFDSWDKYQMGDQNVYPGPIDNSGLLKDGDAQSLKEHLIDELDYILLPTEGWNKLVSWYTLMEGQEPIARKVVEQGMFVKHCKVEVYLTELKLCENGNMNNVVTRRFSKADTIDTIEKEIRKIFSIPDEKETRLWNKYMSNTFEPLNKPDSTIQDAGLYQGQVLVIEQKNEDGTWPRGPSTPNVKNSNYCLPSYTAYKNYDYSEPGRNNEQPGLCGLSNLGNTCFMNSAIQCLSNTPPLTEYFLNDKYQEELNFDNPLGMRGEIAKSYAELIKQMWSGKFSYVTPRAFKTQVGRFAPQFSGYQQQDCQELLAFLLDGLHEDLNRIRKKPYIQLKDADGRPDKVVAEEAWENHLKRNDSIIVDIFHGLFKSTLVCPECAKISVTFDPFCYLTLPLPMKKERTLEVYLVRMDPLTKPMQYKVVVPKIGNILDLCTALSALSGIPADKMIVTDIYNHRFHRIFAMDENLSSIMERDDIYVFEININRTEDTEHVIIPVCLREKFRHSSYTHHTGSSLFGQPFLMAVPRNNTEDKLYNLLLLRMCRYVKISTETEETEGSLHCCKDQNINGNGPNGIHEEGSPSEMETDEPDDESSQDQELPSENENSQSEDSVGGDNDSENGLCTEDTCKGQLTGHKKRLFTFQFNNLGNTDINYIKDDTRHIRFDDRQLRLDERSFLALDWDPDLKKRYFDENAAEDFEKHESVEYKPPKKPFVKLKDCIELFTTKEKLGAEDPWYCPNCKEHQQATKKLDLWSLPPVLVVHLKRFSYSRYMRDKLDTLVDFPINDLDMSEFLINPNAGPCRYNLIAVSNHYGGMGGGHYTAFAKNKDDGKWYYFDDSSVSTASEDQIVSKAAYVLFYQRQDTFSGTGFFPLDRETKGASAATGIPLESDEDSNDNDNDIENENCMHTN

SEQ ID NO: 822025 - protein, 981 aa, Homo sapiens
MAEGGAADLDTQRSDIATLLKTSLRKGDTWYLVDSRWFKQWKKYVGFDSWDKYQMGDQNVYPGPIDNSGLLKDGDAQSLKEHLIDELDYILLPTEGWNKLVSWYTLMEGQEPIARKVVEQGMFVKHCKVEVYLTELKLCENGNMNNVVTRRFSKADTIDTIEKEIRKIFSIPDEKETRLWNKYMSNTFEPLNKPDSTIQDAGLYQGQVLVIEQKNEDGTWPRGPSTPKSPGASNFSTLPKISPSSLSNNYNNMNNRNVKNSNYCLPSYTAYKNYDYSEPGRNNEQPGLCGLSNLGNTCFMNSAIQCLSNTPPLTEYFLNDKYQEELNFDNPLGMRGEIAKSYAELIKQMWSGKFSYVTPRAFKTQVGRFAPQFSGYQQQDCQELLAFLLDGLHEDLNRIRKKPYIQLKDADGRPDKVVAEEAWENHLKRNDSIIVDIFHGLFKSTLVCPECAKISVTFDPFCYLTLPLPMKKERTLEVYLVRMDPLTKPMQYKVVVPKIGNILDLCTALSALSGIPADKMIVTDIYNHRFHRIFAMDENLSSIMERDDIYVFEININRTEDTEHVIIPVCLREKFRHSSYTHHTGSSLFGQPFLMAVPRNNTEDKLYNLLLLRMCRYVKISTETEETEGSLHCCKDQNINGNGPNGIHEEGSPSEMETDEPDDESSQDQELPSENENSQSEDSVGGDNDSENGLCTEDTCKGQLTGHKKRLFTFQFNNLGNTDINYIKDDTRHIRFDDRQLRLDERSFLALDWDPDLKKRYFDENAAEDFEKHESVEYKPPKKPFVKLKDCIELFTTKEKLGAEDPWYCPNCKEHQQATKKLDLWSLPPVLVVHLKRFSYSRYMRDKLDTLVDFPINDLDMSEFLINPNAGPCRYNLIAVSNHYGGMGGGHYTAFAKNKDDGKWYYFDDSSVSTASEDQIVSKAAYVLFYQRQDTFSGTGFFPLDRETKGASAATGIPLESDEDSNDNDNDIENENCMHTN

SEQ ID NO: 822026 - protein, 952 aa, Homo sapiens; identical to SEQ ID NO: 822024

SEQ ID NO: 822027 - protein, 235 aa, Homo sapiens
MAEGGAADLDTQRSDIATLLKTSLRKGDTWYLVDSRWFKQWKKYVGFDSWDKYQMGDQNVYPGPIDNSGLLKDGDAQSLKEHLIDELDYILLPTEGWNKLVSWYTLMEGQEPIARKVVEQGMFVKHCKVEVYLTELKLCENGNMNNVVTRRFSKADTIDTIEKEIRKIFSIPDEKETRLWNKYMSNTFEPLNKPDSTIQDAGLYQGQVLVIEQKNEDGTWPRGPSTPKKPLEQSC

SEQ ID NO: 822028 - protein, 150 aa, Homo sapiens
MAEGGAADLDTQRSDIATLLKTSLRKGDTWYLVDSRWFKQWKKYVGFDSWDKYQMGDQNVYPGPIDNSGLLKDGDAQSLKEHLIDELDYILLPTEGWNKLVSWYTLMEGQEPIARKCQHSKNGRKESKDISRKYDGIKIQEKQQTIETDP

SEQ ID NO: 822029 - protein, 107 aa, Homo sapiens
MLWGRAAAVAATSPTASGRRWRKAERRIWTPSGLTSRRCSKPRSGKGTPGKRKGLRCPRLPEDSGEVGGSRELVLSLVTGAGRSGGGRRGSGILAASEMLGQRLDSR

SEQ ID NO: 822030 - protein, 1029 aa, Homo sapiens
MAEGGAADLDTQRSDIATLLKTSLRKGDTWYLVDSRWFKQWKKYVGFDSWDKYQMGDQNVYPGPIDNSGLLKDGDAQSLKEHLIDELDYILLPTEGWNKLVSWYTLMEGQEPIARKVVEQGMFVKHCKVEVYLTELKLCENGNMNNVVTRRFSKADTIDTIEKEIRKIFSIPDEKETRLWNKYMSNTFEPLNKPDSTIQDAGLYQGQVLVIEQKNEDGTWPRGPSTPKSPGASNFSTLPKISPSSLSNNYNNMNNRNVKNSNYCLPSYTAYKNYDYSEPGRNNEQPGLCGLSNLGNTCFMNSAIQFRFTKIVSIHDHLRIGLLEHLNRKGVVHIQHYKRQLSLFEGDYLAIFQCLSNTPPLTEYFLNDKYQEELNFDNPLGMRGEIAKSYAELIKQMWSGKFSYVTPRAFKTQVGRFAPQFSGYQQQDCQELLAFLLDGLHEDLNRIRKKPYIQLKDADGRPDKVVAEEAWENHLKRNDSIIVDIFHGLFKSTLVCPECAKISVTFDPFCYLTLPLPMKKERTLEVYLVRMDPLTKPMQYKVVVPKIGNILDLCTALSALSGIPADKMIVTDIYNHRFHRIFAMDENLSSIMERDDIYVFEININRTEDTEHVIIPVCLREKFRHSSYTHHTGSSLFGQPFLMAVPRNNTEDKLYNLLLLRMCRYVKISTETEETEGSLHCCKDQNINGNGPNGIHEEGSPSEMETDEPDDESSQDQELPSENENSQSEDSVGGDNDSENGLCTEDTCKGQLTGHKKRLFTFQFNNLGNTDINYIKDDTRHIRFDDRQLRLDERSFLALDWDPDLKKRYFDENAAEDFEKHESVEYKPPKKPFVKLKDCIELFTTKEKLGAEDPWYCPNCKEHQQATKKLDLWSLPPVLVVHLKRFSYSRYMRDKLDTLVDFPINDLDMSEFLINPNAGPCRYNLIAVSNHYGGMGGGHYTAFAKNKDDGKWYYFDDSSVSTASEDQIVSKAAYVLFYQRQDTFSGTGFFPLDRETKGASAATGIPLESDEDSNDNDNDIENENCMHTN

SEQ ID NO: 822031 - protein, 1029 aa, Homo sapiens; identical to SEQ ID NO: 822030

SEQ ID NO: 822032 - protein, 1029 aa, Homo sapiens; identical to SEQ ID NO: 822030

SEQ ID NO: 822033 - protein, 908 aa, Homo sapiens
MFVKHCKVEVYLTELKLCENGNMNNVVTRRFSKADTIDTIEKEIRKIFSIPDEKETRLWNKYMSNTFEPLNKPDSTIQDAGLYQGQVLVIEQKNEDGTWPRGPSTPKSPGASNFSTLPKISPSSLSNNYNNMNNRNVKNSNYCLPSYTAYKNYDYSEPGRNNEQPGLCGLSNLGNTCFMNSAIQFRFTKIVSIHDHLRIGLLEHLNRKGVVHIQHYKRQLSLFEGDYFGYFQCLSNTPPLTEYFLNDKYQEELNFDNPLGMRGEIAKSYAELIKQMWSGKFSYVTPRAFKTQVGRFAPQFSGYQQQDCQELLAFLLDGLHEDLNRIRKKPYIQLKDADGRPDKVVAEEAWENHLKRNDSIIVDIFHGLFKSTLVCPECAKISVTFDPFCYLTLPLPMKKERTLEVYLVRMDPLTKPMQYKVVVPKIGNILDLCTALSALSGIPADKMIVTDIYNHRFHRIFAMDENLSSIMERDDIYVFEININRTEDTEHVIIPVCLREKFRHSSYTHHTGSSLFGQPFLMAVPRNNTEDKLYNLLLLRMCRYVKISTETEETEGSLHCCKDQNINGNGPNGIHEEGSPSEMETDEPDDESSQDQELPSENENSQSEDSVGGDNDSENGLCTEDTCKGQLTGHKKRLFTFQFNNLGNTDINYIKDDTRHIRFDDRQLRLDERSFLALDWDPDLKKRYFDENAAEDFEKHESVEYKPPKKPFVKLKDCIELFTTKEKLGAEDPWYCPNCKEHQQATKKLDLWSLPPVLVVHLKRFSYSRYMRDKLDTLVDFPINDLDMSEFLINPNAGPCRYNLIAVSNHYGGMGGGHYTAFAKNKDDGKWYYFDDSSVSTASEDQIVSKAAYVLFYQRQDTFSGTGFFPLDRETKGASAATGIPLESDEDSNDNDNDIENENCMHTN

SEQ ID NO: 822034 - protein, 462 aa, Homo sapiens
MIVTDIYNHRFHRIFAMDENLSSIMERDDIYVFEININRTEDTEHVIIPVCLREKFRHSSYTHHTGSSLFGQPFLMAVPRNNTEDKLYNLLLLRMCRYVKISTETEETEGSLHCCKDQNINGNGPNGIHEEGSPSEMETDEPDDESSQDQELPSENENSQSEDSVGGDNDSENGLCTEDTCKGQLTGHKKRLFTFQFNNLGNTDINYIKDDTRHIRFDDRQLRLDERSFLALDWDPDLKKRYFDENAAEDFEKHESVEYKPPKKPFVKLKDCIELFTTKEKLGAEDPWYCPNCKEHQQATKKLDLWSLPPVLVVHLKRFSYSRYMRDKLDTLVDFPINDLDMSEFLINPNAGPCRYNLIAVSNHYGGMGGGHYTAFAKNKDDGKWYYFDDSSVSTASEDQIVSKAAYVLFYQRQDTFSGTGFFPLDRETKGASAATGIPLESDEDSNDNDNDIENENCMHTN

SEQ ID NO: 822035 - protein, 911 aa, Homo sapiens
MAEGGAADLDTQRSDIATLLKTSLRKGDTWYLVDSRWFKQWKKYVGFDSWDKYQMGDQNVYPGPIDNSGLLKDGDAQSLKEHLIDELDYILLPTEGWNKLVSWYTLMEGQEPIARKVVEQGMFVKHCKVEVYLTELKLCENGNMNNVVTRRFSKADTIDTIEKEIRKIFSIPDEKETRLWNKYMSNTFEPLNKPDSTIQDAGLYQGQVLVIEQKNEDGTWPRGPSTPKSPGASNFSTLPKISPSSLSNNYNNMNNRNVKNSNYCLPSYTAYKNYDYSEPGRNNEQPGLCGLSNLGNTCFMNSAIQFRFTKIVSIHDHLRIGLLEHLNRKGVVHIQHYKRQLSLFEGDYLAIFQCLSNTPPLTEYFLNDKYQEELNFDNPLGMRGEIAKSYAELIKQMWSGKFSYVTPRAFKTQVGRFAPQFSGYQQQDCQELLAFLLDGLHEDLNRIRKKPYIQLKDADGRPDKVVAEEAWENHLKRNDSIIVDIFHGLFKSTLVCPECAKISVTFDPFCYLTLPLPMKKERTLEVYLVRMDPLTKPMQYKVVVPKIGNILDLCTALSALSGIPADKMIVTDIYNHRFHRIFAMDENLSSIMERDDIYVFEININRTEDTEHVIIPVCLREKFRHSSYTHHTGSSLFGQPFLMAVPRNNTEDKLYNLLLLRMCRYVKISTETEETEGSLHCCKDQNINGNGPNGIHEEGSPSEMETDEPDDESSQDQELPSENENSQSEDSVGGDNDSENGLCTEDTCKGQLTGHKKRLFTFQFNNLGNTDINYIKDDTRHIRFDDRQLRLDERSFLALDWDPDLKKRYFDENAAEDFEKHESVEYKPPKKPFVKLKDCIELFTTKEKLGAEDPWYCPNCKEHQQATKKLDLWSLPPVLVVHLKRFSYSRYMRDKLDTLVDFPIKYCFCKK

SEQ ID NO: 822036 - protein, 215 aa, Homo sapiens
MDHISKYKTIKLLEGNTGQTLVYEMFPSDTTKEKLGAEDPWYCPNCKEHQQATKKLDLWSLPPVLVVHLKRFSYSRYMRDKLDTLVDFPINDLDMSEFLINPNAGPCRYNLIAVSNHYGGMGGGHYTAFAKNKDDGKWYYFDDSSVSTASEDQIVSKAAYVLFYQRQDTFSGTGFFPLDRETKGASAATGIPLESDEDSNDNDNDIENENCMHTN

SEQ ID NO: 822037 - protein, 1003 aa, Homo sapiens
MAEGGAADLDTQRSDIATLLKTSLRKGDTWYLVDSRWFKQWKKYVGFDSWDKYQMGDQNVYPGPIDNSGLLKDGDAQSLKEHLIDELDYILLPTEGWNKLVSWYTLMEGQEPIARKVVEQGMFVKHCKVEVYLTELKLCENGNMNNVVTRRFSKADTIDTIEKEIRKIFSIPDEKETRLWNKYMSNTFEPLNKPDSTIQDAGLYQGQVLVIEQKNEDGTWPRGPSTPKSPGASNFSTLPKISPSSLSNNYNNMNNRNVKNSNYCLPSYTAYKNYDYSEPGRNNEQPGLCGLSNLGNTCFMNSAIQFRFTKIVSIHDHLRIGLLEHLNRKGVVHIQHYKRQLSLFEGDYLAIFQCLSNTPPLTEYFLNDKYQEELNFDNPLGMRGEIAKSYAELIKQMWSGKFSYVTPRAFKTQVGRFAPQFSGYQQQDCQELLAFLLDGLHEDLNRIRKKPYIQLKDADGRPDKVVAEEAWENHLKRNDSIIVDIFHGLFKSTLVCPECAKISVTFDPFCYLTLPLPMKKERTLEVYLVRMDPLTKPMQYKVVVPKIGNILDLCTALSALSGIPADKMIVTDIYNHRFHRIFAMDENLSSIMERDDIYVFEININRTEDTEHVIIPVCLREKFRHSSYTHHTGSSLFGQPFLMAVPRNNTEDKLYNLLLLRMCRYVKISTETEETEGSLHCCKDQNINGNGPNGIHEEGSPSEMETDEPDDESSQDQELPSENENSQSEDSVGGDNDSENGLCTEDTCKGQLTGHKKRLFTFQFNNLGNTDINYIKDDTRHIRFDDRQLRLDERSFLALDWDPDLKKRYFDENAAEDFEKHESVEYKPPKKPFVKLKDCIELFTTKEKLGAEDPWYCPNCKEHQQATKKLDLWSLPPVLVVHLKRFSYSRYMRDKLDTLVDFPINDLDMSEFLINPNAGPCRYNLIAVSNHYGGMGGGHYTAFAKNKDDGKWYYFDDSSVSTASEDQIVCWAHNPLKASESRREVCWCTCGKFFWRKEKMILL

SEQ ID NO: 822038 - protein, 199 aa, Homo sapiens
MAEGGAADLDTQRSDIATLLKTSLRKGDTWYLVDSRWFKQWKKYVGFDSWDKYQMGDQNVYPGPIDNSGLLKDGDAQSLKEHLIDELDYILLPTEGWNKLVSWYTLMEGQEPIARKVVEQGMFVKHCKVEVYLTELKLCENGNMNNVVTRRFSKADTIDTIEKEIRKIFSIPDEKETRLWNKYMSNTFEPAVRRGVPSS

SEQ ID NO: 822039 - protein, 122 aa, Homo sapiens
MAEGGAADLDTQRSDIATLLKTSLRKGDTWYLVDSRWFKQWKKYVGFDSWDKYQMGDQNVYPGPIDNSGLLKDGDAQSLKEHLIDELDYILLPTEGWNKLVSWYTLMEGQEPIARKVHFNNN

SEQ ID NO: 822040 - protein, 90 aa, Homo sapiens
DEPDDESSQDQELPSENENSQSEDSVGGDNDSENGLCTEDTCKGQLTGHKKRLFTFQFNNLGNTDINYIKDDTRHIRFDDRQLRLDGKYL

SEQ ID NO: 822041 - protein, 1536 aa, Homo sapiens
MCKNSMKDPSFLISFDIVIFFSTLKKIGFCIFISADDIWVPKRAALIYFSYLWEKYYKFGEIVMFIVFPSTFVTTAGLLRTAAVGQQDWHLLQRLYLMILLCSIPDLLGNVIYDIQICIISRNIIGLILHYSCIEASMLEEIFCVYLLFLFLNFLKNYLRYGFGVKWVLLAVSSIYPNLTSTYVRLSIWLNFKVIHLSPLCMIFTKCQFSFAYSSFYFSLFSIHGIKISDFWGWGRNVPKSDNRAFYKFLQRKYRQIDKIYFYGEEIWPYYGFVFFLLSKIAGLTLLYEVSLELLKKKKVCTIIFHGCIQMYIFKEKYFLCPHSKMSWDKYEIVYEVAFLVQSDWTKVCILSGYQEKEFLWKSLVSINNPCKPCLHYAKTSGKMGRVILSQDVKNLGLTDSPTFHTVYSCDFCFSVDPESVLQESCFYFGLRNTRCKSYNFLFVLYHDLGFLFSFTFFTALEYFLFFSLVTKIKIKLYFYELKGNLIYFYELKIVASIHCVLRLRSTNLEEPVCGILKRRYCGFIFSSFSPLISGKLENFQRGNENHLNRIHVSFSELVKILATDPVTPGQTSYNITGHNASLYLMEMAELCGSCCEYLGLTVIENLIYTIQTQQLRKTALIAFSYVVTKYKYVKLRIMITYATLVIGIDDNFPVLFQISDCSAGIHWIIIYNVTIILCFSILMSDVNNIKLAVCSSSVSKKYIELHKYQFIFKHTELKILTEIINSEETSPSLSLIISLNTFLFLNNPNYCLFNYESTVFIYMGSTGIYQTSTVCPALPSTVGEHQFAVVVSALEGIFSRKLAVLFSLLSKHEQKRTCSLKNMLTFLVSTEICHCRSESNFTIKEMLQLGNEYGHTGTWCSMQGSRRPGLLSKFCHLGISCVTLNKSLTLSLSFLICKFGLSVYYDNQLRKSLNTSYIQRTYHKLKLAINAPLYIFLNENNTIHDVYFISNICPGHATLKIRGISNKVLDENQISCLNGRKMKLFMDKRVRMCILKYVKMIELKDGFRFFLRIRKVPSPQIQHTLQVLDKGEGSHGIENDLATPQGTCGENEVVRKVRMHKDSSGLGTTVCLVERNQCRKGDATRHLQQTRFFLPFSKDALCSSKTIDRVDWNIMGPSMLLLGIIIKNSFFSLNIVNCSPHKEKLELTSLGGVLDLPLKQSWEAGSSVFSLDRVSLVNKGDTGNPEWTVICVGRHSGSGALILCFLKQPPVFGLPYEMMFMCFLETRWKERGRINFLILLLLNVMNLNTVAFLEALPSFSCCKVKYLISLTEILKIKVIEEANVYFQSNELVVTVILFFYSIFFLILTERRKEYSFAISLGSPLPPGAPSSVLRLCLNKYNIYILLLKPFETVFSDSSKFDLLCTISLINPGYHVALDLQVVYLCKTCDTLNSLLFLSESSHKWSLIIKVKLVSNQFHLAISFSKCQLFSSKIFHQNNDHKLLEYIILCRHKITQTYSHISLVYFGWSNLPALNVKYNEELIPYLELFLPFKIHKYTFYFYRATYNFHITVRDLRCNLLSEPQGYFILQKKPKPN

SEQ ID NO: 822042 - protein, 1536 aa, Homo sapiens; identical to SEQ ID NO: 822041

SEQ ID NO: 822043 - protein, 728 aa, Homo sapiens
FMNPNRPKVLNVISLEFSDTKMSELVEVPDIAKKLSWVENYWPDDSVFPKPFVQKYCLMGVQDSYTDFHIDFGGTSVWYHVLWGEKIFYLIKPTDENLARYESWSSSVTQSEVFFGDKVDKCYKCVVKQGHTLFVPTGWIHAVLTSQDCMAFGGNFLHNLNIGMQLRCYEMEKRLKTPDLFKFPFFEAICWFVAKNLLETLKELREDGFQPQTYLVQGVKALHTALKLWMKKELVSEHAFEIPDNVRPGHLIKELSKVIRAIEEENGKPVKSQGIPIVCPVSRSSNEATSPYHSRRKMRKLRDHNVRTPSNLDILELHTREVLKRLEMCPWEEDILSSKLNGKFNKHLQPSSTVPEWRAKDNDLRLLLTNGRIIKDERQPFADQSLYTADSENEEDKRRTKKAKMKIEESSGVEGVEHEESQKPLNGFFTRVKSELRSRSSGYSDISESEDSGPECTALKSIFTTEESESSGDEKKQEITSNFKEESNVMRNFLQKSQKPSRSEIPIKRECPTSTSTEEEAIQGMLSMAGLHYSTCLQRQIQSTDCSGERNSLQDPSSCHGSNHEVRQLYRYDKPVECGYHVKTEDPDLRTSSWIKQFDTSRFHPQDLSRSQKCIRKEGSSEISQRVQSRNYVDSSGSSLQNGKYMQNSNLTSGACQISNGSLSPERPVGETSFSVPLHPTKRPASNPPPISNQATKGKRPKKGMATAKQRLGKILKLNRNGHARFFV

SEQ ID NO: 822044 - protein, 708 aa, Homo sapiens
MNPNRPKVLNVISLEFSDTKMSELVEVPDIAKKLSWVENYWPDDSVFPKPFVQKYCLMGVQDSYTDFHIDFGGTSVWYHVLWGEKIFYLIKPTDENLARYESWSSSVTQSEVFFGDKVDKCYKCVVKQGHTLFVPTGWIHAVLTSQDCMAFGGNFLHNLNIGMQLRCYEMEKRLKTPDLFKFPFFEAICWFVAKNLLETLKELREDGFQPQTYLVQGVKALHTALKLWMKKELVSEHAFEIPDNVRPGHLIKELSKVIRAIEEENGKPVKSQGIPIVCPVSRSSNEATSPYHSRRKMRKLRDHNVRTPSNLDILELHTREVLKRLEMCPWEEDILSSKLNGKFNKHLQPSSTVPEWRAKDNDLRLLLTNGRIIKDERQPFADQSLYTADSENEEDKRRTKKAKMKIEESSGVEGVEHEESQKPLNGFFTRVKSELRSRSSGYSDISESEDSGPECTALKSIFTTEESESSGDEKKQEITSNFKEESNVMRNFLQKSQKPSRSEIPIKRECPTSTSTEEEAIQGMLSMAGLHYSTCLQRQIQSTDCSGERNSLQDPSSCHGSNHEVRQLYRYDKPVECGYHVKTEDPDLRTSSWIKQFDTSRFHPQDLSRSQKCIRKEGSSEISQRVQSRNYVDSSGSSLQNGKYMQNSNLTSGACQISNGSLSPERPVGETSFSVPLHPTKRPASNPPPISNQATKGNFHTCIEKVYF

SEQ ID NO: 822045 - protein, 200 aa, Homo sapiens
MASSLTCTGVIWALLSFLCAATSCVGFFMPYWLWGSQLGKPVSFGTFRRCSYPVHDESRQMMVMVEECGRYASFQGIPSAEWRICTIVTGLGCGLLLLVALTALMGCCVSDLISRTVGRVAGGIQFLGGLLIGAGCALYPLGWDSEEVRQTCGYTSGQFDLGKCEIGWAYYCTGAGATAAMLLCTWLACFSGKKQKHYPY

SEQ ID NO: 822046 - protein, 200 aa, Homo sapiens; identical to SEQ ID NO: 822045

SEQ ID NO: 822047 - protein, 200 aa, Homo sapiens; identical to SEQ ID NO: 822045

SEQ ID NO: 822048 - protein, 70 aa, Homo sapiens
  misc_feature (14)..(14): Xaa can be any naturally occurring amino acid
LGQGEVCEAKDVAXHRKMAWSGVSFASAHLTLTEPYRGGCQAQDYTGGMGIVNGAKWNPRTGSESAWEGL

SEQ ID NO: 822049 - protein, 1158 aa, Homo sapiens
MAAVRGAPLLSCLLALLALCPGGRPQTVLTDDEIEEFLEGFLSELEPEPREDDVEAPPPPEPTPRVRKAQAGGKPGKRPGTAAEVPPEKTKDKGKKGKKDKGPKVPKESLEGSPRPPKKGKEKPPKATKKPKEKPPKATKKPKEKPPKATKKPKEKPPKATKKPPSGKRPPILAPSETLEWPLPPPPSPGPEELPQEGGAPLSNNWQNPGEETHVEAREHQPEPEEETEQPTLDYNDQIEREDYEDFEYIRRQKQPRPPPSRRRRPERVWPEPPEEKAPAPAPEERIEPPVKPLLPPLPPDYGDGYVIPNYDDMDYYFGPPPPQKPDAERQTDEEKEELKKPKKEDSSPKEETDKWAVEKGKDHKEPRKGEELEEEWTPTEKVKCPPIGMESHRIEDNQIRASSMLRHGLGAQRGRLNMQTGATEDDYYDGAWCAEDDARTQWIEVDTRRTTRFTGVITQGRDSSIHDDFVTTFFVGFSNDSQTWVMYTNGYEEMTFHGNVDKDTPVLSELPEPVVARFIRIYPLTWNGSLCMRLEVLGCSVAPVYSYYAQNEVVATDDLDFRHHSYKDMRQLMKVVNEECPTITRTYSLGKSSRGLKIYAMEISDNPGEHELGEPEFRYTAGIHGNEVLGRELLLLLMQYLCREYRDGNPRVRSLVQDTRIHLVPSLNPDGYEVAAQMGSEFGNWALGLWTEEGFDIFEDFPDLNSVLWGAEERKWVPYRVPNNNLPIPERYLSPDATVSTEVRAIIAWMEKNPFVLGANLNGGERLVSYPYDMARTPTQEQLLAAAMAAARGEDEDEVSEAQETPDHAIFRWLAISFASAHLTLTEPYRGGCQAQDYTGGMGIVNGAKWNPRTGTINDFSYLHTNCLELSFYLGCDKFPHESELPREWENNKEALLTFMEQVHRGIKGVVTDEQGIPIANATISVSGINHGVKTASGGDYWRILNPGEYRVTAHAEGYTPSAKTCNVDYDIGATQCNFILARSNWKRIREIMAMNGNRPIPHIDPSRPMTPQQRRLQQRRLQHRLRLRAQMRLRRLNATTTLGPHTVPPTLPPAPATTLSTTIEPWGLIPPTTAGWEESETETYTEVVTEFGTEVEPEFGTKVEPEFETQLEPEFETQLEPEFEEEEEEEKEEEIATGQAFPFTTVETYTVNFGDF

SEQ ID NO: 822050 - protein, 1158 aa, Homo sapiens; identical to SEQ ID NO: 822049

SEQ ID NO: 822051 - protein, 1192 aa, Homo sapiens
MAAVRGAPLLSCLLALLALCPGGRPQTVLTDDEIEEFLEGFLSELEPEPREDDVEAPPPPEPTPRVRKAQAGGKPGKRPGTAAEVPPEKTKDKGKKGKKDKGPKVPKESLEGSPRPPKKGKEKPPKATKKPKEKPPKATKKPKEKPPKATKKPKEKPPKATKKPPSGKRPPILAPSETLEWPLPPPPSPGPEELPQEGGAPLSNNWQNPGEETHVEAREHQPEPEEETEQPTLDYNDQIEREDYEDFEYIRRQKQPRPPPSRRRRPERVWPEPPEEKAPAPAPEERIEPPVKPLLPPLPPDYGDGYVIPNYDDMDYYFGPPPPQKPDAERQTDEEKEELKKPKKEDSSPKEETDKWAVEKGKDHKEPRKGEELEEEWTPTEKVKCPPIGMESHRIEDNQIRASSMLRHGLGAQRGRLNMQTGATEDDYYDGAWCAEDDARTQWIEVDTRRTTRFTGVITQGRDSSIHDDFVTTFFVGFSNDSQTWVMYTNGYEEMVGTMPRLLALLPLSGRGVGSQRGWQSALRPASPQTFHGNVDKDTPVLSELPEPVVARFIRIYPLTWNGSLCMRLEVLGCSVAPVYSYYAQNEVVATDDLDFRHHSYKDMRQLMKVVNEECPTITRTYSLGKSSRGLKIYAMEISDNPGEHELGEPEFRYTAGIHGNEVLGRELLLLLMQYLCREYRDGNPRVRSLVQDTRIHLVPSLNPDGYEVAAQMGSEFGNWALGLWTEEGFDIFEDFPDLNSVLWGAEERKWVPYRVPNNNLPIPERYLSPDATVSTEVRAIIAWMEKNPFVLGANLNGGERLVSYPYDMARTPTQEQLLAAAMAAARGEDEDEVSEAQETPDHAIFRWLAISFASAHLTLTEPYRGGCQAQDYTGGMGIVNGAKWNPRTGTINDFSYLHTNCLELSFYLGCDKFPHESELPREWENNKEALLTFMEQVHRGIKGVVTDEQGIPIANATISVSGINHGVKTASGGDYWRILNPGEYRVTAHAEGYTPSAKTCNVDYDIGATQCNFILARSNWKRIREIMAMNGNRPIPHIDPSRPMTPQQRRLQQRRLQHRLRLRAQMRLRRLNATTTLGPHTVPPTLPPAPATTLSTTIEPWGLIPPTTAGWEESETETYTEVVTEFGTEVEPEFGTKVEPEFETQLEPEFETQLEPEFEEEEEEEKEEEIATGQAFPFTTVETYTVNFGDF

SEQ ID NO: 822052 - protein, 903 aa, Homo sapiens
  misc_feature (3)..(3): Xaa can be any naturally occurring amino acid
  misc_feature (12)..(12): Xaa can be any naturally occurring amino acid
MGXASPKPSLPXFPNEGTAVGPGLWKSGAWSEWVQFEGPVLEALREMLDCAWVPNHDDMDYYFGPPPPQKPDAERQTDEEKEELKKPKKEDSSPKEETDKWAVEKGKDHKEPRKGEELEEEWTPTEKVKCPPIGMESHRIEDNQIRASSMLRHGLGAQRGRLNMQTGATEDDYYDGAWCAEDDARTQWIEVDTRRTTRFTGVITQGRDSSIHDDFVTTFFVGFSNDSQTWVMYTNGYEEMTFHGNVDKDTPVLSELPEPVVARFIRIYPLTWNGSLCMRLEVLGCSVAPVYSYYAQNEVVATDDLDFRHHSYKDMRQLMKVVNEECPTITRTYSLGKSSRGLKIYAMEISDNPGEHELGEPEFRYTAGIHGNEVLGRELLLLLMQYLCREYRDGNPRVRSLVQDTRIHLVPSLNPDGYEVAAQMGSEFGNWALGLWTEEGFDIFEDFPDLNSVLWGAEERKWVPYRVPNNNLPIPERYLSPDATVSTEVRAIIAWMEKNPFVLGANLNGGERLVSYPYDMARTPTQEQLLAAAMAAARGEDEDEVSEAQETPDHAIFRWLAISFASAHLTLTEPYRGGCQAQDYTGGMGIVNGAKWNPRTGTINDFSYLHTNCLELSFYLGCDKFPHESELPREWENNKEALLTFMEQVHRGIKGVVTDEQGIPIANATISVSGINHGVKTASGGDYWRILNPGEYRVTAHAEGYTPSAKTCNVDYDIGATQCNFILARSNWKRIREIMAMNGNRPIPHIDPSRPMTPQQRRLQQRRLQHRLRLRAQMRLRRLNATTTLGPHTVPPTLPPAPATTLSTTIEPWGLIPPTTAGWEESETETYTEVVTEFGTEVEPEFGTKVEPEFETQLEPEFETQLEPEFEEEEEEEKEEEIATGQAFPFTTVETYTVNFGDF

SEQ ID NO: 822053 - protein, 769 aa, Homo sapiens
MESHRIEDNQIRASSMLRHGLGAQRGRLNMQTGATEDDYYDGAWCAEDDARTQWIEVDTRRTTRFTGVITQGRDSSIHDDFVTTFFVGFSNDSQTWVMYTNGYEEMTFHGNVDKDTPVLSELPEPVVARFIRIYPLTWNGSLCMRLEVLGCSVAPVYSYYAQNEVVATDDLDFRHHSYKDMRQLMKVVNEECPTITRTYSLGKSSRGLKIYAMEISDNPGEHELGEPEFRYTAGIHGNEVLGRELLLLLMQYLCREYRDGNPRVRSLVQDTRIHLVPSLNPDGYEVAAQMGSEFGNWALGLWTEEGFDIFEDFPDLNSVLWGAEERKWVPYRVPNNNLPIPERYLSPDATVSTEVRAIIAWMEKNPFVLGANLNGGERLVSYPYDMARTPTQEQLLAAAMAAARGEDEDEVSEAQETPDHAIFRWLAISFASAHLTLTEPYRGGCQAQDYTGGMGIVNGAKWNPRTGTINDFSYLHTNCLELSFYLGCDKFPHESELPREWENNKEALLTFMEQVHRGIKGVVTDEQGIPIANATISVSGINHGVKTASGGDYWRILNPGEYRVTAHAEGYTPSAKTCNVDYDIGATQCNFILARSNWKRIREIMAMNGNRPIPHIDPSRPMTPQQRRLQQRRLQHRLRLRAQMRLRRLNATTTLGPHTVPPTLPPAPATTLSTTIEPWGLIPPTTAGWEESETETYTEVVTEFGTEVEPEFGTKVEPEFETQLEPEFETQLEPEFEEEEEEEKEEEIATGQAFPFTTVETYTVNFGDF

SEQ ID NO: 822054 - protein, 1158 aa, Homo sapiens; identical to SEQ ID NO: 822049

SEQ ID NO: 822055 - protein, 790 aa, Homo sapiens
YCYLVGYCYLVEEKVKCPPIGMESHRIEDNQIRASSMLRHGLGAQRGRLNMQTGATEDDYYDGAWCAEDDARTQWIEVDTRRTTRFTGVITQGRDSSIHDDFVTTFFVGFSNDSQTWVMYTNGYEEMTFHGNVDKDTPVLSELPEPVVARFIRIYPLTWNGSLCMRLEVLGCSVAPVYSYYAQNEVVATDDLDFRHHSYKDMRQLMKVVNEECPTITRTYSLGKSSRGLKIYAMEISDNPGEHELGEPEFRYTAGIHGNEVLGRELLLLLMQYLCREYRDGNPRVRSLVQDTRIHLVPSLNPDGYEVAAQMGSEFGNWALGLWTEEGFDIFEDFPDLNSVLWGAEERKWVPYRVPNNNLPIPERYLSPDATVSTEVRAIIAWMEKNPFVLGANLNGGERLVSYPYDMARTPTQEQLLAAAMAAARGEDEDEVSEAQETPDHAIFRWLAISFASAHLTLTEPYRGGCQAQDYTGGMGIVNGAKWNPRTGTINDFSYLHTNCLELSFYLGCDKFPHESELPREWENNKEALLTFMEQVHRGIKGVVTDEQGIPIANATISVSGINHGVKTASGGDYWRILNPGEYRVTAHAEGYTPSAKTCNVDYDIGATQCNFILARSNWKRIREIMAMNGNRPIPHIDPSRPMTPQQRRLQQRRLQHRLRLRAQMRLRRLNATTTLGPHTVPPTLPPAPATTLSTTIEPWGLIPPTTAGWEESETETYTEVVTEFGTEVEPEFGTKVEPEFETQLEPEFETQLEPEFEEEEEEEKEEEIATGQAFPFTTVETYTVNFGDF

SEQ ID NO: 822056 - protein, 785 aa, Homo sapiens
DTRTSYESSSECPPIGMESHRIEDNQIRASSMLRHGLGAQRGRLNMQTGATEDDYYDGAWCAEDDARTQWIEVDTRRTTRFTGVITQGRDSSIHDDFVTTFFVGFSNDSQTWVMYTNGYEEMTFHGNVDKDTPVLSELPEPVVARFIRIYPLTWNGSLCMRLEVLGCSVAPVYSYYAQNEVVATDDLDFRHHSYKDMRQLMKVVNEECPTITRTYSLGKSSRGLKIYAMEISDNPGEHELGEPEFRYTAGIHGNEVLGRELLLLLMQYLCREYRDGNPRVRSLVQDTRIHLVPSLNPDGYEVAAQMGSEFGNWALGLWTEEGFDIFEDFPDLNSVLWGAEERKWVPYRVPNNNLPIPERYLSPDATVSTEVRAIIAWMEKNPFVLGANLNGGERLVSYPYDMARTPTQEQLLAAAMAAARGEDEDEVSEAQETPDHAIFRWLAISFASAHLTLTEPYRGGCQAQDYTGGMGIVNGAKWNPRTGTINDFSYLHTNCLELSFYLGCDKFPHESELPREWENNKEALLTFMEQVHRGIKGVVTDEQGIPIANATISVSGINHGVKTASGGDYWRILNPGEYRVTAHAEGYTPSAKTCNVDYDIGATQCNFILARSNWKRIREIMAMNGNRPIPHIDPSRPMTPQQRRLQQRRLQHRLRLRAQMRLRRLNATTTLGPHTVPPTLPPAPATTLSTTIEPWGLIPPTTAGWEESETETYTEVVTEFGTEVEPEFGTKVEPEFETQLEPEFETQLEPEFEEEEEEEKEEEIATGQAFPFTTVETYTVNFGDF

SEQ ID NO: 822057 - protein, 737 aa, Homo sapiens
EDPCSDHCPLHSDDFVTTFFVGFSNDSQTWVMYTNGYEEMVGTMPRLLALLPLSGRGVGSQRGWQSALRPASPQTFHGNVDKDTPVLSELPEPVVARFIRIYPLTWNGSLCMRLEVLGCSVAPVYSYYAQNEVVATDDLDFRHHSYKDMRQLMKVVNEECPTITRTYSLGKSSRGLKIYAMEISDNPGEHELGEPEFRYTAGIHGNEVLGRELLLLLMQYLCREYRDGNPRVRSLVQDTRIHLVPSLNPDGYEVAAQMGSEFGNWALGLWTEEGFDIFEDFPDLNSVLWGAEERKWVPYRVPNNNLPIPERYLSPDATVSTEVRAIIAWMEKNPFVLGANLNGGERLVSYPYDMARTPTQEQLLAAAMAAARGEDEDEVSEAQETPDHAIFRWLAISFASAHLTLTEPYRGGCQAQDYTGGMGIVNGAKWNPRTGTINDFSYLHTNCLELSFYLGCDKFPHESELPREWENNKEALLTFMEQVHRGIKGVVTDEQGIPIANATISVSGINHGVKTASGGDYWRILNPGEYRVTAHAEGYTPSAKTCNVDYDIGATQCNFILARSNWKRIREIMAMNGNRPIPHIDPSRPMTPQQRRLQQRRLQHRLRLRAQMRLRRLNATTTLGPHTVPPTLPPAPATTLSTTIEPWGLIPPTTAGWEESETETYTEVVTEFGTEVEPEFGTKVEPEFETQLEPEFETQLEPEFEEEEEEEKEEEIATGQAFPFTTVETYTVNFGDF

SEQ ID NO: 822058 - protein, 412 aa, Homo sapiens
TTSRGYPHEAEVGANLNGGERLVSYPYDMARTPTQEQLLAAAMAAARGEDEDEVSEAQETPDHAIFRWLAISFASAHLTLTEPYRGGCQAQDYTGGMGIVNGAKWNPRTGTINDFSYLHTNCLELSFYLGCDKFPHESELPREWENNKEALLTFMEQVHRGIKGVVTDEQGIPIANATISVSGINHGVKTASGGDYWRILNPGEYRVTAHAEGYTPSAKTCNVDYDIGATQCNFILARSNWKRIREIMAMNGNRPIPHIDPSRPMTPQQRRLQQRRLQHRLRLRAQMRLRRLNATTTLGPHTVPPTLPPAPATTLSTTIEPWGLIPPTTAGWEESETETYTEVVTEFGTEVEPEFGTKVEPEFETQLEPEFETQLEPEFEEEEEEEKEEEIATGQAFPFTTVETYTVNFGDF

SEQ ID NO: 822059 - protein, 1158 aa, Homo sapiens; identical to SEQ ID NO: 822049

SEQ ID NO: 822060 - protein, 317 aa, Homo sapiens
SLGTRHGAQVKPPDGTINDFSYLHTNCLELSFYLGCDKFPHESELPREWENNKEALLTFMEQVHRGIKGVVTDEQGIPIANATISVSGINHGVKTASGGDYWRILNPGEYRVTAHAEGYTPSAKTCNVDYDIGATQCNFILARSNWKRIREIMAMNGNRPIPHIDPSRPMTPQQRRLQQRRLQHRLRLRAQMRLRRLNATTTLGPHTVPPTLPPAPATTLSTTIEPWGLIPPTTAGWEESETETYTEVVTEFGTEVEPEFGTKVEPEFETQLEPEFETQLEPEFEEEEEEEKEEEIATGQAFPFTTVETYTVNFGDF

SEQ ID NO: 822061 - protein, 308 aa, Homo sapiens
AVPDRMCRHNYELDEAVTLQRRVQPKVNVSPSKKGPQQHHQDILVVLLTFMEQVHRGIKGVVTDEQGIPIANATISVSGINHGVKTASGGDYWRILNPGEYRVTAHAEGYTPSAKTCNVDYDIGATQCNFILARSNWKRIREIMAMNGNRPIPHIDPSRPMTPQQRRLQQRRLQHRLRLRAQMRLRRLNATTTLGPHTVPPTLPPAPATTLSTTIEPWGLIPPTTAGWEESETETYTEVVTEFGTEVEPEFGTKVEPEFETQLEPEFETQLEPEFEEEEEEEKEEEIATGQAFPFTTVETYTVNFGDF

SEQ ID NO: 822062 - protein, 681 aa, Homo sapiens
MAAVRGAPLLSCLLALLALCPGGRPQTVLTDDEIEEFLEGFLSELEPEPREDDVEAPPPPEPTPRVRKAQAGGKPGKRPGTAAEVPPEKTKDKGKKGKKDKGPKVPKESLEGSPRPPKKGKEKPPKATKKPKEKPPKATKKPKEKPPKATKKPKEKPPKATKKPPSGKRPPILAPSETLEWPLPPPPSPGPEELPQEGGAPLSNNWQNPGEETHVEAREHQPEPEEETEQPTLDYNDQIEREDYEDFEYIRRQKQPRPPPSRRRRPERVWPEPPEEKAPAPAPEERIEPPVKPLLPPLPPDYGDGYVIPNYDDMDYYFGPPPPQKPDAERQTDEEKEELKKPKKEDSSPKEETDKWAVEKGKDHKEPRKGEELEEEWTPTEKVKCPPIGMESHRIEDNQIRASSMLRHGLGAQRGRLNMQTGATEDDYYDGAWCAEDDARTQWIEVDTRRTTRFTGVITQGRDSSIHDDFVTTFFVGFSNDSQTWVMYTNGYEEMTFHGNVDKDTPVLSELPEPVVARFIRIYPLTWNGSLCMRLEVLGCSVAPVYSYYAQNEVVATDDLDFRHHSYKDMRQLMKVVNEECPTLSTTIEPWGLIPPTTAGWEESETETYTEVVTEFGTEVEPEFGTKVEPEFETQLEPEFETQLEPEFEEEEEEEKEEEIATGQAFPFTTVETYTVNFGDF

SEQ ID NO: 822063 - protein, 69 aa, Homo sapiens
KLVAYVICWVTELDVRHQWDDALCRAVIEDILEPEFEEEEEEEKEEEIATGQAFPFTTVETYTVNFGDF

SEQ ID NO: 822064 - protein, 639 aa, Homo sapiens
MAAVRGAPLLSCLLALLALCPGGRPQTVLTDDEIEEFLEGFLSELEPEPREDDVEAPPPPEPTPRVRKAQAGGKPGKRPGTAAEVPPEKTKDKGKKGKKDKGPKVPKESLEGSPRPPKKGKEKPPKATKKPKEKPPKATKKPKEKPPKATKKPKEKPPKATKKPPSGKRPPILAPSETLEWPLPPPPSPGPEELPQEGGAPLSNNWQNPGEETHVEAREHQPEPEEETEQPTLDYNDQIEREDYEDFEYIRRQKQPRPPPSRRRRPERVWPEPPEEKAPAPAPEERIEPPVKPLLPPLPPDYGDGYVIPNYDDMDYYFGPPPPQKPDAERQTDEEKEELKKPKKEDSSPKEETDKWAVEKGKDHKEPRKGEELEEEWTPTEKVKCPPIGMESHRIEDNQIRASSMLRHGLGAQRGRLNMQTGATEDDYYDGAWCAEDDARTQWIEVDTRRTTRFTGVITQGRDSSIHDDFVTTFFVGFSNDSQTWVMYTNGYEEMTFHGNVDKDTPVLSELPEPVVARFIRIYPLTWNGSLCMRLEVLGCSVAPVYSYYAQNEVVATDDLDFRHHSYKDMRQLMKVVNEECPTITRTYSLGKSSRGLKIYAMEISDNPGEHELGAAEIYDTPAEYLISTDVLASQLYLF

SEQ ID NO: 822065 - protein, 551 aa, Homo sapiens
MAAVRGAPLLSCLLALLALCPGGRPQTVLTDDEIEEFLEGFLSELEPEPREDDVEAPPPPEPTPRVRKAQAGGKPGKRPGTAAEVPPEKTKDKGKKGKKDKGPKVPKESLEGSPRPPKKGKEKPPKATKKPKEKPPKATKKPKEKPPKATKKPKEKPPKATKKPPSGKRPPILAPSETLEWPLPPPPSPGPEELPQEGGAPLSNNWQNPGEETHVEAREHQPEPEEETEQPTLDYNDQIEREDYEDFEYIRRQKQPRPPPSRRRRPERVWPEPPEEKAPAPAPEERIEPPVKPLLPPLPPDYGDGYVIPNYDDMDYYFGPPPPQKPDAERQTDEEKEELKKPKKEDSSPKEETDKWAVEKGKDHKEPRKGEELEEEWTPTEKVKCPPIGMESHRIEDNQIRASSMLRHGLGAQRGRLNMQTGATEDDYYDGAWCAEDDARTQWIEVDTRRTTRFTGVITQGRDSSIHDDFVTTFFVGFSNDSQTWVMYTNGYEEMTFHGNVDKDTPVLSELPEPVVARFIRIYPLTWNGSLCMRLEVLGCSVARECGGLAG

SEQ ID NO: 822066 - protein, 1088 aa, Homo sapiens [sequence omitted]

SEQ ID NO: 822067 - protein, 1088 aa, Homo sapiens [sequence omitted]

SEQ ID NO: 822068 - protein, 1001 aa, Homo sapiens
MQRYGCRERSLERSPRLERHCPPGALQEMAGRALKQTGSRSIEAALEYISKMGYLDPRNEQIVRVIKQTSPGKGLMPTPVTRRPSFEGTGDSFASYHQLSGTPYEGPSFGADGPTALEEMPRPYVDYLFPGVGPHGPGHQHQHPPKGYGASVEAAGAHFPLQGAHYGRPHLLVPGEPLGYGVQRSPSFQSKTPPETGGYASLPTKGQGGPPGAGLAFPPPAAGLYVPHPHHKQAGPAAHQLHVLGSRSQVFASDSPPQSLLTPSRNSLNVDLYELSSTSVQQWPAATLARRDSLQKPGLEAPPRAHVAFRPDCPVPSRTNSFNSHQPRPGPPGKAEPSLPAPNTVTAVTAAHILHPVKSVRVLRPEPQTAVGPSHPAWVPAPAPAPAPAPAPAAEGLDAKEEHALALGGAGAFPLDVEYGGPDRRCPPPPYPKHLLLRSKSEQYDLDSLCAGMEQSLRAGPNEPEGGDKSRKSAKGDKGGKDKKQIQTSPVPVRKNSRDEEKRESRIKSYSPYAFKFFMEQHVENVIKTYQQKVNRRLQLEQEMAKAGLCEAEQEQMRKILYQKESNYNRLKRAKMDKSMFVKIKTLGIGAFGEVCLACKVDTHALYAMKTLRKKDVLNRNQVAHVKAERDILAEADNEWVVKLYYSFQDKDSLYFVMDYIPGGDMMSLLIRMEVFPEHLARFYIAELTLAIESVHKMGFIHRDIKPDNILIDLDGHIKLTDFGLCTGFRWTHNSKYYQKGSHVRQDSMEPSDLWDDVSNCRCGDRLKTLEQRARKQHQRCLAHSLVGTPNYIAPEVLLRKGYTQLCDWWSVGVILFEMLVGQPPFLAPTPTETQLKVINWENTLHIPAQVKLSPEARDLITKLCCSADHRLGRNGADDLKAHPFFSAIDFSSDIRKQPAPYVPTISHPMDTSNFDPVDEESPWNDASEGSTKAWDTLTSPNNKHPEHAFYEFTFRRFFDDNGYPFRCPKPSGAEASQAESSDLESSDLVDQTEGCQPVYV

SEQ ID NO: 822069 - protein, 304 aa, Homo sapiens [sequence omitted]

SEQ ID NO: 822070 - protein, 178 aa, Homo sapiens
MCGETNLLALLFPQVINWENTLHIPAQVKLSPEARDLITKLCCSADHRLGRNGADDLKAHPFFSAIDFSSDIRKQPAPYVPTISHPMDTSNFDPVDEESPWNDASEGSTKAWDTLTSPNNKHPEHAFYEFTFRRFFDDNGYPFRCPKPSGAEASQAESSDLESSDLVDQTEGCQPVYV

SEQ ID NO: 822071 - protein, 1088 aa, Homo sapiens [sequence omitted]

SEQ ID NO: 822072 - protein, 399 aa, Homo sapiens
MAAPSPSGGGGSGGGSGSGTPGPVGSPAPGHPAVSSMQGKRKALKLNFANPPFKSTARFTLNPNPTGVQNPHIERLRTHSIESSGKLKISPEQHWDFTAEDLKDLGEIGRGAYGSVNKMVHKPSGQIMAVKRIRSTVDEKEQKQLLMDLDVVMRSSDCPYIVQFYGALFREGDCWICMELMSTSFDKFYKYVYSVLDDVIPEEILGKITLATVKALNHLKENLKIIHRDIKPSNILLDRSGNIKLCDFGISGQLVDSIAKTRDAGCRPYMAPERIDPSASRQGYDVRSDVWSLGITLYELATGRFPYPKWNSVFDQLTQVVKGDPPQLSNSEEREFSPSFINFVNLCLTKDESKRPKYKELLKHPFILMYEERAVEVACYVCKILDQMPATPSSPMYVD

SEQ ID NO: 822073 - protein, 399 aa, Homo sapiens; identical to SEQ ID NO: 822072

SEQ ID NO: 822074 - protein, 399 aa, Homo sapiens; identical to SEQ ID NO: 822072

SEQ ID NO: 822075 - protein, 281 aa, Homo sapiens
MVHKPSGQIMAVKRIRSTVDEKEQKQLLMDLDVVMRSSDCPYIVQFYGALFREGDCWICMELMSTSFDKFYKYVYSVLDDVIPEEILGKITLATVKALNHLKENLKIIHRDIKPSNILLDRSGNIKLCDFGISGQLVDSIAKTRDAGCRPYMAPERIDPSASRQGYDVRSDVWSLGITLYELATGRFPYPKWNSVFDQLTQVVKGDPPQLSNSEEREFSPSFINFVNLCLTKDESKRPKYKELLKHPFILMYEERAVEVACYVCKILDQMPATPSSPMYVD

SEQ ID NO: 822076 - protein, 389 aa, Homo sapiens
PRPCERPSLLHCSRRGAARLFTPNNGGSEPERRRRLRGRQRQRHPRPRRVPGARPPGRQQHAGERLRTHSIESSGKLKISPEQHWDFTAEDLKDLGEIGRGAYGSVNKMVHKPSGQIMAVKRIRSTVDEKEQKQLLMDLDVVMRSSDCPYIVQFYGALFREGDCWICMELMSTSFDKFYKYVYSVLDDVIPEEILGKITLATVKALNHLKENLKIIHRDIKPSNILLDRSGNIKLCDFGISGQLVDSIAKTRDAGCRPYMAPERIDPSASRQGYDVRSDVWSLGITLYELATGRFPYPKWNSVFDQLTQVVKGDPPQLSNSEEREFSPSFINFVNLCLTKDESKRPKYKELLKHPFILMYEERAVEVACYVCKILDQMPATPSSPMYVD

SEQ ID NO: 822077 - protein, 230 aa, Homo sapiens
MAAPSPSGGGGSGGGSGSGTPGPVGSPAPGHPAVSSMQGKRKALKLNFANPPFKSTARFTLNPNPTGVQNPHIERLRTHSIESSGKLKISPEQHWDFTAEDLKDLGEIGRGAYGSVNKMVHKPSGQIMAVKRIRSTVDEKEQKQLLMDLDVVMRSSDCPYIVQFYGALFREGDCWICMELMSTSFDKFYKYVYSVLDDVIPEEILGKITLATVKALNHLKENLKIIHREY

SEQ ID NO: 822078 - protein, 399 aa, Homo sapiens; identical to SEQ ID NO: 822072

SEQ ID NO: 822079 - protein, 399 aa, Homo sapiens; identical to SEQ ID NO: 822072

SEQ ID NO: 822080 - protein, 325 aa, Homo sapiens
LGRARGRACCIAAAAAPLGSSLPTMAAPSPSGGGGSGGGSGSGTPGPVGSPAPGHPAVSSMQGKRKALKLNFANPPFKSTARFTLNPNPTGVQNPHIERLRTHSIESSGKLKISPEQHWDFTAEDLKDLGEIGRGAYGSVNKMVHKPSGQIMAVKRIRSTVDEKEQKQLLMDLDVVMRSSDCPYIVQFYGALFREGDCWICMELMSTSFDKFYKYVYSVLDDVIPEEILGKITLATVKALNHLKENLKIIHRDIKPSNILLDRSGNIKLCDFGISGQLVDSIAKTRDAGCRPYMAPERIDPSASRQGYDVRSDVWSLGITLVCLC

SEQ ID NO: 822081 - protein, 400 aa, Homo sapiens
MRRAPAAERLLELGFPPRCGRQEPPFPLGVTRGWGRWPIQKRREGARPVPFSERSQEDGRGPAARSSGTLWRIRTRLSLCRDPEPPPPLCLLRVSLLCALRAGGRGSRWGEDGARLLLLPPARAAGNGEAEPSGGPSYAGRMLESSGCKALKEGVLEKRSDGLLQLWKKKCCILTEEGLLLIPPKQLQHQQQQQQQQQQQQQQPGQGPAEPSQPSGPAVASLEPPVKLKELHFSNMKTVDCVERKGKYMYFTVVMAEGKEIDFRCPQDQGWNAEITLQMVQYKNRQAILAVKSTRQKQQHLVQQQPPSQPQPQPQLQPQPQPQPQPQPQPQSQPQPQPQPKPQPQQLHPYPHPHPHPHSHPHSHPHPHPHPHPHQIPHPHPQPHSQPHGHRLLRSTSNSA

SEQ ID NO: 822082 - protein, 400 aa, Homo sapiens; identical to SEQ ID NO: 822081

SEQ ID NO: 822083 - protein, 440 aa, Homo sapiens
MRRAPAAERLLELGFPPRCGRQEPPFPLGVTRGWGRWPIQKRREGARPVPFSERSQEDGRGPAARSSGTLWRIRTRLSLCRDPEPPPPLCLLRVSLLCALRAGGRGSRWGEDGARLLLLPPARAAGNGEAEPSGGPSYAGRMLESSGCKALKEGVLEKRSDGLLQLWKKKCCILTEEGLLLIPPKQLQHQQQQQQQQQQQQQQPGQGPAEPSQPSGPAVASLEPPVKLKELHFSNMKTVDCVERKGKYMYFTVVMAEGKEIDFRCPQDQGWNAEITLQMVQYKNRQAILAVKSTRQKQQHLVQQQPPSQPQPQPQPNHNPSLSPNPSLSPSSSTRIRIHIHIHTLILTRTHTLTRTRIRTKYRTHTHSRTRSRTGTGFSAAPPTLPERGSSRARQGFEDLRKWDEHISIVFTWIKSKTVSPPRTRSSSLDITLLKTCDSS

SEQ ID NO: 822084 - protein, 165 aa, Homo sapiens
MKTVDCVERKGKYMYFTVVMAEGKEIDFRCPQDQGWNAEITLQMVQYKNRQAILAVKSTRQKQQHLVQQQPPSQPQPQPQLQPQPQPQPQPQPQPQSQPQPQPQPKPQPQQLHPYPHPHPHPHSHPHSHPHPHPHPHPHQIPHPHPQPHSQPHGHRLLRSTSNSA

SEQ ID NO: 822085 - protein, 366 aa, Homo sapiens
MRRAPAAERLLELGFPPRCGRQEPPFPLGVTRGWGRWPIQKRREGARPVPFSERSQEDGRGPAARSSGTLWRIRTRLSLCRDPEPPPPLCLLRVSLLCALRAGGRGSRWGEDGARLLLLPPARAAGNGEAEPSGGPSYAGRMLESSGCKALKEGVLEKRSDGLLQLWKKKCCILTEPSQPSGPAVASLEPPVKLKELHFSNMKTVDCVERKGKYMYFTVVMAEGKEIDFRCPQDQGWNAEITLQMVQYKNRQAILAVKSTRQKQQHLVQQQPPSQPQPQPQLQPQPQPQPQPQPQPQSQPQPQPQPKPQPQQLHPYPHPHPHPHSHPHSHPHPHPHPHPHQIPHPHPQPHSQPHGHRLLRSTSNSA

SEQ ID NO: 822086 - protein, 390 aa, Homo sapiens
MRRAPAAERLLELGFPPRCGRQEPPFPLGVTRGWGRWPIQKRREGARPVPFSERSQEDGRGPAARSSGTLWRIRTRLSLCRDPEPPPPLCLLRVSLLCALRAGGRGSRWGEDGARLLLLPPARAAGNGEAEPSGGPSYAGRMLESSGCKALKEGVLEKRSDGLLQLWKKKCCILTEEGLLLIPPKQLQHQQQQQQQQQQQQQQPGQGPAEPSQPSGPAVASLEPPVKLKELHFSNMKTVDCVERKGKYMYFTVVMAEGKEIDFRCPQDQGWNAEITLQMVQYKNRQAILAVKSTRQKQQHLVQQQPPSQPQPQPQLQPQPQPQPQPQPQPQSQPQPQPQPKPQPQQLHPYPHPHPHPHSHPHSHPHPHPHPQPHSQPHGHRLLRSTSNSA

SEQ ID NO: 822087 - protein, 299 aa, Homo sapiens
PTPTAALAAARAPASPQHLQLCLKGAAPGQDKVRSRHSRSRGVGLGGSELGGVGSLFTGSAPDGEIKTHTKFLGQWKKQKQAGARRAGQRGEAGEIRARQGASRTAPAPAPITTVLVPRSRCRWCSTRIVRPSWRSNPRGRSSSTWSSSSPPRSRSRSRSSSPNPSLSLSRNPSPNHNPSLSPNPSLSPSSSTRIRIHIHIHTLILTRTHTLTRTRIRTKYRTHTHSRTRSRTGTGFSAAPPTLPERGSSRARQGFEDLRKWDEHISIVFTWIKSKTVSPPRTRSSSLDITLLKTCDSS

SEQ ID NO: 822088 - protein, 400 aa, Homo sapiens; identical to SEQ ID NO: 822081

SEQ ID NO: 822089 - protein, 400 aa, Homo sapiens; identical to SEQ ID NO: 822081

SEQ ID NO: 822090 - protein, 400 aa, Homo sapiens; identical to SEQ ID NO: 822081

SEQ ID NO: 822091 - protein, 87 aa, Homo sapiens
YGRPCNPVQLLPSTIRDSVGSSTGFSAAPPTLPERGSSRARQGFEDLRKWDEHISIVFTWIKSKTVSPPRTRSSSLDITLLKTCDSS

SEQ ID NO: 822092 - protein, 108 aa, Homo sapiens
FTIITARLSHYYCYAGAGLFTRTRGYGITHTLRSLWTLVVKLCTGFSAAPPTLPERGSSRARQGFEDLRKWDEHISIVFTWIKSKTVSPPRTRSSSLDITLLKTCDSS

SEQ ID NO: 822093 - protein, 410 aa, Homo sapiens
MRRAPAAERLLELGFPPRCGRQEPPFPLGVTRGWGRWPIQKRREGARPVPFSERSQEDGRGPAARSSGTLWRIRTRLSLCRDPEPPPPLCLLRVSLLCALRAGGRGSRWGEDGARLLLLPPARAAGNGEAEPSGGPSYAGRMLESSGCKALKEGVLEKRSDGLLQLWKKKCCILTEEGLLLIPPKQLQHQQQQQQQQQQQQQQPGQGPAEPSQPSGPAVASLEPPVKLKELHFSNMKTVDCVERKGKYMYFTVVMAEGKEIDFRCPQDQGWNAEITLQMVQYKNRQAILAVKSTRQKQQHLVQQQPPSQPQPQPQPNHNPSLSPNPSLSPSSSTRIRIHIHIHTLILTRTHTLTRTRIRTKYRTHTHSRTRSRTGTGFSAAPPTLPERGSSRARQGKVPALALPRSGSRG

SEQ ID NO: 822094 - protein, 445 aa, Homo sapiens
MSKLPRELTRDLERSLPAVASLGSSLSHSQSLSSHLLPPPEKRRAISDVRRTFCLFVTFDLLFISLLWIIELNTNTGIRKNLEQEIIQYNFKTSFFDIFVLAFFRFSGLLLGYAVLQLRHWWVIAVTTLVSSAFLIVKVILSELLSKGAFGYLLPIVSFVLAWLETWFLDFKVLPQEAEEERWYLAAQVAVARGPLLFSGALSEGQFYSPPESFAGSDNESDEEVAGKKSFSAQEREYIRQGKEATAVVDQILAQEENWKFEKNNEYGDTVYTIEVPFHGKTFILKTFLPCPAELVYQEVILQPERMVLWNKTVTACQILQRVEDNTLISYDVSAGAAGGVVSPRDFVNVRRIERRRDRYLSSGIATSHSAKPPTHKYVRGENGPGGFIVLKSASNPRVCTFVWILNTDLKGRLPRYLIHQSLAATMFEFAFHLRQRISELGARA

SEQ ID NO: 822095 - protein, 218 aa, Homo sapiens
MSKLPRELTRDLERSLPAVASLGSSLSHSQSLSSHLLPPPEKRRAISDVRRTFCLFVTFDLLFISLLWIIELNTNTGIRKNLEQEIIQYNFKTSFFDIFVLAFFRFSGLLLGYAVLQLRHWWVIAVTTLVSSAFLIVKVILSELLSKGAFGYLLPIVSFVLAWLETWFLDFKVLPQEAEEERWYLAAQVAVARGPLLFSGALSEGQFYSPPESFAGLT

SEQ ID NO: 822096 - protein, 182 aa, Homo sapiens
MSKLPRELTRDLERSLPAVASLGSSLSHSQSLSSHLLPPPEKRRAISDVRRTFCLFVTFDLLFISLLWIIELNTNTGIRKNLEQEIIQYNFKTSFFDIFVLAFFRFSGLLLGYAVLQLRHWWVIAVTTLVSSAFLIVKVILSELLSKGAFGYLLPIVSFVLAWLETWFLDFKVLPQEAEEER

SEQ ID NO: 822097 - protein, 435 aa, Homo sapiens
MSKLPRELTRDLERSLPAVASLGSSLSHSQSLSSHLLPPPEKRRAISDVRRTFCLFVTFDLLFISLLWIIELNTNTGIRKNLEQEIIQYNFKTSFFDIFVLAFFRFSGLLLGYAVLQLRHWWVIAVTTLVSSAFLIVKVILSELLSKGAFGYLLPIVSFVLAWLETWFLDFKVLPQEAEEERWYLAAQVAVARGPLLFSGALSEGQFYSPPESFAGSDNESDEEVAGKKSFSAQEREYIRQGKEATAVVDQILAQEENWKFEKNNEYGDTVYTIEVPFHGKTFILKTFLPCPAELVYQEVILQPERMVLWNKTVTACQILQRVEDNTLISYDVSAGAAGGVVSPRDFVNVRRIERRRDRYLSSGIATSHSAKPPTHKYVRGENGPGGFIVLKSASNPRVCTFVWILNTDLKVGCWGAARWVLWSGGDPAADLVAA

SEQ ID NO: 822098 - protein, 512 aa, Homo sapiens
MSKLPRELTRDLERSLPAVASLGSSLSHSQSLSSHLLPPPEKRRAISDVRRTFCLFVTFDLLFISLLWIIELNTNTGIRKNLEQEIIQYNFKTSFFDIFVLAFFRFSGLLLGYAVLQLRHWWVIAVTTLVSSAFLIVKVILSELLSKGAFGYLLPIVSFVLAWLETWFLDFKVLPQEAEEERYVSAVRVGGCSEGYPQPQERGVAGMRVSLKHLATSEQPPVAEGELGWGYPRLLGCNCPRSGTESAPPGYLAAQVAVARGPLLFSGALSEGQFYSPPESFAGSDNESDEEVAGKKSFSAQEREYIRQGKEATAVVDQILAQEENWKFEKNNEYGDTVYTIEVPFHGKTFILKTFLPCPAELVYQEVILQPERMVLWNKTVTACQILQRVEDNTLISYDVSAGAAGGVVSPRDFVNVRRIERRRDRYLSSGIATSHSAKPPTHKYVRGENGPGGFIVLKSASNPRVCTFVWILNTDLKGRLPRYLIHQSLAATMFEFAFHLRQRISELGARA

SEQ ID NO: 822099 - protein, 412 aa, Homo sapiens
MSKLPRELTRDLERSLPAVASLGSSLSHSQSLSSHLLPPPEKRRAISDVRRTFCLFVTFDLLFISLLWIIELNTNTGIRKNLEQEIIQYNFKTSFFDIFVLAFFRFSGLLLGYAVLQLRHWWVIAVTTLVSSAFLIVKVILSELLSKGAFGYLLPIVSFVLAWLETWFLDFKVLPQEAEEERWSDNESDEEVAGKKSFSAQEREYIRQGKEATAVVDQILAQEENWKFEKNNEYGDTVYTIEVPFHGKTFILKTFLPCPAELVYQEVILQPERMVLWNKTVTACQILQRVEDNTLISYDVSAGAAGGVVSPRDFVNVRRIERRRDRYLSSGIATSHSAKPPTHKYVRGENGPGGFIVLKSASNPRVCTFVWILNTDLKGRLPRYLIHQSLAATMFEFAFHLRQRISELGARA

SEQ ID NO: 822100 - protein, 445 aa, Homo sapiens; identical to SEQ ID NO: 822094

SEQ ID NO: 822101 - protein, 445 aa, Homo sapiens; identical to SEQ ID NO: 822094

SEQ ID NO: 822102 - protein, 445 aa, Homo sapiens; identical to SEQ ID NO: 822094

SEQ ID NO: 822103 - protein, 512 aa, Homo sapiens
MSKLPRELTRDLERSLPAVASLGSSLSHSQSLSSHLLPPPEKRRAISDVRRTFCLFVTFDLLFISLLWIIELNTNTGIRKNLEQEIIQYNFKTSFFDIFVLAFFRFSGLLLGYAVLQLRHWWVIAVTTLVSSAFLIVKVILSELLSKGAFGYLLPIVSFVLAWLETWFLDFKVLPQEAEEERYVSAVRVGGCSEGYPQPQERGVAGMRVSLKHLATSEQPPEPEGELGWGYPRLLGCNCPRSGTESAPPGYLAAQVAVARGPLLFSGALSEGQFYSPPESFAGSDNESDEEVAGKKSFSAQEREYIRQGKEATAVVDQILAQEENWKFEKNNEYGDTVYTIEVPFHGKTFILKTFLPCPAELVYQEVILQPERMVLWNKTVTACQILQRVEDNTLISYDVSAGAAGGVVSPRDFVNVRRIERRRDRYLSSGIATSHSAKPPTHKYVRGENGPGGFIVLKSASNPRVCTFVWILNTDLKGRLPRYLIHQSLAATMFEFAFHLRQRISELGARA

SEQ ID NO: 822104 - protein, 427 aa, Homo sapiens [sequence omitted]

SEQ ID NO: 822105 - protein, 417 aa, Homo sapiens
LGGGLASTASPPGSSIPYLLPLPGGEGQPQALASTCRALPVSLSQTNTGIRKNLEQEIIQYNFKTSFFDIFVLAFFRFSGLLLGYAVLQLRHWWVIAVTTLVSSAFLIVKVILSELLSKGAFGYLLPIVSFVLAWLETWFLDFKVLPQEAEEERWYLAAQVAVARGPLLFSGALSEGQFYSPPESFAGSDNESDEEVAGKKSFSAQEREYIRQGKEATAVVDQILAQEENWKFEKNNEYGDTVYTIEVPFHGKTFILKTFLPCPAELVYQEVILQPERMVLWNKTVTACQILQRVEDNTLISYDVSAGAAGGVVSPRDFVNVRRIERRRDRYLSSGIATSHSAKPPTHKYVRGENGPGGFIVLKSASNPRVCTFVWILNTDLKGRLPRYLIHQSLAATMFEFAFHLRQRISELGARA

SEQ ID NO: 822106 - protein, 502 aa, Homo sapiens
MSKLPRELTRDLERSLPAVASLGSSLSHSQSLSSHLLPPPEKRRAISDVRRTFCLFVTFDLLFISLLWIIELNTNTGIRKNLEQEIIQYNFKTSFFDIFVLAFFRFSGLLLGYAVLQLRHWWVIAVTTLVSSAFLIVKVILSELLSKGAFGYLLPIVSFVLAWLETWFLDFKVLPQEAEEERYVSAVRVGGCSEGYPQPQERGVAGMRVSLKHLATSEQPPVAEGELGWGYPRLLGCNCPRSGTESAPPGYLAAQVAVARGPLLFSGALSEGQFYSPPESFAGSDNESDEEVAGKKSFSAQEREYIRQGKEATAVVDQILAQEENWKFEKNNEYGDTVYTIEVPFHGKTFILKTFLPCPAELVYQEVILQPERMVLWNKTVTACQILQRVEDNTLISYDVSAGAAGGVVSPRDFVNVRRIERRRDRYLSSGIATSHSAKPPTHKYVRGENGPGGFIVLKSASNPRVCTFVWILNTDLKVGCWGAARWVLWSGGDPAADLVAA

SEQ ID NO: 822107 - protein, 279 aa, Homo sapiens
MLGCNCPRSGTESAPPGYLAAQVAVARGPLLFSGALSEGQFYSPPESFAGSDNESDEEVAGKKSFSAQEREYIRQGKEATAVVDQILAQEENWKFEKNNEYGDTVYTIEVPFHGKTFILKTFLPCPAELVYQEVILQPERMVLWNKTVTACQILQRVEDNTLISYDVSAGAAGGVVSPRDFVNVRRIERRRDRYLSSGIATSHSAKPPTHKYVRGENGPGGFIVLKSASNPRVCTFVWILNTDLKGRLPRYLIHQSLAATMFEFAFHLRQRISELGARA

SEQ ID NO: 822108 - protein, 340 aa, Homo sapiens
VQRIPLRICRAAARHWWVIAVTTLVSSAFLIVKVILSELLSKGAFGYLLPIVSFVLAWLETWFLDFKVLPQEAEEERWYLAAQVAVARGPLLFSGALSEGQFYSPPESFAGSDNESDEEVAGKKSFSAQEREYIRQGKEATAVVDQILAQEENWKFEKNNEYGDTVYTIEVPFHGKTFILKTFLPCPAELVYQEVILQPERMVLWNKTVTACQILQRVEDNTLISYDVSAGAAGGVVSPRDFVNVRRIERRRDRYLSSGIATSHSAKPPTHKYVRGENGPGGFIVLKSASNPRVCTFVWILNTDLKGRLPRYLIHQSLAATMFEFAFHLRQRISELGARA

SEQ ID NO: 822109 - protein, 164 aa, Homo sapiens
MFILKTFLPCPAELVYQEVILQPERMVLWNKTVTACQILQRVEDNTLISYDVSAGAAGGVVSPRDFVNVRRIERRRDRYLSSGIATSHSAKPPTHKYVRGENGPGGFIVLKSASNPRVCTFVWILNTDLKGRLPRYLIHQSLAATMFEFAFHLRQRISELGARA

SEQ ID NO: 822110 - protein, 435 aa, Homo sapiens; identical to SEQ ID NO: 822097

SEQ ID NO: 822111 - protein, 294 aa, Homo sapiens
MSKLPRELTRDLERSLPAVASLGSSLSHSQSLSSHLLPPPEKRRAISDVRRTFCLFVTFDLLFISLLWIIELNTNTGIRKNLEQEIIQYNFKTSFFDIFVLAFFRFSGLLLGYAVLQLRHWWVIAVTTLVSSAFLIVKVILSELLSKGAFGYLLPIVSFVLAWLETWFLDFKVLPQEAEEERWYLAAQVAVARGPLLFSGALSEGQFYSPPESFAGSDNESDEEVAGKKSFSAQEREYIRQGKEATAVVDQILAQEENWKFEKNNEYGDTVYTIEVPFHGKTFILKVGSTRVGL

SEQ ID NO: 822112 - protein, 79 aa, Homo sapiens
MSKLPRELTRDLERSLPAVASLGSSLSHSQSLSSHLLPPPEKRRAISDVRRTFCLFVTFDLLFISLLWIIELNVSGGEV

SEQ ID NO: 822113 - protein, 111 aa, Homo sapiens
DGGGLTSQPLPSPSSLPPLGRSRRWCPVHSSLSRSSSLRSVAQGLASLVGIRPEWYASREEHFSNLGCLSLLSGLGGEGILSFGIYKESSFTRFPDLAPCSSRNQKVLSPA

SEQ ID NO: 822114 - protein, 481 aa, Homo sapiens
RQPDPAPPAPRSTPEAPAAPASAPLPPPPGAMGAPPGYRPSAWVHLLHQLPRADFQLRPVPSVFAPQEQEYQQALLLVAALAGLGLGLSLIFIAVYLIRFCCCRPPEPPGSKIPSPGGGCVTWSCIVALLAGCTGIGIGFYGNSETSDGVSQLSSALLHANHTLSTIDHLVLETVERLGEAVRTELTTLEEVLEPRTELVAAARGARRQAEAAAQQLQGLAFWQGVPLSPLQVAENVSFVEEYRWLAYVLLLLLELLVCLFTLLGLAKQSKWLVIVMTVMSLLVLVLSWGSMGLEAATAVGLSDFCSNPDPYVLNLTQEETGLSSDILSYYLLCNRAVSNPFQQRLTLSQRALANIHSQLLGLEREAVPQFPSAQKPLLSLEETLNVTEGNFHQLVALLHCRSLHKDYGAALRGLCEDALEGLLFLLLFSLLSAGALATALCSLPRAWALFPPSDDYDDTDDDDPFNPQESKRFVQWQSSI

SEQ ID NO: 822115 - protein, 491 aa, Homo sapiens
RQPDPAPPAPRSTPEAPAAPASAPLPPPPGAMGAPPGYRPSAWVHLLHQLPRADFQLRPVPSVFAPQEQEYQQALLLVAALAGLGLGLSLIFIAVYLIRFCCCRPPEPPGSKIPSPGGGCVTWSCIVALLAGCTGIGIGFYGNSETSDGVSQLSSALLHANHTLSTIDHLVLETVERLGEAVRTELTTLEEVLEPRTELVAAARGARRQAEAAAQQLQGLAFWQGVPLSPLQVAENVSFVEEYRWLAYVLLLLLELLVCLFTLLGLAKQSKWLVIVMTVMSLLVLVLSWGSMGLEAATAVGLSDFCSNPDPYVLNLTQEETGLSSDILSYYLLCNRAVSNPFQQRLTLSQRALANIHSQLLGLEREAVPQFPSAQKPLLSLEETLNVTEGNFHQLVALLHCRSLHKDYGAALRGLCEDALEGLLFLLLFSLLSAGALATALCSLPRAWALFPPRNPSALCSGSRLSEPLLPAGLEPGSPLRSFPGCRRRPH

SEQ ID NO: 822116 - protein, 481 aa, Homo sapiens; identical to SEQ ID NO: 822114

SEQ ID NO: 822117 - protein, 481 aa, Homo sapiens; identical to SEQ ID NO: 822114

SEQ ID NO: 822118 - protein, 481 aa, Homo sapiens; identical to SEQ ID NO: 822114

SEQ ID NO: 822119 - protein, 481 aa, Homo sapiens; identical to SEQ ID NO: 822114

SEQ ID NO: 822120 - protein, 476 aa, Homo sapiens
RQPDPAPPAPRSTPEAPAAPASAPLPPPPGAMGAPPGYRPSAWVHLLHQLPRADFQLRPVPSVFAPQEQEYQQALLLVAALAGLGLGLSLIFIAVYLIRFCCCRPPEPPGSKIPSPGGGCVTWSCIVALLAGCTGIGIGFYGNSETSDGVSQLSSALLHANHTLSTIDHLVLETVERLGEAVRTELTTLEEVLEPRTELVAAARGARRQAEAAAQQLQGLAFWQGVPLSPLQVAENVSFVEEYRWLAYVLLLLLELLVCLFTLLGLAKQSKWLVIVMTVMSLLVLVLSWGSMGLEAATAVGLSDFCSNPDPYVLNLTQEETGLSSDILSYYLLCNRAVSNPFQQRLTLSQRALANIHSQLLGLEREAVPQFPSAQKPLLSLEETLNVTEGNFHQLVALLHCRSLHKDYGAALRGLCEDALEGLLFLLLFSLLSAGALATALCSLPRAWALFPPSSLLLATVLPFLSLALGVAEGAD

SEQ ID NO: 822121 - protein, 622 aa, Homo sapiens
RQPDPAPPAPRSTPEAPAAPASAPLPPPPGAMGAPPGYRPSAWVHLLHQLPRADFQLRPVPSVFAPQEQEYQQALLLVAALAGLGLGLSLIFIAVYLIRFCCCRPPEPPGSKIPSPGGGCVTWSCIVALLAGCTGIGIGFYGNSETSDGVSQLSSALLHANHTLSTIDHLVLETVERLGEAVRTELTTLEEVLEPRTELVAAARGARRQAEAAAQQLQGLAFWQGVPLSPLQVAENVSFVEEYRWLAYVLLLLLELLVCLFTLLGLAKQSKWLVIVMTVMSLLVLVLSWGSMGLEAATAVGLSDFCSNPDPYVLNLTQEETGLSSDILSYYLLCNRAVSNPFQQRLTLSQRALANIHSQLLGLEREAVPQFPSAQKPLLSLEETLNVTEGNFHQLVALLHCRSLHKVVTHRCLIKCYEEGTMIIPPNRLEDEEQIEGPSQGHTASQPVHTEERGTFRRAPPSAPHSQAVAQFCPFCFGMSSSIYSQCPMPLPQLRPRSLPCRRKHGPLPIHPPMDPRIGLPDSANSKPLCYKYARCNAGEILILENYVLGIRYSNVTGSPEFDLATLPKRDLSTPSHGSELSLVWLRQTPSVAPTASHPSGTGIPKREWGVSTEAMLRIADY

SEQ ID NO: 822122 - protein, 527 aa, Homo sapiens
RQPDPAPPAPRSTPEAPAAPASAPLPPPPGAMGAPPGYRPSAWVHLLHQLPRADFQLRPVPSVFAPQEQEYQQSLAVTQRPPPTTPLHRLRPRPRLTPALARRPPEAARGDPRPQSPPEALLLVAALAGLGLGLSLIFIAVYLIRFCCCRPPEPPGSKIPSPGGGCVTWSCIVALLAGCTGIGIGFYGNSETSDGVSQLSSALLHANHTLSTIDHLVLETVERLGEAVRTELTTLEEVLEPRTELVAAARGARRQAEAAAQQLQGLAFWQGVPLSPLQVAENVSFVEEYRWLAYVLLLLLELLVCLFTLLGLAKQSKWLVIVMTVMSLLVLVLSWGSMGLEAATAVGLSDFCSNPDPYVLNLTQEETGLSSDILSYYLLCNRAVSNPFQQRLTLSQRALANIHSQLLGLEREAVPQFPSAQKPLLSLEETLNVTEGNFHQLVALLHCRSLHKDYGAALRGLCEDALEGLLFLLLFSLLSAGALATALCSLPRAWALFPPSDDYDDTDDDDPFNPQESKRFVQWQSSI

SEQ ID NO: 822123 - protein, 444 aa, Homo sapiens
SAARPRAARAPLDSGGSRSPGVRPAAPSPGGHGGAPGLPALSLGASPPPAAPRRLPAPPGAQRFRAPRAGIPAGLVAGGGLGGPGLGPEPHFHRCLPHPLLLLPAPRAPRVQDPLARGRLRHLELHCRPSRRLVLETVERLGEAVRTELTTLEEVLEPRTELVAAARGARRQAEAAAQQLQGLAFWQGVPLSPLQVAENVSFVEEYRWLAYVLLLLLELLVCLFTLLGLAKQSKWLVIVMTVMSLLVLVLSWGSMGLEAATAVGLSDFCSNPDPYVLNLTQEETGLSSDILSYYLLCNRAVSNPFQQRLTLSQRALANIHSQLLGLEREAVPQFPSAQKPLLSLEETLNVTEGNFHQLVALLHCRSLHKDYGAALRGLCEDALEGLLFLLLFSLLSAGALATALCSLPRAWALFPPSDDYDDTDDDDPFNPQESKRFVQWQSSI

SEQ ID NO: 822124 - protein, 238 aa, Homo sapiens [sequence omitted]

SEQ ID NO: 822125 - protein, 196 aa, Homo sapiens
FVRLWAPWPGGSHAVGLSDFCSNPDPYVLNLTQEETGLSSDILSYYLLCNRAVSNPFQQRLTLSQRALANIHSQLLGLEREAVPQFPSAQKPLLSLEETLNVTEGNFHQLVALLHCRSLHKDYGAALRGLCEDALEGLLFLLLFSLLSAGALATALCSLPRAWALFPPSDDYDDTDDDDPFNPQESKRFVQWQSSI

SEQ ID NO: 822126 - protein, 83 aa, Homo sapiens
MIPPGERMPGAQPLQMFVELGKALAAMLVSMHGAQLVTTLFLPRGATVVELFPYAVNPDHYTVRSTWPGRPNPGRPTQVPLHI

SEQ ID NO: 822127 - protein, 580 aa, Homo sapiens
MHLSAVFNALLVSVLAAVLWKHVRLREHAATLEEELALSRQATEPAPALRIDYPKALQILMEGGTHMVCTGRTHTDRICRFKWLCYSNEAEEFIFFHGNTSVMLPNLGSRRFQPALLDLSTVEDHNTQYFNFVELPAAALRFMPKPVFVPDVALIANRFNPDNLMHVFHDDLLPLFYTLRQFPGLAHEARLFFMEGWGEGAHFDLYKLLSPKQPLLRAQLKTLGRLLCFSHAFVGLSKITTWYQYGFVQPQGPKANILVSGNEIRQFARFMTEKLNVSHTGVPLGEEYILVFSRTQNRLILNEAELLLALAQEFQMKTVTVSLEDHTFADVVRLVSNASMLVSMHGAQLVTTLFLPRGATVVELFPYAVNPDHYTPYKTLAMLPGMDLQYVAWRNMMPENTVTHPERPWDQGGITHLDRAEQARILQSREVPRHLCCRNPEWLFRIYQDTKVDIPSLIQTIRRVVKGRPGPRKQKWTVGLYPGKVREARCQASVHGASEARLTVSWQIPWNLKYLKVREVKYEVWLQEQGENTYVPYILALQNHTFTENIKPFTTYLVWVRCIFNKILLGPFADVLVCNT

SEQ ID NO: 822128 - protein, 376 aa, Homo sapiens
MHLSAVFNALLVSVLAAVLWKHVRLREHAATLEEELALSRQATEPAPALRIDYPKALQILMEGGTHMVCTGRTHTDRICRFKWLCYSNEAEEFIFFHGNTSVMLPNLGSRRFQPALLDLSTVEDHNTQYFNFVELPAAALRFMPKPVFVPDVALIANRFNPDNLMHVFHDDLLPLFYTLRQFPGLAHEARLFFMEGWGEGAHFDLYKLLSPKQPLLRAQLKTLGRLLCFSHAFVGLSKITTWYQYGFVQPQGPKANILVSGNEIRQFARFMTEKLNVSHTGVPLGEEYILVFSRTQNRLILNEAELLLALAQEFQMKTVTVSLEDHTFADVVRLVSNASMLVSMHGAQLVTTLFLPRGATVVELFPYAVNPDHYTA

SEQ ID NO: 822129 - protein, 148 aa, Homo sapiens
MASVVLALRTRTAVTSLLSPTPATALAVRYASKKSGGSSKNLGGKSSGRRQGIKKMEGHYVHAGNIIATQRHFRWHPGAHVGVGKNKCLYALEEGIVRYTKEVYVPHPRNTEAVDLITRLPKGAVLYKTFVHVVPAKPEGTFKLVAML

SEQ ID NO: 822130 - protein, 148 aa, Homo sapiens; identical to SEQ ID NO: 822129

SEQ ID NO: 822131 - protein, 139 aa, Homo sapiens
MLLFFTSLLSPTPATALAVRYASKKSGGSSKNLGGKSSGRRQGIKKMEGHYVHAGNIIATQRHFRWHPGAHVGVGKNKCLYALEEGIVRYTKEVYVPHPRNTEAVDLITRLPKGAVLYKTFVHVVPAKPEGTFKLVAML

SEQ ID NO: 822132 - protein, 148 aa, Homo sapiens; identical to SEQ ID NO: 822129

SEQ ID NO: 822133 - protein, 162 aa, Homo sapiens
AAAYYYYYYKFPAARPSVVLALRTRTAVTSLLSPTPATALAVRYASKKSGGSSKNLGGKSSGRRQGIKKMEGHYVHAGNIIATQRHFRWHPGAHVGVGKNKCLYALEEGIVRYTKEVYVPHPRNTEAVDLITRLPKGAVLYKTFVHVVPAKPEGTFKLVAML

SEQ ID NO: 822134 - protein, 148 aa, Homo sapiens; identical to SEQ ID NO: 822129

SEQ ID NO: 822135 - protein, 148 aa, Homo sapiens; identical to SEQ ID NO: 822129

SEQ ID NO: 822136 - protein, 77 aa, Homo sapiens
VEVAVSQDHTTALQARQKTEFFETLSQKKYIYKYTVSDRKHGVGGVGAEDPDSRYILAKPHSGYSSCCQIRIQEVGW

SEQ ID NO: 822137 - protein, 366 aa, Homo sapiens
FPSPCFVFAFLSTYSYLCLSLCLPLRLFSLRAPFFPRPFQIANMAPERLRSRALSAFKLRGLLLRGEAIKYLTEALQSISELELEDKLEKIINAVEKQPLSSNMIERSVVEAAVQECSQSVDETIEHVFNIIGAFDIPRFVYNSERKKFLPLLMTNHPAPNLFGTPRDKAEMFRERYTILHQRTHRHELFTPPVIGSHPDESGSKFQLKTIETLLGSTTKIGDAIVLGMITQLKEGKFFLEDPTGTVQLDLSKAQFHSGLYTEACFVLAEGWFEDQVFHVNAFGFPPTEPSSTTRAYYGNINFFGGPSNTSVKTSAKLKQLEEENKDAMFVFLSDVWLDQVEVLEKLRIMFAGLFTSTSNLLYSVW

SEQ ID NO: 822138 - protein, 366 aa, Homo sapiens; identical to SEQ ID NO: 822137

SEQ ID NO: 822139 - protein, 366 aa, Homo sapiens; identical to SEQ ID NO: 822137

SEQ ID NO: 822140 - protein, 366 aa, Homo sapiens; identical to SEQ ID NO: 822137

SEQ ID NO: 822141 - protein, 366 aa, Homo sapiens; identical to SEQ ID NO: 822137

SEQ ID NO: 822142 - protein, 366 aa, Homo sapiens; identical to SEQ ID NO: 822137

SEQ ID NO: 822143 - protein, 366 aa, Homo sapiens; identical to SEQ ID NO: 822137

SEQ ID NO: 822144 - protein, 366 aa, Homo sapiens; identical to SEQ ID NO: 822137

SEQ ID NO: 822145 - protein, 139 aa, Homo sapiens
FPSPCFVFAFLSTYSYLCLSLCLPLRLFSLRAPFFPRPFQIANMAPERLRSRALSAFKLRGLLLRGEAIKYLTEALQSISELELEDKLEKIINAVEKQPLSSNMIERSVVEAAVQECSQSVDETMYVGTVNFFPPWRCY

SEQ ID NO: 822146 - protein, 1677 aa, Homo sapiens
ASDQSSAGCSGAKMAARRGRRDGVAPPPSGGPGPDPGGGARGSGWGSRSQAPYGTLGAVSGGEQVLLHEEAGDSGFVSLSRLGPSLRDKDLEMEELMLQDETLLGTMQSYMDASLISLIEDFGSLGESRLSLEDQNEVSLLTALTEILDNADSENLSPFDSIPDSELLVSPREGSSLHKLLTLSRTPPERDLITPVDPLGPSTGSSRGSGVEMSLPDPSWDFSPPSFLETSSPKLPSWRPPRSRPRWGQSPPPQQRSDGEEEEEVASFSGQILAGELDNCVSSIPDFPMHLACPEEEDKATAAEMAVPAAGDESISSLSELVRAMHPYCLPNLTHLASLEDELQEQPDDLTLPEGCVVLEIVGQAATAGDDLEIPVVVRQVSPGPRPVLLDDSLETSSALQLLMPTLESETEAAVPKVTLCSEKEGLSLNSEEKLDSACLLKPREVVEPVVPKEPQNPPANAAPGSQRARKGRKKKSKEQPAACVEGYARRLRSSSRGQSTVGTEVTSQVDNLQKQPQEELQKESGPLQGKGKPRAWARAWAAALENSSPKNLERSAGQSSPAKEGPLDLYPKLADTIQTNPIPTHLSLVDSAQASPMPVDSVEADPTAVGPVLAGPVPVDPGLVDLASTSSELVEPLPAEPVLINPVLADSAAVDPAVVPISDNLPPVDAVPSGPAPVDLALVDPVPNDLTPVDPVLVKSRPTDPRRGAVSSALGGSAPQLLVESESLDPPKTIIPEVKEVVDSLKIESGTSATTHEARPRPLSLSEYRRRRQQRQAETEERSPQPPTGKWPSLPETPTGLADIPCLVIPPAPAKKTALQRSPETPLEICLVPVGPSPASPSPEPPVSKPVASSPTEQVPSQEMPLLARPSPPVQSVSPAVPTPPSMSAALPFPAGGLGMPPSLPPPPLQPPSLPLSMGPVLPDPFTHYAPLPSWPCYPHVSPSGYPCLPPPPTVPLVSGTPGAYAVPPTCSVPWAPPPAPVSPYSSTCTYGPLGWGPGPQHAPFWSTVPPPPLPPASIGRAVPQPKMESRGTPAGPPENVLPLSMAPPLSLGLPGHGAPQTEPTKVEVKPVPASPHPKHKVSALVQSPQMKALACVSAEGVTVEEPASERLKPETQETRPREKPPLPATKAVPTPRQSTVPKLPAVHPARLRKLSFLPTPRTQGSEDVVQAFISEIGIEASDLSSLLEQFEKSEAKKECPPPAPADSLAVGNSGGVDIPQEKRPLDRLQAPELANVAGLTPPATPPHQLWKPLAAVSLLAKAKSPKSTAQEGTLKPEGVTEAKHPAAVRLQEGVHGPSRVHVGSGDHDYCVRSRTPPKKMPALVIPEVGSRWNVKRHQDITIKPVLSLGPAAPPPPCIAASREPLDHRTSSEQADPSAPCLAPSSLLSPEASPCRNDMNTRTPPEPSAKQRSMRCYRKACRSASPSSQGWQGRRGRNSRSVSSGSNRTSEASSSSSSSSSSSRSRSRSLSPPHKRWRRSSCSSSGRSRRCSSSSSSSSSSSSSSSSSSSSRSRSRSPSPRRRSDRRRRYSSYRSHDHYQRQRVLQKERAIEERRVVFIGKIPGRMTRSELKQRFSVFGEIEECTIHFRVQGDNYGFVTYRYAEEAFAAIESGHKLRQADEQPFDLCFGGRRQFCKRSYSDLDSNREDFDPAPVKSKFDSLDFDTLLKQAQKNLRR

SEQ ID NO: 822147 - protein, 121 aa, Homo sapiens [sequence omitted]

SEQ ID NO: 822148 - protein, 1585 aa, Homo sapiens
MEELMLQDETLLGTMQSYMDASLISLIEDFGSLGESRLSLEDQNEVSLLTALTEILDNADSENLSPFDSIPDSELLVSPREGSSLHKLLTLSRTPPERDLITPVDPLGPSTGSSRGSGVEMSLPDPSWDFSPPSFLETSSPKLPSWRPPRSRPRWGQSPPPQQRSDGEEEEEVASFSGQILAGELDNCVSSIPDFPMHLACPEEEDKATAAEMAVPAAGDESISSLSELVRAMHPYCLPNLTHLASLEDELQEQPDDLTLPEGCVVLEIVGQAATAGDDLEIPVVVRQVSPGPRPVLLDDSLETSSALQLLMPTLESETEAAVPKVTLCSEKEGLSLNSEEKLDSACLLKPREVVEPVVPKEPQNPPANAAPGSQRARKGRKKKSKEQPAACVEGYARRLRSSSRGQSTVGTEVTSQVDNLQKQPQEELQKESGPLQGKGKPRAWARAWAAALENSSPKNLERSAGQSSPAKEGPLDLYPKLADTIQTNPIPTHLSLVDSAQASPMPVDSVEADPTAVGPVLAGPVPVDPGLVDLASTSSELVEPLPAEPVLINPVLADSAAVDPAVVPISDNLPPVDAVPSGPAPVDLALVDPVPNDLTPVDPVLVKSRPTDPRRGAVSSALGGSAPQLLVESESLDPPKTIIPEVKEVVDSLKIESGTSATTHEARPRPLSLSEYRRRRQQRQAETEERSPQPPTGKWPSLPETPTGLADIPCLVIPPAPAKKTALQRSPETPLEICLVPVGPSPASPSPEPPVSKPVASSPTEQVPSQEMPLLARPSPPVQSVSPAVPTPPSMSAALPFPAGGLGMPPSLPPPPLQPPSLPLSMGPVLPDPFTHYAPLPSWPCYPHVSPSGYPCLPPPPTVPLVSGTPGAYAVPPTCSVPWAPPPAPVSPYSSTCTYGPLGWGPGPQHAPFWSTVPPPPLPPASIGRAVPQPKMESRGTPAGPPENVLPLSMAPPLSLGLPGHGAPQTEPTKVEVKPVPASPHPKHKVSALVQSPQMKALACVSAEGVTVEEPASERLKPETQETRPREKPPLPATKAVPTPRQSTVPKLPAVHPARLRKLSFLPTPRTQGSEDVVQAFISEIGIEASDLSSLLEQFEKSEAKKECPPPAPADSLAVGNSGGVDIPQEKRPLDRLQAPELANVAGLTPPATPPHQLWKPLAAVSLLAKAKSPKSTAQEGTLKPEGVTEAKHPAAVRLQEGVHGPSRVHVGSGDHDYCVRSRTPPKKMPALVIPEVGSRWNVKRHQDITIKPVLSLGPAAPPPPCIAASREPLDHRTSSEQADPSAPCLAPSSLLSPEASPCRNDMNTRTPPEPSAKQRSMRCYRKACRSASPSSQGWQGRRGRNSRSVSSGSNRTSEASSSSSSSSSSSRSRSRSLSPPHKRWRRSSCSSSGRSRRCSSSSSSSSSSSSSSSSSSSSRSRSRSPSPRRRSDRRRRYSSYRSHDHYQRQRVLQKERAIEERRVVFIGKIPGRMTRSELKQRFSVFGEIEECTIHFRVQGDNYGFVTYRYAEEAFAAIESGHKLRQADEQPFDLCFGGRRQFCKRSYSDLDSNREDFDPAPVKSKFDSLDFDTLLKQAQKNLRR

SEQ ID NO: 822149 - protein, 1054 aa, Homo sapiens
GDTSSSESGMLSNGERFSESALSKISVRAVSSDTSFWSSRDNLPPVDAVPSGPAPVDLALVDPVPNDLTPVDPVLVKSRPTDPRRGAVSSALGGSAPQLLVESESLDPPKTIIPEVKEVVDSLKIESGTSATTHEARPRPLSLSEYRRRRQQRQAETEERSPQPPTGKWPSLPETPTGLADIPCLVIPPAPAKKTALQRSPETPLEICLVPVGPSPASPSPEPPVSKPVASSPTEQVPSQEMPLLARPSPPVQSVSPAVPTPPSMSAALPFPAGGLGMPPSLPPPPLQPPSLPLSMGPVLPDPFTHYAPLPSWPCYPHVSPSGYPCLPPPPTVPLVSGTPGAYAVPPTCSVPWAPPPAPVSPYSSTCTYGPLGWGPGPQHAPFWSTVPPPPLPPASIGRAVPQPKMESRGTPAGPPENVLPLSMAPPLSLGLPGHGAPQTEPTKVEVKPVPASPHPKHKVSALVQSPQMKALACVSAEGVTVEEPASERLKPETQETRPREKPPLPATKAVPTPRQSTVPKLPAVHPARLRKLSFLPTPRTQGSEDVVQAFISEIGIEASDLSSLLEQFEKSEAKKECPPPAPADSLAVGNSGGVDIPQEKRPLDRLQAPELANVAGLTPPATPPHQLWKPLAAVSLLAKAKSPKSTAQEGTLKPEGVTEAKHPAAVRLQEGVHGPSRVHVGSGDHDYCVRSRTPPKKMPALVIPEVGSRWNVKRHQDITIKPVLSLGPAAPPPPCIAASREPLDHRTSSEQADPSAPCLAPSSLLSPEASPCRNDMNTRTPPEPSAKQRSMRCYRKACRSASPSSQGWQGRRGRNSRSVSSGSNRTSEASSSSSSSSSSSRSRSRSLSPPHKRWRRSSCSSSGRSRRCSSSSSSSSSSSSSSSSSSSSRSRSRSPSPRRRSDRRRRYSSYRSHDHYQRQRVLQKERAIEERRVVFIGKIPGRMTRSELKQRFSVFGEIEECTIHFRVQGDNYGFVTYRYAEEAFAAIESGHKLRQADEQPFDLCFGGRRQFCKRSYSDLDSNREDFDPAPVKSKFDSLDFDTLLKQAQKNLRR

SEQ ID NO: 822150 - protein, 1677 aa, Homo sapiens; identical to SEQ ID NO: 822146

SEQ ID NO: 822151 - protein, 1677 aa, Homo sapiens; identical to SEQ ID NO: 822146

SEQ ID NO: 822152 - protein, 1268 aa, Homo sapiens
ASDQSSAGCSGAKMAARRGRRDGVAPPPSGGPGPDPGGGARGSGWGSRSQAPYGTLGAVSGGEQVLLHEEAGDSGFVSLSRLGPSLRDKDLEMEELMLQDETLLGTMQSYMDASLISLIEDFGSLGESRLSLEDQNEVSLLTALTEILDNADSENLSPFDSIPDSELLVSPREGSSLHKLLTLSRTPPERDLITPVDPLGPSTGSSRGSGVEMSLPDPSWDFSPPSFLETSSPKLPSWRPPRSRPRWGQSPPPQQRSDGEEEEEVASFSGQILAGELDNCVSSIPDFPMHLACPEEEDKATAAEMAVPAAGDESISSLSELVRAMHPYCLPNLTHLASLEDELQEQPDDLTLPEGCVVLEIVGQAATAGDDLEIPVVVRQVSPGPRPVLLDDSLETSSALQLLMPTLESETEAAVPKVTLCSEKEGLSLNSEEKLDSACLLKPREVVEPVVPKEPQNPPANAAPGSQRARKGRKKKSKEQPAACVEGYARRLRSSSRGQSTVGTEVTSQVDNLQKQPQEELQKESGPLQGKGKPRAWARAWAAALENSSPKNLERSAGQSSPAKEGPLDLYPKLADTIQTNPIPTHLSLVDSAQASPMPVDSVEADPTAVGPVLAGPVPVDPGLVDLASTSSELVEPLPAEPVLINPVLADSAAVDPAVVPISDNLPPVDAVPSGPAPVDLALVDPVPNDLTPVDPVLVKSRPTDPRRGAVSSALGGSAPQLLVESESLDPPKTIIPEVKEVVDSLKIESGTSATTHEARPRPLSLSEYRRRRQQRQAETEERSPQPPTGKWPSLPETPTGLADIPCLVIPPAPAKKTALQRSPETPLEICLVPVGPSPASPSPEPPVSKPVASSPTEQVPSQEMPLLARPSPPVQSVSPAVPTPPSMSAALPFPAGGLGMPPSLPPPPLQPPSLPLSMGPVLPDPFTHYAPLPSWPCYPHVSPSGYPCLPPPPTVPLVSGTPGAYAVPPTCSVPWAPPPAPVSPYSSTCTYGPLGWGPGPQHAPFWSTVPPPPLPPASIGRAVPQPKMESRGTPAGPPENVLPLSMAPPLSLGLPGHGAPQTEPTKVEVKPVPASPHPKHKVSALVQSPQMKALACVSAEGVTVEEPASERLKPETQETRPREKPPLPATKAVPTPRQSTVPKLPAVHPARLRKLSFLPTPRTQGSEDVVQAFISEIGIEASDLSSLLEQFEKSEGPAVVPLDVLEDALPLLRHHLPLRLPHPHHPVLEAAHDPHPPAGEVTGGGGTALIVHMTITKGKECYKRSVQ

SEQ ID NO: 822153 - protein, 1413 aa, Homo sapiens
ASDQSSAGCSGAKMAARRGRRDGVAPPPSGGPGPDPGGGARGSGWGSRSQAPYGTLGAVSGGEQVLLHEEAGDSGFVSLSRLGPSLRDKDLEMEELMLQDETLLGTMQSYMDASLISLIEDFGSLGESRLSLEDQNEVSLLTALTEILDNADSENLSPFDSIPDSELLVSPREGSSLHKLLTLSRTPPERDLITPVDPLGPSTGSSRGSGVEMSLPDPSWDFSPPSFLETSSPKLPSWRPPRSRPRWGQSPPPQQRSDGEEEEEVASFSGQILAGELDNCVSSIPDFPMHLACPEEEDKATAAEMAVPAAGDESISSLSELVRAMHPYCLPNLTHLASLEDELQEQPDDLTLPEGCVVLEIVGQAATAGDDLEIPVVVRQVSPGPRPVLLDDSLETSSALQLLMPTLESETEAAVPKVTLCSEKEGLSLNSEEKLDSACLLKPREVVEPVVPKEPQNPPANAAPGSQRARKGRKKKSKEQPAACVEGYARRLRSSSRGQSTVGTEVTSQVDNLQKQPQEELQKESGPLQGKGKPRAWARAWAAALENSSPKNLERSAGQSSPAKEGPLDLYPKLADTIQTNPIPTHLSLVDSAQASPMPVDSVEADPTAVGPVLAGPVPVDPGLVDLASTSSELVEPLPAEPVLINPVLADSAAVDPAVVPISDNLPPVDAVPSGPAPVDLALVDPVPNDLTPVDPVLVKSRPTDPRRGAVSSALGGSAPQLLVESESLDPPKTIIPEVKEVVDSLKIESGTSATTHEARPRPLSLSEYRRRRQQRQAETEERSPQPPTGKWPSLPETPTGLADIPCLVIPPAPAKKTALQRSPETPLEICLVPVGPSPASPSPEPPVSKPVASSPTEQVPSQEMPLLARPSPPVQSVSPAVPTPPSMSAALPFPAGGLGMPPSLPPPPLQPPSLPLSMGPVLPDPFTHYAPLPSWPCYPHVSPSGYPCLPPPPTVPLVSGTPGAYAVPPTCSVPWAPPPAPVSPYSSTCTYGPLGWGPGPQHAPFWSTVPPPPLPPASIGRAVPQPKMESRGTPAGPPENVLPLSMAPPLSLGLPGHGAPQTEPTKVEVKPVPASPHPKHKVSALVQSPQMKALACVSAEGVTVEEPASERLKPETQETRPREKPPLPATKAVPTPRQSTVPKLPAVHPARLRKLSFLPTPRTQGSEDVVQAFISEIGIEASDLSSLLEQFEKSEAKKECPPPAPADSLAVGNSGSSCSSSGRSRRCSSSSSSSSSSSSSSSSSSSSRSRSRSPSPRRRSDRRRRYSSYRSHDHYQRQRVLQKERAIEERRVVFIGKIPGRMTRSELKQRFSVFGEIEECTIHFRVQGDNYGFVTYRYAEEAFAAIESGHKLRQADEQPFDLCFGGRRQFCKRSYSDLDSNREDFDPAPVKSKFDSLDFDTLLKQAQKNLRR

SEQ ID NO: 822154 - protein, 1663 aa, Homo sapiens
ASDQSSAGCSGAKMAARRGRRDGVAPPPSGGPGPDPGGGARGSGWGSRSQAPYGTLGAVSGGEQVLLHEEAGDSGFVSLSRLGPSLRDKDLEMEELMLQDETLLGTMQSYMDASLISLIEDFGSLGESRLSLEDQNEVSLLTALTEILDNADSENLSPFDSIPDSELLVSPREGSSLHKLLTLSRTPPERDLITPVDPLGPSTGSSRGSGVEMSLPDPSWDFSPPSFLETSSPKLPSWRPPRSRPRWGQSPPPQQRSDGEEEEEVASFSGQILAGELDNCVSSIPDFPMHLACPEEEDKATAAEMAVPAAGDESISSLSELVRAMHPYCLPNLTHLASLEDELQEQPDDLTLPEGCVVLEIVGQAATAGDDLEIPVVVRQVSPGPRPVLLDDSLETSSALQLLMPTLESETEAAVPKVTLCSEKEGLSLNSEEKLDSACLLKPREVVEPVVPKEPQNPPANAAPGSQRARKGRKKKSKEQPAACVEGYARRLRSSSRGQSTVGTEVTSQVDNLQKQPQEELQKESGPLQGKGKPRAWARAWAAALENSSPKNLERSAGQSSPAKEGPLDLYPKLADTIQTNPIPTHLSLVDSAQASPMPVDSVEADPTAVGPVLAGPVPVDPGLVDLASTSSELVEPLPAEPVLINPVLADSAAVDPAVVPISDNLPPVDAVPSGPAPVDLALVDPVPNDLTPVDPVLVKSRPTDPRRGAVSSALGGSAPQLLVESESLDPPKTIIPEVKEVVDSLKIESGTSATTHEARPRPLSLSEYRRRRQQRQAETEERSPQPPTGKWPSLPETPTGLADIPCLVIPPAPAKKTALQRSPETPLEICLVPVGPSPASPSPEPPVSKPVASSPTEQVPSQEMPLLARPSPPVQSVSPAVPTPPSMSAALPFPAGGLGMPPSLPPPPLQPPSLPLSMGPVLPDPFTHYAPLPSWPCYPHVSPSGYPCLPPPPTVPLVSGTPGAYAVPPTCSVPWAPPPAPVSPYSSTCTYGPLGWGPGPQHAPFWSTVPPPPLPPASIGRAVPQPKMESRGTPAGPPENVLPLSMAPPLSLGLPGHGAPQTEPTKVEVKPVPASPHPKHKVSALVQSPQMKALACVSAEGVTVEEPASERLKPETQETRPREKPPLPATKAVPTPRQSTVPKLPAVHPARLRKLSFLPTPRTQGSEDVVQAFISEIGIEASDLSSLLEQFEKSEAKKECPPPAPADSLAVGNSGGVDIPQEKRPLDRLQAPELANVAGLTPPATPPHQLWKPLAAVSLLAKAKSPKSTAQEGTLKPEGVTEAKHPAAVRLQEGVHGPSRVHVGSGDHDYCVRSRTPPKKMPALVIPEVGSRWNVKRHQDITIKPVLSLGPAAPPPPCIAASREPLDHRTSSEQADPSAPCLAPSSLLSPEASPCRNDMNTRTPPEPSAKQRSMRCYRKACRSASPSSQGWQGRRGRNSRSVSSGSNRTSEASSSSSSSSSSSRSRSRSLSPPHKRWRRSSCSSSGRSRRCSSSSSSSSSSSSSSSSSSSSRSRSRSPSPRRRSDRRRRYSSYRSHDHYQRQRVLQKERAIEERRVVFIGKIPGRMTRSELKQRFSVFGEIEECTIHFRVQGDNYGFVTYRYAEEAFAAIESGHKLRQADEQPFDLCFGGRRQFCKRSYSDLGEWREGLKLWNASSPPQKGS

SEQ ID NO: 822155 - protein, 1673 aa, Homo sapiens
ASDQSSAGCSGAKMAARRGRRDGVAPPPSGGPGPDPGGGARGSGWGSRSQAPYGTLGAVSGGEQVLLHEEAGDSGFVSLSRLGPSLRDKDLEMEELMLQDETLLGTMQSYMDASLISLIEDFGSLGESRLSLEDQNEVSLLTALTEILDNADSENLSPFDSIPDSELLVSPREGSSLHKLLTLSRTPPERDLITPVDPLGPSTGSSRGSGVEMSLPDPSWDFSPPSFLETSSPKLPSWRPPRSRPRWGQSPPPQQRSDGEEEEEVASFSGQILAGELDNCVSSIPDFPMHLACPEEEDKATAAEMAVPAAGDESISSLSELVRAMHPYCLPNLTHLASLEDELQEQPDDLTLPEGCVVLEIVGQAATAGDDLEIPVVVRQVSPGPRPVLLDDSLETSSALQLLMPTLESETEAAVPKVTLCSEKEGLSLNSEEKLDSACLLKPREVVEPVVPKEPQNPPANAAPGSQRARKGRKKKSKEQPAACVEGYARRLRSSSRGQSTVGTEVTSQVDNLQKQPQEELQKESGPLQGKGKPRAWARAWAAALENSSPKNLERSAGQSSPAKEGPLDLYPKLADTIQTNPIPTHLSLVDSAQASPMPVDSVEADPTAVGPVLAGPVPVDPGLVDLASTSSELVEPLPAEPVLINPVLADSAAVDPAVVPISDNLPPVDAVPSGPAPVDLALVDPVPNDLTPVDPVLVKSRPTDPRRGAVSSALGGSAPQLLVESESLDPPKTIIPEVKEVVDSLKIESGTSATTHEARPRPLSLSEYRRRRQQRQAETEERSPQPPTGKWPSLPETPTGLADIPCLVIPPAPAKKTALQRSPETPLEICLVPVGPSPASPSPEPPVSKPVASSPTEQVPSQEMPLLARPSPPVQSVSPAVPTPPSMSAALPFPAGGLGMPPSLPPPPLQPPSLPLSMGPVLPDPFTHYAPLPSWPCYPHVSPSGYPCLPPPPTVPLVSGTPGAYAVPPTCSVPWAPPPAPVSPYSSTCTYGPLGWGPGPQHAPFWSTVPPPPLPPASIGRAVPQPKMESRGTPAGPPENVLPLSMAPPLSLGLPGHGAPQTEPTKVEVKPVPASPHPKHKVSALVQSPQMKALACVSAEGVTVEEPASERLKPETQETRPREKPPLPATKAVPTPRQSTVPKLPAVHPARLRKLSFLPTPRTQGSEDVVQAFISEIGIEASDLSSLLEQFEKSEAKKECPPPAPADSLAVGNSGGVDIPQEKRPLDRLQAPELANVAGLTPPATPPHQLWKPLAAVSLLAKAKSPKSTAQEGTLKPEGVTEAKHPAAVRLQEGVHGPSRVHVGSGDHDYCVRSRTPPKKMPALVIPEVGSRWNVKRHQDITIKPVLSLGPAAPPPPCIAASREPLDHRTSSEQADPSAPCLAPSSLLSPEASPCRNDMNTRTPPEPSAKQRSMRCYRKACRSASPSSQGWQGRRGRNSRSVSSGSNRTSEASSSSSSSSSSSRSRSRSLSPPHKRWRRSSCSSSGRSRRCSSSSSSSSSSSSSSSSSSSSRSRSRSPSPRRRSDRRRRYSSYRSHDHYQRQRVLQKERAIEERRVVFIGKIPGRMTRSELKQRFSVFGEIEECTIHFRVQGDNYGFVTYRYAEEAFAAIESGHKLRQADEQPFDLCFGGRRQFCKRSYSDLDVRSRQYSISAPMENLCDLSLIEITERLRY

SEQ ID NO: 822156 - protein, 1680 aa, Homo sapiens
ASDQSSAGCSGAKMAARRGRRDGVAPPPSGGPGPDPGGGARGSGWGSRSQAPYGTLGAVSGGEQVLLHEEAGDSGFVSLSRLGPSLRDKDLEMEELMLQDETLLGTMQSYMDASLISLIEDFGSLGESRLSLEDQNEVSLLTALTEILDNADSENLSPFDSIPDSELLVSPREGSSLHKLLTLSRTPPERDLITPVDPLGPSTGSSRGSGVEMSLPDPSWDFSPPSFLETSSPKLPSWRPPRSRPRWGQSPPPQQRSDGEEEEEVASFSGQILAGELDNCVSSIPDFPMHLACPEEEDKATAAEMAVPAAGDESISSLSELVRAMHPYCLPNLTHLASLEDELQEQPDDLTLPEGCVVLEIVGQAATAGDDLEIPVVVRQVSPGPRPVLLDDSLETSSALQLLMPTLESETEAAVPKVTLCSEKEGLSLNSEEKLDSACLLKPREVVEPVVPKEPQNPPANAAPGSQRARKGRKKKSKEQPAACVEGYARRLRSSSRGQSTVGTEVTSQVDNLQKQPQEELQKESGPLQGKGKPRAWARAWAAALENSSPKNLERSAGQSSPAKEGPLDLYPKLADTIQTNPIPTHLSLVDSAQASPMPVDSVEADPTAVGPVLAGPVPVDPGLVDLASTSSELVEPLPAEPVLINPVLADSAAVDPAVVPISDNLPPVDAVPSGPAPVDLALVDPVPNDLTPVDPVLVKSRPTDPRRGAVSSALGGSAPQLLVESESLDPPKTIIPEVKEVVDSLKIESGTSATTHEARPRPLSLSEYRRRRQQRQAETEERSPQPPTGKWPSLPETPTGLADIPCLVIPPAPAKKTALQRSPETPLEICLVPVGPSPASPSPEPPVSKPVASSPTEQVPSQEMPLLARPSPPVQSVSPAVPTPPSMSAALPFPAGGLGMPPSLPPPPLQPPSLPLSMGPVLPDPFTHYAPLPSWPCYPHVSPSGYPCLPPPPTVPLVSGTPGAYAVPPTCSVPWAPPPAPVSPYSSTCTYGPLGWGPGPQHAPFWSTVPPPPLPPASIGRAVPQPKMESRGTPAGPPENVLPLSMAPPLSLGLPGHGAPQTEPTKVEVKPVPASPHPKHKVSALVQSPQMKALACVSAEGVTVEEPASERLKPETQETRPREKPPLPATKAVPTPRQSTVPKLPAVHPARLRKLSFLPTPRTQGSEDVVQAFISEIGIEASDLSSLLEQFEKSEAKKECPPPAPADSLAVGNSGGVDIPQEKRPLDRLQAPELANVAGLTPPATPPHQLWKPLAAVSLLAKAKSPKSTAQEGTLKPEGVTEAKHPAAVRLQEGVHGPSRVHVGSGDHDYCVRSRTPPKKMPALVIPEVGSRWNVKRHQDITIKPVLSLGPAAPPPPCIAASREPLDHRTSSEQADPSAPCLAPSSLLSPEASPCRNDMNTRTPPEPSAKQRSMRCYRKACRSASPSSQGWQGRRGRNSRSVSSGSNRTSEASSSSSSSSSSSRSRSRSLSPPHKRWRRSSCSSSGRSRRCSSSSSSSSSSSSSSSSSSSSRSRSRSPSPRRRSDRRRRYSSYRSHDHYQRQRVLQKERAIGRNEVRSYHLRGKDKGPKIHSHPHPQQTKKHHGTLNKTEITETTEKKFIINSSEIHSQGEKKRWGFPKALWCEVKKMTDQGRFSLLDEVHHGRRKSCIPKKGIQGKSKTRKRKSSGKSEALSDHYEAE

SEQ ID NO: 822157 - protein, 247 aa, Homo sapiens
MKIVLLDLFYSALSLVLSFLKERQDWGLGEISRVYLNHSQHSCMPSYPSRSSCSSSGRSRRCSSSSSSSSSSSSSSSSSSSSRSRSRSPSPRRRSDRRRRYSSYRSHDHYQRQRVLQKERAIEERRVVFIGKIPGRMTRSELKQRFSVFGEIEECTIHFRVQGDNYGFVTYRYAEEAFAAIESGHKLRQADEQPFDLCFGGRRQFCKRSYSDLDSNREDFDPAPVKSKFDSLDFDTLLKQAQKNLRR

SEQ ID NO: 822158 - protein, 159 aa, Homo sapiens
MFGGLMTPSFVRYSSYRSHDHYQRQRVLQKERAIEERRVVFIGKIPGRMTRSELKQRFSVFGEIEECTIHFRVQGDNYGFVTYRYAEEAFAAIESGHKLRQADEQPFDLCFGGRRQFCKRSYSDLDSNREDFDPAPVKSKFDSLDFDTLLKQAQKNLRR

SEQ ID NO: 822159 - protein, 1216 aa, Homo sapiens
ASDQSSAGCSGAKMAARRGRRDGVAPPPSGGPGPDPGGGARGSGWGSRSQAPYGTLGAVSGGEQVLLHEEAGDSGFVSLSRLGPSLRDKDLEMEELMLQDETLLGTMQSYMDASLISLIEDFGSLGESRLSLEDQNEVSLLTALTEILDNADSENLSPFDSIPDSELLVSPREGSSLHKLLTLSRTPPERDLITPVDPLGPSTGSSRGSGVEMSLPDPSWDFSPPSFLETSSPKLPSWRPPRSRPRWGQSPPPQQRSDGEEEEEVASFSGQILAGELDNCVSSIPDFPMHLACPEEEDKATAAEMAVPAAGDESISSLSELVRAMHPYCLPNLTHLASLEDELQEQPDDLTLPEGCVVLEIVGQAATAGDDLEIPVVVRQVSPGPRPVLLDDSLETSSALQLLMPTLESETEAAVPKVTLCSEKEGLSLNSEEKLDSACLLKPREVVEPVVPKEPQNPPANAAPGSQRARKGRKKKSKEQPAACVEGYARRLRSSSRGQSTVGTEVTSQVDNLQKQPQEELQKESGPLQGKGKPRAWARAWAAALENSSPKNLERSAGQSSPAKEGPLDLYPKLADTIQTNPIPTHLSLVDSAQASPMPVDSVEADPTAVGPVLAGPVPVDPGLVDLASTSSELVEPLPAEPVLINPVLADSAAVDPAVVPISDNLPPVDAVPSGPAPVDLALVDPVPNDLTPVDPVLVKSRPTDPRRGAVSSALGGSAPQLLVESESLDPPKTIIPEVKEVVDSLKIESGTSATTHEARPRPLSLSEYRRRRQQRQAETEERSPQPPTGKWPSLPETPTGLADIPCLVIPPAPAKKTALQRSPETPLEICLVPVGPSPASPSPEPPVSKPVASSPTEQVPSQEMPLLARPSPPVQSVSPAVPTPPSMSAALPFPAGGLGMPPSLPPPPLQPPSLPLSMGPVLPDPFTHYAPLPSWPCYPHVSPSGYPCLPPPPTVPLVSGTPGAYAVPPTCSVPWAPPPAPVSPYSSTCTYGPLGWGPGPQHAPFWSTVPPPPLPPASIGRAVPQPKMESRGTPAGPPENVLPLSMAPPLSLGLPGHGAPQTEPTKVEVKPVPASPHPKHKVSALVQSPQMKALACVSAEGVTVEEPASERLKPETQETRPREKPPLPATKAVPTPRQSTVPKLPAVHPARLRKLSFLPTPRTQGSEDVVQAFISEIGIEASDLSSLLEQFEKSEAKKECPPPAPADSLAVGNSG

SEQ ID NO: 822160 - protein, 1216 aa, Homo sapiens; identical to SEQ ID NO: 822159

SEQ ID NO: 822161 - protein, 1210 aa, Homo sapiens
ASDQSSAGCSGAKMAARRGRRDGVAPPPSGGPGPDPGGGARGSGWGSRSQAPYGTLGAVSGGEQVLLHEEAGDSGFVSLSRLGPSLRDKDLEMEELMLQDETLLGTMQSYMDASLISLIEDFGSLGESRLSLEDQNEVSLLTALTEILDNADSENLSPFDSIPDSELLVSPREGSSLHKLLTLSRTPPERDLITPVDPLGPSTGSSRGSGVEMSLPDPSWDFSPPSFLETSSPKLPSWRPPRSRPRWGQSPPPQQRSDGEEEEEVASFSGQILAGELDNCVSSIPDFPMHLACPEEEDKATAAEMAVPAAGDESISSLSELVRAMHPYCLPNLTHLASLEDELQEQPDDLTLPEGCVVLEIVGQAATAGDDLEIPVVVRQVSPGPRPVLLDDSLETSSALQLLMPTLESETEAAVPKVTLCSEKEGLSLNSEEKLDSACLLKPREVVEPVVPKEPQNPPANAAPGSQRARKGRKKKSKEQPAACVEGYARRLRSSSRGQSTVGTEVTSQVDNLQKQPQEELQKESGPLQGKGKPRAWARAWAAALENSSPKNLERSAGQSSPAKEGPLDLYPKLADTIQTNPIPTHLSLVDSAQASPMPVDSVEADPTAVGPVLAGPVPVDPGLVDLASTSSELVEPLPAEPVLINPVLADSAAVDPAVVPISDNLPPVDAVPSGPAPVDLALVDPVPNDLTPVDPVLVKSRPTDPRRGAVSSALGGSAPQLLVESESLDPPKTIIPEVKEVVDSLKIESGTSATTHEARPRPLSLSEYRRRRQQRQAETEERSPQPPTGKWPSLPETPTGLADIPCLVIPPAPAKKTALQRSPETPLEICLVPVGPSPASPSPEPPVSKPVASSPTEQVPSQEMPLLARPSPPVQSVSPAVPTPPSMSAALPFPAGGLGMPPSLPPPPLQPPSLPLSMGPVLPDPFTHYAPLPSWPCYPHVSPSGYPCLPPPPTVPLVSGTPGAYAVPPTCSVPWAPPPAPVSPYSSTCTYGPLGWGPGPQHAPFWSTVPPPPLPPASIGRAVPQPKMESRGTPAGPPENVLPLSMAPPLSLGLPGHGAPQTEPTKVEVKPVPASPHPKHKVSALVQSPQMKALACVSAEGVTVEEPASERLKPETQETRPREKPPLPATKAVPTPRQSTVPKLPAVHPARLRKLSFLPTPRTQGSEDVVQAFISEIGIEASDLSSLLEQFEKSEGEGTWVVLLQLFFW

SEQ ID NO: 822162 - protein, 266 aa, Homo sapiens
MLRYPYFCRMYKECLSCWLESGIPNLGVWPNRIHTTAEKYREYEAREQTDQTQAQELHRSQDRDFETMAKLHIPVMVDEVVHCLSPQKGQIFLDMTFGSGGHTKAILQKESDIVLYALDRDPTAYALAEHLSELYPKQIRAMLGQFSQAEALLMKAGVQPGTFDGVLMDLGCPPCNDTPEGGFLPFRKDGLGHENGCARSTHCIYLRLRGGKLPEIVGIVRPRLPLQNQVHVRRALILPVENFPCRGLPRVVSPRDVTEPLGWCPP

SEQ ID NO: 822163 - protein, 223 aa, Homo sapiens
MAAKVFESIGKFGLALAVAGGVVNSALYNVDAGHRAVIFDRFRGVQDIVVGEGTHFLIPWVQKPIIFDCRSRPRNVPVITGSKDLQNVNITLRILFRPVASQLPRIFTSIGEDYDERVLPSITTEILKSVVARFDAGELITQRELVSRQVSDDLTERAATFGLILDDVSLTHLTFGKEFTEAVEAKQVAQQEAERARFVVEKAEQTEKRRPSSLLRATPRQLS

SEQ ID NO: 822164 - protein, 223 aa, Homo sapiens; identical to SEQ ID NO: 822163

SEQ ID NO: 822165 - protein, 195 aa, Homo sapiens
MAAKVFESIGKFGLALAVAGGVVNSALYNVDAGHRAVIFDRFRGVQDIVVGEGTHFLIPWVQKPIIFDCRSRPRNVPVITGSKDLQNVNITLRILFRPVASQLPRIFTSIGEDYDERVLPSITTEILKSVVARFDAGELITQRELVSRQVSDDLTERAATFGLILDDVSLENLPPESQRRVEQQCQKRGGNWGES

SEQ ID NO: 822166 - protein, 198 aa, Homo sapiens
MAAKVFESIGKFGLALAVAGGVVNSALYNVDAGHRAVIFDRFRGVQDIVVGEGTHFLIPWVQKPIIFDCRSRPRNVPVITGSKDLQNVNITLRILFRPVASQLPRIFTSIGEDYDERVLPSITTEILKSVVARFDAGELITQRELVSRQVSDDLTERAATFGLILDDVSLGKILRETEEGKGLQFSFRCLAPFLGRRY

SEQ ID NO: 822167 - protein, 107 aa, Homo sapiens
MAAKVFESIGKFGLALAVAGGVVNSALYNVDAGHRAVIFDRFRGVQDIVVGEGTHFLIPWVQKPIIFDCRSRPRNVPVITGSKGADWATAPMILNTAFLLLPPQKSL

SEQ ID NO: 822168 - protein, 223 aa, Homo sapiens; identical to SEQ ID NO: 822163

SEQ ID NO: 822169 - protein, 223 aa, Homo sapiens; identical to SEQ ID NO: 822163

SEQ ID NO: 822170 - protein, 223 aa, Homo sapiens; identical to SEQ ID NO: 822163

SEQ ID NO: 822171 - protein, 223 aa, Homo sapiens; identical to SEQ ID NO: 822163

SEQ ID NO: 822172 - protein, 223 aa, Homo sapiens; identical to SEQ ID NO: 822163

SEQ ID NO: 822173 - protein, 223 aa, Homo sapiens; identical to SEQ ID NO: 822163

SEQ ID NO: 822174 - protein, 223 aa, Homo sapiens; identical to SEQ ID NO: 822163

SEQ ID NO: 822175 - protein, 223 aa, Homo sapiens; identical to SEQ ID NO: 822163

SEQ ID NO: 822176 - protein, 223 aa, Homo sapiens; identical to SEQ ID NO: 822163

SEQ ID NO: 822177 - protein, 201 aa, Homo sapiens
SEGYSGEVDAGHRAVIFDRFRGVQDIVVGEGTHFLIPWVQKPIIFDCRSRPRNVPVITGSKDLQNVNITLRILFRPVASQLPRIFTSIGEDYDERVLPSITTEILKSVVARFDAGELITQRELVSRQVSDDLTERAATFGLILDDVSLTHLTFGKEFTEAVEAKQVAQQEAERARFVVEKAEQTEKRRPSSLLRATPRQLS

SEQ ID NO: 822178 - protein, 240 aa, Homo sapiens
MWELQHCRTLGKFVQGHPAEQRLNQDTIRHAFLVSTTPSTHSPRRPLDAGHRAVIFDRFRGVQDIVVGEGTHFLIPWVQKPIIFDCRSRPRNVPVITGSKDLQNVNITLRILFRPVASQLPRIFTSIGEDYDERVLPSITTEILKSVVARFDAGELITQRELVSRQVSDDLTERAATFGLILDDVSLTHLTFGKEFTEAVEAKQVAQQEAERARFVVEKAEQTEKRRPSSLLRATPRQLS

SEQ ID NO: 822179 - protein, 178 aa, Homo sapiens
KGGTIRLGTRPGGGSRQKPIIFDCRSRPRNVPVITGSKDLQNVNITLRILFRPVASQLPRIFTSIGEDYDERVLPSITTEILKSVVARFDAGELITQRELVSRQVSDDLTERAATFGLILDDVSLTHLTFGKEFTEAVEAKQVAQQEAERARFVVEKAEQTEKRRPSSLLRATPRQLS

SEQ ID NO: 822180 - protein, 131 aa, Homo sapiens
MAAKVFESIGKFGLALAVAGGVVNSALYNVDAGHRAVIFDRFRGVQDIVVGEGTHFLIPWVQKPIIFDCRSRPRNVPVITGSKDLQNVNITLRILFRPVASQLPRIFTSIGEDYDERVLPSITTEILKSVV

SEQ ID NO: 822181 - protein, 111 aa, Homo sapiens [sequence omitted]

SEQ ID NO: 822182 - protein, 116 aa, Homo sapiens
MAAKVFESIGKFGLALAVAGGVVNSALYNVDAGHRAVIFDRFRGVQDIVVGEGTHFLIPWVQKPIIFDCRSRPRNVPVITGSKALTLSEHHLPASGAVRAPPAAPVRAHPACTSAG

SEQ ID NO: 822183 - protein, 223 aa, Homo sapiens; identical to SEQ ID NO: 822163

SEQ ID NO: 822184 - protein, 290 aa, Homo sapiens
MAAKVFESIGKFGLALAVAGGVVNSALYNVDAGHRAVIFDRFRGVQDIVVGEGTHFLIPWVQKPIIFDCRSRPRNVPVITGSKDLQNVNITLRILFRPVASQLPRIFTSIGEDYDERVLPSITTEILKSVVARFDAGELITQRELVSRQVSDDLTERAATFGLILDDVSLTHLEPSGEGSSHRRGGKSTSGGPRGNPRGPDYAAGPPLRHWNTGALTLSLSGTSGTDDDLQLHAHARACSSSTLTRESSNRNTYRTDNTSHSGVSSPQGHAASALPTITNAPNEPRRGCP

SEQ ID NO: 822185 - protein, 168 aa, Homo sapiens
MAAKVFESIGKFGLALAVAGGVVNSALYNVDAGHRAVIFDRFRGVQDIVVGEGTHFLIPWVQKPIIFDCRSRPRNVPVITGSKDLQTVNITLRILGTAARGTASGGSRGGHPGYRLYLAVVSSDFAASGPPSWARDSKVTGMVISLDCVASLGIGGSTVSVPSGDREE

SEQ ID NO: 822186 - protein, 116 aa, Homo sapiens; identical to SEQ ID NO: 822182

SEQ ID NO: 822187 - protein, 223 aa, Homo sapiens
  misc_feature (212)..(212): Xaa can be any naturally occurring amino acid
MAAKVFESIGKFGLALAVAGGVVNSALYNVDAGHRAVIFDRFRGVQDIVVGEGTHFLIPWVQKPIIFDCRSRPRNVPVITGSKDLQNVNITLRILFRPVASQLPRIFTSIGEDYDERVLPSITTEILKSVVARFDAGELITQRELVSRQVSDDLTERAATFGLILDDVSLTHLTFGKEFTEAVEAKQVAQQEAERARFVVEKKGLKQTRKKXAGQSISWLEGA

SEQ ID NO: 822188 - protein, 223 aa, Homo sapiens; identical to SEQ ID NO: 822163

SEQ ID NO: 822189 - protein, 290 aa, Homo sapiens
MAAKVFESIGKFGLALAVAGGVVNSALYNVDAGHRAVIFDRFRGVQDIVVGEGTHFLIPWVQKPIIFDCRSRPRNVPVITGSKDLQNVNITLRILFRPVASQLPRIFTSIGEDYDERVLPSITTEILKSVVARFDAGELITQRELVSRQVSDDLTERAATFGLILDDVSLTHLEPSGEGSSHRRGGKSTSGGPRGNPRGPDYAAGPPLRHWNTGALTLSLSGTSGTDDDLQLHAHARACSSSTLTRESSNRNTYRTDNTSHSGVSSPQGHGASALPTITNAPNEPRRGCP

SEQ ID NO: 822190 - protein, 223 aa, Homo sapiens; identical to SEQ ID NO: 822163

SEQ ID NO: 822191 - protein, 223 aa, Homo sapiens; identical to SEQ ID NO: 822163

SEQ ID NO: 822192 - protein, 223 aa, Homo sapiens; identical to SEQ ID NO: 822163

SEQ ID NO: 822193 - protein, 223 aa, Homo sapiens; identical to SEQ ID NO: 822163

SEQ ID NO: 822194 - protein, 223 aa, Homo sapiens; identical to SEQ ID NO: 822163

SEQ ID NO: 822195 - protein, 223 aa, Homo sapiens; identical to SEQ ID NO: 822163

SEQ ID NO: 822196 - protein, 223 aa, Homo sapiens; identical to SEQ ID NO: 822163

SEQ ID NO: 822197 - protein, 223 aa, Homo sapiens; identical to SEQ ID NO: 822163

SEQ ID NO: 822198 - protein, 207 aa, Homo sapiens
MAAKVFESIGKFGLALAVAGGVVNSALYNVDAGHRAVIFDRFRGVQKPIIFDCRSRPRNVPVITGSKDLQNVNITLRILFRPVASQLPRIFTSIGEDYDERVLPSITTEILKSVVARFDAGELITQRELVSRQVSDDLTERAATFGLILDDVSLTHLTFGKEFTEAVEAKQVAQQEAERARFVVEKAEQTEKRRPSSLLRATPRQLS

SEQ ID NO: 822199 - protein, 111 aa, Homo sapiens [sequence omitted]

SEQ ID NO: 822200 - protein, 111 aa, Homo sapiens [sequence omitted]

SEQ ID NO: 822201 - protein, 116 aa, Homo sapiens; identical to SEQ ID NO: 822182

SEQ ID NO: 822202 - protein, 186 aa, Homo sapiens
MAAKVFESIGKFGLALAVAGGVVNSALYNVDAGHRAVIFDRFRGVQDIVVGEGTHFLIPWVQKPIIFDCRSRPRNVPVITGSKDLQNVNITLRILFRPVASQLPRIFTSIGEDYDERVLPSITTEILKSVVARFDAGELITQRELVSRQVSDDLTERAATFGLILDDVSLTQPSFCSHPRNHCEIS

SEQ ID NO: 822203 - protein, 126 aa, Homo sapiens
DDGDRCCRGRYGTQAVAKGIARLFPDHFLLSLREVRAPARPLQNFGALARRRRQDFSRDFCNCVRARWRWVSLGRGGRGTSTAAAHVTGLHSCGVWLRPRPGRGRGQGLGGGDCGAVGVGGLKRKR

SEQ ID NO: 822204 - protein, 178 aa, Homo sapiens
MAAGTAAALAFLSQESRTRAGGVGGLRVPAPVTMDSFFFGCELSGHTRSFTFKVEEEDDAEHVLALTMLCLTEGAKDECNVVEVVARNHDHQEIAVPVANLKLSCQPMLSLDDFQLQPPVTFRLKSGSGPVRITGRHQIVTMSNDVSEEESEEEEEDSDEEEVELCPILPAKKQGGRP

SEQ ID NO: 822205 - protein, 178 aa, Homo sapiens; identical to SEQ ID NO: 822204

SEQ ID NO: 822206 - protein, 178 aa, Homo sapiens; identical to SEQ ID NO: 822204

SEQ ID NO: 822207 - protein, 655 aa, Homo sapiens
NSGRSGRRLLPAGAPSMVDYIVEYDYDAVHDDELTIRVGEIIRNVKKLQEEGWLEGELNGRRGMFPDNFVKEIKRETEFKDDSLPIKRERHGNVASLVQRISTYGLPAGGIQPHPQTKNIKKKTKKRQCKVLFEYIPQNEDELELKVGDIIDINEEVEEGWWSGTLNNKLGLFPSNFVKELEVTDDGETHEAQDDSETVLAGPTSPIPSLGNVSETASGSVTQPKKIRGIGFGDIFKEGSVKLRTRTSSSETEEKKPEKPLILQSLGPKTQSVEITKTDTEGKIKAKEYCRTLFAYEGTNEDELTFKEGEIIHLISKETGEAGWWRGELNGKEGVFPDNFAVQINELDKDFPKPKKPPPPAKAPAPKPELIAAEKKYFSLKPEEKDEKSTLEQKPSKPAAPQVPPKKPTPPTKASNLLRSSGTVYPKRPEKPVPPPPPIAKINGEVSSISSKFETEPVSKLKLDSEQLPLRPKSVDFDSLTVRTSKETDVVNFDDIASSENLLHLTANRPKMPGRRLPGRFNGGHSPTHSPEKILKLPKEEDSANLKPSELKKDTCYSPKPSVYLSTPSSASKANTTAFLTPLEIKAKVETDDVKKNSLDELRAQIIELLCIVEALKKDHGKELEKLRKDLEEEKTMRSNLEMEIEKLKKAVLSS

SEQ ID NO: 822208 - protein, 315 aa, Homo sapiens
FERGTPFGVFAPKPKKPPPPAKAPAPKPELIAAEKKYFSLKPEEKDEKSTLEQKPSKPAAPQVPPKKPTPPTKASNLLRSSGTVYPKRPEKPVPPPPPIAKINGEVSSISSKFETEPVSKLKLDSEQLPLRPKSVDFDSLTVRTSKETDVVNFDDIASSENLLHLTANRPKMPGRRLPGRFNGGHSPTHSPEKILKLPKEEDSANLKPSELKKDTCYSPKPSVYLSTPSSASKANTTAFLTPLEIKAKVETDDVKKNSLDELRAQIIELLCIVEALKKDHGKELEKLRKDLEEEKTMRSNLEMEIEKLKKAVLSS

SEQ ID NO: 822209 - protein, 655 aa, Homo sapiens; identical to SEQ ID NO: 822207

SEQ ID NO: 822210 - protein, 403 aa, Homo sapiens
NSGRSGRRLLPAGAPSMVDYIVEYDYDAVHDDELTIRVGEIIRNVKKLQEEGWLEGELNGRRGMFPDNFVKEIKRETEFKDDSLPIKRERHGNVASLVQRISTYGLPAGGIQPHPQTKNIKKKTKKRQCKVLFEYIPQNEDELELKVGDIIDINEEVEEGWWSGTLNNKLGLFPSNFVKELEVTDDGETHEAQDDSETVLAGPTSPIPSLGNVSETASGSVTQPKKIRGIGFGDIFKEGSVKLRTRTSSSETEEKKPEKPLILQSLGPKTQSVEITKTDTEGKIKAKEYCRTLFAYEGTNEDELTFKEGEIIHLISKETGEAGWWRGELNGKEGVFPDNFAVQINELDKDFPKPKKPPPPAKAPAPKPELIAAEKKYFSLKPEEKGEANFQLSKKQLFLLLSF

SEQ ID NO: 822211 - protein, 568 aa, Homo sapiens
NSGRSGRRLLPAGAPSMVDYIVEYDYDAVHDDELTIRVGEIIRNVKKLQEEGWLEGELNGRRGMFPDNFVKEIKRETEFKDDSLPIKRERHGNVASLVQRISTYGLPAGGIQPHPQTKNIKKKTKKRQCKVLFEYIPQNEDELELKVGDIIDINEEVEEGWWSGTLNNKLGLFPSNFVKELEVTDDGETHEAQDDSETVLAGPTSPIPSLGNVSETASGSVTQPKKIRGIGFGDIFKEGSVKLRTRTSSSETEEKKPEKPLILQSLGPKTQSVEITKTDTEGKIKAKEYCRTLFAYEGTNEDELTFKEGEIIHLISKETGEAGWWRGELNGKEGVFPDNFAVQINELDKDFPKPKKPPPPAKAPAPKPELIAAEKKYFSLKPEEKDEKSTLEQKPSKPAAPQVPPKKPTPPTKASNLLRSSGTVYPKRPEKPVPPPPPIAKINGEVSSISSKFETEPVSKLKLDSEQLPLRPKSVDFDSLTVRTSKETDVVNFDDIASSENLLHLTANRPKMPGRRLPGRFNGGHSPTHSPEKILKLPKEEDSASASRAALKRLVERRGRMEATLRPA

SEQ ID NO: 822212 - protein, 498 aa, Homo sapiens
NSGRSGRRLLPAGAPSMVDYIVEYDYDAVHDDELTIRVGEIIRNVKKLQEEGWLEGELNGRRGMFPDNFVKEIKRETEFKDDSLPIKRERHGNVASLVQRISTYGLPAGGIQPHPQTKNIKKKTKKRQCKVLFEYIPQNEDELELKVGDIIDINEEVEEGWWSGTLNNKLGLFPSNFVKELEVTDDGETHEAQDDSETVLAGPTSPIPSLGNVSETASGSVTQPKKIRGIGFGDIFKEGSVKLRTRTSSSETEEKKPEKPLILQSLGPKTQSVEITKTDTEGKIKAKEYCRTLFAYEGTNEDELTFKEGEIIHLISKETGEAGWWRGELNGKEGVFPDNFAVQINELDKDFPKPKKPPPPAKAPAPKPELIAAEKKYFSLKPEEKDEKSTLEQKPSKPAAPQVPPKKPTPPTKASNLLRSSGTVYPKRPEKPVPPPPPIAKINGEVSSISSKFETEPVSKLKLDSEQLPLRPKSVDFDSLTVRTSKETGKSAWTAVVH

SEQ ID NO: 822213 - protein, 709 aa, Homo sapiens
RCGAPARRRGSLPIKGTRHRGNSAQVLSQRRSPRGRQRTSGSGSNEQPRRRQLPLQRRRPRRRRKGRRARREVQEGPSPWVHGPRVAEDTGLVPNWLLLLPVASMAEDWLDCPALGPGWKRREVFRKSGATCGRSDTYYQSPTGDRIRSKVELTRYLGPACDLTLFDFKQGILCYPAPKAHPVAVASKKRKKPSRPAKTRKRQVGPQSGEVRKEAPRDETKADTDTAPASFPAPGCCENCGISFSGDGTQRQRLKTLCKDCRAQRIAFNREQRMFKRVGCGECAACQVTEDCGACSTCLLQLPHDVASGLFCKCERRRCLRIVERSRGCGVCRGCQTQEDCGHCPICLRPPRPGLRRQWKCVQRRCLRGKHARRKGGCDSKMAARRRPGAQPLPPPPPSQSPEPTEPHPRALAPSPPAEFIYYCVDEDELQPYTNRRQNRKCGACAACLRRMDCGRCDFCCDKPKFGGSNQKRQKCRWRQCLQFAMKRLLPSVWSESEDGAGSPPPYRRRKRPSSARRHHLGPTLKPTLATRTAQPDHTQAPTKQEAGGGFVLPPPGTDLVFLREGASSPVQVPGPVAASTEALLQEAQCSGLSWVVALPQVKQEKADTQDEWTPGTAVLTSPVLVPGCPSKAVDPGLPSVKQEPPDPEEDKEENKDDSASKLAPEEEAGGAGTPVITEIFSLGGTRFRDTAVWLPRSKDLKKPGARKQ

SEQ ID NO: 822214 - protein, 660 aa, Homo sapiens
RCGAPARRRGSLPIKGTRHRGNSAQVLSQRRSPRGRQRTSGSGSNEQPRRRQLPLQRRRPRRRRKGRRARREVQEGPSPWVHGPRVAEDTGLVPNWLLLLPVASMAEDWLDCPALGPGWKRREVFRKSGATCGRSDTYYQSPTGDRIRSKVELTRYLGPACDLTLFDFKQGILCYPAPKAHPVAVASKKRKKPSRPAKTRKRQVGPQSGEVRKEAPRDETKADTDTAPASFPAPGCCENCGISFSGDGTQRQRLKTLCKDCRAQRIAFNREQRMFKSRGCGVCRGCQTQEDCGHCPICLRPPRPGLRRQWKCVQRRCLRGKHARRKGGCDSKMAARRRPGAQPLPPPPPSQSPEPTEPHPRALAPSPPAEFIYYCVDEDELQPYTNRRQNRKCGACAACLRRMDCGRCDFCCDKPKFGGSNQKRQKCRWRQCLQFAMKRLLPSVWSESEDGAGSPPPYRRRKRPSSARRHHLGPTLKPTLATRTAQPDHTQAPTKQEAGGGFVLPPPGTDLVFLREGASSPVQVPGPVAASTEALLQEAQCSGLSWVVALPQVKQEKADTQDEWTPGTAVLTSPVLVPGCPSKAVDPGLPSVKQEPPDPEEDKEENKDDSASKLAPEEEAGGAGTPVITEIFSLGGTRFRDTAVWLPRSKDLKKPGARKQ

SEQ ID NO: 822215 - protein, 653 aa, Homo sapiens
RCGAPARRRGSLPIKGTRHRGNSAQVLSQRRSPRGRQRTSGSGSNEQPRRRQLPLQRRRPRRRRKGRRARREVQEGPSPWVHGPRVAEDTGLVPNWLLLLPVASMAEDWLDCPALGPGWKRREVFRKSGATCGRSDTYYQSPTGDRIRSKVELTRYLGPACDLTLFDFKQGILCYPAPKAHPVAVASKKRKKPSRPAKTRKRQVGPQSGEVRKEAPRDETKADTDTAPASFPAPGCCENCGISFSGDGTQRQRLKTLCKDCRAQRIAFNREQRMFKRVGCGECAACQVTEDCGACSTCLLQLPHDVASGLFCKCERRRCLRIVERSRGCGVCRGCQTQEDCGHCPICLRPPRPGLRRQWKCVQRRCLRGKHARRKGGCDSKMAARRRPGAQPLPPPPPSQSPEPTEPHPRALAPSPPAEFIYYCVDEDELKRLLPSVWSESEDGAGSPPPYRRRKRPSSARRHHLGPTLKPTLATRTAQPDHTQAPTKQEAGGGFVLPPPGTDLVFLREGASSPVQVPGPVAASTEALLQEAQCSGLSWVVALPQVKQEKADTQDEWTPGTAVLTSPVLVPGCPSKAVDPGLPSVKQEPPDPEEDKEENKDDSASKLAPEEEAGGAGTPVITEIFSLGGTRFRDTAVWLPRSKDLKKPGARKQ

SEQ ID NO: 822216 - protein, 607 aa, Homo sapiens
RCGAPARRRGSLPIKGTRHRGNSAQVLSQRRSPRGRQRTSGSGSNEQPRRRQLPLQRRRPRRRRKGRRARREVQEGPSPWVHGPRVAEDTGLVPNWLLLLPVASMAEDWLDCPALGPGWKRREVFRKSGATCGRSDTYYQSPTGDRIRSKVELTRYLGPACDLTLFDFKQGILCYPAPKAHPVAVASKKRKKPSRPAKTRKRQVGPQSGEVRKEAPRDETKADTDTAPASFPAPGCCENCGISFSGDGTQRQRLKTLCKDCRAQRIAFNREQRMFKRVGCGECAACQVTEDCGACSTCLLQLPHDVASGLFCKCERRRCLRIVERSRGCGVCRGCQTQEDCGHCPICLRPPRPGLRRQWKCVQRRCLRGKHARRKGGCDSKMAARRRPGAQPLPPPPPSQSPEPTEPHPRALAPSPPAEFIYYCVDEDELKRLLPSVWSESEDGAGSPPPYRRRKRPSSARRHHLGPTLKPTLATRTAQPDHTQAPTKQEAGGGFVLPPPGTDLVFLREGASSPVQVPGPVAASTEALLQAVDPGLPSVKQEPPDPEEDKEENKDDSASKLAPEEEAGGAGTPVITEIFSLGGTRFRDTAVWLPRSKDLKKPGARKQ

SEQ ID NO: 822217 - protein, 415 aa, Homo sapiens
RCGAPARRRGSLPIKGTRHRGNSAQVLSQRRSPRGRQRTSGSGSNEQPRRRQLPLQRRRPRRRRKGRRARREVQEGPSPWVHGPRVAEDTGLVPNWLLLLPVASMAEDWLDCPALGPGWKRREVFRKSGATCGRSDTYYQSPTGDRIRSKVELTRYLGPACDLTLFDFKQGILCYPAPKAHPVAVASKKRKKPSRPAKTRKRQVGPQSGEVRKEAPRDETKADTDTAPASFPAPGCCENCGISFSGDGTQRQRLKTLCKDCRAQRIAFNREQRMFKRVGCGECAACQVTEDCGACSTCLLQLPHDVASGLFCKCERRRCLRIVERSRGCGVCRGCQTQEDCGHCPICLRPPRPGLRRQWKCVQRRCLRGKHARRKGGCDSKMAARRRPGAQPLPPPPPSQSPEPTEPVRPQWVEG

SEQ ID NO: 822218 - protein, 319 aa, Homo sapiens
RCGAPARRRGSLPIKGTRHRGNSAQVLSQRRSPRGRQRTSGSGSNEQPRRRQLPLQRRRPRRRRKGRRARREVQEGPSPWVHGPRVAEDTGLVPNWLLLLPVASMAEDWLDCPALGPGWKRREVFRKSGATCGRSDTYYQSPTGDRIRSKVELTRYLGPACDLTLFDFKQGILCYPAPKAHPVAVASKKRKKPSRPAKTRKRQVGPQSGEVRKEAPRDETKADTDTAPASFPAPGCCENCGISFSGDGTQRQRLKTLCKDCRAQRIAFNREQRMFKSRGCGVCRGCQTQEDCGHCPICLRPPRPGLRRQWKCVQRRCLR

SEQ ID NO: 822219 - protein, 134 aa, Homo sapiens
VNCVLKRAYTLVVLIICQFDVGTDLLHVLNKCSMLTPTLEWEYHSVILNWLLGITTLLLTGNATVVTTCAAGPSWFPDLCFLFCLDPDSQKPVTGLLIHILTLVHCDPQTLNYAPPGRATAPLVHLICPHPRIS

SEQ ID NO: 822220 - protein, 155 aa, Homo sapiens
RCGAPARRRGSLPIKGTRHRGNSAQVLSQRRSPRGRQRTSGSGSNEQPRRRQLPLQRRRPRRRRKGRRARREVQEGPSPWVHGPRVAEDTGLVPNWLLLLPVASMAEDWLDCPALGPGWKRREVFRKSGATCGRSDTYYQRYWVGSGQSQEWGRA

SEQ ID NO: 822221 - protein, 709 aa, Homo sapiens; identical to SEQ ID NO: 822213

SEQ ID NO: 822222 - protein, 653 aa, Homo sapiens; identical to SEQ ID NO: 822215

SEQ ID NO: 822223 - protein, 607 aa, Homo sapiens; identical to SEQ ID NO: 822216

SEQ ID NO: 822224 - protein, 727 aa, Homo sapiens
RCGAPARRRGSLPIKGTRHRGNSAQVLSQRRSPRGRQRTSGSGSNEQPRRRQLPLQRRRPRRRRKGRRARREVQEGPSPWVHGPRVAEDTGLVPNWLLLLPVASMAEDWLDCPALGPGWKRREVFRKSGATCGRSDTYYQSPTGDRIRSKVELTRYLGPACDLTLFDFKQGILCYPAPKAHPVAVASKKRKKPSRPAKTRKRQVGPQSGEVRKEAPRDETKADTDTAPASFPAPGCCENCGISFSGDGTQRQRLKTLCKDCRAQRIAFNREQRMFKRVGCGECAACQVTEDCGACSTCLLQLPHDVASGLFCKCERRRCLRIVERSRGCGVCRGCQTQEDCGHCPICLRPPRPGLRRQWKCVQRRCLRGKHARRKGGCDSKMAARRRPGAQPLPPPPPSQSPEPTEPHPRALAPSPPAEFIYYCVDEDELQPYTNRRQNRKCGACAACLRRMDCGRCDFCCDKPKFGGSNQKRQKCRWRQCLQFAMKRLLPSVWSESEDGAGSPPPYRRRKRPSSARRHHLGPTLKPTLATRTAQPDHTQAPTKQEAGGGFVLPPPGTDLVFLREGASSPVQVPGPVAASTEALLQEAQCSGLSWVVALPQVKQEKADTQDEWTPGTAVLTSPVLVPGCPSKAVDPGLPSVKQEPPDPEEDKEENKDDSASKLAPEEEAGGAGTPVRRFSAWVAPASGIPPSGCPGPKTLKNLELESSRLEASTDCRIQGDICRLAL

SEQ ID NO: 822225 - protein, 745 aa, Homo sapiens
RCGAPARRRGSLPIKGTRHRGNSAQVLSQRRSPRGRQRTSGSGSNEQPRRRQLPLQRRRPRRRRKGRRARREVQEGPSPWVHGPRVAEDTGLVPNWLLLLPVASMAEDWLDCPALGPGWKRREVFRKSGATCGRSDTYYQSPTGDRIRSKVELTRYLGPACDLTLFDFKQGILCYPAPKAHPVAVASKKRKKPSRPAKTRKRQVGPQSGEVRKEAPRDETKADTDTAPASFPAPGCCENCGISFSGDGTQRQRLKTLCKDCRAQRIAFNREQRMFKRVGCGECAACQVTEDCGACSTCLLQLPHDVASGLFCKCERRRCLRIVERVSWASGKSPRLTSAPGPHGLGPMLHASAAHLPPAKQSRGCGVCRGCQTQEDCGHCPICLRPPRPGLRRQWKCVQRRCLRGKHARRKGGCDSKMAARRRPGAQPLPPPPPSQSPEPTEPHPRALAPSPPAEFIYYCVDEDELQPYTNRRQNRKCGACAACLRRMDCGRCDFCCDKPKFGGSNQKRQKCRWRQCLQFAMKRLLPSVWSESEDGAGSPPPYRRRKRPSSARRHHLGPTLKPTLATRTAQPDHTQAPTKQEAGGGFVLPPPGTDLVFLREGASSPVQVPGPVAASTEALLQEAQCSGLSWVVALPQVKQEKADTQDEWTPGTAVLTSPVLVPGCPSKAVDPGLPSVKQEPPDPEEDKEENKDDSASKLAPEEEAGGAGTPVITEIFSLGGTRFRDTAVWLPRSKDLKKPGARKQ

SEQ ID NO: 822226 - protein, 663 aa, Homo sapiens
RCGAPARRRGSLPIKGTRHRGNSAQVLSQRRSPRGRQRTSGSGSNEQPRRRQLPLQRRRPRRRRKGRRARREVQEGPSPWVHGPRVAEDTGLVPNWLLLLPVASMAEDWLDCPALGPGWKRREVFRKSGATCGRSDTYYQSPTGDRIRSKVELTRYLGPACDLTLFDFKQGILCYPAPKAHPVAVASKKRKKPSRPAKTRKRQVGPQSGEVRKEAPRDETKADTDTAPASFPAPGCCENCGISFSGDGTQRQRLKTLCKDCRAQRIAFNREQRMFKRVGCGECAACQVTEDCGACSTCLLQLPHDVASGLFCKCERRRCLRIVERSRGCGVCRGCQTQEDCGHCPICLRPPRPGLRRQWKCVQRRCLRGKHARRKGGCDSKMAARRRPGAQPLPPPPPSQSPEPTEPHPRALAPSPPAEFIYYCVDEDELQPYTNRRQNRKCGACAACLRRMDCGRCDFCCDKPKFGGSNQKRQKCRWRQCLQFAMKRLLPSVWSESEDGAGSPPPYRRRKRPSSARRHHLGPTLKPTLATRTAQPDHTQAPTKQEAGGGFVLPPPGTDLVFLREGASSPVQVPGPVAASTEALLQAVDPGLPSVKQEPPDPEEDKEENKDDSASKLAPEEEAGGAGTPVITEIFSLGGTRFRDTAVWLPRSKDLKKPGARKQ

SEQ ID NO: 822227 - protein, 690 aa, Homo sapiens
RCGAPARRRGSLPIKGTRHRGNSAQVLSQRRSPRGRQRTSGSGSNEQPRRRQLPLQRRRPRRRRKGRRARREVQEGPSPWVHGPRVAEDTGLVPNWLLLLPVASMAEDWLDCPALGPGWKRREVFRKSGATCGRSDTYYQSPTGDRIRSKVELTRYLGPACDLTLFDFKQGILCYPAPKAHPVAVASKKRKKPSRPAKTRKRQVGPQSGEVRKEAPRDETKADTDTAPASFPAPGCCENCGISFSGDGTQRQRLKTLCKDCRAQRIAFNREQRMFKRVGCGECAACQVTEDCGACSTCLLQLPHDVASGLFCKCERRRCLRIVERSRGCGVCRGCQTQEDCGHCPICLRPPRPGLRRQWKCVQRRCLRGKHARRKGGCDSKMAARRRPGAQPLPPPPPSQSPEPTEPQPYTNRRQNRKCGACAACLRRMDCGRCDFCCDKPKFGGSNQKRQKCRWRQCLQFAMKRLLPSVWSESEDGAGSPPPYRRRKRPSSARRHHLGPTLKPTLATRTAQPDHTQAPTKQEAGGGFVLPPPGTDLVFLREGASSPVQVPGPVAASTEALLQAVDPGLPSVKQEPPDPEEDKEENKDDSASKLAPEEEAGGAGTPVITEIFSLGGTRFRDTAVWLPSLQGRHSGREDGCKVWETEDTVEPTSTSWNPRGWPGTHVSLSPPPASMMWVSCRRSWCPSSQS

SEQ ID NO: 822228 - protein, 678 aa, Homo sapiens
RCGAPARRRGSLPIKGTRHRGNSAQVLSQRRSPRGRQRTSGSGSNEQPRRRQLPLQRRRPRRRRKGRRARREVQEGPSPWVHGPRVAEDTGLVPNWLLLLPVASMAEDWLDCPALGPGWKRREVFRKSGATCGRSDTYYQSPTGDRIRSKVELTRYLGPACDLTLFDFKQGILCYPAPKAHPVAVASKKRKKPSRPAKTRKRQVGPQSGEVRKEAPRDETKADTDTAPASFPAPGCCENCGISFSGDGTQRQRLKTLCKDCRAQRIAFNREQRMFKRVGCGECAACQVTEDCGACSTCLLQLPHDVASGLFCKCERRRCLRIVERSRGCGVCRGCQTQEDCGHCPICLRPPRPGLRRQWKCVQRRCLRHLAHRLRRRHQRCQRRTPLAVAPPTGKHARRKGGCDSKMAARRRPGAQPLPPPPPSQSPEPTEPHPRALAPSPPAEFIYYCVDEDELKRLLPSVWSESEDGAGSPPPYRRRKRPSSARRHHLGPTLKPTLATRTAQPDHTQAPTKQEAGGGFVLPPPGTDLVFLREGASSPVQVPGPVAASTEALLQEAQCSGLSWVVALPQVKQEKADTQDEWTPGTAVLTSPVLVPGCPSKAVDPGLPSVKQEPPDPEEDKEENKDDSASKLAPEEEAGGAGTPVITEIFSLGGTRFRDTAVWLPRSKDLKKPGARKQ

SEQ ID NO: 822229 - protein, 478 aa, Homo sapiens
MRPRLTLTQPQLHSLLLGAVRTVESASQGMAPKGSGSKRCAKTVERVGCGECAACQVTEDCGACSTCLLQLPHDVASGLFCKCERRRCLRIVERSRGCGVCRGCQTQEDCGHCPICLRPPRPGLRRQWKCVQRRCLRGKHARRKGGCDSKMAARRRPGAQPLPPPPPSQSPEPTEPHPRALAPSPPAEFIYYCVDEDELQPYTNRRQNRKCGACAACLRRMDCGRCDFCCDKPKFGGSNQKRQKCRWRQCLQFAMKRLLPSVWSESEDGAGSPPPYRRRKRPSSARRHHLGPTLKPTLATRTAQPDHTQAPTKQEAGGGFVLPPPGTDLVFLREGASSPVQVPGPVAASTEALLQEAQCSGLSWVVALPQVKQEKADTQDEWTPGTAVLTSPVLVPGCPSKAVDPGLPSVKQEPPDPEEDKEENKDDSASKLAPEEEAGGAGTPVITEIFSLGGTRFRDTAVWLPRSKDLKKPGARKQ

SEQ ID NO: 822230 - protein, 709 aa, Homo sapiens; identical to SEQ ID NO: 822213

SEQ ID NO: 822231 - protein, 709 aa, Homo sapiens; identical to SEQ ID NO: 822213

SEQ ID NO: 822232 - protein, 759 aa, Homo sapiens
RCGAPARRRGSLPIKGTRHRGNSAQVLSQRRSPRGRQRTSGSGSNEQPRRRQLPLQRRRPRRRRKGRRARREVQEGPSPWVHGPRVAEDTGLVPNWLLLLPVASMAEDWLDCPALGPGWKRREVFRKSGATCGRSDTYYQSPTGDRIRSKVELTRYLGPACDLTLFDFKQGILCYPAPKAHPVAVASKKRKKPSRPAKTRKRQVGPQSGEVRKEAPRDETKADTDTAPASFPAPGCCENCGISFSGDGTQRQRLKTLCKDCRAQRIAFNREQRMFKRVGCGECAACQVTEDCGACSTCLLQLPHDVASGLFCKCERRRCLRIVERSRGCGVCRGCQTQEDCGHCPICLRPPRPGLRRQWKCVQRRCLRGKHARRKGGCDSKMAARRRPGAQPLPPPPPSQSPEPTEPHPRALAPSPPAEFIYYCVDEDELQPYTNRRQNRKCGACAACLRRMDCGRCDFCCDKPKFGGSNQKRQKCRWRQCLQFAMKRLLPSVWSESEDGAGSPPPYRRRKRPSSARRHHLGPTLKPTLATRTAQPDHTQAPTKQEAGGGFVLPPPGTDLVFLREGASSPVQVPGPVAASTEALLQEAQCSGLSWVVALPQVKQEKADTQDEWTPGTAVLTSPVLVPGCPSKAVDPGLPSVKQEPPDPEEDKEENKDDSASKLAPEEEAGGAGTPVITEIFSLGGTRFRDTAVWLPSLQGRHSGREDGCKVWETEDTVEPTSTSWNPRGWPGTHVSLSPPPASMMWVSCRRSWCPSSQS

SEQ ID NO: 822233 - protein, 709 aa, Homo sapiens; identical to SEQ ID NO: 822213

SEQ ID NO: 822234 - protein, 721 aa, Homo sapiens
RCGAPARRRGSLPIKGTRHRGNSAQVLSQRRSPRGRQRTSGSGSNEQPRRRQLPLQRRRPRRRRKGRRARREVQEGPSPWVHGPRVAEDTGLVPNWLLLLPVASMAEDWLDCPALGPGWKRREVFRKSGATCGRSDTYYQSPTGDRIRSKVELTRYLGPACDLTLFDFKQGILCYPAPKAHPVAVASKKRKKPSRPAKTRKRQVGPQSGEVRKEAPRDETKADTDTAPASFPAPGCCENCGISFSGDGTQRQRLKTLCKDCRAQRIAFNREQRMFKRVGCGECAACQVTEDCGACSTCLLQLPHDVASGLFCKCERRRCLRIVERSRGCGVCRGCQTQEDCGHCPICLRPPRPGLRRQWKCVQRRCLRGKHARRKGGCDSKMAARRRPGAQPLPPPPPSQSPEPTEPHPRALAPSPPAEFIYYCVDEDELQPYTNRRQNRKCGACAACLRRMDCGRCDFCCDKPKFGGSNQKRQKCRWRQCLQFAMKRLLPSVWSESEDGAGSPPPYRRRKRPSSARRHHLGPTLKPTLATRTAQPDHTQAPTKQEAGGGFVLPPPGTDLVFLREGASSPVQVPGPVAASTEALLQEAQCSGLSWVVALPQVKQEKADTQDEWTPGTAVLTSPVLVPGCPSKAVDPGLPSVKQEPPDPEEDKEENKDDSASKLAPEEEAGGAGTPVITEIFSLGGTRFRDTAVWLPRYYHLALDWKCNCGYHLCCRSVLVP

SEQ ID NO: 822235 - protein, 619 aa, Homo sapiens
RCGAPARRRGSLPIKGTRHRGNSAQVLSQRRSPRGRQRTSGSGSNEQPRRRQLPLQRRRPRRRRKGRRARREVQEGPSPWVHGPRVAEDTGLVPNWLLLLPVASMAEDWLDCPALGPGWKRREVFRKSGATCGRSDTYYQSPTGDRIRSKVELTRYLGPACDLTLFDFKQGILCYPAPKAHPVAVASKKRKKPSRPAKTRKRQVGPQSGEVRKEAPRDETKADTDTAPASFPAPGCCENCGISFSGDGTQRQRLKTLCKDCRAQRIAFNREQRMFKRVGCGECAACQVTEDCGACSTCLLQLPHDVASGLFCKCERRRCLRIVERSRGCGVCRGCQTQEDCGHCPICLRPPRPGLRRQWKCVQRRCLRGKHARRKGGCDSKMAARRRPGAQPLPPPPPSQSPEPTEPHPRALAPSPPAEFIYYCVDEDELQPYTNRRQNRKCGACAACLRRMDCGRCDFCCDKPKFGGSNQKRQKCRWRQCLQFAMKRLLPSVWSESEDGAGSPPPYRRRKRPSSARRHHLGPTLKPTLATRTAQPDHTQAPTKQEAGGGFVLPPPGTDLVFLREGASSPVQVPGPVAASTEALLQAVDPGLPSVKQEPPDPERGGAAERGGAAERGGA

SEQ ID NO: 822236 - protein, 313 aa, Homo sapiens
RCGAPARRRGSLPIKGTRHRGNSAQVLSQRRSPRGRQRTSGSGSNEQPRRRQLPLQRRRPRRRRKGRRARREVQEGPSPWVHGPRVAEDTGLVPNWLLLLPVASMAEDWLDCPALGPGWKRREVFRKSGATCGRSDTYYQSPTGDRIRSKVELTRYLGPACDLTLFDFKQGILCYPAPKAHPVAVASKKRKKPSRPAKTRKRQVGPQSGEVRKEAPRDETKADTDTAPASFPAPGCCENCGISFSGDGTQRQRLKTLCKDCRAQRIAFNREQRMFKVSTTCFLFTTLQWEQDVMELVESEGMMMGPQDEESFY

SEQ ID NO: 822237 - protein, 385 aa, Homo sapiens
MGCRRTREGPSKAMIFPWKCQSTQRDLWNIFKLWGWTMLCCDFLAHHGTDCWTYHYSEKPMNWQRARRFCRDNYTDLVAIQNKAEIEYLEKTLPFSRSYYWIGIRKIGGIWTWVGTNKSLTEEAENWGDGEPNNKKNKEDCVEIYIKRNKDAGKWNDDACHKLKAALCYTASCQPWSCSGHGECVEIINNYTCNCDVGYYGPQCQFVIQCEPLEAPELGTMDCTHPLGNFSFSSQCAFSCSEGTNLTGIEETTCGPFGNWSSPEPTCQVIQCEPLSAPDLGIMNCSHPLASFSFTSACTFICSEGTELIGKKKTICESSGIWSNPSPICQKLDKSFSMIKEGDYNPLFIPVAVMVTAFSGLAFIIWLARRLKKGKKSKRSMNDPY

SEQ ID NO: 822238 - protein, 385 aa, Homo sapiens; identical to SEQ ID NO: 822237

SEQ ID NO: 822239 - protein, 385 aa, Homo sapiens; identical to SEQ ID NO: 822237

SEQ ID NO: 822240 - protein, 332 aa, Homo sapiens
MGCRRTREGPSKAMIFPWKCQSTQRDLWNIFKLWGWTMLCCDFLAHHGTDCWTYHYSEKPMNWQRARRFCRDNYTDLVAIQNKAEIEYLEKTLPFSRSYYWIGIRKIGGIWTWVGTNKSLTEEAENWGDGEPNNKKNKEDCVEIYIKRNKDAGKWNDDACHKLKAALCYTASCQPWSCSGHGECVEIINNYTCNCDVGYYGPQCQFVIQCEPLEAPELGTMDCTHPLGNFSFSSQCAFSCSEGTNLTGIEETTCGPFGNWSSPEPTCQVIQCEPLSAPDLGIMNCSHPLASFSFTSACTFICSEGTELIGKKKTICESSGIWSNPSPICQSE

SEQ ID NO: 822241 - protein, 369 aa, Homo sapiens
MGCRRTREGPSKAMIFPWKCQSTQRDLWNIFKLWGWTMLCCDFLAHHGTDCWTYHYSEKPMNWQRARRFCRDNYTDLVAIQNKAEIEYLEKTLPFSRSYYWIGIRKIGGIWTWVGTNKSLTEEAENWGDGEPNNKKNKEDCVEIYIKRNKDAGKWNDDACHKLKAALCYTASCQPWSCSGHGECVEIINNYTCNCDVGYYGPQCQFVIQCEPLEAPELGTMDCTHPLGNFSFSSQCAFSCSEGTNLTGIEETTCGPFGNWSSPEPTCQVIQCEPLSAPDLGIMNCSHPLASFSFTSACTFICSEGTELIGKKKTICESSGIWSNPSPICQKLDKSFSMIKEGDYNPLFIPVAVMVTAFSGLHQHGDGIL

SEQ ID NO: 822242 - protein, 313 aa, Homo sapiens
MGCRRTREGPSKAMIFPWKCQSTQRDLWNIFKLWGWTMLCCDFLAHHGTDCWTYHYSEKPMNWQRARRFCRDNYTDLVAIQNKAEIEYLEKTLPFSRSYYWIGIRKIGGIWTWVGTNKSLTEEAENWGDGEPNNKKNKEDCVEIYIKRNKDAGKWNDDACHKLKAALCYTASCQPWSCSGHGECVEIINNYTCNCDVGYYGPQCQFVIQCEPLSAPDLGIMNCSHPLASFSFTSACTFICSEGTELIGKKKTICESSGIWSNPSPICQKLDKSFSMIKEGDYNPLFIPVAVMVTAFSGLHQHGDGILYVEDTA

SEQ ID NO: 822243 - protein, 103 aa, Homo sapiens [sequence omitted]

SEQ ID NO: 822244 - protein, 103 aa, Homo sapiens [sequence omitted]

SEQ ID NO: 822245 - protein, 143 aa, Homo sapiens [sequence omitted]

SEQ ID NO: 822246 - protein, 103 aa, Homo sapiens [sequence omitted]

SEQ ID NO: 822247 - protein, 103 aa, Homo sapiens [sequence omitted]

SEQ ID NO: 822248 - protein, 120 aa, Homo sapiens
MRLRFDEESSGWSAAAGSCSAPLRGRRRRQRPRDLERPGRRGWPGPAWRPGATLRGLQGPSWGGRRGPEDGWLWDFYFAFSSLCRLSEGRELWRQPRGGETSSGVGRAGFSSGPSHQLAE

SEQ ID NO: 822249 - protein, 120 aa, Homo sapiens; identical to SEQ ID NO: 822248

SEQ ID NO: 822250 - protein, 120 aa, Homo sapiens; identical to SEQ ID NO: 822248

SEQ ID NO: 822251 - protein, 120 aa, Homo sapiens; identical to SEQ ID NO: 822248

SEQ ID NO: 822252 - protein, 503 aa, Homo sapiens
MTLGSPRKGLLMLLMALVTQGDPVKPSRGPLVTCTCESPHCKGPTCRGAWCTVVLVREEGRHPQEHRGCGNLHRELCRGRPTEFVNHYCCDSHLCNHNVSLVLEATQPPSEQPGTDGQLALILGPVLALLALVALGVLGLWHVRRRQEKQRGLHSELGESSLILKASEQGDSMLGDLLDSDCTTGSGSGLPFLVQRTVARQVALVECVGKGRYGEVWRGLWHGESVAVKIFSSRDEQSWFRETEIYNTVLLRHDNILGFIASDMTSRNSSTQLWLITHYHEHGSLYDFLQRQTLEPHLALRLAVSAACGLAHLHVEIFGTQGKPAIAHRDFKSRNVLVKSNLQCCIADLGLAVMHSQGSDYLDIGNNPRVGTKRYMAPEVLDEQIRTDCFESYKWTDIWAFGLVLWEIARRTIVNGIVEDYRPPFYDVVPNDPSFEDMKKVVCVDQQTPTIPNRLAADPVLSGLAQMMRECWYPNPSARLTALRIKKTLQKISNSPEKPKVIQ

SEQ ID NO: 822253 - protein, 546 aa, Homo sapiens
EAASLPPLQKKLCDFLWAGGSHGQRLSHFMALTPPLLLLSAGTMTLGSPRKGLLMLLMALVTQGDPVKPSRGPLVTCTCESPHCKGPTCRGAWCTVVLVREEGRHPQEHRGCGNLHRELCRGRPTEFVNHYCCDSHLCNHNVSLVLEATQPPSEQPGTDGQLALILGPVLALLALVALGVLGLWHVRRRQEKQRGLHSELGESSLILKASEQGDSMLGDLLDSDCTTGSGSGLPFLVQRTVARQVALVECVGKGRYGEVWRGLWHGESVAVKIFSSRDEQSWFRETEIYNTVLLRHDNILGFIASDMTSRNSSTQLWLITHYHEHGSLYDFLQRQTLEPHLALRLAVSAACGLAHLHVEIFGTQGKPAIAHRDFKSRNVLVKSNLQCCIADLGLAVMHSQGSDYLDIGNNPRVGTKRYMAPEVLDEQIRTDCFESYKWTDIWAFGLVLWEIARRTIVNGIVEDYRPPFYDVVPNDPSFEDMKKVVCVDQQTPTIPNRLAADPVLSGLAQMMRECWYPNPSARLTALRIKKTLQKISNSPEKPKVIQ

SEQ ID NO: 822254 - protein, 207 aa, Homo sapiens
MTLGSPRKGLLMLLMALVTQGDPVKPSRAIAHRDFKSRNVLVKSNLQCCIADLGLAVMHSQGSDYLDIGNNPRVGTKRYMAPEVLDEQIRTDCFESYKWTDIWAFGLVLWEIARRTIVNGIVEDYRPPFYDVVPNDPSFEDMKKVVCVDQQTPTIPNRLAADPVLSGLAQMMRECWYPNPSARLTALRIKKTLQKISNSPEKPKVIQ

SEQ ID NO: 822255 - protein, 537 aa, Homo sapiens
EAASLPPLQKKLCDFLWAGGSHGQRLSHFMALTPPLLLLSAGTMTLGSPRKGLLMLLMALVTQGDPVKPSRGPLVTCTCESPHCKGPTCRGAWCTVVLVREEGRHPQEHRGCGNLHRELCRGRPTEFVNHYCCDSHLCNHNVSLVLEATQPPSEQPGTDGQLALILGPVLALLALVALGVLGLWHVRRRQEKQRGLHSELGESSLILKASEQGDSMLGDLLDSDCTTGSGSGLPFLVQRTVARQVALVECVGKGRYGEVWRGLWHGESVAVKIFSSRDEQSWFRETEIYNTVLLRHDNILGFIASDMTSRNSSTQLWLITHYHEHGSLYDFLQRQTLEPHLALRLAVSAACGLAHLHVEIFGTQGKPAIAHRDFKSRNVLVKSNLQCCIADLGLAVMHSQGSDYLDIGNNPRVGTKRYMAPEVLDEQIRTDCFESYKWTDIWAFGLVLWEIARRTIVNGIVEDYRPPFYDVVPNDPSFEDMKKVVCVDQQTPTIPNRLAADPVRPLLGLGWRGVVAHGWDFWAQELVSEASASSHRY

SEQ ID NO: 822256 - protein, 537 aa, Homo sapiens; identical to SEQ ID NO: 822255

SEQ ID NO: 822257 - protein, 271 aa, Homo sapiens
  misc_feature (259)..(259): Xaa can be any naturally occurring amino acid
MTLGSPRKGLLMLLMALVTQGDPVKPSRGPLVTCTCESPHCKGPTCRGAWCTVVLVREEGRHPQEHRGCGNLHRELCRGRPTEFVNHYCCDSHLCNHNVSLVLEATQPPSEQPGTDGQLALILGPVLALLALVALGVLGLWHVRRRQEKQRGLHSELGESSLILKASEQGDSMLGDLLDSDCTTGSGSGLPFLVQRTVARQVALVECVGKGRYGEVWRGLWHGESVAVKIFSSRDEQSWFRETEIYNTVFAPRTRTNNXLRALFRPSRTIG

SEQ ID NO: 822258 - protein, 224 aa, Homo sapiens
MPALPTHISLGSWEPREHYTSKEYLGPWFSLWPLPSSPSPCTSPSAFPSLSHCFSQSPPCLPPGSQVWERGRSDRPHPHSLAVMHSQGSDYLDIGNNPRVGTKRYMAPEVLDEQIRTDCFESYKWTDIWAFGLVLWEIARRTIVNGIVEDYRPPFYDVVPNDPSFEDMKKVVCVDQQTPTIPNRLAADPVRPLLGLGWRGVVAHGWDFWAQELVSEASASSHRY

SEQ ID NO: 822259 - protein, 75 aa, Homo sapiens
AGTTVAELPVCLPGDPVKPSRGPLVTCTCESPHCKGPTCRGAWCTVVLVREEGRHPQEHRGCGNLHRELCRGRPT

SEQ ID NO: 822260 - protein, 548 aa, Homo sapiens
MPVDLGQALGLLPSLAKAEDSQFSESDAALQEELSSPETARQLFRQFRYQVMSGPHETLKQLRKLCFQWLQPEVHTKEQILEILMLEQFLTILPGEIQMWVRKQCPGSGEEAVTLVESLKGDPQRLWQWISIQVLGQDILSEKMESPSCQVGEVEPHLEVVPQELGLENSSSGPGELLSHIVKEESDTEAELALAASQPARLEERLIRDQDLGASLLPAAPQEQWRQLDSTQKEQYWDLMLETYGKMVSAGISHPKSDLTNSIEFGEELAGIYLHVNEKIPRPTCIGDRQENDKENLNLENHRDQELLHASCQASGEVPSQASLRGFFTEDEPGCFGEGENLPEALQNIQDEGTGEQLSPQERISEKQLGQHLPNPHSGEMSTMWLEEKRETSQKGQPRAPMAQKLPTCRECGKTFYRNSQLIFHQRTHTGETYFQCTICKKAFLRSSDFVKHQRTHTGEKPCKCDYCGKGFSDFSGLRHHEKIHTGEKPYKCPICEKSFIQRSNFNRHQRVHTGEKPYKCSHCGKSFSWSSSLDKHQRSHLGKKPFQ

SEQ ID NO: 822261 - protein, 534 aa, Homo sapiens
MPVDLGQALGLLPSLAKAEDSQFSESDAALQEELSSPETARQLFRQFRYQVMSGPHETLKQLRKLCFQWLQPEVHTKEQILEILMLEQFLTILPGEIQMWVRKQCPGSGEEAVTLVESLKGDPQRLWQWISIQVLGQDILSEKMESPSCQVGEVEPHLEVVPQELGLENSSSGPGELLSHIVKEESDTEAELALAASQPARLEERLIRDQDLGASLLPAAPQEQWRQLDSTQKEQYWDLMLETYGKMVSEFGEELAGIYLHVNEKIPRPTCIGDRQENDKENLNLENHRDQELLHASCQASGEVPSQASLRGFFTEDEPGCFGEGENLPEALQNIQDEGTGEQLSPQERISEKQLGQHLPNPHSGEMSTMWLEEKRETSQKGQPRAPMAQKLPTCRECGKTFYRNSQLIFHQRTHTGETYFQCTICKKAFLRSSDFVKHQRTHTGEKPCKCDYCGKGFSDFSGLRHHEKIHTGEKPYKCPICEKSFIQRSNFNRHQRVHTGEKPYKCSHCGKSFSWSSSLDKHQRSHLGKKPFQ

SEQ ID NO: 822262 - protein, 548 aa, Homo sapiens; identical to SEQ ID NO: 822260

SEQ ID NO: 822263 - protein, 277 aa, Homo sapiens
LQASCSEDMGRWLGLLLVEMGSRVTPEALHYDYVDVETLTSIVSAGRNSFLYARSCQNQWPEPRVYDDVPYEKMQDEEPERPTGAQVKRHASSCSEKSHRVDPQVKVKRHASSANQYKYGKNRAEEDARRYLVEKEKLEKEKETIRTELIALRQEKRELKEAIRSSPGAKLKALEEAVATLEAQCRAKEERRIDLELKLVAVKERLQQSLAGGPALGLSVSSKPKSGETANKPQNSVPEQPLPVNCVSELRKRSPSIVASNQGRVLQKAKEWEMKKT

SEQ ID NO: 822264 - protein, 277 aa, Homo sapiens; identical to SEQ ID NO: 822263

SEQ ID NO: 822265 - protein, 277 aa, Homo sapiens; identical to SEQ ID NO: 822263

SEQ ID NO: 822266 - protein, 277 aa, Homo sapiens; identical to SEQ ID NO: 822263

SEQ ID NO: 822267 - protein, 505 aa, Homo sapiens
MKFKLHVNSARQYKDLWNMSDDKPFLCTAPGCGQRFTNEDHLAVHKHKHEMTLKFGPARNDSVIVADQTPTPTRFLKNCEEVGLFNELASPFENEFKKASEDDIKKMPLDLSPLATPIIRSKIEEPSVVETTHQDSPLPHPESTTSDEKEVPLAQTAQPTSAIVRPASLQVPNVLLTSSDSSVIIQQAVPSPTSSTVITQAPSSNRPIVPVPGPFPLLLHLPNGQTMPVAIPASITSSNVHVPAAVPLVRPVTMVPSVPGIPGPSSPQPVQSEAKMRLKAALTQQHPPVTNGDTVKGHGSGLVRTQSEESRPQSLQQPATSTTETPASPAHTTPQTQSTSGRRRRAANEDPDEKRRKFLERNRAAASRCRQKRKVWVQSLEKKAEDLSSLNGQLQSEVTLLRNEVAQLKQLLLAHKDCPVTAMQKKSGYHTADKDDSSEDISVPSSPHTEAIQHSSVSTSNGVSSTSKAEAVATSVLTQMADQSTEPALSQIVMAPSSQSQPSGS

SEQ ID NO: 822268 - protein, 329 aa, Homo sapiens
MSTAYFVIIQQAVPSPTSSTVITQAPSSNRPIVPVPGPFPLLLHLPNGQTMPVAIPASITSSNVHVPAAVPLVRPVTMVPSVPGIPGPSSPQPVQSEAKMRLKAALTQQHPPVTNGDTVKGHGSGLVRTQSEESRPQSLQQPATSTTETPASPAHTTPQTQSTSGRRRRAANEDPDEKRRKFLERNRAAASRCRQKRKVWVQSLEKKAEDLSSLNGQLQSEVTLLRNEVAQLKQLLLAHKDCPVTAMQKKSGYHTADKDDSSEDISVPSSPHTEAIQHSSVSTSNGVSSTSKAEAVATSVLTQMADQSTEPALSQIVMAPSSQSQPSGS

SEQ ID NO: 822269 - protein, 447 aa, Homo sapiens
MYCAWMWPDQTPTPTRFLKNCEEVGLFNELASPFENEFKKASEDDIKKMPLDLSPLATPIIRSKIEEPSVVETTHQDSPLPHPESTTSDEKEVPLAQTAQPTSAIVRPASLQVPNVLLTSSDSSVIIQQAVPSPTSSTVITQAPSSNRPIVPVPGPFPLLLHLPNGQTMPVAIPASITSSNVHVPAAVPLVRPVTMVPSVPGIPGPSSPQPVQSEAKMRLKAALTQQHPPVTNGDTVKGHGSGLVRTQSEESRPQSLQQPATSTTETPASPAHTTPQTQSTSGRRRRAANEDPDEKRRKFLERNRAAASRCRQKRKVWVQSLEKKAEDLSSLNGQLQSEVTLLRNEVAQLKQLLLAHKDCPVTAMQKKSGYHTADKDDSSEDISVPSSPHTEAIQHSSVSTSNGVSSTSKAEAVATSVLTQMADQSTEPALSQIVMAPSSQSQPSGS

SEQ ID NO: 822270 - protein, 447 aa, Homo sapiens; identical to SEQ ID NO: 822269

SEQ ID NO: 822271 - protein, 455 aa, Homo sapiens
MTLKFGPARNDSVIVADQTPTPTRFLKNCEEVGLFNELASPFENEFKKASEDDIKKMPLDLSPLATPIIRSKIEEPSVVETTHQDSPLPHPESTTSDEKEVPLAQTAQPTSAIVRPASLQVPNVLLTSSDSSVIIQQAVPSPTSSTVITQAPSSNRPIVPVPGPFPLLLHLPNGQTMPVAIPASITSSNVHVPAAVPLVRPVTMVPSVPGIPGPSSPQPVQSEAKMRLKAALTQQHPPVTNGDTVKGHGSGLVRTQSEESRPQSLQQPATSTTETPASPAHTTPQTQSTSGRRRRAANEDPDEKRRKFLERNRAAASRCRQKRKVWVQSLEKKAEDLSSLNGQLQSEVTLLRNEVAQLKQLLLAHKDCPVTAMQKKSGYHTADKDDSSEDISVPSSPHTEAIQHSSVSTSNGVSSTSKAEAVATSVLTQMADQSTEPALSQIVMAPSSQSQPSGS

SEQ ID NO: 822272 - protein, 413 aa, Homo sapiens
SSVPDLDSEDDIKEMPLDLSPLATPIIRSKIEEPSVVETTHQDSPLPHPESTTSDEKEVPLAQTAQPTSAIVRPASLQVPNVLLTSSDSSVIIQQAVPSPTSSTVITQAPSSNRPIVPVPGPFPLLLHLPNGQTMPVAIPASITSSNVHVPAAVPLVRPVTMVPSVPGIPGPSSPQPVQSEAKMRLKAALTQQHPPVTNGDTVKGHGSGLVRTQSEESRPQSLQQPATSTTETPASPAHTTPQTQSTSGRRRRAANEDPDEKRRKFLERNRAAASRCRQKRKVWVQSLEKKAEDLSSLNGQLQSEVTLLRNEVAQLKQLLLAHKDCPVTAMQKKSGYHTADKDDSSEDISVPSSPHTEAIQHSSVSTSNGVSSTSKAEAVATSVLTQMADQSTEPALSQIVMAPSSQSQPSGS

SEQ ID NO: 822273 - protein, 395 aa, Homo sapiens
MKFKLHVNSARQYKDLWNMSDDKPFLCTAPGCGQRFTNEDHLAVHKHKHEMTLKFGPARNDSVIVADQTPTPTRFLKNCEEVGLFNELASPFENEFKKASEDDIKKMPLDLSPLATPIIRSKIEEPSVVETTHQDSPLPHPESTTSDEKEVPLAQTAQPTSAIVRPASLQVPNVLLTSSDSSVIIQQAVPSPTSSTVITQAPSSNRPIVPVPGPFPLLLHLPNGQTMPVAIPASITSSNVHVPAAVPLVRPVTMVPSVPGIPGPSSPQPVQSEAKMRLKAALTQQHPPVTNGDTVKGHGSGLVRTQSEESRPQSLQQPATSTTETPASPAHTTPQTQSTSGRRRRAANEDPDEKRRKFLERNRAAASRCRQKRKVWVQSLEKKAEDLSSLNGQLQ

SEQ ID NO: 822274 - protein, 144 aa, Homo sapiens
MKFKLHVNSARQYKDLWNMSDDKPFLCTAPGCGQSEVTLLRNEVAQLKQLLLAHKDCPVTAMQKKSGYHTADKDDSSEDISVPSSPHTEAIQHSSVSTSNGVSSTSKAEAVATSVLTQMADQSTEPALSQIVMAPSSQSQPSGS

SEQ ID NO: 822275 - protein, 505 aa, Homo sapiens; identical to SEQ ID NO: 822267

SEQ ID NO: 822276 - protein, 432 aa, Homo sapiens
MKFKLHVNSARQYKDLWNMSDDKPFLCTAPGCGQRFTNEDHLAVHKHKHEMTLKFGPARNDSVIVADQTPTPTRFLKNCEEVGLFNELASPFENEFKKASEDDIKKMPLDLSPLATPIIRSKIEEPSVVETTHQDSPLPHPESTTSDEKEVPLAQTAQPTSAIVRPASLQVPNVLLTSSDSSVIIQQAVPSPTSSTVITQAPSSNRPIVPVPGPFPLLLHLPNGQTMPVAIPASITSSNVHVPAAVPLVRPVTMVPSVPGIPGPSSPQPVQSEAKMRLKAALTQQHPPVTNGDTVKGHGSGLVRTQSEESRPQSLQQPATSTTETPASPAHTTPQTQSTSGRRRRAANEDPDEKRRKFLERNRAAASRCRQKRKVWVQSLEKKAEDLSSLNGQLQSEVTLLRNEVAQLKQLLLAHKDCPVTAMQKKSGYHSE

SEQ ID NO: 822277 - protein, 340 aa, Homo sapiens
MARDLIGPALPPGFKARGTAEDEERDPSPVAGPALPPNYKSSSSDSSDSDEDSSSLYEEGNQESEEDDSGPTARKQRKNQDDDDDDDDGFFGPALPPGFKKQDDSPPRPIIGPALPPGFIKSTQKSDKGRDDPGQQETDSSEDEDIIGPMPAKGPVNYNVTTEFEKRAQRMKEKLTKGDDDSSKPIVRESWMTELPPEMKDFGLGPRTFKRRADDTSGDRSIWTDTPADRERKAKETQEARKSSSKKDEEHILSGRDKRLAEQVSSYNESKRSESLMDIHHKKLKSKAAEDKNKPQERIPFDRDKDLKVNRFDEAQKKALIKKSRELNTRFSHGKGNMFL

SEQ ID NO: 822278 - protein, 340 aa, Homo sapiens; identical to SEQ ID NO: 822277

SEQ ID NO: 822279 - protein, 191 aa, Homo sapiens
MPAKGPVNYNVTTEFEKRAQRMKEKLTKGDDDSSKPIVRESWMTELPPEMKDFGLGPRTFKRRADDTSGDRSIWTDTPADRERKAKETQEARKSSSKKDEEHILSGRDKRLAEQVSSYNESKRSESLMDIHHKKLKSKAAEDKNKPQERIPFDRDKDLKVNRFDEAQKKALIKKSRELNTRFSHGKGNMFL

SEQ ID NO: 822280 - protein, 107 aa, Homo sapiens
MESCSVAQAGVQWRDLGSLQPPLPEFKQFTCLSLLSSWDYRRTPPCPANFVFLVETGFHHVAQAGPELLTSGDPPTSASQSAGITGVSHHTWPTPFFISFLMHIPCC

SEQ ID NO: 822281 - protein, 340 aa, Homo sapiens; identical to SEQ ID NO: 822277

SEQ ID NO: 822282 - protein, 340 aa, Homo sapiens; identical to SEQ ID NO: 822277

SEQ ID NO: 822283 - protein, 340 aa, Homo sapiens; identical to SEQ ID NO: 822277

SEQ ID NO: 822284 - protein, 404 aa, Homo sapiens
MARDLIGPALPPGFKARGTAEDEERDPSPVAGPALPPNYKSSSSDSSDSDEDSSSLYEEGNQESEEDDSGPTARKQRKNQDDDDDDDDGFFGPALPPGFKKQDDSPPRPIIGPALPPGFIKSTQKSDKGRDDPGQQETDSSEDEDIIGPMPAKGPVNYNVTTEFEKRAQRMKEKLTKGDDDSSKPIVRESWMTELPPEMKDFGLGPRTFKRRADDTSGDRSIWTDTPADRERKAKETQEARKSSSKKDEEHILSGRDKRLAEQVSSYNESKRSESLMDIHHKKLKSKAAEDKNKPQERIPFDRDKDLKVNRFDEAQKKALIKKGISLCNEEKLKNTLCPSLFLCFWLLKIRDYFNLKKHTNLPCSVCPFKVMWKHKTNVFYVEQNILCAFSFCGSMGNYGLFFK

SEQ ID NO: 822285 - protein, 340 aa, Homo sapiens; identical to SEQ ID NO: 822277

SEQ ID NO: 822286 - protein, 340 aa, Homo sapiens; identical to SEQ ID NO: 822277

SEQ ID NO: 822287 - protein, 191 aa, Homo sapiens; identical to SEQ ID NO: 822279

SEQ ID NO: 822288 - protein, 380 aa, Homo sapiens
MARDLIGPALPPGFKARGTAEDEERDPSPVAGPALPPNYKSSSSDSSDSDEDSSSLYEEGNQESEEDDSGPTARKQRKNQDDDDDDDDGFFGPALPPGFKKQDDSPPRPIIGPALPPGFIKSTQKSDKGRDDPGQQVSSSHFNSKVWKVFIERIRCIVTNSKLYACSYYNHWTQLNETDSSEDEDIIGPMPAKGPVNYNVTTEFEKRAQRMKEKLTKGDDDSSKPIVRESWMTELPPEMKDFGLGPRTFKRRADDTSGDRSIWTDTPADRERKAKETQEARKSSSKKDEEHILSGRDKRLAEQVSSYNESKRSESLMDIHHKKLKSKAAEDKNKPQERIPFDRDKDLKVNRFDEAQKKALIKKSRELNTRFSHGKGNMFL

SEQ ID NO: 822289 - protein, 322 aa, Homo sapiens
MARDLIGPALPPGFKARGTAEDEERDPSPVAGPALPPNYKSSSSDSSDSDEDSSSLYEEGNQESEEDDSGPTARKQRKNQDDDDDDDDGFFGPALPPGFKKQDDSPPRPIIGPALPPGFIKSTQKSDKGRDDPGQQETDSSEDEDIIGPMPAKGPVNYNVTTEFEKRAQRMKEMTELPPEMKDFGLGPRTFKRRADDTSGDRSIWTDTPADRERKAKETQEARKSSSKKDEEHILSGRDKRLAEQVSSYNESKRSESLMDIHHKKLKSKAAEDKNKPQERIPFDRDKDLKVNRFDEAQKKALIKKSRELNTRFSHGKGNMFL

SEQ ID NO: 822290 - protein, 340 aa, Homo sapiens; identical to SEQ ID NO: 822277

SEQ ID NO: 822291 - protein, 1204 aa, Homo sapiens
MVKCYHKKYRSATRDVIFRLQFHTGAVQGYGLVFGKEDLDNASKDDFPDYGKVELVFSATPEKIQGSEHLYNDHGVIVDYNTTDPLIRWDSYENLSADGEVLHTQGPVDGSLYAKVRKKSSSDPGIPGGPQAIPATNSPDHSDHTLSVSSDSGHSTASARTDKTEERLAPGTRRGLSAQEKAELDQLLSGFGLEDPGSSLKEMTDARSKYSGTRHVVPAQVHVNGDAALKDRETDILDDEMPHHDLHSVDSLGTLSSSEGPQSAHLGPFTCHKSSQNSLLSDGFGSNVGEDPQGTLVPDLGLGMDGPYERERTFGSREPKQPQPLLRKPSVSAQMQAYGQSSYSTQTWVRQQQMVVAHQYSFAPDGEARLVSRCPADNPGLVQAQPRVPLTPTRGTSSRVAVQRGVGSGPHPPDTQQPSPSKAFKPRFPGDQVVNGAGPELSTGPSPGSPTLDIDQSIEQLNRLILELDPTFEPIPTHMNALGSQANGSVSPDSVGGGLRASSRLPDTGEGPSRATGRQGSSAEQPLGGRLRKLSLGQYDNDAGGQLPFSKCAWGKAGVDYAPNLPPFPSPADVKETMTPGYPQDLDIIDGRILSSKESMCSTPAFPVSPETPYVKTALRHPPFSPPEPPLSSPASQHKGGREPRSCPETLTHAVGMSESPIGPKSTMLRADASSTPSFQQAFASSCTISSNGPGQRRESSSSAERQWVESSPKPMVSLLGSGRPTGSPLSAEFSGTRKDSPVLSCFPPSELQAPFHSHELSLAEPPDSLAPPSSQAFLGFGTAPVGSGLPPEEDLGALLANSHGASPTPSIPLTATGAADNGFLSHNFLTVAPGHSSHHSPGLQGQGVTLPGQPPLPEKKRASEGDRSLGSVSPSSSGFSSPHSGSTISIPFPNVLPDFSKASEAASPLPDSPGDKLVIVKFVQDTSKFWYKADISREQAIAMLKDKEPGSFIVRDSHSFRGAYGLAMKVATPPPSVLQLNKKAGDLANELVRHFLIECTPKGVRLKGCSNEPYFGSLTALVCQHSITPLALPCKLLIPERDPLEEIAESSPQTAANSAAELLKQGAACNVWYLNSVEMESLTGHQAIQKALSITLVQEPPPVSTVVHFKVSAQGITLTDNQRKLFFRRHYPVNSVIFCALDPQDRKWIKDGPSSKVFGFVARKQGSATDNVCHLFAEHDPEQPASAIVNFVSKVMIGSPKKV

SEQ ID NO: 822292 - protein, 1111 aa, Homo sapiens
SPVFSPAVLHTQGPVDGSLYAKVRKKSSSDPGIPGGPQAIPATNSPDHSDHTLSVSSDSGHSTASARTDKTEERLAPGTRRGLSAQEKAELDQLLSGFGLEDPGSSLKEMTDARSKYSGTRHVVPAQVHVNGDAALKDRETDILDDEMPHHDLHSVDSLGTLSSSEGPQSAHLGPFTCHKSSQNSLLSDGFGSNVGEDPQGTLVPDLGLGMDGPYERERTFGSREPKQPQPLLRKPSVSAQMQAYGQSSYSTQTWVRQQQMVVAHQYSFAPDGEARLVSRCPADNPGLVQAQPRVPLTPTRGTSSRVAVQRGVGSGPHPPDTQQPSPSKAFKPRFPGDQVVNGAGPELSTGPSPGSPTLDIDQSIEQLNRLILELDPTFEPIPTHMNALGSQANGSVSPDSVGGGLRASSRLPDTGEGPSRATGRQGSSAEQPLGGRLRKLSLGQYDNDAGGQLPFSKCAWGKAGVDYAPNLPPFPSPADVKETMTPGYPQDLDIIDGRILSSKESMCSTPAFPVSPETPYVKTALRHPPFSPPEPPLSSPASQHKGGREPRSCPETLTHAVGMSESPIGPKSTMLRADASSTPSFQQAFASSCTISSNGPGQRRESSSSAERQWVESSPKPMVSLLGSGRPTGSPLSAEFSGTRKDSPVLSCFPPSELQAPFHSHELSLAEPPDSLAPPSSQAFLGFGTAPVGSGLPPEEDLGALLANSHGASPTPSIPLTATGAADNGFLSHNFLTVAPGHSSHHSPGLQGQGVTLPGQPPLPEKKRASEGDRSLGSVSPSSSGFSSPHSGSTISIPFPNVLPDFSKASEAASPLPDSPGDKLVIVKFVQDTSKFWYKADISREQAIAMLKDKEPGSFIVRDSHSFRGAYGLAMKVATPPPSVLQLNKKAGDLANELVRHFLIECTPKGVRLKGCSNEPYFGSLTALVCQHSITPLALPCKLLIPERDPLEEIAESSPQTAANSAAELLKQGAACNVWYLNSVEMESLTGHQAIQKALSITLVQEPPPVSTVVHFKVSAQGITLTDNQRKLFFRRHYPVNSVIFCALDPQDRKWIKDGPSSKVFGFVARKQGSATDNVCHLFAEHDPEQPASAIVNFVSKVMIGSPKKV

SEQ ID NO: 822293 - protein, 144 aa, Homo sapiens [sequence omitted]

SEQ ID NO: 822294 - protein, 1204 aa, Homo sapiens; identical to SEQ ID NO: 822291

SEQ ID NO: 822295 - protein, 1204 aa, Homo sapiens; identical to SEQ ID NO: 822291

SEQ ID NO: 822296 - protein, 1204 aa, Homo sapiens; identical to SEQ ID NO: 822291

SEQ ID NO: 822297 - protein, 1204 aa, Homo sapiens; identical to SEQ ID NO: 822291

SEQ ID NO: 822298 - protein, 173 aa, Homo sapiens
MEEGHGLDLTYITERIIAVSFPAGCSEESYLHNLQEVTRMLKSKHGDNYLVLNLSEKRYDLTKLNPKIMDVGWPELHAPPLDKMCTICKAQESWLNSNLQHVVVIHCRGGKGRIGVVISSYMHFTNVSASADQALDRFAMKKFYDDKVSALMQPSQKRYVQFLSGLLSGSVKM

SEQ ID NO: 822299 - protein, 168 aa, Homo sapiens
GGDLCTWRMLNSTTRFKGRNDLMEYAKQHGIPIPVTPKNPWSMDENLMHITERIIAVSFPAGCSEESYLHNLQEVTRMLKSKHGDNYLVLNLSEKRYDLTKLNPKIMDVGWPELHAPPLDKMCTICKAQESWLNSNLQHVVVIHCRGGKGRIGVVISSYMHFTNVSAR

SEQ ID NO: 822300 - protein, 131 aa, Homo sapiens
MVKCYHKKYRSATRDVIFRLQFHTGAVQGYGLVFGKEDLDNASKDDRFPDYGKVELVFSATPEKIQGSEHLYNDHGVIVDYNTTDPLIRWDSYENLSADGEGACVHLVCSYGGKGHREDSPLKYLKYFAVC

SEQ ID NO: 822301 - protein, 77 aa, Homo sapiens
RLILELDPTFEPIPTHMNALGSQANGSVSPDSVGGGLRASSRLPDTGEGPSRATGRQGELGLHGRCSTGGAPREANV

SEQ ID NO: 822302 - protein, 186 aa, Homo sapiens
MTWRARDDATRGAVHAGIFKSPPRRGAAMSPAAAAAGAGERRRPIASVRDGRGRGCGGPAGAALLGLSLVGLLLYLVPAAAALAWLAVGTTAAWWGLSREPRGSRPLSSFVQKARHRRTLFASPPAKSTANGNLLEPRTLLEGPDPAELLLMGSYLGKPGPPQPAPAPEGQDLRNRPGGGHPPARR

SEQ ID NO: 822303 - protein, 106 aa, Homo sapiens
MAQEFVNCKIQPGKVVVFIKPTCPYCRRAQEILSQLPIKQGLLEFVDITATNHTNEIQDYLQQLTGARTVPRVFIGKDCIGGCSDLVSLQQSGELLTRLKQIGALQ

SEQ ID NO: 822304 - protein, 106 aa, Homo sapiens; identical to SEQ ID NO: 822303

SEQ ID NO: 822305 - protein, 106 aa, Homo sapiens; identical to SEQ ID NO: 822303

SEQ ID NO: 822306 - protein, 106 aa, Homo sapiens; identical to SEQ ID NO: 822303

SEQ ID NO: 822307 - protein, 106 aa, Homo sapiens; identical to SEQ ID NO: 822303

SEQ ID NO: 822308 - protein, 106 aa, Homo sapiens; identical to SEQ ID NO: 822303

SEQ ID NO: 822309 - protein, 106 aa, Homo sapiens; identical to SEQ ID NO: 822303

SEQ ID NO: 822310 - protein, 106 aa, Homo sapiens; identical to SEQ ID NO: 822303

SEQ ID NO: 822311 - protein, 106 aa, Homo sapiens; identical to SEQ ID NO: 822303

SEQ ID NO: 822312 - protein, 218 aa, Homo sapiens
GVYRGASLASNSLCLHEHVASPSLPRWRTQGPRDTWGVQLLHTQNTSLIHTKKKLETDLMQLQSEVEDASRDARNAEEKAKKAITDAAMMAEELKKEQDTSAHLERMKKNLEQTVKDLQHRLDEAEQLALKGGKKQIQKLETRIRELEFELEGEQCHHPRQAFPDPSQEQTRDQVHTLLRAVSCASPAPSPVFVLCLPGSGRGACPCFFSDREINAPE

SEQ ID NO: 822313 - protein, 1968 aa, Homo sapiens
EFRGRRSGISWLLLSSALILQVGLSADTMSSDTEMEVFGIAAPFLRKSEKERIEAQNQPFDAKTYCFVVDSKEEYAKGKIKSSQDGKVTVETEDNRTLVVKPEDVYAMNPPKFDRIEDMAMLTHLNEPAVLYNLKDRYTSWMIYTYSGLFCVTVNPYKWLPVYNPEVVEGYRGKKRQEAPPHIFSISDNAYQFMLTDRENQSILITGESGAGKTVNTKRVIQYFATIAATGDLAKKKDSKMKGTLEDQIISANPLLEAFGNAKTVRNDNSSRFGKFIRIHFGTTGKLASADIETYLLEKSRVTFQLKAERSYHIFYQILSNKKPELIELLLITTNPYDYPFISQGEILVASIDDREELLATDSAIDILGFTPEEKSGLYKLTGAVMHYGNMKFKQKQREEQAEPDGTEVADKTAYLMGLNSSDLLKALCFPRVKVGNEYVTKGQTVDQVHHAVNALSKSVYEKLFLWMVTRINQQLDTKLPRQHFIGVLDIAGFEIFEYNSLEQLCINFTNEKLQQFFNHHMFVLEQEEYKKEGIEWTFIDFGMDLAACIELIEKPMGIFSILEEECMFPKATDTSFKNKLYDQHLGKSNNFQKPKVVKGRAEAHFSLIHYAGTVDYSVSGWLEKNKDPLNETVVGLYQKSSNRLLAHLYATFATADADSGKKKVAKKKGSSFQTVSALFRENLNKLMSNLRTTHPHFVRCIIPNETKTPGAMEHSLVLHQLRCNGVLEGIRICRKGFPNRILYGDFKQRYRVLNASAILEGQFIDSKKACEKLLASIDIDHTQYKFGHTKVFFKAGLLGTLEEMRDDRLAKLITRTQAVCRGFLMRVEFQKMVQRRESIFCIQYNIRSFMNVKHWPWMKLFFKIKPLLKSAETEKEMATMKEEFQKTKDELAKSEAKRKELEEKLVTLVQEKNDLQLQVQAESENLLDAEERCDQLIKAKFQLEAKIKEVTERAEDEEEINAELTAKKRKLEDECSELKKDIDDLELTLAKVEKEKHATENKVKNLTEELSGLDETIAKLTREKKALQEAHQQALDDLQAEEDKVNSLNKTKSKLEQQVEDLESSLEQEKKLRVDLERNKRKLEGDLKLAQESILDLENDKQQLDERLKKKDFEYCQLQSKVEDEQTLGLQFQKKIKELQARIEELEEEIEAERATRAKTEKQRSDYARELEELSERLEEAGGVTSTQIELNKKREAEFLKLRRDLEEATLQHEAMVATLRKKHADSVAELGEQIDNLQRVKQKLEKEKSEFKLEIDDLSSSMESVSKSKANLEKICRTLEDQLSEARGKNEEIQRSLSELTTQKSRLQTEAGELSRQLEEKESIVSQLSRSKQAFTQQTEELKRQLEEENKAKNALAHALQSSRHDCDLLREQYEEEQEGKAELQRALSKANSEVAQWRTKYETDAIQRTEELEEAKKKLAQRLQDSEEQVEAVNAKCASLEKTKQRLQGEVEDLMVDVERANSLAAALDKKQRNFDKVLAEWKTKCEESQAELEASLKESRSLSTELFKLKNAYEEALDQLETVKRENKNLEQEIADLTEQIAENGKTIHELEKSRKQIELEKADIQLALEEAEAALEHEEAKILRIQLELTQVKSEIDRKIAEKDEEIEQLKRNYQRTVETMQSALDAEVRSRNEAIRLKKKMEGDLNEIEIQLSHANRQAAETLKHLRSVQGQLKDTQLHLDDALRGQEDLKEQLAIVERRANLLQAEVEELRATLEQTERARKLAEQELLDSNERVQLLHTQNTSLIHTKKKLETDLMQLQSEVEDASRDARNAEEKAKKAITDAAMMAEELKKEQDTSAHLERMKKNLEQTVKDLQHRLDEAEQLALKGGKKQIQKLETRIRELEFELEGEQKKNTESVKGLRKYERRVKELTYQSEEDRKNVLRLQDLVDKLQVKVKSYKRQAEEADEQANAHLTKFRKAQHELEEAEERADIAESQVNKLRAKTRDFTSSRMVVHESEE

SEQ ID NO: 822314 - protein, 1716 aa, Homo sapiens
MNRNYWAMVESGPPPESRPIQGKFIRIHFGTTGKLASADIETYLLEKSRVTFQLKAERSYHIFYQILSNKKPELIELLLITTNPYDYPFISQGEILVASIDDREELLATDSAIDILGFTPEEKSGLYKLTGAVMHYGNMKFKQKQREEQAEPDGTEVADKTAYLMGLNSSDLLKALCFPRVKVGNEYVTKGQTVDQVHHAVNALSKSVYEKLFLWMVTRINQQLDTKLPRQHFIGVLDIAGFEIFEYNSLEQLCINFTNEKLQQFFNHHMFVLEQEEYKKEGIEWTFIDFGMDLAACIELIEKPMGIFSILEEECMFPKATDTSFKNKLYDQHLGKSNNFQKPKVVKGRAEAHFSLIHYAGTVDYSVSGWLEKNKDPLNETVVGLYQKSSNRLLAHLYATFATADADSGKKKVAKKKGSSFQTVSALFRENLNKLMSNLRTTHPHFVRCIIPNETKTPGAMEHSLVLHQLRCNGVLEGIRICRKGFPNRILYGDFKQRYRVLNASAILEGQFIDSKKACEKLLASIDIDHTQYKFGHTKVFFKAGLLGTLEEMRDDRLAKLITRTQAVCRGFLMRVEFQKMVQRRESIFCIQYNIRSFMNVKHWPWMKLFFKIKPLLKSAETEKEMATMKEEFQKTKDELAKSEAKRKELEEKLVTLVQEKNDLQLQVQAESENLLDAEERCDQLIKAKFQLEAKIKEVTERAEDEEEINAELTAKKRKLEDECSELKKDIDDLELTLAKVEKEKHATENKVKNLTEELSGLDETIAKLTREKKALQEAHQQALDDLQAEEDKVNSLNKTKSKLEQQVEDLESSLEQEKKLRVDLERNKRKLEGDLKLAQESILDLENDKQQLDERLKKKDFEYCQLQSKVEDEQTLGLQFQKKIKELQARIEELEEEIEAERATRAKTEKQRSDYARELEELSERLEEAGGVTSTQIELNKKREAEFLKLRRDLEEATLQHEAMVATLRKKHADSVAELGEQIDNLQRVKQKLEKEKSEFKLEIDDLSSSMESVSKSKANLEKICRTLEDQLSEARGKNEEIQRSLSELTTQKSRLQTEAGELSRQLEEKESIVSQLSRSKQAFTQQTEELKRQLEEENKAKNALAHALQSSRHDCDLLREQYEEEQEGKAELQRALSKANSEVAQWRTKYETDAIQRTEELEEAKKKLAQRLQDSEEQVEAVNAKCASLEKTKQRLQGEVEDLMVDVERANSLAAALDKKQRNFDKVLAEWKTKCEESQAELEASLKESRSLSTELFKLKNAYEEALDQLETVKRENKNLEQEIADLTEQIAENGKTIHELEKSRKQIELEKADIQLALEEAEAALEHEEAKILRIQLELTQVKSEIDRKIAEKDEEIEQLKRNYQRTVETMQSALDAEVRSRNEAIRLKKKMEGDLNEIEIQLSHANRQAAETLKHLRSVQGQLKDTQLHLDDALRGQEDLKEQLAIVERRANLLQAEVEELRATLEQTERARKLAEQELLDSNERVQLLHTQNTSLIHTKKKLETDLMQLQSEVEDASRDARNAEEKAKKAITDAAMMAEELKKEQDTSAHLERMKKNLEQTVKDLQHRLDEAEQLALKGGKKQIQKLETRIRELEFELEGEQKKNTESVKGLRKYERRVKELTYQSEEDRKNVLRLQDLVDKLQVKVKSYKRQAEEADEQANAHLTKFRKAQHELEEAEERADIAESQVNKLRAKTRDFTSSRMVVHESEE

SEQ ID NO: 822315 - protein, 1693 aa, Homo sapiens
MPQIIIEEGIIPTSADIETYLLEKSRVTFQLKAERSYHIFYQILSNKKPELIELLLITTNPYDYPFISQGEILVASIDDREELLATDSAIDILGFTPEEKSGLYKLTGAVMHYGNMKFKQKQREEQAEPDGTEVADKTAYLMGLNSSDLLKALCFPRVKVGNEYVTKGQTVDQVHHAVNALSKSVYEKLFLWMVTRINQQLDTKLPRQHFIGVLDIAGFEIFEYNSLEQLCINFTNEKLQQFFNHHMFVLEQEEYKKEGIEWTFIDFGMDLAACIELIEKPMGIFSILEEECMFPKATDTSFKNKLYDQHLGKSNNFQKPKVVKGRAEAHFSLIHYAGTVDYSVSGWLEKNKDPLNETVVGLYQKSSNRLLAHLYATFATADADSGKKKVAKKKGSSFQTVSALFRENLNKLMSNLRTTHPHFVRCIIPNETKTPGAMEHSLVLHQLRCNGVLEGIRICRKGFPNRILYGDFKQRYRVLNASAILEGQFIDSKKACEKLLASIDIDHTQYKFGHTKVFFKAGLLGTLEEMRDDRLAKLITRTQAVCRGFLMRVEFQKMVQRRESIFCIQYNIRSFMNVKHWPWMKLFFKIKPLLKSAETEKEMATMKEEFQKTKDELAKSEAKRKELEEKLVTLVQEKNDLQLQVQAESENLLDAEERCDQLIKAKFQLEAKIKEVTERAEDEEEINAELTAKKRKLEDECSELKKDIDDLELTLAKVEKEKHATENKVKNLTEELSGLDETIAKLTREKKALQEAHQQALDDLQAEEDKVNSLNKTKSKLEQQVEDLESSLEQEKKLRVDLERNKRKLEGDLKLAQESILDLENDKQQLDERLKKKDFEYCQLQSKVEDEQTLGLQFQKKIKELQARIEELEEEIEAERATRAKTEKQRSDYARELEELSERLEEAGGVTSTQIELNKKREAEFLKLRRDLEEATLQHEAMVATLRKKHADSVAELGEQIDNLQRVKQKLEKEKSEFKLEIDDLSSSMESVSKSKANLEKICRTLEDQLSEARGKNEEIQRSLSELTTQKSRLQTEAGELSRQLEEKESIVSQLSRSKQAFTQQTEELKRQLEEENKAKNALAHALQSSRHDCDLLREQYEEEQEGKAELQRALSKANSEVAQWRTKYETDAIQRTEELEEAKKKLAQRLQDSEEQVEAVNAKCASLEKTKQRLQGEVEDLMVDVERANSLAAALDKKQRNFDKVLAEWKTKCEESQAELEASLKESRSLSTELFKLKNAYEEALDQLETVKRENKNLEQEIADLTEQIAENGKTIHELEKSRKQIELEKADIQLALEEAEAALEHEEAKILRIQLELTQVKSEIDRKIAEKDEEIEQLKRNYQRTVETMQSALDAEVRSRNEAIRLKKKMEGDLNEIEIQLSHANRQAAETLKHLRSVQGQLKDTQLHLDDALRGQEDLKEQLAIVERRANLLQAEVEELRATLEQTERARKLAEQELLDSNERVQLLHTQNTSLIHTKKKLETDLMQLQSEVEDASRDARNAEEKAKKAITDAAMMAEELKKEQDTSAHLERMKKNLEQTVKDLQHRLDEAEQLALKGGKKQIQKLETRIRELEFELEGEQKKNTESVKGLRKYERRVKELTYQSEEDRKNVLRLQDLVDKLQVKVKSYKRQAEEADEQANAHLTKFRKAQHELEEAEERADIAESQVNKLRAKTRDFTSSRMVVHESEE

SEQ ID NO: 822316 - protein, 1687 aa, Homo sapiens
MNRNYWAMVESGPPPESRPIQGKFIRIHFGTTGKLASADIETYLLEKSRVTFQLKAERSYHIFYQILSNKKPELIELLLITTNPYDYPFISQGEILVASIDDREELLATDSAIDILGFTPEEKSGLYKLTGAVMHYGNMKFKQKQREEQAEPDGTEVADKTAYLMGLNSSDLLKALCFPRVKVGNEYVTKGQTVDQVHHAVNALSKSVYEKLFLWMVTRINQQLDTKLPRQHFIGVLDIAGFEIFEYNSLEQLCINFTNEKLQQFFNHHMFVLEQEEYKKEGIEWTFIDFGMDLAACIELIEKPMGIFSILEEECMFPKATDTSFKNKLYDQHLGKSNNFQKPKVVKGRAEAHFSLIHYAGTVDYSVSGWLEKNKDPLNETVVGLYQKSSNRLLAHLYATFATADADSGKKKVAKKKGSSFQTVSALFRENLNKLMSNLRTTHPHFVRCIIPNETKTPGAMEHSLVLHQLRCNGVLEGIRICRKGFPNRILYGDFKQRYRVLNASAILEGQFIDSKKACEKLLASIDIDHTQYKFGHTKVFFKAGLLGTLEEMRDDRLAKLITRTQAVCRGFLMRVEFQKMVQRRESIFCIQYNIRSFMNVKHWPWMKLFFKIKPLLKSAETEKEMATMKEEFQKTKDELAKSEAKRKELEEKLVTLVQEKNDLQLQVQAESENLLDAEERCDQLIKAKFQLEAKIKEVTERAEDEEEINAELTAKKRKLEDECSELKKDIDDLELTLAKVEKEKHATENKVKNLTEELSGLDETIAKLTREKKALQEAHQQALDDLQAEEDKVNSLNKTKSKLEQQVEDLESSLEQEKKLRVDLERNKRKLEGDLKLAQESILDLENDKQQLDERLKKKDFEYCQLQSKVEDEQTLGLQFQKKIKELQARIEELEEEIEAERATRAKTEKQRSDYARELEELSERLEEAGGVTSTQIELNKKREAEFLKLRRDLEEATLQHEAMVATLRKKHADSVAELGEQIDNLQRVKQKLEKEKSEFKLEIDDLSSSMESVSKSKANLEKICRTLEDQLSEARGKNEEIQRSLSELTTQKSRLQTEAGELSRQLEEKESIVSQLSRSKQAFTQQTEELKRQLEEENKAKNALAHALQSSRHDCDLLREQYEEEQEGKAELQRALSKANSEVAQWRTKYETDAIQRTEELEEAKKKLAQRLQDSEEQVEAVNAKCASLEKTKQRLQGEVEDLMVDVERANSLAAALDKKQRNFDKVLAEWKTKCEESQAELEASLKESRSLSTELFKLKNAYEEALDQLETVKRENKNLEQEIADLTEQIAENGKTIHELEKSRKQIELEKADIQLALEEAEAALEHEEAKILRIQLELTQVKSEIDRKIAEKDEEIEQLKRNYQRTVETMQSALDAEVRSRNEAIRLKKKMEGDLNEIEIQLSHANRQAAETLKHLRSVQGQLKDTQLHLDDALRGQEDLKEQLAIVERRANLLQAEVEELRATLEQTERARKLAEQELLDSNERVQLLHTQNTSLIHTKKKLETDLMQLQSEVEDASRDARNAEEKAKKAITDAAMMAEELKKEQDTSAHLERMKKNLEQTVKDLQHRLDEAEQLALKGGKKQIQKLETRIRELEFELEGEQKKNTESVKGLRKYERRVKELTYQSEEDRKNVLRLQDLVDKLQVKVKSYKRQAEEAVSEIGADCGRQTVLFPVVSSERGAC

SEQ ID NO: 822317 - protein, 1670 aa, Homo sapiens
MNRNYWAMVESGPPPESRPIQGKFIRIHFGTTGKLASADIETYLLEKSRVTFQLKAERSYHIFYQILSNKKPELIELLLITTNPYDYPFISQGEILVASIDDREELLATDSAIDILGFTPEEKSGLYKLTGAVMHYGNMKFKQKQREEQAEPDGTEVADKTAYLMGLNSSDLLKALCFPRVKVGNEYVTKGQTVDQVHHAVNALSKSVYEKLFLWMVTRINQQLDTKLPRQHFIGVLDIAGFEIFEYNSLEQLCINFTNEKLQQFFNHHMFVLEQEEYKKEGIEWTFIDFGMDLAACIELIEKPMGIFSILEEECMFPKATDTSFKNKLYDQHLGKSNNFQKPKVVKGRAEAHFSLIHYAGTVDYSVSGWLEKNKDPLNETVVGLYQKSSNRLLAHLYATFATADADSGKKKVAKKKGSSFQTVSALFRENLNKLMSNLRTTHPHFVRCIIPNETKTPGAMEHSLVLHQLRCNGVLEGIRICRKGFPNRILYGDFKQRYRVLNASAILEGQFIDSKKACEKLLASIDIDHTQYKFGHTKVFFKAGLLGTLEEMRDDRLAKLITRTQAVCRGFLMRVEFQKMVQRRESIFCIQYNIRSFMNVKHWPWMKLFFKIKPLLKSAETEKEMATMKEEFQKTKDELAKSEAKRKELEEKLVTLVQEKNDLQLQVQAESENLLDAEERCDQLIKAKFQLEAKIKEVTERAEDEEEINAELTAKKRKLEDECSELKKDIDDLELTLAKVEKEKHATENKVKNLTEELSGLDETIAKLTREKKALQEAHQQALDDLQAEEDKVNSLNKTKSKLEQQVEDLESSLEQEKKLRVDLERNKRKLEGDLKLAQESILDLENDKQQLDERLKKKDFEYCQLQSKVEDEQTLGLQFQKKIKELQARIEELEEEIEAERATRAKTEKQRSDYARELEELSERLEEAGGVTSTQIELNKKREAEFLKLRRDLEEATLQHEAMVATLRKKHADSVAELGEQIDNLQRVKQKLEKEKSEFKLEIDDLSSSMESVSKSKANLEKICRTLEDQLSEARGKNEEIQRSLSELTTQKSRLQTEAGELSRQLEEKESIVSQLSRSKQAFTQQTEELKRQLEEENKAKNALAHALQSSRHDCDLLREQYEEEQEGKAELQRALSKANSEVAQWRTKYETDAIQRTEELEEAKKKLAQRLQDSEEQVEAVNAKCASLEKTKQRLQGEVEDLMVDVERANSLAAALDKKQRNFDKVLAEWKTKCEESQAELEASLKESRSLSTELFKLKNAYEEALDQLETVKRENKNLEQEIADLTEQIAENGKTIHELEKSRKQIELEKADIQLALEEAEAALEHEEAKILRIQLELTQVKSEIDRKIAEKDEEIEQLKRNYQRTVETMQSALDAEVRSRNEAIRLKKKMEGDLNEIEIQLSHANRQAAETLKHLRSVQGQLKDTQLHLDDALRGQEDLKEQLAIVERRANLLQAEVEELRATLEQTERARKLAEQELLDSNERVQLLHTQNTSLIHTKKKLETDLMQLQSEVEDASRDARNAEEKAKKAITDAAMMAEELKKEQDTSAHLERMKKNLEQTVKDLQHRLDEAEQLALKGGKKQIQKLETRIRELEFELEGEQCHHPRQAFPDPSQEQTRDQVHTLLRAVSCASPAPSPVFVLCLPGSGRGACPCFFSDREINAPE

SEQ ID NO: 822318 - protein, 1236 aa, Homo sapiens
MNRNYWAMVESGPPPESRPIQGKFIRIHFGTTGKLASADIETYLLEKSRVTFQLKAERSYHIFYQILSNKKPELIELLLITTNPYDYPFISQGEILVASIDDREELLATDSAIDILGFTPEEKSGLYKLTGAVMHYGNMKFKQKQREEQAEPDGTEVADKTAYLMGLNSSDLLKALCFPRVKVGNEYVTKGQTVDQVHHAVNALSKSVYEKLFLWMVTRINQQLDTKLPRQHFIGVLDIAGFEIFEYNSLEQLCINFTNEKLQQFFNHHMFVLEQEEYKKEGIEWTFIDFGMDLAACIELIEKPMGIFSILEEECMFPKATDTSFKNKLYDQHLGKSNNFQKPKVVKGRAEAHFSLIHYAGTVDYSVSGWLEKNKDPLNETVVGLYQKSSNRLLAHLYATFATADADSGKKKVAKKKGSSFQTVSALFRENLNKLMSNLRTTHPHFVRCIIPNETKTPGAMEHSLVLHQLRCNGVLEGIRICRKGFPNRILYGDFKQRYRVLNASAILEGQFIDSKKACEKLLASIDIDHTQYKFGHTKVFFKAGLLGTLEEMRDDRLAKLITRTQAVCRGFLMRVEFQKMVQRRESIFCIQYNIRSFMNVKHWPWMKLFFKIKPLLKSAETEKEMATMKEEFQKTKDELAKSEAKRKELEEKLVTLVQEKNDLQLQVQAESENLLDAEERCDQLIKAKFQLEAKIKEVTERAEDEEEINAELTAKKRKLEDECSELKKDIDDLELTLAKVEKEKHATENKVKNLTEELSGLDETIAKLTREKKALQEAHQQALDDLQAEEDKVNSLNKTKSKLEQQVEDLESSLEQEKKLRVDLERNKRKLEGDLKLAQESILDLENDKQQLDERLKKKDFEYCQLQSKVEDEQTLGLQFQKKIKELQARIEELEEEIEAERATRAKTEKQRSDYARELEELSERLEEAGGVTSTQIELNKKREAEFLKLRRDLEEATLQHEAMVATLRKKHADSVAELGEQIDNLQRVKQKLEKEKSEFKLEIDDLSSSMESVSKSKANLEKICRTLEDQLSEARGKNEEIQRSLSELTTQKSRLQTEAGELSRQLEEKESIVSQLSRSKQAFTQQTEELKRQLEEENKAKNALAHALQSSRHDCDLLREQYEEEQEGKAELQRALSKANSEVAQWRTKYETDAIQRTEELEEAKKKLAQRLQDSEEQVEAVNAKCASLEKTKQRLQGEVEDLMVDVERANSLAAALDKKQRNFDKMVVHESEE

SEQ ID NO: 822319 - protein, 699 aa, Homo sapiens
MNRNYWAMVESGPPPESRPIQGKFIRIHFGTTGKLASADIETYLLEKSRVTFQLKAERSYHIFYQILSNKKPELIELLLITTNPYDYPFISQGEILVASIDDREELLATDSAIDILGFTPEEKSGLYKLTGAVMHYGNMKFKQKQREEQAEPDGTEVADKTAYLMGLNSSDLLKALCFPRVKVGNEYVTKGQTVDQVHHAVNALSKSVYEKLFLWMVTRINQQLDTKLPRQHFIGVLDIAGFEIFEYNSLEQLCINFTNEKLQQFFNHHMFVLEQEEYKKEGIEWTFIDFGMDLAACIELIEKPMGIFSILEEECMFPKATDTSFKNKLYDQHLGKSNNFQKPKVVKGRAEAHFSLIHYAGTVDYSVSGWLEKNKDPLNETVVGLYQKSSNRLLAHLYATFATADADSGKKKVAKKKGSSFQTVSALFRENLNKLMSNLRTTHPHFVRCIIPNETKTPGAMEHSLVLHQLRCNGVLEGIRICRKGFPNRILYGDFKQRYRVLNASAILEGQFIDSKKACEKLLASIDIDHTQYKFGHTKVFFKAGLLGTLEEMRDDRLAKLITRTQAVCRGFLMRVEFQKMVQRRESIFCIQYNIRSFMNVKHWPWMKLFFKIKPLLKSAETEKEMATMKEEFQKTKDELAKSEAKRKELEEKLVTLVQEKNDLQLQVQAETGNLLDAEVAVSRDRATALQSGPQSKTL

SEQ ID NO: 822320 - protein, 365 aa, Homo sapiens
MNRNYWAMVESGPPPESRPIQGKFIRIHFGTTGKLASADIETYLLEKSRVTFQLKAERSYHIFYQILSNKKPELIELLLITTNPYDYPFISQGEILVASIDDREELLATDSAIDILGFTPEEKSGLYKLTGAVMHYGNMKFKQKQREEQAEPDGTEVADKTAYLMGLNSSDLLKALCFPRVKVGNEYVTKGQTVDQVHHAVNALSKSVYEKLFLWMVTRINQQLDTKLPRQHFIGVLDIAGFEIFEYNSLEQLCINFTNEKLQQFFNHHMFVLEQEEYKKEGIEWTFIDFGMDLAACIELIEKPMGIFSILEEECMFPKATDTSFKNKLYDQHLGKSNNFQKPKVVKGRPALLEQDRRYAKCIFS

SEQ ID NO: 822321 - protein, 78 aa, Homo sapiens
MFKWMETEITAASLSYSLRKKLAQRLQDSEEQVEAVNAKCASLEKTKQRLQGEVEDLMVDVERANSLAAALDKKQRNF

SEQ ID NO: 822322 - protein, 75 aa, Homo sapiens
MFVLEQEEYKKEGIEWTFIDFGMDLAACIELIEKVSSSIPTVSSSHRLFCSLLQLIFTSLHFALPSIQPMGIFSI

SEQ ID NO: 822323 - protein, 116 aa, Homo sapiens
  misc_feature (13)..(13): Xaa can be any naturally occurring amino acid
EERKKERTKERKXERKKERKKECMSVSVCAWKLGHWASDSLPTQERKDPSPPPLARQFTLPTCHVFAKTKILKEMSGQRQGPQAMWPAQPQCHLAAGWGGGGQQHPSLEMLHFPSL

SEQ ID NO: 822324 - protein, 568 aa, Homo sapiens
MERDRISALKRSFEVEEVETPNSTPPRRVQTPLLRATVASSTQKFQDLGVKNSEPSARHVDSLSQRSPKASLRRVELSGPKAAEPVSRRTELSIDISSKQVENAGAIGPSRFGLKRAEVLGHKTPEPAPRRTEITIVKPQESAHRRMEPPASKVPEVPTAPATDAAPKRVEIQMPKPAEAPTAPSPAQTLENSEPAPVSQLQSRLEPKPQPPVAEATPRSQEATEAAPSCVGDMADTPRDAGLKQAPASRNEKAPVDFGYVGIDSILEQMRRKAMKQGFEFNIMVVGQSGLGKSTLINTLFKSKISRKSVQPTSEERIPKTIEIKSITHDIEEKGVRMKLTVIDTPGFGDHINNENCWQPIMKFINDQYEKYLQEEVNINRKKRIPDTRVHCCLYFIPATGHSLRPLDIEFMKRLSKVVNIVPVIAKADTLTLEERVHFKQRITADLLSNGIDVYPQKEFDEDSEDRLVNEKFREMIPFAVVGSDHEYQVNGKRILGRKTKWGTIEVENTTHCEFAYLRDLLIRTHMQNIKDITSSIHFEAYRVKRLNEGSSAMANGVEEKEPEAPEM

SEQ ID NO: 822325 - protein, 612 aa, Homo sapiens
MGQAGRARHARRECSWSTGSIWSGWEWAQEQRRGSTGLFPGAAHLVSWFLQALKRSFEVEEVETPNSTPPRRVQTPLLRATVASSTQKFQDLGVKNSEPSARHVDSLSQRSPKASLRRVELSGPKAAEPVSRRTELSIDISSKQVENAGAIGPSRFGLKRAEVLGHKTPEPAPRRTEITIVKPQESAHRRMEPPASKVPEVPTAPATDAAPKRVEIQMPKPAEAPTAPSPAQTLENSEPAPVSQLQSRLEPKPQPPVAEATPRSQEATEAAPSCVGDMADTPRDAGLKQAPASRNEKAPVDFGYVGIDSILEQMRRKAMKQGFEFNIMVVGQSGLGKSTLINTLFKSKISRKSVQPTSEERIPKTIEIKSITHDIEEKGVRMKLTVIDTPGFGDHINNENCWQPIMKFINDQYEKYLQEEVNINRKKRIPDTRVHCCLYFIPATGHSLRPLDIEFMKRLSKVVNIVPVIAKADTLTLEERVHFKQRITADLLSNGIDVYPQKEFDEDSEDRLVNEKFREMIPFAVVGSDHEYQVNGKRILGRKTKWGTIEVENTTHCEFAYLRDLLIRTHMQNIKDITSSIHFEAYRVKRLNEGSSAMANGVEEKEPEAPEM

SEQ ID NO: 822326 - protein, 586 aa, Homo sapiens [sequence omitted]

SEQ ID NO: 822327 - protein, 579 aa, Homo sapiens [sequence omitted]

SEQ ID NO: 822328 - protein, 669 aa, Homo sapiens
RWSSSERCWPGAFSGLCVWVRGTLDGHSALSVWVPRSAGLGGTEGQKVPFGALDSLADSYPTPAWGFREGVQAGVSSFLNGDVASVSVPGGTRTSSGRLRRLGDSSGPALKRSFEVEEVETPNSTPPRRVQTPLLRATVASSTQKFQDLGVKNSEPSARHVDSLSQRSPKASLRRVELSGPKAAEPVSRRTELSIDISSKQVENAGAIGPSRFGLKRAEVLGHKTPEPAPRRTEITIVKPQESAHRRMEPPASKVPEVPTAPATDAAPKRVEIQMPKPAEAPTAPSPAQTLENSEPAPVSQLQSRLEPKPQPPVAEATPRSQEATEAAPSCVGDMADTPRDAGLKQAPASRNEKAPVDFGYVGIDSILEQMRRKAMKQGFEFNIMVVGQSGLGKSTLINTLFKSKISRKSVQPTSEERIPKTIEIKSITHDIEEKGVRMKLTVIDTPGFGDHINNENCWQPIMKFINDQYEKYLQEEVNINRKKRIPDTRVHCCLYFIPATGHSLRPLDIEFMKRLSKVVNIVPVIAKADTLTLEERVHFKQRITADLLSNGIDVYPQKEFDEDSEDRLVNEKFREMIPFAVVGSDHEYQVNGKRILGRKTKWGTIEVENTTHCEFAYLRDLLIRTHMQNIKDITSSIHFEAYRVKRLNEGSSAMANGVEEKEPEAPEM

SEQ ID NO: 822329 - protein, 417 aa, Homo sapiens
SQRPGPAPIVSAPSSGDPLACAPLGPSTSQACREGERKRLTHWPGPPGAGEAGEAGAGSDLNPEALGGRAQATEAAPSCVGDMADTPRDAGLKQAPASRNEKAPVDFGYVGIDSILEQMRRKAMKQGFEFNIMVVGQSGLGKSTLINTLFKSKISRKSVQPTSEERIPKTIEIKSITHDIEEKGVRMKLTVIDTPGFGDHINNENCWQPIMKFINDQYEKYLQEEVNINRKKRIPDTRVHCCLYFIPATGHSLRPLDIEFMKRLSKVVNIVPVIAKADTLTLEERVHFKQRITADLLSNGIDVYPQKEFDEDSEDRLVNEKFREMIPFAVVGSDHEYQVNGKRILGRKTKWGTIEVENTTHCEFAYLRDLLIRTHMQNIKDITSSIHFEAYRVKRLNEGSSAMANGVEEKEPEAPEM

SEQ ID NO: 822330 - protein, 329 aa, Homo sapiens
SQRPGPAPIVSAPSSGDPLACAPLGPSTSQACREGERKRLTHWPGPPGAGEAGEAGAGSDLNPEALGGRAQATEAAPSCVGDMADTPRDAGLKQAPASRNEKAPVDFGYVGIDSILEQMRRKAMKQGFEFNIMVVGQSGLGKSTLINTLFKSKISRKSVQPTSEERIPKTIEIKSITHDIEEKGVRMKLTVIDTPGFGDHINNENCWQPIMKFINDQYEKYLQEEVNINRKKRIPDTRVHCCLYFIPATGHSCPSWSRKCLYLSHPQTARPDAGTGWNEGGVFISLPSPSHATPAPTGLQVLLMRWDLIEDKKEGEMTPTPSSPSFEKV

SEQ ID NO: 822331 - protein, 568 aa, Homo sapiens; identical to SEQ ID NO: 822324

SEQ ID NO: 822332 - protein, 111 aa, Homo sapiens
MGNVTNKYPRKTLKSPCDAPPALVLGCRPRVSLLVRHPFTTAVNWEETIPMHCSKSRWIWFWGCWAAAQETGRGGRCVAPEGFQSTLCCEDPTPCAPRKWPVFFCSSREPR

SEQ ID NO: 822333 - protein, 254 aa, Homo sapiens
RVAAPWRPSRAFRLLLRRACRWAPLSLPAPSSCSPRPAPLEQFPTEPPFPGSRGPSLPLPRALGGSLFRDHKAPLILCSALSHVTRWAGSARWRVQRSPTFRCWATEAAPSCVGDMADTPRDAGLKQAPASRNEKAPVDFGYVGIDSILEQMRRKAMKQGFEFNIMVVGQSGLGKSTLINTLFKSKISRKSVQPTSEERIPKTIEIKSITHDIEEKGVRMKLTVIDTPGFGDHINNENWTRHRALRDPLDQPCD

SEQ ID NO: 822334 - protein, 191 aa, Homo sapiens
RVAAPWRPSRAFRLLLRRACRWAPLSLPAPSSCSPRPAPLEQFPTEPPFPGSRGPSLPLPRALGGSLFRDHKAPLILCSALSHVTRWAGSARWRVQRSPTFRCWGESCSFVLPSLAPLARGLSGGAAARRTLMAMVAVPGATLSLGPGPRPAGPSGVPRRGVAGSSISTRGPDFRPQNRRIGLCVVTAISL

SEQ ID NO: 822335 - protein, 238 aa, Homo sapiens
RVAAPWRPSRAFRLLLRRACRWAPLSLPAPSSCSPRPAPLEQFPTEPPFPGSRGPSLPLPRALGGSLFRDHKAPLILCSALSHVTRWAGSARWRVQRSPTFRCWATEAAPSCVGDMADTPRDAGLKQAPASRNEKAPVDFGYVGIDSILEQMRRKAMKQGFEFNIMVVGQSGLGKSTLINTLFKSKISRKSVQPTSEERIPKTIEIKSITHDIEEKGVRMKLTVIDTPGFGDHINNEN

SEQ ID NO: 822336 - protein, 157 aa, Homo sapiens [sequence omitted]

SEQ ID NO: 822337 - protein, 219 aa, Homo sapiens
RVAAPWRPSRAFRLLLRRACRWAPLSLPAPSSCSPRPAPLEQFPTEPPFPGSRGPSLPLPRALGGSLFRDHKAPLILCSALSHVTRWAGSARWRVQRSPTFRCWATEAAPSCVGDMADTPRDAGLKQAPASRNEKAPVDFGYVGIDSILEQMRRKAMKQGFEFNIMVVGESSPCMPLNQCRKPASAPRAAHKPLGLVFPSVKWGSNPDLRRAIVRFGIL

SEQ ID NO: 822338 - protein, 450 aa, Homo sapiens
RVAAPWRPSRAFRLLLRRACRWAPLSLPAPSSCSPRPAPLEQFPTEPPFPGSRGPSLPLPRALGGSLFRDHKAPLILCSALSHVTRWAGSARWRVQRSPTFRCWATEAAPSCVGDMADTPRDAGLKQAPASRNEKAPVDFGYVGIDSILEQMRRKAMKQGFEFNIMVVGQSGLGKSTLINTLFKSKISRKSVQPTSEERIPKTIEIKSITHDIEEKGVRMKLTVIDTPGFGDHINNENCWQPIMKFINDQYEKYLQEEVNINRKKRIPDTRVHCCLYFIPATGHSLRPLDIEFMKRLSKVVNIVPVIAKADTLTLEERVHFKQRITADLLSNGIDVYPQKEFDEDSEDRLVNEKFREMIPFAVVGSDHEYQVNGKRILGRKTKWGTIEVENTTHCEFAYLRDLLIRTHMQNIKDITSSIHFEAYRVKRLNEGSSAMANGVEEKEPEAPEM

SEQ ID NO: 822339 - protein, 413 aa, Homo sapiens
MSDPAVNAQLDGIISDFEMPKPAEAPTAPSPAQTLENSEPAPVSQLQSRLEPKPQPPVAEATPRSQEATEAAPSCVGDMADTPRDAGLKQAPASRNEKAPVDFGYVGIDSILEQMRRKAMKQGFEFNIMVVGQSGLGKSTLINTLFKSKISRKSVQPTSEERIPKTIEIKSITHDIEEKGVRMKLTVIDTPGFGDHINNENCWQPIMKFINDQYEKYLQEEVNINRKKRIPDTRVHCCLYFIPATGHSLRPLDIEFMKRLSKVVNIVPVIAKADTLTLEERVHFKQRITADLLSNGIDVYPQKEFDEDSEDRLVNEKFREMIPFAVVGSDHEYQVNGKRILGRKTKWGTIEVENTTHCEFAYLRDLLIRTHMQNIKDITSSIHFEAYRVKRLNEGSSAMANGVEEKEPEAPEM

SEQ ID NO: 822340 - protein, 335 aa, Homo sapiens
MADTPRDAGLKQAPASRNEKAPVDFGYVGIDSILEQMRRKAMKQGFEFNIMVVGQSGLGKSTLINTLFKSKISRKSVQPTSEERIPKTIEIKSITHDIEEKGVRMKLTVIDTPGFGDHINNENCWQPIMKFINDQYEKYLQEEVNINRKKRIPDTRVHCCLYFIPATGHSLRPLDIEFMKRLSKVVNIVPVIAKADTLTLEERVHFKQRITADLLSNGIDVYPQKEFDEDSEDRLVNEKFREMIPFAVVGSDHEYQVNGKRILGRKTKWGTIEVENTTHCEFAYLRDLLIRTHMQNIKDITSSIHFEAYRVKRLNEGSSAMANGVEEKEPEAPEM

SEQ ID NO: 822341 - protein, 359 aa, Homo sapiens
AGCTGTWSWLWGTATEAAPSCVGDMADTPRDAGLKQAPASRNEKAPVDFGYVGIDSILEQMRRKAMKQGFEFNIMVVGQSGLGKSTLINTLFKSKISRKSVQPTSEERIPKTIEIKSITHDIEEKGVRMKLTVIDTPGFGDHINNENCWQPIMKFINDQYEKYLQEEVNINRKKRIPDTRVHCCLYFIPATGHSLRPLDIEFMKRLSKVVNIVPVIAKADTLTLEERVHFKQRITADLLSNGIDVYPQKEFDEDSEDRLVNEKFREMIPFAVVGSDHEYQVNGKRILGRKTKWGTIEVENTTHCEFAYLRDLLIRTHMQNIKDITSSIHFEAYRVKRLNEGSSAMANGVEEKEPEAPEM

SEQ ID NO: 822342 - protein, 474 aa, Homo sapiens [sequence omitted]

SEQ ID NO: 822343 - protein, 350 aa, Homo sapiens
WGLVVYYCALCFTINMADTPRDAGLKQAPASRNEKAPVDFGYVGIDSILEQMRRKAMKQGFEFNIMVVGQSGLGKSTLINTLFKSKISRKSVQPTSEERIPKTIEIKSITHDIEEKGVRMKLTVIDTPGFGDHINNENCWQPIMKFINDQYEKYLQEEVNINRKKRIPDTRVHCCLYFIPATGHSLRPLDIEFMKRLSKVVNIVPVIAKADTLTLEERVHFKQRITADLLSNGIDVYPQKEFDEDSEDRLVNEKFREMIPFAVVGSDHEYQVNGKRILGRKTKWGTIEVENTTHCEFAYLRDLLIRTHMQNIKDITSSIHFEAYRVKRLNEGSSAMANGVEEKEPEAPEM

SEQ ID NO: 822344 - protein, 231 aa, Homo sapiens
MKLTVIDTPGFGDHINNENCWQPIMKFINDQYEKYLQEEVNINRKKRIPDTRVHCCLYFIPATGHSLRPLDIEFMKRLSKVVNIVPVIAKADTLTLEERVHFKQRITADLLSNGIDVYPQKEFDEDSEDRLVNEKFREMIPFAVVGSDHEYQVNGKRILGRKTKWGTIEVENTTHCEFAYLRDLLIRTHMQNIKDITSSIHFEAYRVKRLNEGSSAMANGVEEKEPEAPEM

SEQ ID NO: 822345 - protein, 301 aa, Homo sapiens
VIGRCFAVSLSVRDLVMVVGQSGLGKSTLINTLFKSKISRKSVQPTSEERIPKTIEIKSITHDIEEKGVRMKLTVIDTPGFGDHINNENCWQPIMKFINDQYEKYLQEEVNINRKKRIPDTRVHCCLYFIPATGHSLRPLDIEFMKRLSKVVNIVPVIAKADTLTLEERVHFKQRITADLLSNGIDVYPQKEFDEDSEDRLVNEKFREMIPFAVVGSDHEYQVNGKRILGRKTKWGTIEVENTTHCEFAYLRDLLIRTHMQNIKDITSSIHFEAYRVKRLNEGSSAMANGVEEKEPEAPEM

SEQ ID NO: 822346 - protein, 265 aa, Homo sapiens
LLHLLIFSHLMQERIPKTIEIKSITHDIEEKGVRMKLTVIDTPGFGDHINNENCWQPIMKFINDQYEKYLQEEVNINRKKRIPDTRVHCCLYFIPATGHSLRPLDIEFMKRLSKVVNIVPVIAKADTLTLEERVHFKQRITADLLSNGIDVYPQKEFDEDSEDRLVNEKFREMIPFAVVGSDHEYQVNGKRILGRKTKWGTIEVENTTHCEFAYLRDLLIRTHMQNIKDITSSIHFEAYRVKRLNEGSSAMANGVEEKEPEAPEM

SEQ ID NO: 822347 - protein, 259 aa, Homo sapiens
ALEDKIPALGFPSRSRPSRTDIEEKGVRMKLTVIDTPGFGDHINNENCWQPIMKFINDQYEKYLQEEVNINRKKRIPDTRVHCCLYFIPATGHSLRPLDIEFMKRLSKVVNIVPVIAKADTLTLEERVHFKQRITADLLSNGIDVYPQKEFDEDSEDRLVNEKFREMIPFAVVGSDHEYQVNGKRILGRKTKWGTIEVENTTHCEFAYLRDLLIRTHMQNIKDITSSIHFEAYRVKRLNEGSSAMANGVEEKEPEAPEM

SEQ ID NO: 822348 - protein, 568 aa, Homo sapiens; identical to SEQ ID NO: 822324

SEQ ID NO: 822349 - protein, 225 aa, Homo sapiens
EERNNLRLGTRLGVWQPIMKFINDQYEKYLQEEVNINRKKRIPDTRVHCCLYFIPATGHSLRPLDIEFMKRLSKVVNIVPVIAKADTLTLEERVHFKQRITADLLSNGIDVYPQKEFDEDSEDRLVNEKFREMIPFAVVGSDHEYQVNGKRILGRKTKWGTIEVENTTHCEFAYLRDLLIRTHMQNIKDITSSIHFEAYRVKRLNEGSSAMANGVEEKEPEAPEM

SEQ ID NO: 822350 - protein, 183 aa, Homo sapiens
MDTRVHCCLYFIPATGHSLRPLDIEFMKRLSKVVNIVPVIAKADTLTLEERVHFKQRITADLLSNGIDVYPQKEFDEDSEDRLVNEKFREMIPFAVVGSDHEYQVNGKRILGRKTKWGTIEVENTTHCEFAYLRDLLIRTHMQNIKDITSSIHFEAYRVKRLNEGSSAMANGVEEKEPEAPEM

SEQ ID NO: 822351 - protein, 157 aa, Homo sapiens [sequence omitted]

SEQ ID NO: 822352 - protein, 568 aa, Homo sapiens; identical to SEQ ID NO: 822324

SEQ ID NO: 822353 - protein, 165 aa, Homo sapiens
SGGQLTTPALPLCIGGMSVKEQMETIRHGVHMMVAIPGRLMDLLQKKMVSLDICRYLALDEADRLVNEKFREMIPFAVVGSDHEYQVNGKRILGRKTKWGTIEVENTTHCEFAYLRDLLIRTHMQNIKDITSSIHFEAYRVKRLNEGSSAMANGVEEKEPEAPEM

SEQ ID NO: 822354 - protein, 106 aa, Homo sapiens
  misc_feature (5)..(5): Xaa can be any naturally occurring amino acid
QAGTXRNYGMFREMIPFAVVGSDHEYQVNGKRILGRKTKWGTIEVENTTHCEFAYLRDLLIRTHMQNIKDITSSIHFEAYRVKRLNEGSSAMANGVEEKEPEAPEM

SEQ ID NO: 822355 - protein, 568 aa, Homo sapiens; identical to SEQ ID NO: 822324

SEQ ID NO: 822356 - protein, 568 aa, Homo sapiens; identical to SEQ ID NO: 822324

SEQ ID NO: 822357 - protein, 568 aa, Homo sapiens; identical to SEQ ID NO: 822324

SEQ ID NO: 822358 - protein, 143 aa, Homo sapiens
MTLCPQAWLPEGSEEQLRCADHPSVWGSQCRRPWGGGQASHLQRSPVGCTLPSIPIGPVPWSVSEPRGECSPPGAPGPPARHMVWPSLSPYPCPAPKGRKLQGPLPPTAQPLQAPWQLPLLEQKVPLSQPSADCSARCGDRLE

SEQ ID NO: 822359 - protein, 143 aa, Homo sapiens; identical to SEQ ID NO: 822358

SEQ ID NO: 822360 - protein, 134 aa, Homo sapiens
LARYEAWVLAAHQEHLDPLPATWCGHHSAPTPALLLRVENSRVPCHRLPSHSKPPGSCPSWSRKCLYLSHPQTARPDAGTGWNEGGVFISLPSPSHATPAPTGLQVLLMRWDLIEDKKEGEMTPTPSSPSFEKV

SEQ ID NO: 822361 - protein, 568 aa, Homo sapiens; identical to SEQ ID NO: 822324

SEQ ID NO: 822362 - protein, 568 aa, Homo sapiens; identical to SEQ ID NO: 822324

SEQ ID NO: 822363 - protein, 501 aa, Homo sapiens
MERDRISALKRSFEVEEVETPNSTPPRRVQTPLLRATVASSTQKFQDLGVKNSEPSARHVDSLSQRSPKASLRRVELSGPKAAEPVSRRTELSIDISSKQVENAGAIGPSRFGLKRAEVLGHKTPEPAPRRTEITIVKPQESAHRRMEPPASKVPEVPTAPATDAAPKRVEIQMPKPAEAPTAPSPAQTLENSEPAPVSQLQSRLEPKPQPPVAEATPRSQEATEAAPSCVGDMADTPRDAGLKQAPASRNEKAPVDFGYVGIDSILEQMRRKAMKQGFEFNIMVVGQSGLGKSTLINTLFKSKISRKSVQPTSEERIPKTIEIKSITHDIEEKGVRMKLTVIDTPGFGDHINNENCWQPIMKFINDQYEKYLQEEVNINRKKRIPDTRVHCCLYFIPATGHSLRPLDIEFMKRLSKVVNIVPVIAKADTLTPLSPRGDPWGLSLQGTDDQSPFLLPVTCLAPGEKEGPDETPLRCTHHQVHLQAPGWLLAARRRSARRSV

SEQ ID NO: 822364 - protein, 568 aa, Homo sapiens; identical to SEQ ID NO: 822324

SEQ ID NO: 822365 - protein, 568 aa, Homo sapiens; identical to SEQ ID NO: 822324

SEQ ID NO: 822366 - protein, 106 aa, Homo sapiens
GICLDGIKLGERRERASGVHSPQLKSKVSWQHGPAPHPLSPRGDPWGLSLQGTDDQSPFLLPVTCLAPGEKEGPDETPLRCTHHQVHLQAPGWLLAARRRSARRSV

SEQ ID NO: 822367 - protein, 399 aa, Homo sapiens
MERDRISALKRSFEVEEVETPNSTPPRRVQTPLLRATVASSTQKFQDLGVKNSEPSARHVDSLSQRSPKASLRRVELSGPKAAEPVSRRTELSIDISSKQVENAGAIGPSRFGLKRAEVLGHKTPEPAPRRTEITIVKPQESAHRRMEPPASKVPEVPTAPATDAAPKRVEIQMPKPAEAPTAPSPAQTLENSEPAPVSQLQSRLEPKPQPPVAEATPRSQEATEAAPSCVGDMADTPRDAGLKQAPASRNEKAPVDFGYVGIDSILEQMRRKAMKQGFEFNIMVVGQSGLGKSTLINTLFKSKISRKSVQPTSEERIPKTIEIKSITHDIEEKGVRMKLTVIDTPGFGDHINNENCWQPIMKFINDQYEKYCLQPGEGQREGVYECECVCMEVGALGV

SEQ ID NO: 822368 - protein, 568 aa, Homo sapiens; identical to SEQ ID NO: 822324

SEQ ID NO: 822369 - protein, 568 aa, Homo sapiens; identical to SEQ ID NO: 822324

SEQ ID NO: 822370 - protein, 568 aa, Homo sapiens; identical to SEQ ID NO: 822324

SEQ ID NO: 822371 - protein, 166 aa, Homo sapiens
MADTPRDAGLKQAPASRNEKAPVDFGYVGIDSILEQMRRKAMKQGFEFNIMVVGQSGLGKSTLINTLFKSKISRKSVQPTSEERIPKTIEIKSITHDIEEKGVRMKLTVIDTPGFGDHINNENCWQPIMKFINDQYEKYCLQPGEGQREGVYECECVCMEVGALGV

SEQ ID NO: 822372 - protein, 593 aa, Homo sapiens
MERDRISALKRSFEVEEVETPNSTPPRRVQTPLLRATVASSTQKFQDLGVKNSEPSARHVDSLSQRSPKASLRRVELSGPKAAEPVSRRTELSIDISSKQVENAGAIGPSRFGLKRAEVLGHKTPEPAPRRTEITIVKPQESAHRRMEPPASKVPEVPTAPATDAAPKRVEIQMPKPAEAPTAPSPAQTLENSEPAPVSQLQSRLEPKPQPPVAEATPRSQEATEAAPSCVGDMADTPRDAGLKQAPASRNEKAPVDFGYVGIDSILEQMRRKAMKQGFEFNIMVVGQSGLGKSTLINTLFKSKISRKSVQPTSEERIPKTIEIKSITHDIEEKGVRMKLTVIDTPGFGDHINNENCWQPIMKFINDQYEKYLQEEVNINRKKRIPDTRVHCCLYFIPATGHSLRPLDIEFMKRLSKVVNIVPVIAKADTLTLEERVHFKQRITADLLSNGIDVYPQKEFDEDSEDRLVNEKFREMIPFAVVGSDHEYQVNGKRILGRKTKWGTIEVENTTHCEFAYLRDLLIRTHMQNIKDITSSIHFEAYRVKRLNEGSIPALRCFTFLLCNQTLKNCSFHQALFLNGLLLRASREICLFV

SEQ ID NO: 822373 - protein, 577 aa, Homo sapiens
MERDRISALKRSFEVEEVETPNSTPPRRVQTPLLRATVASSTQKFQDLGVKNSEPSARHVDSLSQRSPKASLRRVELSGPKAAEPVSRRTELSIDISSKQVENAGAIGPSRFGLKRAEVLGHKTPEPAPRRTEITIVKPQESAHRRMEPPASKVPEVPTAPATDAAPKRVEIQMPKPAEAPTAPSPAQTLENSEPAPVSQLQSRLEPKPQPPVAEATPRSQEATEAAPSCVGDMADTPRDAGLKQAPASRNEKAPVDFGYVGIDSILEQMRRKAMKQGFEFNIMVVGQSGLGKSTLINTLFKSKISRKSVQPTSEERIPKTIEIKSITHDIEEKGVRMKLTVIDTPGFGDHINNENCWQPIMKFINDQYEKYLQEEVNINRKKRIPDTRVHCCLYFIPATGHSLRPLDIEFMKRLSKVVNIVPVIAKADTLTLEERVHFKQRITADLLSNGIDVYPQKEFDEDSEDRLVNEKFREMIPFAVVGSDHEYQVNGKRILGRKTKWGTIEVENTTHCEFAYLRDLLIRTHMQNIKDITSIPALRCFTFLLCNQTLKNCSFHQALFLNGLLLRASREICLFV

SEQ ID NO: 822374 - protein, 578 aa, Homo sapiens
MERDRISALKRSFEVEEVETPNSTPPRRVQTPLLRATVASSTQKFQDLGVKNSEPSARHVDSLSQRSPKASLRRVELSGPKAAEPVSRRTELSIDISSKQVENAGAIGPSRFGLKRAEVLGHKTPEPAPRRTEITIVKPQESAHRRMEPPASKVPEVPTAPATDAAPKRVEIQMPKPAEAPTAPSPAQTLENSEPAPVSQLQSRLEPKPQPPVAEATPRSQEATEAAPSCVGDMADTPRDAGLKQAPASRNEKAPVDFGYVGIDSILEQMRRKAMKQGFEFNIMVVGQSGLGKSTLINTLFKSKISRKSVQPTSEERIPKTIEIKSITHDIEEKGVRMKLTVIDTPGFGDHINNENCWQPIMKFINDQYEKYLQEEVNINRKKRIPDTRVHCCLYFIPATGHSLRPLDIEFMKRLSKVVNIVPVIAKADTLTLEERVHFKQRITADLLSNGIDVYPQKEFDEDSEDRLVNEKFREMIPFAVVGSDHEYQVNGKRILGRKTKWGTIEVENTTHCEFAYLRDLLIRTHMQNIKDITSSIHFEAYRVKRLNEGSSAMANGVEEKVPQVGKLTVCSVFNFDG

SEQ ID NO: 822375 - protein, 539 aa, Homo sapiens
MERDRISALKRSFEVEEVETPNSTPPRRVQTPLLRATVASSTQKFQDLGVKNSEPSARHVDSLSQRSPKASLRRVELSGPKAAEPVSRRTELSIDISSKQVENAGAIGPSRFGLKRAEVLGHKTPEPAPRRTEITIVKPQESAHRRMEPPASKVPEVPTAPATDAAPKRVEIQMPKPAEAPTAPSPAQTLENSEPAPVSQLQSRLEPKPQPPVAEATPRSQEATEAAPSCVGDMADTPRDAGLKQAPASRNEKAPVDFGYVGIDSILEQMRRKAMKQGFEFNIMVVGQSGLGKSTLINTLFKSKISRKSVQPTSEERIPKTIEIKSITHDIEEKGVRMKLTVIDTPGFGDHINNENCWQPIMKFINDQYEKYLQEEVNINRKKRIPDTRVHCCLYFIPATGHSLRPLDIEFMKRLSKVVNIVPVIAKADTLTLEERVHFKQRITADLLSNGIDVYPQKEFDEDSEDRLVNEKFREMIPFAVVGSDHEYQVNGKRILGRKTKWGTIEVENTTHCEFAYLRDLLIRTRHRALRDPLDQPCD

SEQ ID NO: 822376 - protein, 116 aa, Homo sapiens; identical to SEQ ID NO: 822323
  misc_feature (13)..(13): Xaa can be any naturally occurring amino acid

SEQ ID NO: 822377 - protein, 521 aa, Homo sapiens
MERDRISALKRSFEVEEVETPNSTPPRRVQTPLLRATVASSTQKFQDLGVKNSEPSARHVDSLSQRSPKASLRRVELSGPKAAEPVSRRTELSIDISSKQVENAGAIGPSRFGLKRAEVLGHKTPEPAPRRTEITIVKPQESAHRRMEPPASKVPEVPTAPATDAAPKRVEIQMPKPAEAPTAPSPAQTLENSEPAPVSQLQSRLEPKPQPPVAEATPRSQEATEAAPSCVGDMADTPRDAGLKQAPASRNEKAPVDFGYVGIDSILEQMRRKAMKQGFEFNIMVVGQSGLGKSTLINTLFKSKISRKSVQPTSEERIPKTIEIKSITHDIEEKGVRMKLTVIDTPGFGDHINNENCWQPIMKFINDQYEKYLQEEVNINRKKRIPDTRVHCCLYFIPATGHSLRPLDIEFMKRLSKVVNIVPVIAKADTLTLEERVHFKQRITADLLSNGIDVYPQKEFDEDSEDRLVNEKFREMIPFAVVGSDHEYQVNGKRILGRKTKWGTIEVETRTHCEIHSRRPI

SEQ ID NO: 822378 - protein, 518 aa, Homo sapiens
MERDRISALKRSFEVEEVETPNSTPPRRVQTPLLRATVASSTQKFQDLGVKNSEPSARHVDSLSQRSPKASLRRVELSGPKAAEPVSRRTELSIDISSKQVENAGAIGPSRFGLKRAEVLGHKTPEPAPRRTEITIVKPQESAHRRMEPPASKVPEVPTAPATDAAPKRVEIQMPKPAEAPTAPSPAQTLENSEPAPVSQLQSRLEPKPQPPVAEATPRSQEATEAAPSCVGDMADTPRDAGLKQAPASRNEKAPVDFGYVGIDSILEQMRRKAMKQGFEFNIMVVGQSGLGKSTLINTLFKSKISRKSVQPTSEERIPKTIEIKSITHDIEEKGVRMKLTVIDTPGFGDHINNENCWQPIMKFINDQYEKYLQEEVNINRKKRIPDTRVHCCLYFIPATGHSLRPLDIEFMKRLSKVVNIVPVIAKADTLTLEERVHFKQRITADLLSNGIDVYPQKEFDEDSEDRLVNEKFREMIPFAVVGSDHEYQVNGKRILGRKTKWGTIEGTRRRRRGSRQM

SEQ ID NO: 822379 - protein, 435 aa, Homo sapiens
MERDRISALKRSFEVEEVETPNSTPPRRVQTPLLRATVASSTQKFQDLGVKNSEPSARHVDSLSQRSPKASLRRVELSGPKAAEPVSRRTELSIDISSKQVENAGAIGPSRFGLKRAEVLGHKTPEPAPRRTEITIVKPQESAHRRMEPPASKVPEVPTAPATDAAPKRVEIQMPKPAEAPTAPSPAQTLENSEPAPVSQLQSRLEPKPQPPVAEATPRSQEATEAAPSCVGDMADTPRDAGLKQAPASRNEKAPVDFGYVGIDSILEQMRRKAMKQGFEFNIMVVGQSGLGKSTLINTLFKSKISRKSVQPTSEERIPKTIEIKSITHDIEEKGVRMKLTVIDTPGFGDHINNENCWQPIMKFINDQYEKYLQEEVNINRKKRIPRWRVLLQHHAPLQPAVPCDLCGAVIQGAGEEYLGAKVFYGSEDCARFQD

SEQ ID NO: 822380 - protein, 399 aa, Homo sapiens
MERDRISALKRSFEVEEVETPNSTPPRRVQTPLLRATVASSTQKFQDLGVKNSEPSARHVDSLSQRSPKASLRRVELSGPKAAEPVSRRTELSIDISSKQVENAGAIGPSRFGLKRAEVLGHKTPEPAPRRTEITIVKPQESAHRRMEPPASKVPEVPTAPATDAAPKRVEIQMPKPAEAPTAPSPAQTLENSEPAPVSQLQSRLEPKPQPPVAEATPRSQEATEAAPSCVGDMADTPRDAGLKQAPASRNEKAPVDFGYVGIDSILEQMRRKAMKQGFEFNIMVVGQSGLGKSTLINTLFKSKISRKSVQPTSEERIPKTIEIKSITHDIEEKGVRMKLTVIDTPGFGDHINNENCIPALRCFTFLLCNQTLKNCSFHQALFLNGLLLRASREICLFV

SEQ ID NO: 822381 - protein, 372 aa, Homo sapiens
MERDRISALKRSFEVEEVETPNSTPPRRVQTPLLRATVASSTQKFQDLGVKNSEPSARHVDSLSQRSPKASLRRVELSGPKAAEPVSRRTELSIDISSKQVENAGAIGPSRFGLKRAEVLGHKTPEPAPRRTEITIVKPQESAHRRMEPPASKVPEVPTAPATDAAPKRVEIQMPKPAEAPTAPSPAQTLENSEPAPVSQLQSRLEPKPQPPVAEATPRSQEATEAAPSCVGDMADTPRDAGLKQAPASRNEKAPVDFGYVGIDSILEQMRRKAMKQGFEFNIMVVGQSGLGKSTLINTLFKSKISRKSVQPTSEERIPKTIEIKSITHDIEEKGVRMKLTVIDTPGFGDHINNENWTRHRALRDPLDQPCD

SEQ ID NO: 822382 - protein, 360 aa, Homo sapiens
MERDRISALKRSFEVEEVETPNSTPPRRVQTPLLRATVASSTQKFQDLGVKNSEPSARHVDSLSQRSPKASLRRVELSGPKAAEPVSRRTELSIDISSKQVENAGAIGPSRFGLKRAEVLGHKTPEPAPRRTEITIVKPQESAHRRMEPPASKVPEVPTAPATDAAPKRVEIQMPKPAEAPTAPSPAQTLENSEPAPVSQLQSRLEPKPQPPVAEATPRSQEATEAAPSCVGDMADTPRDAGLKQAPASRNEKAPVDFGYVGIDSILEQMRRKAMKQGFEFNIMVVGQSGLGKSTLINTLFKSKISRKSVQPTSEERIPKTIEIKSITHDIEEKGVRMKLTVIDTPGFGDHINNENWCPQ

SEQ ID NO: 822383 - protein, 388 aa, Homo sapiens
MERDRISALKRSFEVEEVETPNSTPPRRVQTPLLRATVASSTQKFQDLGVKNSEPSARHVDSLSQRSPKASLRRVELSGPKAAEPVSRRTELSIDISSKQVENAGAIGPSRFGLKRAEVLGHKTPEPAPRRTEITIVKPQESAHRRMEPPASKVPEVPTAPATDAAPKRVEIQMPKPAEAPTAPSPAQTLENSEPAPVSQLQSRLEPKPQPPVAEATPRSQEATEAAPSCVGDMADTPRDAGLKQAPASRNEKAPVDFGYVGIDSILEQMRRKAMKQGFEFNIMVVGQSGLGKSTLINTLFKSKISRKSVQPTSEERIPKTIEIKSITHDIEEKGVRMKLTVIDTPGFGDHINNENCWQPILSPGQSGLGKSTLINTLFKSKISRKYV

SEQ ID NO: 822384 - protein, 155 aa, Homo sapiens
YELEVETFCRASGIDVYPQKEFDEDSEDRLVNEKFREMIPFAVVGSDHEYQVNGKRILGRKTKWGTIEVENTTHCEFAYLRDLLIRTHMQNIKDITSSIHFEAYRVKRLNEGSIPALRCFTFLLCNQTLKNCSFHQALFLNGLLLRASREICLFV

SEQ ID NO: 822385 - protein, 123 aa, Homo sapiens
RQSLTLLPRLECSGAISAHCNLRLPDSSDSPASASRVAGIIGTHHHTQLIFVFLVETGFHHVGQAGLELLVSSDLPSSASQSAGITGVSHRAWPTLSHFKTLLSATKVACTMGNVTNKYPRKT

SEQ ID NO: 822386 - protein, 420 aa, Homo sapiens
MATSLGSNTYNRQNWEDADFPILCQTCLGENPYIRMTKEKYGKECKICARPFTVFRWCPGVRMRFKKTEVCQTCSKLKNVCQTCLLDLEYGLPIQVRDAGLSFKDDMPKSDVNKEYYTQNMEREISNSDGTRPVGMLGKATSTSDMLLKLARTTPYYKRNRPHICSFWVKGECKRGEECPYRHEKPTDPDDPLADQNIKDRYYGINDPVADKLLKRASTMPRLDPPEDKTITTLYVGGLGDTITETDLRNHFYQFGEIRTITVVQRQQCAFIQFATRQAAEVAAEKSFNKLIVNGRRLNVKWGRSQAARGKEKEKDGTTDSGIKLEPVPGLPGALPPPPAAEEEASANYFNLPPSGPPAVVNIALPPPPGIAPPPPPGFGPHMFHPMGPPPPFMRAPGPIHYPSQDPQRMGAHAGKHSSP

SEQ ID NO: 822387 - protein, 367 aa, Homo sapiens
MGLVVGAVCSPEESWEKGSQVLKHPTETNTAIQYGLFGCIYHEATRRNSTYEATLKCNRIGYVDDVPLPGIISNSDGTRPVGMLGKATSTSDMLLKLARTTPYYKRNRPHICSFWVKGECKRGEECPYRHEKPTDPDDPLADQNIKDRYYGINDPVADKLLKRASTMPRLDPPEDKTITTLYVGGLGDTITETDLRNHFYQFGEIRTITVVQRQQCAFIQFATRQAAEVAAEKSFNKLIVNGRRLNVKWGRSQAARGKEKEKDGTTDSGIKLEPVPGLPGALPPPPAAEEEASANYFNLPPSGPPAVVNIALPPPPGIAPPPPPGFGPHMFHPMGPPPPFMRAPGPIHYPSQDPQRMGAHAGKHSSP

SEQ ID NO: 822388 - protein, 448 aa, Homo sapiens
MATSLGSNTYNRQNWEDADFPILCQTCLGENPYIRMTKEKYGKECKICARPFTVFRWCPGVRMRFKKTEVCQTCSKLKNVCQTCLLDLEYGLPIQVRDAGLSFKDDMPKSDVNKEYYTQNMEREVCCHFLDKNPNELTQSDNLSFEFVIPTEISNSDGTRPVGMLGKATSTSDMLLKLARTTPYYKRNRPHICSFWVKGECKRGEECPYRHEKPTDPDDPLADQNIKDRYYGINDPVADKLLKRASTMPRLDPPEDKTITTLYVGGLGDTITETDLRNHFYQFGEIRTITVVQRQQCAFIQFATRQAAEVAAEKSFNKLIVNGRRLNVKWGRSQAARGKEKEKDGTTDSGIKLEPVPGLPGALPPPPAAEEEASANYFNLPPSGPPAVVNIALPPPPGIAPPPPPGFGPHMFHPMGPPPPFMRAPGPIHYPSQDPQRMGAHAGKHSSP

SEQ ID NO: 822389 - protein, 150 aa, Homo sapiens [sequence omitted]

SEQ ID NO: 822390 - protein, 290 aa, Homo sapiens
RVNKTPTGAALPRGLTGLWRSSLPIRKLQLPPDALKMATSLGSNTYNRQNWEDADFPILCQTCLGENPYIRMTKEKYGKECKICARPFTVFRWCPGVRMRFKKTEVCQTCSKLKNVCQTCLLDLEYGLPIQVRDAGLSFKDDMPKSDVNKEYYTQNMEREISNSDGTRPVGMLGKATSTSDMLLKLARTTPYYKRNRPHICSFWVKGECKRGEECPYRHEKPTDPDDPLADQNIKDRYYGINDPVADKLLKRASTMPRLDPPEDKTITTLYVGGLGDTITETDLRFVGIS

SEQ ID NO: 822391 - protein, 246 aa, Homo sapiens
RPRPRAPDMLGQPAPLERFASRRPQVLAVRTVCDLVLGKMDKDCEMKRTTLDSPLGKLELSGCEQGLHEIKLLGKGTSAADAVEVPAPAAVLGGPEPLMQCTAWLNAYFHQPEAIEEFPVPALHHPVFQQESFTRQVLWKLLKVVKFGEVISYQQLAALAGNPKAARAVGGAMRGNPVPILIPCHRVVCSSGAVGNYSGGLAVKEWLLAHEGHRLGKPGLGGSSGLAGAWLKGAGATSGSPPAGRN

SEQ ID NO: 822392 - protein, 246 aa, Homo sapiens; identical to SEQ ID NO: 822391

SEQ ID NO: 822393 - protein, 220 aa, Homo sapiens
PPRPPRRPLVLGKMDKDCEMKRTTLDSPLGKLELSGCEQGLHEIKLLGKGTSAADAVEVPAPAAVLGGPEPLMQCTAWLNAYFHQPEAIEEFPVPALHHPVFQQESFTRQVLWKLLKVVKFGEVISYQQLAALAGNPKAARAVGGAMRGNPVPILIPCHRVVCSSGAVGNYSGGLAVKEWLLAHEGHRLGKPGLGGSSGLAGAWLKGAGATSGSPPAGRN

SEQ ID NO: 822394 - protein, 107 aa, Homo sapiens
RPRPRAPDMLGQPAPLERFASRRPQVLAVRTVCDLVLGKMDKDCEMKRTTLDSPLGKLELSGCEQGLHEIKLLGKGTSAAEPLLVLPCLGVIIRRMDQPGAIGNALR

SEQ ID NO: 822395 - protein, 71 aa, Homo sapiens
DRIALIAPPTARAALGFLPGCYSGGLAVKEWLLAHEGHRLGKPGLGGSSGLAGAWLKGAGATSGSPPAGRN

SEQ ID NO: 822396 - protein, 103 aa, Homo sapiens [sequence omitted]

SEQ ID NO: 822397 - protein, 564 aa, Homo sapiens
MKEHGGTFSSTGISGGSGDSAMDSLQPLQPNYMPVCLFAEESYQKLAMETLEELDWCLDQLETIQTYRSVSEMASNKFKRMLNRELTHLSEMSRSGNQVSEYISNTFLDKQNDVEIPSPTQKDREKKKKQQLMTQISGVKKLMHSSSLNNTSISRFGVNTENEDHLAKELEDLNKWGLNIFNVAGYSHNRPLTCIMYAIFQERDLLKTFRISSDTFITYMMTLEDHYHSDVAYHNSLHAADVAQSTHVLLSTPALDAVFTDLEILAAIFAAAIHDVDHPGVSNQFLINTNSELALMYNDESVLENHHLAVGFKLLQEEHCDIFMNLTKKQRQTLRKMVIDMVLATDMSKHMSLLADLKTMVETKKVTSSGVLLLDNYTDRIQVLRNMVHCADLSNPTKSLELYRQWTDRIMEEFFQQGDKERERGMEISPMCDKHTASVEKSQVGFIDYIVHPLWETWADLVQPDAQDILDTLEDNRNWYQSMIPQSPSPPLDEQNRDCQGLMEKFQFELTLDEEDSEGPEKEGEGHSYFSSTKTLCVIDPENRDSLGETDIDIATEDKSPVDT

SEQ ID NO: 822398 - protein, 564 aa, Homo sapiens; identical to SEQ ID NO: 822397

SEQ ID NO: 822399 - protein, 736 aa, Homo sapiens
MKKSRSVMTVMADDNVKDYFECSLSKSYSSSSNTLGIDLWRGRRCCSGNLQLPPLSQRQSERARTPEGDGISRPTTLPLTTLPSIAITTVSQECFDVENGPSPGRSPLDPQASSSAGLVLHATFPGHSQRRESFLYRSDSDYDLSPKAMSRNSSLPSEQHGDDLIVTPFAQVLASLRSVRNNFTILTNLHGTSNKRSPAASQPPVSRVNPQEESYQKLAMETLEELDWCLDQLETIQTYRSVSEMASNKFKRMLNRELTHLSEMSRSGNQVSEYISNTFLDKQNDVEIPSPTQKDREKKKKQQLMTQISGVKKLMHSSSLNNTSISRFGVNTENEDHLAKELEDLNKWGLNIFNVAGYSHNRPLTCIMYAIFQERDLLKTFRISSDTFITYMMTLEDHYHSDVAYHNSLHAADVAQSTHVLLSTPALDAVFTDLEILAAIFAAAIHDVDHPGVSNQFLINTNSELALMYNDESVLENHHLAVGFKLLQEEHCDIFMNLTKKQRQTLRKMVIDMVLATDMSKHMSLLADLKTMVETKKVTSSGVLLLDNYTDRIQVLRNMVHCADLSNPTKSLELYRQWTDRIMEEFFQQGDKERERGMEISPMCDKHTASVEKSQVGFIDYIVHPLWETWADLVQPDAQDILDTLEDNRNWYQSMIPQSPSPPLDEQNRDCQGLMEKFQFELTLDEEDSEGPEKEGEGHSYFSSTKTLCVIDPENRDSLGETDIDIATEDKSPVDT

SEQ ID NO: 822400 - protein, 721 aa, Homo sapiens
MTAKDSSKELTASEPEVCIKTFKEQMHLELELPRLPGNRPTSPKISPRSSPRNSPCFFRKLLVNKSIRQRRRFTVAHTCFDVENGPSPGRSPLDPQASSSAGLVLHATFPGHSQRRESFLYRSDSDYDLSPKAMSRNSSLPSEQHGDDLIVTPFAQVLASLRSVRNNFTILTNLHGTSNKRSPAASQPPVSRVNPQEESYQKLAMETLEELDWCLDQLETIQTYRSVSEMASNKFKRMLNRELTHLSEMSRSGNQVSEYISNTFLDKQNDVEIPSPTQKDREKKKKQQLMTQISGVKKLMHSSSLNNTSISRFGVNTENEDHLAKELEDLNKWGLNIFNVAGYSHNRPLTCIMYAIFQERDLLKTFRISSDTFITYMMTLEDHYHSDVAYHNSLHAADVAQSTHVLLSTPALDAVFTDLEILAAIFAAAIHDVDHPGVSNQFLINTNSELALMYNDESVLENHHLAVGFKLLQEEHCDIFMNLTKKQRQTLRKMVIDMVLATDMSKHMSLLADLKTMVETKKVTSSGVLLLDNYTDRIQVLRNMVHCADLSNPTKSLELYRQWTDRIMEEFFQQGDKERERGMEISPMCDKHTASVEKSQVGFIDYIVHPLWETWADLVQPDAQDILDTLEDNRNWYQSMIPQSPSPPLDEQNRDCQGLMEKFQFELTLDEEDSEGPEKEGEGHSYFSSTKTLCVIDPENRDSLGETDIDIATEDKSPVDT

SEQ ID NO: 822401 - protein, 736 aa, Homo sapiens; identical to SEQ ID NO: 822399

SEQ ID NO: 822402 - protein, 721 aa, Homo sapiens; identical to SEQ ID NO: 822400

SEQ ID NO: 822403 - protein, 453 aa, Homo sapiens
MKEHGGTFSSTGISGGSGDSAMDSLQPLQPNYMPVCLFAEESYQKLAMETLEELDWCLDQLETIQTYRSVSEMASNKFKRMLNRELTHLSEMSRSGNQVSEYISNTFLDKQNDVEIPSPTQKDREKKKKQQLMTQISGVKKLMHSSSLNNTSISRFGVNTENEDHLAKELEDLNKWGLNIFNVAGYSHNRPLTCIMYAIFQERDLLKTFRISSDTFITYMMTLEDHYHSDVAYHNSLHAADVAQSTHVLLSTPALDAVFTDLEILAAIFAAAIHDVDHPGVSNQFLINTNSELALMYNDESVLENHHLAVGFKLLQEEHCDIFMNLTKKQRQTLRKMVIDMVLATDMSKHMSLLADLKTMVETKKVTSSGVLLLDNYTDRIQVLRNMVHCADLSNPTKSLELYRQWTDRIMEEFFQQGDKERERGMEISPMCDKHTASVEKSQVSNMRFSKFL

SEQ ID NO: 822404 - protein, 224 aa, Homo sapiens
MKKSRSVMTVMADDNVKDYFECSLSKSYSSSSNTLGIDLWRGRRCCSGNLQLPPLSQRQSERARTPEGDGISRPTTLPLTTLPSIAITTVSQECFDVENGPSPGRSPLDPQASSSAGLVLHATFPGHSQRRESFLYRSDSDYDLSPKAMSRNSSLPSEQHGDDLIVTPFAQVLASLRSVRNNFTILTNLHGTSNKRSPAASQPPVSRVNPQGRPCHKVYLDVSR

SEQ ID NO: 822405 - protein, 98 aa, Homo sapiens
GGESWKEGASVQIMKEHGGTFSSTGISGGSGDSAMDSLQPLQPNYMPVCLFAEESYQKLAMETLEELDWCLDQLETIQTYRSVSEMASNKVRDDLFIH

SEQ ID NO: 822406 - protein, 188 aa, Homo sapiens
EEFGIIKSYNLKPGGDKISVTNQNRKEYVQLYTDFLLNKSIYKQFAAFYYGFHSVCASNALMLLRPEEVEILVCGSPDLDMHALQRSTQYDGYAKTDLTIKYFWDVVLGFPLDLQKKLLHFTTGSDRVPVGGMADLNFKISKNETSTNCLPVAHTCFNQLCLPPYKSKKDLKQKLIIGISNSEGFGLE

SEQ ID NO: 822407 - protein, 141 aa, Homo sapiens
GTTAGEAGSFSGAVALAADAGSRTLGVMYYKFSGFTQKLAGAWASEAYSPQGLKPVVSTEAPPIIFATPTKLTSDSTVYDYAGKNKVPELQKFFQKADGVPVYLKRGLPDQMLYRTTMALTVGGTIYCLIALYMASQPKNK

SEQ ID NO: 822408 - protein, 141 aa, Homo sapiens; identical to SEQ ID NO: 822407

SEQ ID NO: 822409 - protein, 97 aa, Homo sapiens
GTTAGEAGSFSGAVALAADAGSRTLGVMYYKFSGFTQKLAGAWASEAYSPQGLKPVVSTEAPPIIFATPTKLTSDSTVYDYAGKNKVPELQKFFQCI

SEQ ID NO: 822410 - protein, 141 aa, Homo sapiens; identical to SEQ ID NO: 822407

SEQ ID NO: 822411 - protein, 141 aa, Homo sapiens; identical to SEQ ID NO: 822407

SEQ ID NO: 822412 - protein, 141 aa, Homo sapiens; identical to SEQ ID NO: 822407

SEQ ID NO: 822413 - protein, 120 aa, Homo sapiens
GPQPGRRGPSLGRSRWQRMREAGLWASCTTSLVASRRSWQEHGLRRPIARRYEWRLASSDMRSGGPSLGDRQSRRWSQGRLLPAVEFVSVLLAPPGASPHQRIKACGFHRSTTYHICHTN

SEQ ID NO: 822414 - protein, 187 aa, Homo sapiens
MKDMPLSGHFSLLLPCEEGHVCFPFCIIDWWPHKKRQEESCLCAHTPRKSHVSTQRKGSRAHKPGREPCTPELNCENIHSCCLSHQSVVFYGSPAKTGLKPVVSTEAPPIIFATPTKLTSDSTVYDYAGKNKVPELQKFFQKADGVPVYLKRGLPDQMLYRTTMALTVGGTIYCLIALYMASQPKNK

SEQ ID NO: 822415 - protein, 116 aa, Homo sapiens
QGGREMDGNCWGCEKPGALTGVVIDLGLKPVVSTEAPPIIFATPTKLTSDSTVYDYAGKNKVPELQKFFQKADGVPVYLKRGLPDQMLYRTTMALTVGGTIYCLIALYMASQPKNK

SEQ ID NO: 822416 - protein, 122 aa, Homo sapiens
GTTAGEAGSFSGAVALAADAGSRTLGVMYYKFSGFTQKLAEAPPIIFATPTKLTSDSTVYDYAGKNKVPELQKFFQKADGVPVYLKRGLPDQMLYRTTMALTVGGTIYCLIALYMASQPKNK

SEQ ID NO: 822417 - protein, 141 aa, Homo sapiens; identical to SEQ ID NO: 822407

SEQ ID NO: 822418 - protein, 141 aa, Homo sapiens; identical to SEQ ID NO: 822407

SEQ ID NO: 822419 - protein, 194 aa, Homo sapiens
GTTAGEAGSFSGAVALAADAGSRTLGVMYYKFSGFTQKLAGAWASEAYSPQGLKPVVSTEAPPIIFATPTKLTSDSTVYDYAGKNKVPELQKFFQETYLQTILFLWLLETPVVGILDKGTFGQQGFSDGDTDVRHCCVVDSPRPRLRTKTDTDSLLFPLSPFQSKSVNLPWSFPSMSNECLSPSVVEEVQILKF

SEQ ID NO: 822420 - protein, 502 aa, Homo sapiens
MQSEIAMDRMKKIKRQLSMTLRGGRGIDKTNGAPEQIGLDESGGGGGSDPGEAPTRAAPGELRSARGPLSSAPEIVHEDLKMGSDGESDQASATSSDEVQSPVRVRMRNHPPRKISTEDINKRLSLPADIRLPEGYLEKLTLNSPIFDKPLSRRLRRVSLSEIGFGKLETYIKLDKLGEGTYATVYKGKSKLTDNLVALKEIRLEHEEGAPCTAIREVSLLKDLKHANIVTLHDIIHTEKSLTLVFEYLDKDLKQYLDDCGNIINMHNVKLFLFQLLRGLAYCHRQKVLHRDLKPQNLLINERGELKLADFGLARAKSIPTKTYSNEVVTLWYRPPDILLGSTDYSTQIDMWGVGCIFYEMATGRPLFPGSTVEEQLHFIFRILGTPTEETWPGILSNEEFKTYNYPKYRAEALLSHAPRLDSDGADLLTKLLQFEGRNRISAEDAMKHPFFLSLGERIHKLPDTTSIFALKEIQLQKEASLRSSSMPDSGRPAFRVVDTEF

SEQ ID NO: 822421 - protein, 631 aa, Homo sapiens
CACAERGARGGWAVGCSALGSAATPRSDRSVPRAAVSTRIQAGANESGGIARSGQAHGRLSGTPPPPQPPPPPPPPPPQPAAARAQQPWLKTTGTGACGEQEEKEVARPHPGPPPQAPPRRPRGSEVARAPPPIAMDRMKKIKRQLSMTLRGGRGIDKTNGAPEQIGLDESGGGGGSDPGEAPTRAAPGELRSARGPLSSAPEIVHEDLKMGSDGESDQASATSSDEVQSPVRVRMRNHPPRKISTEDINKRLSLPADIRLPEGYLEKLTLNSPIFDKPLSRRLRRVSLSEIGFGKLETYIKLDKLGEGTYATVYKGKSKLTDNLVALKEIRLEHEEGAPCTAIREVSLLKDLKHANIVTLHDIIHTEKSLTLVFEYLDKDLKQYLDDCGNIINMHNVKLFLFQLLRGLAYCHRQKVLHRDLKPQNLLINERGELKLADFGLARAKSIPTKTYSNEVVTLWYRPPDILLGSTDYSTQIDMWGVGCIFYEMATGRPLFPGSTVEEQLHFIFRILGTPTEETWPGILSNEEFKTYNYPKYRAEALLSHAPRLDSDGADLLTKLLQFEGRNRISAEDAMKHPFFLSLGERIHKLPDTTSIFALKEIQLQKEASLRSSSMPDSGRPAFRVVDTEF

SEQ ID NO: 822422 - protein, 580 aa, Homo sapiens
CACAERGARGGWAVGCSALGSAATPRSDRSVPRAAVSTRIQAGANESGGIARSGQAHGRLSGTPPPPQPPPPPPPPPPQPAAARAQQPWLKTTGTGACGEQEEKEVARPHPGPPPQAPPRRPRGSEVARAPPPIAMDRMKKIKRQLSMTLREIVHEDLKMGSDGESDQASATSSDEVQSPVRVRMRNHPPRKISTEDINKRLSLPADIRLPEGYLEKLTLNSPIFDKPLSRRLRRVSLSEIGFGKLETYIKLDKLGEGTYATVYKGKSKLTDNLVALKEIRLEHEEGAPCTAIREVSLLKDLKHANIVTLHDIIHTEKSLTLVFEYLDKDLKQYLDDCGNIINMHNVKLFLFQLLRGLAYCHRQKVLHRDLKPQNLLINERGELKLADFGLARAKSIPTKTYSNEVVTLWYRPPDILLGSTDYSTQIDMWGVGCIFYEMATGRPLFPGSTVEEQLHFIFRILGTPTEETWPGILSNEEFKTYNYPKYRAEALLSHAPRLDSDGADLLTKLLQFEGRNRISAEDAMKHPFFLSLGERIHKLPDTTSIFALKEIQLQKEASLRSSSMPDSGRPAFRVVDTEF

SEQ ID NO: 822423 - protein, 496 aa, Homo sapiens [sequence omitted]

SEQ ID NO: 822424 - protein, 624 aa, Homo sapiens
CACAERGARGGWAVGCSALGSAATPRSDRSVPRAAVSTRIQAGANESGGIARSGQAHGRLSGTPPPPPPPPQPAAARAQQPWLKTTGTGACGEQEEKEVARPHPGPPPQAPPRRPRGSEVARAPPPIAMDRMKKIKRQLSMTLRGGRGIDKTNGAPEQIGLDESGGGGGSDPGEAPTRAAPGELRSARGPLSSAPEIVHEDLKMGSDGESDQASATSSDEVQSPVRVRMRNHPPRKISTEDINKRLSLPADIRLPEGYLEKLTLNSPIFDKPLSRRLRRVSLSEIGFGKLETYIKLDKLGEGTYATVYKGKSKLTDNLVALKEIRLEHEEGAPCTAIREVSLLKDLKHANIVTLHDIIHTEKSLTLVFEYLDKDLKQYLDDCGNIINMHNVKLFLFQLLRGLAYCHRQKVLHRDLKPQNLLINERGELKLADFGLARAKSIPTKTYSNEVVTLWYRPPDILLGSTDYSTQIDMWGVGCIFYEMATGRPLFPGSTVEEQLHFIFRILGTPTEETWPGILSNEEFKTYNYPKYRAEALLSHAPRLDSDGADLLTKLLQFEGRNRISAEDAMKHPFFLSLGERIHKLPDTTSIFALKEIQLQKEASLRSSSMPDSGRPAFRVVDTEF

SEQ ID NO: 822425 - protein, 496 aa, Homo sapiens [sequence omitted]

SEQ ID NO: 822426 - protein, 496 aa, Homo sapiens [sequence omitted]

SEQ ID NO: 822427 - protein, 631 aa, Homo sapiens; identical to SEQ ID NO: 822421

SEQ ID NO: 822428 - protein, 631 aa, Homo sapiens; identical to SEQ ID NO: 822421

SEQ ID NO: 822429 - protein, 617 aa, Homo sapiens
CACAERGARGGWAVGCSALGSAATPRSDRSVPRAAVSTRIQAGANESGGIARSGQAHGRLSGTPPPPQPPPPPPPPPPQPAAARAQQPWLKTTGTGACGEQEEKEVARPHPGPPPQAPPRRPRGSEVARAPPPIAMDRMKKIKRQLSMTLRGGRGIDKTNGAPEQIGLDESGGGGGSDPGEAPTRAAPGELRSARGPLSSAPEIVHEDLKMGSDGESDQASATSSDEVQSPVRDINKRLSLPADIRLPEGYLEKLTLNSPIFDKPLSRRLRRVSLSEIGFGKLETYIKLDKLGEGTYATVYKGKSKLTDNLVALKEIRLEHEEGAPCTAIREVSLLKDLKHANIVTLHDIIHTEKSLTLVFEYLDKDLKQYLDDCGNIINMHNVKLFLFQLLRGLAYCHRQKVLHRDLKPQNLLINERGELKLADFGLARAKSIPTKTYSNEVVTLWYRPPDILLGSTDYSTQIDMWGVGCIFYEMATGRPLFPGSTVEEQLHFIFRILGTPTEETWPGILSNEEFKTYNYPKYRAEALLSHAPRLDSDGADLLTKLLQFEGRNRISAEDAMKHPFFLSLGERIHKLPDTTSIFALKEIQLQKEASLRSSSMPDSGRPAFRVVDTEF

SEQ ID NO: 822430 - protein, 266 aa, Homo sapiens
ALGLVSVFGRGAVPAGGRASGYVFDLCLPFLGPQLFLFQLLRGLAYCHRQKVLHRDLKPQNLLINERGELKLADFGLARAKSIPTKTYSNEVVTLWYRPPDILLGSTDYSTQIDMWGVGCIFYEMATGRPLFPGSTVEEQLHFIFRILGTPTEETWPGILSNEEFKTYNYPKYRAEALLSHAPRLDSDGADLLTKLLQFEGRNRISAEDAMKHPFFLSLGERIHKLPDTTSIFALKEIQLQKEASLRSSSMPDSGRPAFRVVDTEF

SEQ ID NO: 822431 - protein, 619 aa, Homo sapiens
CACAERGARGGWAVGCSALGSAATPRSDRSVPRAAVSTRIQAGANESGGIARSGQAHGRLSGTPPPPQPPPPPPPPPPQPAAARAQQPWLKTTGTGACGEQEEKEVARPHPGPPPQAPPRRPRGSEVARAPPPIAMDRMKKIKRQLSMTLRGGRGIDKTNGAPEQIGLDESGGGGGSDPGEAPTRAAPGELRSARGPLSSAPEIVHEDLKMGSDGESDQASATSSDEVQSPVRVRMRNHPPRKISTEDINKRLSLPADIRLPEGYLEKLTLNSPIFDKPLSRRLRRVSLSEIGFGKLETYIKLDKLGEGTYATVYKGKSKLTDNLVALKEIRLEHEEGAPCTAIREVSLLKDLKHANIVTLHDIIHTEKSLTLVFEYLDKDLKQYLDDCGNIINMHNVKLFLFQLLRGLAYCHRQKVLHRDLKPQNLLINERGELKLADFGLARAKSIPTKTYSNEVVTLWYRPPDILLGSTDYSTQIDMWGVGCIFYEMATGRPLFPGSTVEEQLHFIFRILGTPTEETWPGILSNEEFKTYNYPKYRAEALLSHAPRLDSDGADLLTKLLQFEGRNRISAEDAMKHPFFLSLGERIHKLPDSEWSWGMDRPAWGLGNRTAGASWRVV

SEQ ID NO: 822432 - protein, 631 aa, Homo sapiens; identical to SEQ ID NO: 822421

SEQ ID NO: 822433 - protein, 152 aa, Homo sapiens [sequence omitted]

SEQ ID NO: 822434 - protein, 631 aa, Homo sapiens; identical to SEQ ID NO: 822421

SEQ ID NO: 822435 - protein, 631 aa, Homo sapiens; identical to SEQ ID NO: 822421

SEQ ID NO: 822436 - protein, 723 aa, Homo sapiens
CACAERGARGGWAVGCSALGSAATPRSDRSVPRAAVSTRIQAGANESGGIARSGQAHGRLSGTPPPPQPPPPPPPPPPQPAAARAQQPWLKTTGTGACGEQEEKEVARPHPGPPPQAPPRRPRGSEVARAPPPIAMDRMKKIKRQLSMTLRGGRGIDKTNGAPEQIGLDESGGGGGSDPGEAPTRAAPGELRSARGPLSSAPEIVHEDLKMGSDGESDQASATSSDEVQSPVRVRMRNHPPRKISTEDINKRLSLPADIRLPEGYLEKLTLNSPIFDKPLSRRLRRVSLSEIGFGKLETYIKLDKLGEGTYATVYKGKSKLTDNLVALKEIRLEHEEGAPCTAIREVSLLKDLKHANIVTLHDIIHTEKSLTLVFEYLDKDLKQYLDDCGNIINMHNVKLFLFQLLRGLAYCHRQKVLHRDLKPQNLLINERGELKLADFGLARAKSIPTKTYSNEVVTLWYRPPDILLGSTDYSTQIDMWGVGCIFYEMATGRPLFPGSTVEEQLHFIFRILGTPTEETWPGILSNEEFKTYNYPKYRAEALLSHAPRLDSDGADLLTKLLQFEGRNRISAEDAMKHPFFLSLGERIHKLPDTTSIFALKEIQLQKEASLRSSSMPDSAICSAFPHRQASFPRGGHRVLSHRPRPQQAAAGGMPHPSQGSPQLHLPCLLSAYLPEPCSPAHLSPAACPNTPPLACQPTHWPVCWVLTKLSSLLHLVCLSLSW

SEQ ID NO: 822437 - protein, 632 aa, Homo sapiens
CACAERGARGGWAVGCSALGSAATPRSDRSVPRAAVSTRIQAGANESGGIARSGQAHGRLSGTPPPPQPPPPPPPPPPQPAAARAQQPWLKTTGTGACGEQEEKEVARPHPGPPPQAPPRRPRGSEVARAPPPIAMDRMKKIKRQLSMTLRGGRGIDKTNGAPEQIGLDESGGGGGSDPGEAPTRAAPGELRSARGPLSSAPEIVHEDLKMGSDGESDQASATSSDEVQSPVRVRMRNHPPRKISTEDINKRLSLPADIRLPEGYLEKLTLNSPIFDKPLSRRLRRVSLSEIGFGKLETYIKLDKLGEGTYATVYKGKSKLTDNLVALKEIRLEHEEGAPCTAIREVSLLKDLKHANIVTLHDIIHTEKSLTLVFEYLDKDLKQYLDDCGNIINMHNVKLFLFQLLRGLAYCHRQKVLHRDLKPQNLLINERGELKLADFGLARAKSIPTKTYSNEVVTLWYRPPDILLGSTDYSTQIDMWGVGCIFYEMATGRPLFPGSTVEEQLHFIFRILGTPTEETWPGILSNEEFKTYNYPKYRAEALLSHAPRLDSDGADLLTKLLQFEGRNRISAEDAMKHPFFLSLGERIHKLPDTTSIFALKEIQLQKEASLRSSSMPDSVAGGQHGRASLPH

SEQ ID NO: 822438 - protein, 631 aa, Homo sapiens; identical to SEQ ID NO: 822421

SEQ ID NO: 822439 - protein, 632 aa, Homo sapiens; identical to SEQ ID NO: 822437

SEQ ID NO: 822440 - protein, 480 aa, Homo sapiens
CACAERGARGGWAVGCSALGSAATPRSDRSVPRAAVSTRIQAGANESGGIARSGQAHGRLSGTPPPPQPPPPPPPPPPQPAAARAQQPWLKTTGTGACGEQEEKEVARPHPGPPPQAPPRRPRGSEVARAPPPIAMDRMKKIKRQLSMTLRGGRGIDKTNGAPEQIGLDESGGGGGSDPGEAPTRAAPGELRSARGPLSSAPEIVHEDLKMGSDGESDQASATSSDEVQSPVRVRMRNHPPRKISTEDINKRLSLPADIRLPEGYLEKLTLNSPIFDKPLSRRLRRVSLSEIGFGKLETYIKLDKLGEGTYATVYKGKSKLTDNLVALKEIRLEHEEGAPCTAIREVSLLKDLKHANIVTLHDIIHTEKSLTLVFEYLDQPEAVPGMTVGASPTCPTWNCLFQLVRGWLPATGSGTPDSARTVSREGRPRADLRAGSFPKFLGGTWSPAVVGRPPVGGGFKEALPGRPLPGRCSHGAWGL

SEQ ID NO: 822441 - protein, 98 aa, Homo sapiens
MFRGGWGVLWFLTPPGLPYPSPCHQIVHEDLKMGSDGESDQASATSSDEVQSPVRVRMRNHPPRKISTEVLDPVWMVEELEKGVGPGEVELMILFLSC

SEQ ID NO: 822442 - protein, 272 aa, Homo sapiens
AAFPSRAPARRLPPPPPPPELCSMASRRMETKPVITCLKTLLIIYSFVFWITGVILLAVGVWGKLTLGTYISLIAENSTNAPYVLIGTGTTIVVFGLFGCFATCRGSPWMLKLYAMFLSLVFLAELVAGISGFVFRHEIKDTFLRTYTDAMQTYNGNDERSRAVDHVQRSLSCCGVQNYTNWSTSPYFLEHGIPPSCCMNETDCNPQDLHNLTVAATKVNQKGCYDLVTSFMETNMGIIAGVAFGIAFSQLIGMLLACCLSRFITANQYEMV

SEQ ID NO: 822443 - protein, 272 aa, Homo sapiens; identical to SEQ ID NO: 822442

SEQ ID NO: 822444 - protein, 272 aa, Homo sapiens; identical to SEQ ID NO: 822442

SEQ ID NO: 822445 - protein, 272 aa, Homo sapiens; identical to SEQ ID NO: 822442

SEQ ID NO: 822446 - protein, 272 aa, Homo sapiens; identical to SEQ ID NO: 822442

SEQ ID NO: 822447 - protein, 272 aa, Homo sapiens; identical to SEQ ID NO: 822442

SEQ ID NO: 822448 - protein, 272 aa, Homo sapiens; identical to SEQ ID NO: 822442

SEQ ID NO: 822449 - protein, 272 aa, Homo sapiens; identical to SEQ ID NO: 822442

SEQ ID NO: 822450 - protein, 272 aa, Homo sapiens; identical to SEQ ID NO: 822442

SEQ ID NO: 822451 - protein, 272 aa, Homo sapiens; identical to SEQ ID NO: 822442

SEQ ID NO: 822452 - protein, 283 aa, Homo sapiens
AAFPSRAPARRLPPPPPPPELCSMASRRMETKPVITCLKTLLIIYSFVFWVYRRGGKNTPGITGVILLAVGVWGKLTLGTYISLIAENSTNAPYVLIGTGTTIVVFGLFGCFATCRGSPWMLKLYAMFLSLVFLAELVAGISGFVFRHEIKDTFLRTYTDAMQTYNGNDERSRAVDHVQRSLSCCGVQNYTNWSTSPYFLEHGIPPSCCMNETDCNPQDLHNLTVAATKVNQKGCYDLVTSFMETNMGIIAGVAFGIAFSQLIGMLLACCLSRFITANQYEMV

SEQ ID NO: 822453 - protein, 240 aa, Homo sapiens
LLVLVEHFQNFVRKGTREITGVILLAVGVWGKLTLGTYISLIAENSTNAPYVLIGTGTTIVVFGLFGCFATCRGSPWMLKLYAMFLSLVFLAELVAGISGFVFRHEIKDTFLRTYTDAMQTYNGNDERSRAVDHVQRSLSCCGVQNYTNWSTSPYFLEHGIPPSCCMNETDCNPQDLHNLTVAATKVNQKGCYDLVTSFMETNMGIIAGVAFGIAFSQLIGMLLACCLSRFITANQYEMV

SEQ ID NO: 822454 - protein, 163 aa, Homo sapiens
MLKLYAMFLSLVFLAELVAGISGFVFRHEIKDTFLRTYTDAMQTYNGNDERSRAVDHVQRSLSCCGVQNYTNWSTSPYFLEHGIPPSCCMNETDCNPQDLHNLTVAATKVNQKGCYDLVTSFMETNMGIIAGVAFGIAFSQLIGMLLACCLSRFITANQYEMV

SEQ ID NO: 822455 - protein, 267 aa, Homo sapiens
  misc_feature (10)..(10): Xaa can be any naturally occurring amino acid
  misc_feature (17)..(17): Xaa can be any naturally occurring amino acid
  misc_feature (19)..(19): Xaa can be any naturally occurring amino acid
  misc_feature (32)..(32): Xaa can be any naturally occurring amino acid
  misc_feature (39)..(39): Xaa can be any naturally occurring amino acid
  misc_feature (46)..(46): Xaa can be any naturally occurring amino acid
  misc_feature (53)..(53): Xaa can be any naturally occurring amino acid
  misc_feature (66)..(66): Xaa can be any naturally occurring amino acid
  misc_feature (74)..(74): Xaa can be any naturally occurring amino acid
PNPCLKKPFXPQKPPPXQXKPNLPFGPFPGIXPGGLNPXLGLGWEXLGGPKLXPPGATQKILPPNXPEEPPTKXLPYCSFIGTGTTIVVFGLFGCFATCRGSPWMLKLYAMFLSLVFLAELVAGISGFVFRHEIKDTFLRTYTDAMQTYNGNDERSRAVDHVQRSLSCCGVQNYTNWSTSPYFLEHGIPPSCCMNETDCNPQDLHNLTVAATKVNQKGCYDLVTSFMETNMGIIAGVAFGIAFSQLIGMLLACCLSRFITANQYEMV

SEQ ID NO: 822456 - protein, 260 aa, Homo sapiens
  misc_feature (96)..(96): Xaa can be any naturally occurring amino acid
MASRRMETKPVITCLKTLLIIYSFVFWITGVILLAVGVWGKLTLGTYISLIAENSTNAPYVLIGTGTTIVVFGLFGCFATCRGSPWMLKLYLLLQXESIISLYPPTTTTHTPNYTHPPTHPLPHQSNQHITPSSHHTSLHTYNGNDERSRAVDHVQRSLSCCGVQNYTNWSTSPYFLEHGIPPSCCMNETDCNPQDLHNLTVAATKVNQKGCYDLVTSFMETNMGIIAGVAFGIAFSQLIGMLLACCLSRFITANQYEMV

SEQ ID NO: 822457 - protein, 114 aa, Homo sapiens
ARYRVSTDVQRSLSCCGVQNYTNWSTSPYFLEHGIPPSCCMNETDCNPQDLHNLTVAATKVNQKGCYDLVTSFMETNMGIIAGVAFGIAFSQLIGMLLACCLSRFITANQYEMV

SEQ ID NO: 822458 - protein, 94 aa, Homo sapiens
GTRQMLPMCSSEHGIPPSCCMNETDCNPQDLHNLTVAATKVNQKGCYDLVTSFMETNMGIIAGVAFGIAFSQLIGMLLACCLSRFITANQYEMV

SEQ ID NO: 822459 - protein, 120 aa, Homo sapiens
AAFPSRAPARRLPPPPPPPELCSMASRRMETKPVITCLKTLLIIYSFVFWITGVILLAVGVWGKLTLGTYISLIAENSTNAPYVLIGTGTTIVVFGLFGCFATCRGSPWMLKLRKQNKNQ

SEQ ID NO: 822460 - protein, 105 aa, Homo sapiens [sequence omitted]

SEQ ID NO: 822461 - protein, 119 aa, Homo sapiens
  misc_feature (1)..(2): Xaa can be any naturally occurring amino acid
  misc_feature (12)..(12): Xaa can be any naturally occurring amino acid
  misc_feature (15)..(15): Xaa can be any naturally occurring amino acid
  misc_feature (19)..(20): Xaa can be any naturally occurring amino acid
XXKKKKKKKKKXKKXKKKXXFRNAEVSAFGEEGEGDYLDDWTVLCNGPYWVRDGEVRFKHSSTEVLLSVTGEQYGRPISGQKEVHGMAQPSQNNYWKAMEGIFMKPSELLKAEAHHAEL

SEQ ID NO: 822462 - protein, 142 aa, Homo sapiens
MDGNSMYHAYRVSSYSYRLTAIQFCAIVSVINRAHMTVVLQCFDWDNADRGSGQQSVTGVTSVDDSNSYWRIRGKSATVCERGTPIKCGQPIRLTHVNTGRNLHSHHFTSPLSGNQVRWLSMDCCCSALLSGCLFDLLVLKC

SEQ ID NO: 822463 - protein, 211 aa, Homo sapiens
MAVVPLLLLGGLWSAVGASSLGVVTCGSVVKLLNTRHNVRLHSHDVRYGSGSGQQSVTGVTSVDDSNSYWRIRGKSATVCERGTPIKCGQPIRLTHVNTGRNLHSHHFTSPLSGNQEVSAFGEEGEGDYLDDWTVLCNGPYWVRDGEVRFKHSSTEVLLSVTGEQYGRPISGQKEVHGMAQPSQNNYWKAMEGIFMKPSELLKAEAHHAEL

SEQ ID NO: 822464 - protein, 211 aa, Homo sapiens; identical to SEQ ID NO: 822463

SEQ ID NO: 822465 - protein, 211 aa, Homo sapiens; identical to SEQ ID NO: 822463

SEQ ID NO: 822466 - protein, 211 aa, Homo sapiens; identical to SEQ ID NO: 822463

SEQ ID NO: 822467 - protein, 211 aa, Homo sapiens; identical to SEQ ID NO: 822463

SEQ ID NO: 822468 - protein, 123 aa, Homo sapiens
MAVVPLLLLGGLWSAVGASSLGVVTCGSVVKLLNTRHNVRLHSHDVRYGSGSGQQSVTGVTSVDDSNSYWRIRGKSATVCERGTPIKCGQPIRLTHVNTGRNLHSHHFTSPLSGNQLLCKVIL

SEQ ID NO: 822469 - protein, 211 aa, Homo sapiens; identical to SEQ ID NO: 822463

SEQ ID NO: 822470 - protein, 117 aa, Homo sapiens
NRTLDPSPFPSLSLHIHLLTSDEVSAFGEEGEGDYLDDWTVLCNGPYWVRDGEVRFKHSSTEVLLSVTGEQYGRPISGQKEVHGMAQPSQNNYWKAMEGIFMKPSELLKAEAHHAEL

SEQ ID NO: 822471 - protein, 147 aa, Homo sapiens
MAVVPLLLLGGLWSAVGASSLGVVTCGSVVKLLNTRHNVRLHSHDVRYGSGSGQQSVTGVTSVDDSNSYWRIRGKSATVCERGTPIKCGQPIRLTHVNTGRNLHSHHFTSPLSGNQNMVDLSVGKKRCMAWPSQVRTTTGKPWKASS

SEQ ID NO: 822472 - protein, 365 aa, Homo sapiens
VLPNIKSEDTPCLLSIDLFHVLVGAVLAFPSLYWDDPVDLQPSSVSSSYNHLYLFHLITMAHMLQILLTVDTGLPLAQVQEDSEEAHSASSFFAEISQYTSGSIGCDIPGWYLWVSLKNGITPYLRCAALFFHYLLGVTPPEELHTNSAEGEYSALCSYLSLPTNLFLLFQEYWDTVRPLLQRWCADPALLNCLKQKNTVVRYPRKRNSLIELPDDYSCLLNQASHFRCPRSADDERKHPVLCLFCGAILCSQNICCQEIVNGEEVGACIFHALHCGAGVCIFLKIRECRVVLVEGKARGCAYPAPYLDEYGETDPGLKRGNPLHLSRERYRKLHLVWQQHCIIEEIARSQETNQMLFGFNWQLL

SEQ ID NO: 822473 - protein, 365 aa, Homo sapiens; identical to SEQ ID NO: 822472

SEQ ID NO: 822474 - protein, 365 aa, Homo sapiens; identical to SEQ ID NO: 822472

SEQ ID NO: 822475 - protein, 160 aa, Homo sapiens
MLLLLLSIIVLHVAVLVLLFVSTIVSQWIVGNGHATDLWQNCSTSSSGNVHHCFSSSPNEWLQSVQATMILSIIFSILSLFLFFCQLFTLTKGGRFYITGIFQILAGLCVMSAAAIYTVRHPEWHLNSDYSYGFAYILAWVAFPLALLSGVIYVILRKRE

SEQ ID NO: 822476 - protein, 160 aa, Homo sapiens; identical to SEQ ID NO: 822475

SEQ ID NO: 822477 - protein, 160 aa, Homo sapiens; identical to SEQ ID NO: 822475

SEQ ID NO: 822478 - protein, 161 aa, Homo sapiens [sequence omitted]

SEQ ID NO: 822479 - protein, 160 aa, Homo sapiens; identical to SEQ ID NO: 822475

SEQ ID NO: 822480 - protein, 160 aa, Homo sapiens; identical to SEQ ID NO: 822475

SEQ ID NO: 822481 - protein, 102 aa, Homo sapiens
LSILDLEADFLPEVKCSSYPAIVSIRGGGEGAALPWTLRHPACPSPSPGLCVMSAAAIYTVRHPEWHLNSDYSYGFAYILAWVAFPLALLSGVIYVILRKRE

SEQ ID NO: 822482 - protein, 86 aa, Homo sapiens
MAEDMETKIKNYKTAPFDSRFPNQNQTRNCWQNYLDFHRCQKAMTAKGGDISVCEWYQRVYQSLCPTSWVTDWDEQRAEGTFPGKI

SEQ ID NO: 822483 - protein, 200 aa, Homo sapiens
HEVRHRRTHSGERPYVCEDCGERFRHKVQIRRHERQLHGAGRSRGLGLLRASRPAALGGPARAEQAATATAPADKALGGLGDTAAEAKKLACGVFAEGHIELQVESGVPLGFSTMAEDMETKIKNYKTAPFDSRFPNQNQTRNCWQNYLDFHRCQKAMTAKGGDISVCEWYQRVYQSLCPTSWVTDWDEQRAEGTFPGKI

SEQ ID NO: 822484 - protein, 86 aa, Homo sapiens; identical to SEQ ID NO: 822482

SEQ ID NO: 822485 - protein, 86 aa, Homo sapiens; identical to SEQ ID NO: 822482

SEQ ID NO: 822486 - protein, 83 aa, Homo sapiens
MKRTPTFLFDNEGTHRGGYKIKDDQRPPLNSGVSGKNGSGQHGEEQSRGEDVWTNSRRVGPGQYNGTLWCNRESRRKGTMIEI

SEQ ID NO: 822487 - protein, 86 aa, Homo sapiens; identical to SEQ ID NO: 822482

SEQ ID NO: 822488 - protein, 86 aa, Homo sapiens; identical to SEQ ID NO: 822482

SEQ ID NO: 822489 - protein, 86 aa, Homo sapiens; identical to SEQ ID NO: 822482

SEQ ID NO: 822490 - protein, 142 aa, Homo sapiens
  misc_feature (90)..(90): Xaa can be any naturally occurring amino acid
MVKGDLVPSDPHPRILNHDLPANKNSLEKKQTKKKKRGGGGAKNSPGGAKLAYPGFLVTKGVPLGEEAIIKKKERGRGLTNRGERGKSRXAGQAGGRRPSLLGGRDSLGRHTRGRLKVRAIYPGGLRVYHAYLPEMARIVKL

SEQ ID NO: 822491 - protein, 164 aa, Homo sapiens
MPREGHPRPRATPNFGVTKRGPHKGEGPIYNTDQGARRSTPPQRVARGTTRSSRGTPRGEKAALNTERGEANTPWGTHTPHKRPLRARRDKKHSNAPVQAVVAPHGRHTRDRRYTAFAHRTYMLTPLLTREYNNNKLARHTITAALYPRPSTATHEPLYTVRHL

SEQ ID NO: 822492 - protein, 86 aa, Homo sapiens; identical to SEQ ID NO: 822482

SEQ ID NO: 822493 - protein, 86 aa, Homo sapiens; identical to SEQ ID NO: 822482

SEQ ID NO: 822494 - protein, 86 aa, Homo sapiens; identical to SEQ ID NO: 822482

SEQ ID NO: 822495 - protein, 46 aa, Homo sapiens
  misc_feature (15)..(18): Xaa can be any naturally occurring amino acid
MTYLLIKTHWKKKNXXXXPNSTLLRGITLKITPIKTQWPSFLNYFT

SEQ ID NO: 822496 - protein, 102 aa, Homo sapiens
NRVVRSPDGVPLGFSTMAEDMETKIKNYKTAPFDSRFPNQNQTRNCWQNYLDFHRCQKAMTAKGGDISVCEWYQRVYQSLCPTSWVTDWDEQRAEGTFPGKI

SEQ ID NO: 822497 - protein, 122 aa, Homo sapiens
RVSSPSSLLDVGGAAASSPMHPHPQIPGRDLAGFSTMAEDMETKIKNYKTAPFDSRFPNQNQTRNCWQNYLDFHRCQKAMTAKGGDISVCEWYQRVYQSLCPTSWVTDWDEQRAEGTFPGKI

SEQ ID NO: 822498 - protein, 182 aa, Homo sapiens
HEVRHRRTHSGERPYVCEDCGERFRHKVQIRRHERQLHGAGRSRGLGLLRASRPAALGGPARAEQAATATAPADKALGGLGDTAAEAKKLACGVFAEGHIELQVESGVPLGFSTMAEDMETQTRNCWQNYLDFHRCQKAMTAKGGDISVCEWYQRVYQSLCPTSWVTDWDEQRAEGTFPGKI

SEQ ID NO: 822499 - protein, 312 aa, Homo sapiens
HEVRHRRTHSGERPYVCEDCGERFRHKVQIRRHERQLHGAGRSRGLGLLRASRPAALGGPARAEQAATATAPADKALGGLGDTAAEAKKLACGVFAEGHIELQVESGVPLGFSTMAEDMETKIKNYKTAPFDSRFPNQNQQQYRALTVPELTQQMFDAKNMMAACDPRHGRYLTVATVFRGRMSMKEVDEQMLAIQSKNSSYFVEWIPNNVKVAVCDIPPRGLKMSSTFIGNSTAIQELFKRISEQFTAMFRRKAFLHWYTGEGMDEMEFTEAESNMNDLVSEYQQYQDATAEEEGEMYEDDEEESEAQGPK

SEQ ID NO: 822500 - protein, 431 aa, Homo sapiens
  misc_feature (202)..(202): Xaa can be any naturally occurring amino acid
  misc_feature (248)..(248): Xaa can be any naturally occurring amino acid
  misc_feature (271)..(271): Xaa can be any naturally occurring amino acid
  misc_feature (424)..(424): Xaa can be any naturally occurring amino acid
HEVRHRRTHSGERPYVCEDCGERFRHKVQIRRHERQLHGAGRSRGLGLLRASRPAALGGPARAEQAATATAPADKALGGLGDTAAEAKKLACGVFAEGHIELQVESGVPLGFSTMAEDMETKIKNYKTAPFDSRFPNQNQTRNCWQNYLDFHRCQKEVTAVVSFLENLLCLQLMELLMFILVRHMPHLSTKVSDSPSHIATXTRLSEESARLVAATVTILSDLPSLCSPAGCMTILPTILFLIARILXDTAIKSADNQVPPPVSAALQGIXSIVTLSMAKTEAGVQKQWTALIRSTLACILEYSQPDSVPTPDEVSMLTAIALFLWSASNEIIGVQSLQNGCMNRFKNALNSCDPWVQAKCYQLLLSVFQHSNRALSTPYIHSLAPIVVEKLKAVERNRPASNIELLAVQEGIKVLETLVALGXDKQSQLL

SEQ ID NO: 822501 - protein, 318 aa, Homo sapiens
MPNIVLFSGSSHQDLSQRVADRLGLELGKVVTKKFSNQETSVEIGESVRGEDVYIIQSGCGEINDNLMELLIMINACKIASSSRVTAVIPCFPYARQDKKDKSRAPISAKLVANMLSVAGADHIITMDLHASQIQGFFDIPVDNLYAEPAVLQWIRENIAEWKNCIIVSPDAGGAKRVTSIADRLNVEFALIHKERKKANEVDRMVLVGDVKDRVAILVDDMADTCGTICHAADKLLSAGATKVYAILTHGIFSGPAISRINNAAFEAVVVTNTIPQEDKMKHCTKIQVIDISMILAEAIRRTHNGESVSYLFSHVPL

SEQ ID NO: 822502 - protein, 318 aa, Homo sapiens; identical to SEQ ID NO: 822501

SEQ ID NO: 822503 - protein, 251 aa, Homo sapiens
MELLIMINACKIASSSRVTAVIPCFPYARQDKKDKSRAPISAKLVANMLSVAGADHIITMDLHASQIQGFFDIPVDNLYAEPAVLQWIRENIAEWKNCIIVSPDAGGAKRVTSIADRLNVEFALIHKERKKANEVDRMVLVGDVKDRVAILVDDMADTCGTICHAADKLLSAGATKVYAILTHGIFSGPAISRINNAAFEAVVVTNTIPQEDKMKHCTKIQVIDISMILAEAIRRTHNGESVSYLFSHVPL

SEQ ID NO: 822504 - protein, 274 aa, Homo sapiens
YFPENLRPWDWRQLRSSLVVFRVPSNRNERFTSLIASSSRVTAVIPCFPYARQDKKDKSRAPISAKLVANMLSVAGADHIITMDLHASQIQGFFDIPVDNLYAEPAVLQWIRENIAEWKNCIIVSPDAGGAKRVTSIADRLNVEFALIHKERKKANEVDRMVLVGDVKDRVAILVDDMADTCGTICHAADKLLSAGATKVYAILTHGIFSGPAISRINNAAFEAVVVTNTIPQEDKMKHCTKIQVIDISMILAEAIRRTHNGESVSYLFSHVPL

SEQ ID NO: 822505 - protein, 153 aa, Homo sapiens
MSINFSQAEKPEPTNQGQDSLKKHLHAEIKVIGFIISGSLSIATEKRLTKLLVHSSLVGSILSALSALVGFIILSVKQATLNPASLQCGTLSLMLICTLLEFCLAVLTAVLRWKQAYSDFPGSVLFLPHSYIGNSGMSSKMTHDCGYEELLTS

SEQ ID NO: 822506 - protein, 249 aa, Homo sapiens
  misc_feature (239)..(239): Xaa can be any naturally occurring amino acid
  misc_feature (247)..(247): Xaa can be any naturally occurring amino acid
  misc_feature (249)..(249): Xaa can be any naturally occurring amino acid
MVLLTLLEVYSNGSAGTFHKSTIFGNTIMTSQPVPNETIIVLPSNVINFSQAEKPEPTNQGQDSLKKHLHAEIKVIGTIQILCGMMVLSLGIILASASFSPNFTQVTSTLLNSAYPFIGPFFFIISGSLSIATEKRLTKLLVHSSLVGSILSALSALVGFIILSVKQATLNPASLQCELDKNNIPTRSYVSYFYHDSLYTTDCYTAKASLAEISLLDGWIWHFWLGILAWLVAPLAGAXRVGKQGLXLX

SEQ ID NO: 822507 - protein, 248 aa, Homo sapiens
MTSQPVPNETIIVLPSNVINFSQAEKPEPTNQGQDSLKKHLHAEIKVIGTIQILCGMMVLSLGIILASASFSPNFTQVTSTLLNSAYPFIGPFFFIISGSLSIATEKRLTKLLVHSSLVGSILSALSALVGFIILSVKQATLNPASLQCELDKNNIPTRSYVSYFYHDSLYTTDCYTAKASLAGTLSLMLICTLLEFCLAVLTAVLRWKQAYSDFPGSVLFLPHSYIGNSGMSSKMTHDCGYEELLTS

SEQ ID NO: 822508 - protein, 225 aa, Homo sapiens
MTSQPVPNETIIVLPSNVINFSQAEKPEPTNQGQDSLKKHLHAEIKVIGTIQILCGMMVLSLGIILASASFSPNFTQVTSTLLNSAYPFIGPFFFIISGSLSIATEKRLTKLLVHSSLVGSILSALSALVGFIILSVKQATLNPASLQCELDKNNIPTRSYVSYFYHDSLYTTDCYTAKASLAGTLSLMLICTLLEFCLAVLTAVLRWKQAYSDFPGVSVLAGFT

SEQ ID NO: 822509 - protein, 248 aa, Homo sapiens; identical to SEQ ID NO: 822507

SEQ ID NO: 822510 - protein, 225 aa, Homo sapiens; identical to SEQ ID NO: 822508

SEQ ID NO: 822511 - protein, 225 aa, Homo sapiens; identical to SEQ ID NO: 822508

SEQ ID NO: 822512 - protein, 248 aa, Homo sapiens; identical to SEQ ID NO: 822507

SEQ ID NO: 822513 - protein, 294 aa, Homo sapiens
LGTSSYGLVLFHGLYLGRLYQLYSKDAMCLERFHRIYNLSRLGNTIMTSQPVPNETIIVLPSNVINFSQAEKPEPTNQGQDSLKKHLHAEIKVIGTIQILCGMMVLSLGIILASASFSPNFTQVTSTLLNSAYPFIGPFFFIISGSLSIATEKRLTKLLVHSSLVGSILSALSALVGFIILSVKQATLNPASLQCELDKNNIPTRSYVSYFYHDSLYTTDCYTAKASLAGTLSLMLICTLLEFCLAVLTAVLRWKQAYSDFPGSVLFLPHSYIGNSGMSSKMTHDCGYEELLTS

SEQ ID NO: 822514 - protein, 191 aa, Homo sapiens
MVLSLGIILASASFSPNFTQVTSTLLNSAYPFIGPFFFIISGSLSIATEKRLTKLLVHSSLVGSILSALSALVGFIILSVKQATLNPASLQCELDKNNIPTRSYVSYFYHDSLYTTDCYTAKASLAGTLSLMLICTLLEFCLAVLTAVLRWKQAYSDFPGSVLFLPHSYIGNSGMSSKMTHDCGYEELLTS

SEQ ID NO: 822515 - protein, 103 aa, Homo sapiens
MTSQPVPNETIIVLPSNVINFSQAEKPEPTNQGQDSLKKHLHAEIKVIGIILASASFSPNFTQVTSTLLNSAYPFIGPFFFIISGSLSIATEKRLTKLLGFLS

SEQ ID NO: 822516 - protein, 214 aa, Homo sapiens
MTSQPVPNETIIVLPSNVINFSQAEKPEPTNQGQDSLKKHLHAEIKVIGTIQILCGMMVLSLGIILASASFSPNFTQVTSTLLNSAYPFIGPFFFIISGSLSIATEKRLTKLLVHSSLVGSILSALSALVGFIILSVKQATLNPASLQCELDKNNIPTRSYVSYFYHDSLYTTDCYTAKASLALEFCLAVLTAVLRWKQAYSDFPGVSVLAGFT

SEQ ID NO: 822517 - protein, 166 aa, Homo sapiens
MTSQPVPNETIIVLPSNVINFSQAEKPEPTNQGQDSLKKHLHAEIKVIGTIQILCGMMVLSLGIILASASFSPNFTQVTSTLLNSAYPFIGPFFFIISGSLSIATEKRLTKLLVHSSLVGSILSALSALVGFIILSVKQATLNPASLQCIPRTAIQPKPVWLELSL

SEQ ID NO: 822518 - protein, 214 aa, Homo sapiens
MTSQPVPNETIIVLPSNVINFSQAEKPEPTNQGQDSLKKHLHAEIKVIGTIQILCGMMVLSLGIILASASFSPNFTQVTSTLLNSAYPFIGPFFFIISGSLSIATEKRLTKLLVHSSLVGSILSALSALVGFIILSVKQATLNPASLQCGTLSLMLICTLLEFCLAVLTAVLRWKQAYSDFPGSVLFLPHSYIGNSGMSSKMTHDCGYEELLTS

SEQ ID NO: 822519 - protein, 214 aa, Homo sapiens; identical to SEQ ID NO: 822518

SEQ ID NO: 822520 - protein, 221 aa, Homo sapiens
  misc_feature (211)..(211): Xaa can be any naturally occurring amino acid
  misc_feature (219)..(219): Xaa can be any naturally occurring amino acid
  misc_feature (221)..(221): Xaa can be any naturally occurring amino acid
MTSQPVPNETIIVLPSNVINFSQAEKPEPTNQGQDSLKKHLHAEIKVIGTIQILCGMMVLSLGIILASASFSPNFTQVTSTLLNSAYPFIGPFFFIISGSLSIATEKRLTKLLVHSSLVGSILSALSALVGFIILSVKQATLNPASLQCELDKNNIPTRSYVSYFYHDSLYTTDCYTAKASLAEISLLDGWIWHFWLGILAWLVAPLAGAXRVGKQGLXLX

SEQ ID NO: 822521 - protein, 166 aa, Homo sapiens; identical to SEQ ID NO: 822517

SEQ ID NO: 822522 - protein, 161 aa, Homo sapiens
MTSQPVPNETIIVLPSNVINFSQAEKPEPTNQGQDSLKKHLHAEIKVIGTIQILCGMMVLSLGIILASASFSPNFTQVTSTLLNSAYPFIGPFFFIISGSLSIATECSVCPGGFHYPVCQTGHLKSCLTAVWNSLSDADLHSAGILPSCAHCCAAVETGLL

SEQ ID NO: 822523 - protein, 120 aa, Homo sapiens
MTSQPVPNETIIVLPSNVINFSQAEKPEPTNQGQDSLKKHLHAEIKVIGTIQILCGMMVLSLGIILASASFSPNFTQVTSTLLNSAYPFIGPFFFIISGSLSIATEKRLTKLLGLMLEIM

SEQ ID NO: 822524 - protein, 120 aa, Homo sapiens; identical to SEQ ID NO: 822523

SEQ ID NO: 822525 - protein, 127 aa, Homo sapiens
MTSQPVPNETIIVLPSNVINFSQAEKPEPTNQGQDSLKKHLHAEIKVIGVHSSLVGSILSALSALVGFIILSVKQATLNPASLQCGTLSLMLICTLLEFCLAVLTAVLRWKQAYSDFPGVSVLAGFT

SEQ ID NO: 822526 - protein, 141 aa, Homo sapiens
MTSQPVPNETIIVLPSNVINFSQAEKPEPTNQGQDSLKKHLHAEIKVIGTIQILCGMMVLSLGIILASASFSPNFTQVTSTLLNSAYPFIGPFFVSRVSEEGRMGQRGEEDANSLDFPPASLLCLICQEQGVNGESCSPVG

SEQ ID NO: 822527 - protein, 141 aa, Homo sapiens; identical to SEQ ID NO: 822526

SEQ ID NO: 822528 - protein, 111 aa, Homo sapiens
FLLSFLLLGEVAVHVSFQYLTYSHGAGGRGKRGTIAIFKDALETNREHINTTTSTITCYWPSDTFKRKRQSLFFFLNDIHINSYFYPIIIVFCLYLVLCGKGLHHRFFPAL

SEQ ID NO: 822529 - protein, 111 aa, Homo sapiens; identical to SEQ ID NO: 822528

SEQ ID NO: 822530 - protein, 111 aa, Homo sapiens; identical to SEQ ID NO: 822528

SEQ ID NO: 822531 - protein, 111 aa, Homo sapiens; identical to SEQ ID NO: 822528

SEQ ID NO: 822532 - protein, 111 aa, Homo sapiens; identical to SEQ ID NO: 822528

SEQ ID NO: 822533 - protein, 111 aa, Homo sapiens; identical to SEQ ID NO: 822528

SEQ ID NO: 822534 - protein, 688 aa, Homo sapiens
MATNGSKVADGQISTEVSEAPVANDKPKTLVVKVQKKAADLPDRDTWKGRFDFLMSCVGYAIGLGNVWRFPYLCGKNGGGAFLIPYFLTLIFAGVPLFLLECSLGQYTSIGGLGVWKLAPMFKGVGLAAAVLSFWLNIYYIVIISWAIYYLYNSFTTTLPWKQCDNPWNTDRCFSNYSMVNTTNMTSAVVEFWERNMHQMTDGLDKPGQIRWPLAITLAIAWILVYFCIWKGVGWTGKVVYFSATYPYIMLIILFFRGVTLPGAKEGILFYITPNFRKLSDSEVWLDAATQIFFSYGLGLGSLIALGSYNSFHNNVYRDSIIVCCINSCTSMFAGFVIFSIVGFMAHVTKRSIADVAASGPGLAFLAYPEAVTQLPISPLWAILFFSMLLMLGIDSQFCTVEGFITALVDEYPRLLRNRRELFIAAVCIISYLIGLSNITQGGIYVFKLFDYYSASGMSLLFLVFFECVSISWFYGVNRFYDNIQEMVGSRPCIWWKLCWSFFTPIIVAGVFIFSAVQMTPLTMGNYVFPKWGQGVGWLMALSSMVLIPGYMAYMFLTLKGSLKQRIQVMVQPSEDMFAQRMVLSSPGGQLHQQGGLHLGWGPLTDPTLSPPDLAECDHHLMSEDTFHLNLPRVASPDTITTQRGEVGGQLDPWVGPAVGKDTRWLLAPGGLVTFLIQAPSASHDRPW

SEQ ID NO: 822535 - protein, 688 aa, Homo sapiens; identical to SEQ ID NO: 822534

SEQ ID NO: 822536 - protein, 688 aa, Homo sapiens; identical to SEQ ID NO: 822534

SEQ ID NO: 822537 - protein, 688 aa, Homo sapiens; identical to SEQ ID NO: 822534

SEQ ID NO: 822538 - protein, 688 aa, Homo sapiens; identical to SEQ ID NO: 822534

SEQ ID NO: 822539 - protein, 55 aa, Homo sapiens
MHQMTDGLDKPGQIRWPLAITLAIAWILVYFCIWKGVGWTGKVRDICAQWGQEGT

SEQ ID NO: 822540 - protein, 210 aa, Homo sapiens
MSAKSAISKEIFAPLDERMLGAVQVKRRTKKKIPFLATGGQGEYLTYICLSVTNKKPTQASITKVKQFEGSTSFVRRSQWMLEQLRQVNGIDPNGDSAEFDLLFENAFDQWVASTASEKCTFFQILHHTCQRYLTDRKPEFINCQSKIMGGNSILHSAADSVTSAVQKASQALNERGERLGRAEEKTEDLKNSAQQFAETAHKLAMKHKC

SEQ ID NO: 822541 - protein, 108 aa, Homo sapiens
MSACFLDTRRAAFLQCDLPSSYRILTLPESGHCGSAEPVSDAPALLLSGNSILHSAADSVTSAVQKASQALNERGERLGRAEEKTEDLKNSAQQFAETAHKLAMKHKC

SEQ ID NO: 822542 - protein, 256 aa, Homo sapiens
CFAGARTRRRAGARLQLELQRPELELPGVSPQPLPFRARQQEPAREPRAAASQHPGRLSLVRARSPEPRAGQPPGEEPRALGRVPRTGTAGARARLHVTNKKPTQASITKVKQFEGSTSFVRRSQWMLEQLRQVNGIDPNGDSAEFDLLFENAFDQWVASTASEKCTFFQILHHTCQRYLTDRKPEFINCQSKIMGGNSILHSAADSVTSAVQKASQALNERGERLGRAEEKTEDLKNSAQQFAETAHKLAMKHKC

SEQ ID NO: 822543 - protein, 210 aa, Homo sapiens; identical to SEQ ID NO: 822540

SEQ ID NO: 822544 - protein, 210 aa, Homo sapiens; identical to SEQ ID NO: 822540

SEQ ID NO: 822545 - protein, 318 aa, Homo sapiens
CFAGARTRRRAGARLQLELQRPELELPGVSPQPLPFRARQQEPAREPRAAASQHPGRLSLVRARSPEPRAGQPPGEEPRALGRVPRTGTAGARARLHDSLRAVLTCSTMSAKSAISKEIFAPLDERMLGAVQVKRRTKKKIPFLATGGQGEYLTYICLSVTNKKPTQASITKVKQFEGSTSFVRRSQWMLEQLRQVNGIDPNGDSAEFDLLFENAFDQWVASTASEKCTFFQILHHTCQRYLTDRKPEFINCQSKIMGGNSILHSAADSVTSAVQKASQALNERGERLGRAEEKTEDLKNSAQQFAETAHKLAMKHKC

SEQ ID NO: 822546 - protein, 234 aa, Homo sapiens
RQVARLGGEGLNKYSLRAVLTCSTMSAKSAISKEIFAPLDERMLGAVQVKRRTKKKIPFLATGGQGEYLTYICLSVTNKKPTQASITKVKQFEGSTSFVRRSQWMLEQLRQVNGIDPNGDSAEFDLLFENAFDQWVASTASEKCTFFQILHHTCQRYLTDRKPEFINCQSKIMGGNSILHSAADSVTSAVQKASQALNERGERLGRAEEKTEDLKNSAQQFAETAHKLAMKHKC

SEQ ID NO: 822547 - protein, 210 aa, Homo sapiens; identical to SEQ ID NO: 822540

SEQ ID NO: 822548 - protein, 222 aa, Homo sapiens
MNSLRAVLTCSTMSAKSAISKEIFAPLDERMLGAVQVKRRTKKKIPFLATGGQGEYLTYICLSVTNKKPTQASITKVKQFEGSTSFVRRSQWMLEQLRQVNGIDPNGDSAEFDLLFENAFDQWVASTASEKCTFFQILHHTCQRYLTDRKPEFINCQSKIMGGNSILHSAADSVTSAVQKASQALNERGERLGRAEEKTEDLKNSAQQFAETAHKLAMKHKC

SEQ ID NO: 822549 - protein, 210 aa, Homo sapiens; identical to SEQ ID NO: 822540

SEQ ID NO: 822550 - protein, 318 aa, Homo sapiens; identical to SEQ ID NO: 822545

SEQ ID NO: 822551 - protein, 318 aa, Homo sapiens; identical to SEQ ID NO: 822545

SEQ ID NO: 822552 - protein, 181 aa, Homo sapiens
  misc_feature (174)..(174): Xaa can be any naturally occurring amino acid
MNSLRAVLTCSTMSAKSAISKEIFAPLDERMLGAVQVKRRTKKKIPFLATGGQGEYLTYICLSVTNKKPTQASITKVKQFEGSTSFVRRSQWMLEQLRQVNGIDPNGDSAEFDLLFENAFDQWVASTASEKCTFFQILHHTCQRYLTDRKPEFINCQSKIMGGTSISLVVTRDXARRGTKP

SEQ ID NO: 822553 - protein, 426 aa, Homo sapiens
MPPKKQAQAGGSKKAEQKKKEKIIEDKTFGLKNKKGAKQQKFIKAVTHQVKFGQQNPRQVAQSEAEKKLKKDDKKKELQELNELFKPVVAAQKISKGADPKSVVCAFFKQGQCTKGDKCKFSHDLTLERKCEKRSVYIDARDEELEKDTMDNWDEKKLEEVVNKKHGEAEKKKPKTQIVCKHFLEAIENNKYGWFWVCPGGGDICMYRHALPPGFVLKKDKKKEEKEDEISLEDLIERERSALGPNVTKITLESFLAWKKRKRQEKIDKLEQDMERRKADFKAGKALVISGREVFEFRPELVNDDDEEADDTRYTQGTGGDEVDDSVSVNDIDLSLYIPRDVDETGITVASLERFSTYTSDKDENKLSEASGGRAENGERSDLEEDNEREGTENGAIDAVPVDENLFTGEDLDELEEELNTLDLEE

SEQ ID NO: 822554 - protein, 393 aa, Homo sapiens
MPPKKQAQAGGSKKAEQKKKEKIIEDKTFGLKNKKGAKQQKFIKAVTHQVKFGQQNPRQVAQSEAEKKLKKDDKKKELQELNELFKPVVAAQKISKGADPKSVVCAFFKQGQCTKGDKCKFSHDLTLERKCEKRSVYIDARDEELEKDTMDNWDEKKLEEVVNKKHGEAEKKKPKTQIVCKHFLEAIENNKYGWFWVCPGGGDICMYRHALPPGFVLKKDKKKEEKEDEISLEDLIERERSALGPNVTKITLESFLAWKKRKRQEKIDKLEQDMERRKADFKAGKALVISGREVFEFRPELVNDDDEEADDTRYTQGTGGDEVDDSVSVNDIDLSLYIPRDVDETGITVASLERFSTYTSDKDEGRHGHGKGFLGYGKPKCICSSEEEDLKTN

SEQ ID NO: 822555 - protein, 271 aa, Homo sapiens
MPPKKQAQAGGSKKAEQKKKEKIIEDKTFGLKNKKGAKQQKFIKAVTHQVKFGQQNPRQVAQSEAEKKLKKDDKKKELQELNELFKPVVAAQKISKGADPKSVVCAFFKQGQCTKGDKCKFSHDLTLERKCEKRSVYIDARDEELEKDTMDNWDEKKLEEVVNKKHGEAEKKKPKTQIVCKHFLEAIENNKYGWFWVCPGGGDICMYRHALPPGFVLKKDKKKEEKEDEISLEDLIERERSALGPNVTKITLESFLAWKKRKRQEKIDQWS

SEQ ID NO: 822556 - protein, 426 aa, Homo sapiens; identical to SEQ ID NO: 822553

SEQ ID NO: 822557 - protein, 426 aa, Homo sapiens; identical to SEQ ID NO: 822553

SEQ ID NO: 822558 - protein, 426 aa, Homo sapiens; identical to SEQ ID NO: 822553

SEQ ID NO: 822559 - protein, 426 aa, Homo sapiens; identical to SEQ ID NO: 822553

SEQ ID NO: 822560 - protein, 426 aa, Homo sapiens; identical to SEQ ID NO: 822553

SEQ ID NO: 822561 - protein, 392 aa, Homo sapiens
MPPKKQAQAGGSKKAEQKKKEKIIEDKTFGLKNKKGAKQQKFIKAVTHQVKFGQQNPRQVAQSEAEKKLKKDDKKKELQELNELFKPVVAAQKISKGADPKSVVCAFFKQGQCTKGDKCKFSHDLTLERKCEKRSVYIDARDEELEKDTMDNWDEKKLEEVVNKKHGEAEKKKPKTQIVCKHFLEAIENNKYGWFWVCPGGGDICMYRHALPPGFVLKKDKKKEEKEDEISLEDLIERERSALGPNVTKITLESFLAWKKRKRQEKIDKLEQDMERRKADFKAGKALVISGREVFEFRPELVNDDDEEADDTRYTQGTGGDEVDDSVSVNDIDLSLYIPRDVDETGITVASLERFSTYTSDKDESTGCLFPMLILEELTSCKKGILSLHLLF

SEQ ID NO: 822562 - protein, 414 aa, Homo sapiens
MPPKKQAQAGGSKKAEQKKKEKIIEDKTFGLKNKKGAKQQKFIKAVTHQVKFGQQNPRQVAQSEAEKKLKKDDKKKELQELNELFKPVVAAQKISKGADPKSVVCAFFKQGQCTKGDKCKFSHDLTLERKCEKRSVYIDARDEELEKDTMDNWDEKKLEEVVNKKHGEAEKKKPKTQIKYGWFWVCPGGGDICMYRHALPPGFVLKKDKKKEEKEDEISLEDLIERERSALGPNVTKITLESFLAWKKRKRQEKIDKLEQDMERRKADFKAGKALVISGREVFEFRPELVNDDDEEADDTRYTQGTGGDEVDDSVSVNDIDLSLYIPRDVDETGITVASLERFSTYTSDKDENKLSEASGGRAENGERSDLEEDNEREGTENGAIDAVPVDENLFTGEDLDELEEELNTLDLEE

SEQ ID NO: 822563 - protein, 192 aa, Homo sapiens [sequence omitted]

SEQ ID NO: 822564 - protein, 417 aa, Homo sapiens
MPPKKQAQAGGSKKAEQKKKEKIIEDKTFGLKNKKGAKQQKFIKAVTHQVKFGQQNPRQVAQSEAEKKLKKDDKKKELQELNELFKPVVAAQKISKGADPKSVVCAFFKQGQCTKGDKCKFSHDLTLERKCEKRSVYIDARDEELEKDTMDNWDEKKLEEVVNKKHGEAEKKKPKTQIVCKHFLEAIENNKYGWFWVCPGGGDICMYRHALPPGFVLKKDKKKEEKEDEISLEDLIERERSALGPNVTKITLESFLAWKKRKRQEKIDKLEQDMERRKADFKAGKALVISGREVFEFRPELVNDDDEEADDTRYTQGTGGDEVDDSVSVNDIDLSLYIPRDVDETGITVASLERFSTYTSDKDENKLSEASGGRAENGERSDLEEDNEREGTENGAIDAVPVDEIFWGDWVIKINLV

SEQ ID NO: 822565 - protein, 392 aa, Homo sapiens; identical to SEQ ID NO: 822561

SEQ ID NO: 822566 - protein, 364 aa, Homo sapiens
MPPKKQAQAGGSKKAEQKKKEKIIEDKTFGLKNKKGAKQQKFIKAVTHQVKFGQQNPRQVAQSEAEKKLKKDDKKKELQELNELFKPVVAAQKISKGADPKSVVCAFFKQGQCTKGDKCKFSHDLTLERKCEKRSVYIDARDEELEKDTMDNWDEKKLEEVVNKKHGEAEKKKPKTQIVCKHFLEAIENNKYGWFWVCPGGGDICMYRHALPPGFVLKKDKKKEEKEDEISLEDLIERERSALGPNVTKITLESFLAWKKRKRQEKIDKLEQDMERRKADFKAGKALVISGREVFEFRPELVNDDDEEADDTRYTQGTGGDEVDDSVSVNDIDLSLYIPRDVDETGITVASLERFSTYTSDKDG

SEQ ID NO: 822567 - protein, 271 aa, Homo sapiens
PYEDPVIDDKHGEAEKKKPKTQIVCKHFLEAIENNKYGWFWVCPGGGDICMYRHALPPGFVLKKDKKKEEKEDEISLEDLIERERSALGPNVTKITLESFLAWKKRKRQEKIDKLEQDMERRKADFKAGKALVISGREVFEFRPELVNDDDEEADDTRYTQGTGGDEVDDSVSVNDIDLSLYIPRDVDETGITVASLERFSTYTSDKDENKLSEASGGRAENGERSDLEEDNEREGTENGAIDAVPVDENLFTGEDLDELEEELNTLDLEE

SEQ ID NO: 822568 - protein, 367 aa, Homo sapiens [sequence omitted]

SEQ ID NO: 822569 - protein, 271 aa, Homo sapiens; identical to SEQ ID NO: 822555

SEQ ID NO: 822570 - protein, 247 aa, Homo sapiens
MPPKKQAQAGGSKKAEQKKKEKIIEDKTFGLKNKKGAKQQKFIKAVTHQVKFGQQNPRQVAQSEAEKKLKKDDKKKELQELNELFKPVVAAQKISKGADPKSVVCAFFKQGQCTKGDKCKFSHDLTLERKCEKRSVYIDARDEELEKDTMDNWDEKKLEEVVNKKHGEAEKKKPKTQIVCKHFLEAIENNKYGWFWVCPGGGDICMYRHALPPGFVLKKDKKKEEKEDEISLEDLIEREVTGILFLP

SEQ ID NO: 822571 - protein, 249 aa, Homo sapiens
MPPKKQAQAGGSKKAEQKKKEKIIEDKTFGLKNKKGAKQQKFIKAVTHQVKFGQQNPRQVAQSEAEKKLKKDDKKKELQELNELFKPVVAAQKISKGADPKSVVCAFFKQGQCTKGDKCKFSHDLTLERKCEKRSVYIDARDEELEKDTMDNWDEKKLEEVVNKKHGEAEKKKPKTQIVCKHFLEAIENNKYGWFWVCPGGGDICMYRHALPPGFVLKKDKKKEDYRRQNFRFEEKKGAKQQNGNIYAA

SEQ ID NO: 822572 - protein, 1227 aa, Homo sapiens
ARTQPGAARALDAPTAGRTDGRTPSAVPRGSYRRGDRPGLAWTMVLLWEPAGAWLALGLALALGPSVAAAAPRQDCTGVECPPLENCIEEALEPGACCATCVQQGCACEGYQYYDCLQGGFVRGRVPAGQSYFVDFGSTECSCPPGGGKISCQFMLCPELPPNCIEAVVVADSCPQCGQVGCVHAGHKYAAGHTVHLPPCRACHCPDAGGELICYQLPGCHGNFSDAEEGDPERHYEDPYSYDQEVAEVEAATALGGEVQAGAVQAGAGGPPAALGGGSQPLSTIQAPPWPAVLPRPTAAAALGPPAPVQAKARRVTEDSEEEEEEEEEREEMAVTEQLAAGGHRGLDGLPTTAPAGPSLPIQEERAEAGARAEAGARPEENLILDAQATSRSTGPEGVTHAPSLGKAALVPTQAVPGSPRDPVKPSPHNILSTSLPDAAWIPPTREVPRKPQVLPHSHVEEDTDPNSVHSIPRSSPEGSTKDLIETCCAAGQQWAIDNDECLEIPESGTEDNVCRTAQRHCCVSYLQEKSCMAGVLGAKEGETCGAEDNDSCGISLYKQCCDCCGLGLRVRAEGQSCESNPNLGYPCNHVMLSCCEGEEPLIVPEVRRPPEPAAAPRRVSEAEMAGREALSLGTEAELPNSLPGDDQDECLLLPGELCQHLCINTVGSYHCACFPGFSLQDDGRTCRPEGHPPQPEAPQEPALKSEFSQVASNTIPLPLPQPNTCKDNGPCKQVCSTVGGSAICSCFPGYAIMADGVSCEDINECVTDLHTCSRGEHCVNTLGSFHCYKALTCEPGYALKDGECEDVDECAMGTHTCQPGFLCQNTKGSFYCQARQRCMDGFLQDPEGNCVDINECTSLSEPCRPGFSCINTVGSYTCQRNPLICARGYHASDDGTKCVDVNECETGVHRCGEGQVCHNLPGSYRCDCKAGFQRDAFGRGCIDVNECWASPGRLCQHTCENTLGSYRCSCASGFLLAADGKRCEDVNECEAQRCSQECANIYGSYQCYCRQGYQLAEDGHTCTDIDECAQGAGILCTFRCLNVPGSYQCACPEQGYTMTANGRSCKDVDECALGTHNCSEAETCHNIQGSFRCLRFECPPNYVQVSKTKCERTTCHDFLECQNSPARITHYQLNFQTGLLVPAHIFRIGPAPAFTGDTIALNIIKGNEEGYFGTRRLNAYTGVVYLQRAVLEPRDFALDVEMKLWRQGSVTTFLAKMHIFFTTFAL

SEQ ID NO: 822573 - protein, 1274 aa, Homo sapiens
ARTQPGAARALDAPTAGRTDGRTPSAVPRGSYRRGDRPGLAWTMVLLWEPAGAWLALGLALALGPSVAAAAPRQDCTGVECPPLENCIEEALEPGACCATCVQQGCACEGYQYYDCLQGGFVRGRVPAGQSYFVDFGSTECSCPPGGGKISCQFMLCPELPPNCIEAVVVADSCPQCGQVGCVHAGHKYAAGHTVHLPPCRACHCPDAGGELICYQLPGCHGNFSDAEEGDPERHYEDPYSYDQEVAEVEAATALGGEVQAGAVQAGAGGPPAALGGGSQPLSTIQAPPWPAVLPRPTAAAALGPPAPVQAKARRVTEDSEEEEEEEEEREEMAVTEQLAAGGHRGLDGLPTTAPAGPSLPIQEERAEAGARAEAGARPEENLILDAQATSRSTGPEGVTHAPSLGKAALVPTQAVPGSPRDPVKPSPHNILSTSLPDAAWIPPTREVPRKPQVLPHSHVEEDTDPNSVHSIPRSSPEGSTKDLIETCCAAGQQWAIDNDECLEIPESGTEDNVCRTAQRHCCVSYLQEKSCMAGVLGAKEGETCGAEDNDSCGISLYKQCCDCCGLGLRVRAEGQSCESNPNLGYPCNHVMLSCCEGEEPLIVPEVRRPPEPAAAPRRVSEAEMAGREALSLGTEAELPNSLPGDDQDECLLLPGELCQHLCINTVGSYHCACFPGFSLQDDGRTCRPEGHPPQPEAPQEPALKSEFSQVASNTIPLPLPQPNTCKDNGPCKQVCSTVGGSAICSCFPGYAIMADGVSCEDQDECLMGAHDCSRRQFCVNTLGSFYCVNHTVLCADGYILNAHRKCVDINECVTDLHTCSRGEHCVNTLGSFHCYKALTCEPGYALKDGECEDVDECAMGTHTCQPGFLCQNTKGSFYCQARQRCMDGFLQDPEGNCVDINECTSLSEPCRPGFSCINTVGSYTCQRNPLICARGYHASDDGTKCVDVNECETGVHRCGEGQVCHNLPGSYRCDCKAGFQRDAFGRGCIDVNECWASPGRLCQHTCENTLGSYRCSCASGFLLAADGKRCEDVNECEAQRCSQECANIYGSYQCYCRQGYQLAEDGHTCTDIDECAQGAGILCTFRCLNVPGSYQCACPEQGYTMTANGRSCKDVDECALGTHNCSEAETCHNIQGSFRCLRFECPPNYVQVSKTKCERTTCHDFLECQNSPARITHYQLNFQTGLLVPAHIFRIGPAPAFTGDTIALNIIKGNEEGYFGTRRLNAYTGVVYLQRAVLEPRDFALDVEMKLWRQGSVTTFLAKMHIFFTTFAL

SEQ ID NO: 822574 - protein, 479 aa, Homo sapiens
GDSAASDGLALPADINECVTDLHTCSRGEHCVNTLGSFHCYKALTCEPGYALKDGECEDVDECAMGTHTCQPGFLCQNTKGSFYCQARQRCMDGFLQDPEGNCVDINECTSLSEPCRPGFSCINTVGSYTCQRNPLICARGYHASDDGTKCVDVNECETGVHRCGEGQVCHNLPGSYRCDCKAGFQRDAFGRGCIDVNECWASPGRLCQHTCENTLGSYRCSCASGFLLAADGKRCEDVNECEAQRCSQECANIYGSYQCYCRQGYQLAEDGHTCTDIDECAQGAGILCTFRCLNVPGSYQCACPEQGYTMTANGRSCKDVDECALGTHNCSEAETCHNIQGSFRCLRFECPPNYVQVSKTKCERTTCHDFLECQNSPARITHYQLNFQTGLLVPAHIFRIGPAPAFTGDTIALNIIKGNEEGYFGTRRLNAYTGVVYLQRAVLEPRDFALDVEMKLWRQGSVTTFLAKMHIFFTTFAL

SEQ ID NO: 822575 - protein, 366 aa, Homo sapiens
GDLEIPGQYWMCGSTDVRASTDVRASTDVLGSTDVRASTDVNECETGVHRCGEGQVCHNLPGSYRCDCKAGFQRDAFGRGCIDVNECWASPGRLCQHTCENTLGSYRCSCASGFLLAADGKRCEDVNECEAQRCSQECANIYGSYQCYCRQGYQLAEDGHTCTDIDECAQGAGILCTFRCLNVPGSYQCACPEQGYTMTANGRSCKDVDECALGTHNCSEAETCHNIQGSFRCLRFECPPNYVQVSKTKCERTTCHDFLECQNSPARITHYQLNFQTGLLVPAHIFRIGPAPAFTGDTIALNIIKGNEEGYFGTRRLNAYTGVVYLQRAVLEPRDFALDVEMKLWRQGSVTTFLAKMHIFFTTFAL

SEQ ID NO: 822576 - protein, 1212 aa, Homo sapiens
ARTQPGAARALDAPTAGRTDGRTPSAVPRGSYRRGDRPGLAWTMVLLWEPAGAWLALGLALALGPSVAAAAPRQDCTGVECPPLENCIEEALEPGACCATCVQQGCACEGYQYYDCLQGGFVRGRVPAGQSYFVDFGSTECSCPPGGGKISCQFMLCPELPPNCIEAVVVADSCPQCGQVGCVHAGHKYAAGHTVHLPPCRACHCPDAGGELICYQLPGCHGNFSDAEEGDPERHYEDPYSYDQEVAEVEAATALGGEVQAGAVQAGAGGPPAALGGGSQPLSTIQAPPWPAVLPRPTAAAALGPPAPVQAKARRVTEDSEEEEEEEEEREEMAVTEQLAAGGHRGLDGLPTTAPAGPSLPIQEERAEAGARAEAGARPEENLILDAQATSRSTGPEGVTHAPSLGKAALVPTQAVPGSPRDPVKPSPHNILSTSLPDAAWIPPTREVPRKPQVLPHSHVEEDTDPNSVHSIPRSSPEGSTKDLIETCCAAGQQWAIDNDECLEIPESGTEDNVCRTAQRHCCVSYLQEKSCMAGVLGAKEGETCGAEDNDSCGISLYKQCCDCCGLGLRVRAEGQSCESNPNLGYPCNHVMLSCCEGEEPLIVPEVRRPPEPAAAPRRVSEAEMAGREALSLGTEAELPNSLPGDDQDECLLLPGELCQHLCINTVGSYHCACFPGFSLQDDGRTCRPEGHPPQPEAPQEPALKSEFSQVASNTIPLPLPQPNTCKDNGPCKQVCSTVGGSAICSCFPGYAIMADGVSCEDINECVTDLHTCSRGEHCVNTLGSFHCYKALTCEPGYALKDGECEDVDECAMGTHTCQPGFLCQNTKGSFYCQARQRCMDGFLQDPEGNCVDINECTSLSEPCRPGFSCINTVGSYTCQRNPLICARGYHASDDGTKCVDVNECETGVHRCGEGQVCHNLPGSYRCDCKAGFQRDAFGRGCIDVNECWASPGRLCQHTCENTLGSYRCSCASGFLLAADGKRCEDVNECEAQRCSQECANIYGSYQCYCRQGYQLAEDGHTCTDIDECAQGAGILCTFRCLNVPGSYQCACPEQGYTMTANGRSCKDVDECALGTHNCSEAETCHNIQGSFRCLRFECPPNYVQVSKTKCERTTCHDFLECQNSPARITHYQLNFQTGLLVPAHIFRIGPAPAFTGDTIALNIIKGNEEGYFGTRRLNAYTGPPAGVAQPRAHTAWEGLGHYCGFYYNFVN

SEQ ID NO: 822577 - protein, 1133 aa, Homo sapiens
ARTQPGAARALDAPTAGRTDGRTPSAVPRGSYRRGDRPGLAWTMVLLWEPAGAWLALGLALALGPSVAAAAPRQDCTGVECPPLENCIEEALEPGACCATCVQQGCACEGYQYYDCLQGGFVRGRVPAGQSYFVDFGSTECSCPPGGGKISCQFMLCPELPPNCIEAVVVADSCPQCGQVGCVHAGHKYAAGHTVHLPPCRACHCPDAGGELICYQLPGCHGNFSDAEEGDPERHYEDPYSYDQEVAEVEAATALGGEVQAGAVQAGAGGPPAALGGGSQPLSTIQAPPWPAVLPRPTAAAALGPPAPVQAKARRVTEDSEEEEEEEEEREEMAVTEQLAAGGHRGLDGLPTTAPAGPSLPIQEERAEAGARAEAGARPEENLILDAQATSRSTGPEGVTHAPSLGKAALVPTQAVPGSPRDPVKPSPHNILSTSLPDAAWIPPTREVPRKPQVLPHSHVEEDTDPNSVHSIPRSSPEGSTKDLIETCCAAGQQWAIDNDECLEIPESGTEDNVCRTAQRHCCVSYLQEKSCMAGVLGAKEGETCGAEDNDSCGISLYKQCCDCCGLGLRVRAEGQSCESNPNLGYPCNHVMLSCCEGEEPLIVPEVRRPPEPAAAPRRVSEAEMAGREALSLGTEAELPNSLPGDDQDECLLLPGELCQHLCINTVGSYHCACFPGFSLQDDGRTCRPEGHPPQPEAPQEPALKSEFSQVASNTIPLPLPQPNTCKDNGPCKQVCSTVGGSAICSCFPGYAIMADGVSCEDINECVTDLHTCSRGEHCVNTLGSFHCYKALTCEPGYALKDGECEDVDECAMGTHTCQPGFLCQNTKGSFYCQARQRCMDGFLQDPEGNCVDINECTSLSEPCRPGFSCINTVGSYTCQRNPLICARGYHASDDGTKCVDVNECETGVHRCGEGQVCHNLPGSYRCDCKAGFQRDAFGRGCIDVNECWASPGRLCQHTCENTLGSYRCSCASGFLLAADGKRCEDVNECEAQRCSQECANIYGSYQCYCRQGYQLAEDGHTCTDIDECAQGAGILCTFRCLNVPGSYQCACPEQGYTMTANGRSCKDVDECALGTHNCSEAETCHNIQGSFRCLRFECPPNYVQVSKTWCVPTQAPSGSLHGGPRPWRVPCG

SEQ ID NO: 822578 - protein, 571 aa, Homo sapiens
MTRAGDHNRQRGCCGSLADYLTSAKFLLYLGHSLSTWGDRMWHFAVSVFLVELYGNSLLLTAVYGLVVAGSVLVLGAIIGDWVDKNARLKVAQTSLVVQNVSVILCGIILMMVFLHKHELLTMYHGWVLTSCYILIITIANIANLASTATAITIQRDWIVVVAGEDRSKLANMNATIRRIDQLTNILAPMAVGQIMTFGSPVIGCGFISGWNLVSMCVEYVLLWKVYQKTPALAVKAGLKEEETELKQLNLHKDTEPKPLEGTHLMGVKDSNIHELEHEQEPTCASQMAEPFRTFRDGWVSYYNQPVFLAGMGLAFLYMTVLGFDCITTGYAYTQGLSGSILSILMGASAITGIMGTVAFTWLRRKCGLVRTGLISGLAQLSCLILCVISVFMPGSPLDLSVSPFEDIRSRFIQGESITPTKIPEITTEIYMSNGSNSANIVPETSPESVPIISVSLLFAGVIAARIGLWSFDLTVTQLLQENVIESERGIINGVQNSMNYLLDLLHFIMVILAPNPEAFGLLVLISVSFVAMGHIMYFRFAQNTLGNKLFACGPDAKEVRKENQANTSVV

SEQ ID NO: 822579 - protein, 571 aa, Homo sapiens; identical to SEQ ID NO: 822578

SEQ ID NO: 822580 - protein, 624 aa, Homo sapiens
AFVLVSTSDMAEETEDAWPRCYLQFLALLLTSTSARAAAAIAAAEEPAGSPSVMTRAGDHNRQRGCCGSLADYLTSAKFLLYLGHSLSTWGDRMWHFAVSVFLVELYGNSLLLTAVYGLVVAGSVLVLGAIIGDWVDKNARLKVAQTSLVVQNVSVILCGIILMMVFLHKHELLTMYHGWVLTSCYILIITIANIANLASTATAITIQRDWIVVVAGEDRSKLANMNATIRRIDQLTNILAPMAVGQIMTFGSPVIGCGFISGWNLVSMCVEYVLLWKVYQKTPALAVKAGLKEEETELKQLNLHKDTEPKPLEGTHLMGVKDSNIHELEHEQEPTCASQMAEPFRTFRDGWVSYYNQPVFLAGMGLAFLYMTVLGFDCITTGYAYTQGLSGSILSILMGASAITGIMGTVAFTWLRRKCGLVRTGLISGLAQLSCLILCVISVFMPGSPLDLSVSPFEDIRSRFIQGESITPTKIPEITTEIYMSNGSNSANIVPETSPESVPIISVSLLFAGVIAARIGLWSFDLTVTQLLQENVIESERGIINGVQNSMNYLLDLLHFIMVILAPNPEAFGLLVLISVSFVAMGHIMYFRFAQNTLGNKLFACGPDAKEVRKENQANTSVV

SEQ ID NO: 822581 - protein, 531 aa, Homo sapiens
MWHFAVSVFLVELYGNSLLLTAVYGLVVAGSVLVLGAIIGDWVDKNARLKVAQTSLVVQNVSVILCGIILMMVFLHKHELLTMYHGWVLTSCYILIITIANIANLASTATAITIQRDWIVVVAGEDRSKLANMNATIRRIDQLTNILAPMAVGQIMTFGSPVIGCGFISGWNLVSMCVEYVLLWKVYQKTPALAVKAGLKEEETELKQLNLHKDTEPKPLEGTHLMGVKDSNIHELEHEQEPTCASQMAEPFRTFRDGWVSYYNQPVFLAGMGLAFLYMTVLGFDCITTGYAYTQGLSGSILSILMGASAITGIMGTVAFTWLRRKCGLVRTGLISGLAQLSCLILCVISVFMPGSPLDLSVSPFEDIRSRFIQGESITPTKIPEITTEIYMSNGSNSANIVPETSPESVPIISVSLLFAGVIAARIGLWSFDLTVTQLLQENVIESERGIINGVQNSMNYLLDLLHFIMVILAPNPEAFGLLVLISVSFVAMGHIMYFRFAQNTLGNKLFACGPDAKEVRKENQANTSVV

SEQ ID NO: 822582 - protein, 460 aa, Homo sapiens
MVFLHKHELLTMYHGWVLTSCYILIITIANIANLASTATAITIQRDWIVVVAGEDRSKLANMNATIRRIDQLTNILAPMAVGQIMTFGSPVIGCGFISGWNLVSMCVEYVLLWKVYQKTPALAVKAGLKEEETELKQLNLHKDTEPKPLEGTHLMGVKDSNIHELEHEQEPTCASQMAEPFRTFRDGWVSYYNQPVFLAGMGLAFLYMTVLGFDCITTGYAYTQGLSGSILSILMGASAITGIMGTVAFTWLRRKCGLVRTGLISGLAQLSCLILCVISVFMPGSPLDLSVSPFEDIRSRFIQGESITPTKIPEITTEIYMSNGSNSANIVPETSPESVPIISVSLLFAGVIAARIGLWSFDLTVTQLLQENVIESERGIINGVQNSMNYLLDLLHFIMVILAPNPEAFGLLVLISVSFVAMGHIMYFRFAQNTLGNKLFACGPDAKEVRKENQANTSVV

SEQ ID NO: 822583 - protein, 531 aa, Homo sapiens; identical to SEQ ID NO: 822581

SEQ ID NO: 822584 - protein, 571 aa, Homo sapiens; identical to SEQ ID NO: 822578

SEQ ID NO: 822585 - protein, 571 aa, Homo sapiens; identical to SEQ ID NO: 822578

SEQ ID NO: 822586 - protein, 571 aa, Homo sapiens; identical to SEQ ID NO: 822578

SEQ ID NO: 822587 - protein, 571 aa, Homo sapiens; identical to SEQ ID NO: 822578

SEQ ID NO: 822588 - protein, 571 aa, Homo sapiens; identical to SEQ ID NO: 822578

SEQ ID NO: 822589 - protein, 571 aa, Homo sapiens; identical to SEQ ID NO: 822578

SEQ ID NO: 822590 - protein, 571 aa, Homo sapiens; identical to SEQ ID NO: 822578

SEQ ID NO: 822591 - protein, 269 aa, Homo sapiens
MTRAGDHNRQRGCCGSLADYLTSAKFLLYLGHSLSTWGDRMWHFAVSVFLVELYGNSLLLTAVYGLVVAGSVLVLGAIIGDWVDKNARLKVAQTSLVVQNVSVILCGIILMMVFLHKHELLTMYHGWVLTSCYILIITIANIANLASTATAITIQRDWIVVVAGEDRSKLANMNATIRRIDQLTNILAPMAVGQIMTFGSPVIGCGFISGWNLVSMCVEYVLLWKVYQKTPALAVKAGLKEEETELKQLNLHKGKLNTMISPFVLMFRP

SEQ ID NO: 822592 - protein, 133 aa, Homo sapiens
MTRAGDHNRQRGCCGSLADYLTSAKFLLYLGHSLSTWGDRMWHFAVSVFLVELYGNSLLLTAVYGLVVAGSVLVLGAIIGDWVDKNARLKVAQTSLVVQNVSVILCGIILMMVFLHKHELLTMYHGWVLVSSQ

SEQ ID NO: 822593 - protein, 166 aa, Homo sapiens
AVLPDPGAGLRARTQSCSASRLRIRASTTCFALRPGKWGGDGREGGGGERRKEAAYTRLPVPLLRAARRPLPPLPLLPPLPPEETRRPPVAASCESFLAPGVSCTLPLPLLLSFQYKENKRRYQRKEPLTPFRITQVSPAAWTPSVAHQEGGGIWNPRGPVPAVCS

SEQ ID NO: 822594 - protein, 814 aa, Homo sapiens
AVLPDPGAGLRARTQSCSASRLRIRASTTCFALRPGKWGGDGREGGGGERRKEAAYTRLPVPLLRAARRPLPPLPLLPPLPPEETRRPPVAASCESFLAPGVSCTLPLPLLLSFQYKENKRRYQRKEPLTPFRITQVSPGNRGSLSPEEQPKGPWAGVDREGGGVGGIAWWKVACGREPKVQRHSPGDGVSGRRRCPCVGTRQRAGTAGARDDAPSCGVDSVSGPPRRRRNMESKGASSCRLLFCLLISATVFRPGLGWYTVNSAYGDTIIIPCRLDVPQNLMFGKWKYEKPDGSPVFIAFRSSTKKSVQYDDVPEYKDRLNLSENYTLSISNARISDEKRFVCMLVTEDNVFEAPTIVKVFKQPSKPEIVSKALFLETEQLKKLGDCISEDSYPDGNITWYRNGKVLHPLEGAVVIIFKKEMDPVTQLYTMTSTLEYKTTKADIQMPFTCSVTYYGPSGQKTIHSEQAVFDIYYPTEQVTIQVLPPKNAIKEGDNITLKCLGNGNPPPEEFLFYLPGQPEGIRSSNTYTLTDVRRNATGDYKCSLIDKKSMIASTAITVHYLDLSLNPSGEVTRQIGDALPVSCTISASRNATVVWMKDNIRLRSSPSFSSLHYQDAGNYVCETALQEVEGLKKRESLTLIVEGKPQIKMTKKTDPSGLSKTIICHVEGFPKPAIQWTITGSGSVINQTEESPYINGRYYSKIIISPEENVTLTCTAENQLERTVNSLNVSAISIPEHDEADEISDENREKVNDQAKLIVGIVVGLLLAALVAGVVYWLYMKKSKTASKHVNKDLGNMEENKKLEENNHKTEA

SEQ ID NO: 822595 - protein, 569 aa, Homo sapiens
MVTDVSSGTDRLAVLLQNSAYGDTIIIPCRLDVPQNLMFGKWKYEKPDGSPVFIAFRSSTKKSVQYDDVPEYKDRLNLSENYTLSISNARISDEKRFVCMLVTEDNVFEAPTIVKVFKQPSKPEIVSKALFLETEQLKKLGDCISEDSYPDGNITWYRNGKVLHPLEGAVVIIFKKEMDPVTQLYTMTSTLEYKTTKADIQMPFTCSVTYYGPSGQKTIHSEQAVFDIYYPTEQVTIQVLPPKNAIKEGDNITLKCLGNGNPPPEEFLFYLPGQPEGIRSSNTYTLTDVRRNATGDYKCSLIDKKSMIASTAITVHYLDLSLNPSGEVTRQIGDALPVSCTISASRNATVVWMKDNIRLRSSPSFSSLHYQDAGNYVCETALQEVEGLKKRESLTLIVEGKPQIKMTKKTDPSGLSKTIICHVEGFPKPAIQWTITGSGSVINQTEESPYINGRYYSKIIISPEENVTLTCTAENQLERTVNSLNVSAISIPEHDEADEISDENREKVNDQAKLIVGIVVGLLLAALVAGVVYWLYMKKSKTASKHVNKDLGNMEENKKLEENNHKTEA

SEQ ID NO: 822596 - protein, 801 aa, Homo sapiens
AVLPDPGAGLRARTQSCSASRLRIRASTTCFALRPGKWGGDGREGGGGERRKEAAYTRLPVPLLRAARRPLPPLPLLPPLPPEETRRPPVAASCESFLAPGVSCTLPLPLLLSFQYKENKRRYQRKEPLTPFRITQVSPGNRGSLSPEEQPKGPWAGVDREGGGVGGIAWWKVACGREPKVQRHSPGDGVSGRRRCPCVGTRQRAGTAGARDDAPSCGVDSVSGPPRRRRNMESKGASSCRLLFCLLISATVFRPGLGWYTVNSAYGDTIIIPCRLDVPQNLMFGKWKYEKPDGSPVFIAFRSSTKKSVQYDDVPEYKDRLNLSENYTLSISNARISDEKRFVCMLVTEDNVFEAPTIVKVFKQPSKPEIVSKALFLETEQLKKLGDCISEDSYPDGNITWYRNGKVLHPLEGAVVIIFKKEMDPVTQLYTMTSTLEYKTTKADIQMPFTCSVTYYGPSGQKTIHSEQAVFDIYYPTEQVTIQVLPPKNAIKEGDNITLKCLGNGNPPPEEFLFYLPGQPEGIRSSNTYTLTDVRRNATGDYKCSLIDKKSMIASTAITVHYLDLSLNPSGEVTRQIGDALPVSCTISASRNATVVWMKDNIRLRSSPSFSSLHYQDAGNYVCETALQEVEGLKKRESLTLIVEGKPQIKMTKKTDPSGLSKTIICHVEGFPKPAIQWTITGSGSVINQTEESPYINGRYYSKIIISPEENVTLTCTAENQLERTVNSLNVSANENREKVNDQAKLIVGIVVGLLLAALVAGVVYWLYMKKSKTASKHVNKDLGNMEENKKLEENNHKTEA

SEQ ID NO: 822597 - protein, 814 aa, Homo sapiens; identical to SEQ ID NO: 822594

SEQ ID NO: 822598 - protein, 814 aa, Homo sapiens; identical to SEQ ID NO: 822594

SEQ ID NO: 822599 - protein, 814 aa, Homo sapiens; identical to SEQ ID NO: 822594

SEQ ID NO: 822600 - protein, 786 aa, Homo sapiens
AVLPDPGAGLRARTQSCSASRLRIRASTTCFALRPGKWGGDGREGGGGERRKEAAYTRLPVPLLRAARRPLPPLPLLPPLPPEETRRPPVAASCESFLAPGVSCTLPLPLLLSFQYKENKRRYQRKEPLTPFRITQVSPGNRGSLSPEEQPKGPWAGVDREGGGVGGIAWWKVACGREPKVQRHSPGDGVSGRRRCPCVGTRQRAGTAGARDDAPSCGVDSVSGPPRRRRNMESKGASSCRLLFCLLISATVFRPGLGWYTVNSAYGDTIIIPCRLDVPQNLMFGKWKYEKPDGSPVFIAFRSSTKKSVQYDDVPEYKDRLNLSENYTLSISNARISDEKRFVCMLVTEDNVFEAPTIVKVFKQPSKPEIVSKALFLETEQLKKLGDCISEDSYPDGNITWYRNGKVLHPLEGAVVIIFKKEMDPVTQLYTMTSTLEYKTTKADIQMPFTCSVTYYGPSGQKTIHSEQAVFDIYYPTEQVTIQVLPPKNAIKEGDNITLKCLGNGNPPPEEFLFYLPGQPEGIRSSNTYTLTDVRRNATGDYKCSLIDKKSMIASTAITVHYLDLSLNPSGEVTRQIGDALPVSCTISASRNATVVWMKDNIRLRSSPSFSSLHYQDAGNYVCETALQEVEGLKKRESLTLIVEGKPQIKMTKKTDPSGLSKTIICHVEGFPKPAIQWTITGSGSVINQTEESPYINGRYYSKIIISPEENVTLTCTAENQLERTVNSLNVSAISIPEHDEADEISDENREKVNDQAKLIVGIVVGLLLAALVAGVVYWLYMKKSK

SEQ ID NO: 822601 - protein, 734 aa, Homo sapiens
AVLPDPGAGLRARTQSCSASRLRIRASTTCFALRPGKWGGDGREGGGGERRKEAAYTRLPVPLLRAARRPLPPLPLLPPLPPEETRRPPVAASCESFLAPGVSCTLPLPLLLSFQYKENKRRYQRKEPLTPFRITQVSPGNRGSLSPEEQPKGPWAGVDREGGGVGGIAWWKVACGREPKVQRHSPGDGVSGRRRCPCVGTRQRAGTAGARDDAPSCGVDSVSGPPRRRRNMESKGASSCRLLFCLLISATVFRPGLGWYTVNSAYGDTIIIPCRLDVPQNLMFGKWKYEKPDGSPVFIAFRSSTKKSVQYDDVPEYKDRLNLSENYTLSISNARISDEKRFVCMLVTEDNVFEAPTIVKVFKQPSKPEIVSKALFLETEQLKKLGDCISEDSYPDGNITWYRNGKVLHPLEGAVVIIFKKEMDPVTQLYTMTSTLEYKTTKADIQMPFTCSVTYYGPSGQKTIHSEQAVFDIYYPTEQVTIQVLPPKNAIKEGDNITLKCLGNGNPPPEEFLFYLPGQPEGIRSSNTYTLTDVRRNATGDYKCSLIDKKSMIASTAITVHYLDLSLNPSGEVTRQIGDALPVSCTISASRNATVVWMKDNIRLRSSPSFSSLHYQDAGNYVCETALQEVEGLKKRESLTLIVEGKPQIKMTKKTDPSGLSKTIICHVEGFPKPAIQWTITGSGSVINQTEESPYINGRYYSKIIISPEENVTLTCTAENQLERTVAILGRMLV

SEQ ID NO: 822602 - protein, 753 aa, Homo sapiens
  misc_feature (743)..(743): Xaa can be any naturally occurring amino acid
AVLPDPGAGLRARTQSCSASRLRIRASTTCFALRPGKWGGDGREGGGGERRKEAAYTRLPVPLLRAARRPLPPLPLLPPLPPEETRRPPVAASCESFLAPGVSCTLPLPLLLSFQYKENKRRYQRKEPLTPFRITQVSPGNRGSLSPEEQPKGPWAGVDREGGGVGGIAWWKVACGREPKVQRHSPGDGVSGRRRCPCVGTRQRAGTAGARDDAPSCGVDSVSGPPRRRRNMESKGASSCRLLFCLLISATVFRPGLGWYTVNSAYGDTIIIPCRLDVPQNLMFGKWKYEKPDGSPVFIAFRSSTKKSVQYDDVPEYKDRLNLSENYTLSISNARISDEKRFVCMLVTEDNVFEAPTIVKVFKQPSKPEIVSKALFLETEQLKKLGDCISEDSYPDGNITWYRNGKVLHPLEGAVVIIFKKEMDPVTQLYTMTSTLEYKTTKADIQMPFTCSVTYYGPSGQKTIHSEQAVFDIYYPTEQVTIQVLPPKNAIKEGDNITLKCLGNGNPPPEEFLFYLPGQPEGIRSSNTYTLTDVRRNATGDYKCSLIDKKSMIASTAITVHYLDLSLNPSGEVTRQIGDALPVSCTISASRNATVVWMKDNIRLRSSPSFSSLHYQDAGNYVCETALQEVEGLKKRESLTLIVEGKPQIKMTKKTDPSGLSKTIICHVEGFPKPAIQWTITGSGSVINQTEESPYINGRYYSKIIISPEENVTLTCTAENQLERTVNSLNVSATRTRMRPGLXLLIRIKVKLG

SEQ ID NO: 822603 - protein, 520 aa, Homo sapiens
AVLPDPGAGLRARTQSCSASRLRIRASTTCFALRPGKWGGDGREGGGGERRKEAAYTRLPVPLLRAARRPLPPLPLLPPLPPEETRRPPVAASCESFLAPGVSCTLPLPLLLSFQYKENKRRYQRKEPLTPFRITQVSPGNRGSLSPEEQPKGPWAGVDREGGGVGGIAWWKVACGREPKVQRHSPGDGVSGRRRCPCVGTRQRAGTAGARDDAPSCGVDSVSGPPRRRRNMESKGASSCRLLFCLLISATVFRPGLGWYTVNSAYGDTIIIPCRLDVPQNLMFGKWKYEKPDGSPVFIAFRSSTKKSVQYDDVPEYKDRLNLSENYTLSISNARISDEKRFVCMLVTEDNVFEAPTIVKVFKQPSKPEIVSKALFLETEQLKKLGDCISEDSYPDGNITWYRNGKVLHPLEGAVVIIFKKEMDPVTQLYTMTSTLEYKTTKADIQMPFTCSVTYYGPSGQKTIHSEQAVFDIYYPTEQVTIQVLPPKNAIKEGDNITLKCLGNGICMSALVVLYSSVER

SEQ ID NO: 822604 - protein, 589 aa, Homo sapiens
MAESGESGGPPGSQDSAAGAEGAGAPAAAASAEPKIMKVTVKTPKEKEEFAVPENSSVQQFKEEISKRFKSHTDQLVLIFAGKILKDQDTLSQHGIHDGLTVHLVIKTQNRPQDHSAQQTNTAGSNVTTSSTPNSNSTSGSATSNPFGLGGLGGLAGLSSLGLNTTNFSELQSQMQRQLLSNPEMMVQIMENPFVQSMLSNPDLMRQLIMANPQMQQLIQRNPEISHMLNNPDIMRQTLELARNPAMMQEMMRNQDRALSNLESIPGGYNALRRMYTDIQEPMLSAAQEQFGGNPFASLVSNTSSGEGSQPSRTENRDPLPNPWAPQTSQSSSASSGTASTVGGTTGSTASGTSGQSTTAPNLVPGVGASMFNTPGMQSLLQQITENPQLMQNMLSAPYMRSMMQSLSQNPDLAAQMMLNNPLFAGNPQLQEQMRQQLPTFLQQMQNPDTLSAMSNPRAMQALLQIQQGLQTLATEAPGLIPGFTPGLGALGSTGGSSGTNGSNATPSENTSPTAGTTEPGHQQFIQQMLQALAGVNPQLQNPEVRFQQQLEQLSAMGFLNREANLQALIATGGDINAAIERLLGSQPS

SEQ ID NO: 822605 - protein, 589 aa, Homo sapiens; identical to SEQ ID NO: 822604

SEQ ID NO: 822606 - protein, 561 aa, Homo sapiens
MAESGESGGPPGSQDSAAGAEGAGAPAAAASAEPKIMKVTVKTPKEKEEFAVPENSSVQQFKEEISKRFKSHTDQLVLIFAGKILKDQDTLSQHGIHDGLTVHLVIKTQNRPQDHSAQQTNTAGSNVTTSSTPNSNSTSGSATSNPFGLGGLGGLAGLSSLGLNTTNFSELQSQMQRQLLSNPEMMVQIMENPFVQSMLSNPDLMRQLIMANPQMQQLIQRNPEISHMLNNPDIMRQTLELARNPAMMQEMMRNQDRALSNLESIPGGYNALRRMYTDIQEPMLSAAQEQFGGNPFASLVSNTSSGEGSQPSRTENRDPLPNPWAPQTSQSSSASSGTASTVGGTTGSTASGTSGQSTTAPNLVPGVGASMFNTPGMQSLLQQITENPQLMQNMLSAPYMRSMMQSLSQNPDLAAQMQNPDTLSAMSNPRAMQALLQIQQGLQTLATEAPGLIPGFTPGLGALGSTGGSSGTNGSNATPSENTSPTAGTTEPGHQQFIQQMLQALAGVNPQLQNPEVRFQQQLEQLSAMGFLNREANLQALIATGGDINAAIERLLGSQPS

SEQ ID NO: 822607 - protein, 132 aa, Homo sapiens [sequence omitted]

SEQ ID NO: 822608 - protein, 589 aa, Homo sapiens; identical to SEQ ID NO: 822604

SEQ ID NO: 822609 - protein, 589 aa, Homo sapiens; identical to SEQ ID NO: 822604

SEQ ID NO: 822610 - protein, 589 aa, Homo sapiens; identical to SEQ ID NO: 822604

SEQ ID NO: 822611 - protein, 589 aa, Homo sapiens; identical to SEQ ID NO: 822604

SEQ ID NO: 822612 - protein, 589 aa, Homo sapiens; identical to SEQ ID NO: 822604

SEQ ID NO: 822613 - protein, 589 aa, Homo sapiens; identical to SEQ ID NO: 822604

SEQ ID NO: 822614 - protein, 561 aa, Homo sapiens; identical to SEQ ID NO: 822606

SEQ ID NO: 822615 - protein, 576 aa, Homo sapiens
MAESGESGGPPGSQDSAAGAEGAGAPAAAASAEPKIMKVTVKTPKEKEEFAVPENSSVQQFKEEISKRFKSHTDQLVLIFAGKILKDQDTLSQHGIHDGLTVHLVIKTQNRPQDHSAQQTNTAGSNVTTSSTPNSNSTSGSATSNPFGLGGLGGLAGLSSLGLNTTNFSELQSQMQRQLLSNPEMMVQIMENPFVQSMLSNPDLMRQLIMANPQMQQLIQRNPEISHMLNNPDIMRQTLELARNPAMMQEMMRNQDRALSNLESIPGGYNALRRMYTDIQEPMLSAAQEQFGGNPFASLVSNTSSGEGSQPSRTENRDPLPNPWAPQTSQSSSASSGTASTVGGTTGSTASGTSGQSTTAPNLVPGVGASMFNTPGMQSLLQQITENPQLMQNMLSAPYMRSMMQSLSQNPDLAAQLQEQMRQQLPTFLQQMQNPDTLSAMSNPRAMQALLQIQQGLQTLATEAPGLIPGFTPGLGALGSTGGSSGTNGSNATPSENTSPTAGTTEPGHQQFIQQMLQALAGVNPQLQNPEVRFQQQLEQLSAMGFLNREANLQALIATGGDINAAIERLLGSQPS

SEQ ID NO: 822616 - protein, 589 aa, Homo sapiens; identical to SEQ ID NO: 822604

SEQ ID NO: 822617 - protein, 412 aa, Homo sapiens
MAESGESGGPPGSQDSAAGAEGAGAPAAAASAEPKIMKVTVKTPKEKEEFAVPENSSVQQTLELARNPAMMQEMMRNQDRALSNLESIPGGYNALRRMYTDIQEPMLSAAQEQFGGNPFASLVSNTSSGEGSQPSRTENRDPLPNPWAPQTSQSSSASSGTASTVGGTTGSTASGTSGQSTTAPNLVPGVGASMFNTPGMQSLLQQITENPQLMQNMLSAPYMRSMMQSLSQNPDLAAQMMLNNPLFAGNPQLQEQMRQQLPTFLQQMQNPDTLSAMSNPRAMQALLQIQQGLQTLATEAPGLIPGFTPGLGALGSTGGSSGTNGSNATPSENTSPTAGTTEPGHQQFIQQMLQALAGVNPQLQNPEVRFQQQLEQLSAMGFLNREANLQALIATGGDINAAIERLLGSQPS

SEQ ID NO: 822618 - protein, 589 aa, Homo sapiens; identical to SEQ ID NO: 822604

SEQ ID NO: 822619 - protein, 172 aa, Homo sapiens
MLNNPLFAGNPQLQEQMRQQLPTFLQQMQNPDTLSAMSNPRAMQALLQIQQGLQTLATEAPGLIPGFTPGLGALGSTGGSSGTNGSNATPSENTSPTAGTTEPGHQQFIQQMLQALAGVNPQLQNPEVRFQQQLEQLSAMGFLNREANLQALIATGGDINAAIERLLGSQPS

SEQ ID NO: 822620 - protein, 120 aa, Homo sapiens
LQDLRIFPICAFCRFTPGLGALGSTGGSSGTNGSNATPSENTSPTAGTTEPGHQQFIQQMLQALAGVNPQLQNPEVRFQQQLEQLSAMGFLNREANLQALIATGGDINAAIERLLGSQPS

SEQ ID NO: 822621 - protein, 589 aa, Homo sapiens; identical to SEQ ID NO: 822604

SEQ ID NO: 822622 - protein, 141 aa, Homo sapiens
MAESGESGGPPGSQDSAAGAEGAGAPAAAASAEPKIMKVTVKTPKEKEEFAVPENSSVQQFKEEISKRFKSHTDQLVLIFAGKILKDQDTLSQHGIHDGLTVHLVIKTQNRPQDHSAQQTNTAGSNVTTSSIPNCWGGTFL

SEQ ID NO: 822623 - protein, 503 aa, Homo sapiens
MAESGESGGPPGSQDSAAGAEGAGAPAAAASAEPKIMKVTVKTPKEKEEFAVPENSSVQQFKEEISKRFKSHTDQLVLIFAGKILKDQDTLSQHGIHDGLTVHLVIKTQNRPQDHSAQQTNTAGSNVTTSSTPNSNSTSGSATSNPFGLGGLGGLAGLSSLGLNTTNFSELQSQMQRQLLSNPEMMVQIMENPFVQSMLSNPDLMRQLIMANPQMQQLIQRNPEISHMLNNPDIMRQTLELARNPAMMQEMMRNQDRALSNLESIPGGYNALRRMYTDIQEPMLSAAQEQFGGNPFASLVSNTSSGEGSQPSRTENRDPLPNPWAPQTSQSSSASSGTASTVGGTTGSTASGTSGQSTTAPNLVPGVGASMFNTPGMQSLLQQITENPQLMQNMLSAPYMRSMMQSLSQNPDLAAQMMLNNPLFAGNPQLQEQMRQQLPTFLQQMQNPDTLSAMSNPRAMQALLQIQQGLQTLATEAPGLIPGVLLAGGIRKIARGKEATRVR

SEQ ID NO: 822624 - protein, 258 aa, Homo sapiens
MAESGESGGPPGSQDSAAGAEGAGAPAAAASAEPKIMKVTVKTPKEKEEFAVPENSSVQQFKEEISKRFKSHTDQLVLIFAGKILKDQDTLSQHGIHDGLTVHLVIKTQNRPQDHSAQQTNTAGSNVTTSSTPNSNSTSGSATSNPFGLGGLGGLAGLSSLGLNTTNFSELQSQMQRQLLSNPEMMVQIMENPFVQSMLSNPDLMRQLIMANPQMQQLIQRNPEISHMLNNPDIMRQTTFWNFAQNPTNDAENEERNP

SEQ ID NO: 822625 - protein, 458 aa, Homo sapiens
MRKKWKMGGMKYIFSLLFFLLLEGGKTEQVKHSETYCMFQDKKYRVGERWHPYLEPYGLVYCVNCICSENGNVLCSRVRCPNVHCLSPVHIPHLCCPRCPEDSLPPVNNKVTSKSCEYNGTTYQHGELFVAEGLFQNRQPNQCTQCSCSEGNVYCGLKTCPKLTCAFPVSVPDSCCRVCRGDGELSWEHSDGDIFRQPANREARHSYHRSHYDPPPSRQAGGLSRFPGARSHRGALMDSQQASGTIVQIVINNKHKHGQVCVSNGKTYSHGESWHPNLRAFGIVECVLCTCNVTKQECKKIHCPNRYPCKYPQKIDGKCCKVCPGKKAKEELPGQSFDNKGYFCGEETMPVYESVFMEDGETTRKIALETERPPQVEVHVWTIRKGILQHFHIEKISKRMFEELPHFKLVTRTTLSQWKIFTEGEAQISQMCSSRVCRTELEDLVKVLYLERSEKGHC

SEQ ID NO: 822626 - protein, 492 aa, Homo sapiens
RTRAPRGARSACTRGRRRRPVPSLKVLSPFAVVQMRKKWKMGGMKYIFSLLFFLLLEGGKTEQVKHSETYCMFQDKKYRVGERWHPYLEPYGLVYCVNCICSENGNVLCSRVRCPNVHCLSPVHIPHLCCPRCPEDSLPPVNNKVTSKSCEYNGTTYQHGELFVAEGLFQNRQPNQCTQCSCSEGNVYCGLKTCPKLTCAFPVSVPDSCCRVCRGDGELSWEHSDGDIFRQPANREARHSYHRSHYDPPPSRQAGGLSRFPGARSHRGALMDSQQASGTIVQIVINNKHKHGQVCVSNGKTYSHGESWHPNLRAFGIVECVLCTCNVTKQECKKIHCPNRYPCKYPQKIDGKCCKVCPGKKAKEELPGQSFDNKGYFCGEETMPVYESVFMEDGETTRKIALETERPPQVEVHVWTIRKGILQHFHIEKISKRMFEELPHFKLVTRTTLSQWKIFTEGEAQISQMCSSRVCRTELEDLVKVLYLERSEKGHC

SEQ ID NO: 822627 - protein, 458 aa, Homo sapiens; identical to SEQ ID NO: 822625

SEQ ID NO: 822628 - protein, 117 aa, Homo sapiens
ERDVQEKRRSVPCPSPGPLGFDHLRCVETERPPQVEVHVWTIRKGILQHFHIEKISKRMFEELPHFKLVTRTTLSQWKIFTEGEAQISQMCSSRVCRTELEDLVKVLYLERSEKGHC

SEQ ID NO: 822629 - protein, 492 aa, Homo sapiens; identical to SEQ ID NO: 822626

SEQ ID NO: 822630 - protein, 492 aa, Homo sapiens; identical to SEQ ID NO: 822626

SEQ ID NO: 822631 - protein, 483 aa, Homo sapiens
RTRAPRGARSACTRGRRRRPVPSLKVLSPFAVVQMRKKWKMGGMKYIFSLLFFLLLEGGKTEQVKHSETYCMFQDKKYRVGERWHPYLEPYGLVYCVNCICSENGNVLCSRVRCPNVHCLSPVHIPHLCCPRCPEDSLPPVNNKVTSKSCEYNGTTYQHGELFVAEGLFQNRQPNQCTQCSCSEGNVYCGLKTCPKLTCAFPVSVPDSCCRVCRGDGELSWEHSDGDIFRQPANREARHSYHRSHYDPPPSRQAGGLSRFPGARSHRGALMDSQQASGTIVQIVINNKHKHGQVCVSNGKTYSHGESWHPNLRAFGIVECVLCTCNVTKQECKKIHCPNRYPCKYPQKIDGKCCKVCPGKKAKEELPGQSFDNKGYFCGEETMPVYESVFMEDGETTRKIALETERPPQVEVHVWTIRKGILQHFHIEKISKRMFEELPHFKLVTRTTLSQWKIFTEGEAQISQMCSSRVCRIGHRVKRPSCL

SEQ ID NO: 822632 - protein, 1129 aa, Homo sapiens
NLQNKLEVLNQRWQNVLEKTEQRKQQLDGALRQAKGFHGEIEDLQQWLTDTERHLLASKPLGGLPETAKEQLNVHMEVCAAFEAKEETYKSLMQKGQQMLARCPKSAETNIDQDINNLKEKWESVETKLNERKTKLEEALNLAMEFHNSLQDFINWLTQAEQTLNVASRPSLILDTVLFQIDEHKVFANEVNSHREQIIELDKTGTHLKYFSQKQDVVLIKNLLISVQSRWEKVVQRLVERGRSLDDARKRAKQFHEAWSKLMEWLEESEKSLDSELEIANDPDKIKTQLAQHKEFQKSLGAKHSVYDTTNRTGRSLKEKTSLADDNLKLDDMLSELRDKWDTICGKSVERQNKLEEALLFSGQFTDALQALIDWLYRVEPQLAEDQPVHGDIDLVMNLIDNHKAFQKELGKRTSSVQALKRSARELIEGSRDDSSWVKVQMQELSTRWETVCALSISKQTRLEAALRQAEEFHSVVHALLEWLAEAEQTLRFHGVLPDDEDALRTLIDQHKEFMKKLEEKRAELNKATTMGDTVLAICHPDSITTIKHWITIIRARFEEVLAWAKQHQQRLASALAGLIAKQELLEALLAWLQWAETTLTDKDKEVIPQEIEEVKALIAEHQTFMEEMTRKQPDVDKVTKTYKRRAADPSSLQSHIPVLDKGRAGRKRFPASSLYPSGSQTQIETKNPRVNLLVSKWQQVWLLALERRRKLNDALDRLEELREFANFDFDIWRKKYMRWMNHKKSRVMDFFRRIDKDQDGKITRQEFIDGILSSKFPTSRLEMSAVADIFDRDGDGYIDYYEFVAALHPNKDAYKPITDADKIEDEVTRQVAKCKCAKRFQVEQIGDNKYRFFLGNQFGDSQQLRLVRILRSTVMVRVGGGWMALDEFLVKNDPCRAKGRTNMELREKFILADGASQGMAAFRPRGRRSRPSSRGASPNRSTSVSSQAAQAASPQVPATTTPKILHPLTRNYGKPWLTNSKMSTPCKAAECSDFPVPSAEGTPIQGSKLRLPGYLSGKGFHSGEDSGLITTAAARVRTQFADSKKTPSRPGSRAGSKAGSRASSRRGSDASDFDISEIQSVCSDVETVPQTHRPTPRAGSRPSTAKPSKIPTPQRKSPASKLDKSSKR

SEQ ID NO: 822633 - protein, 1129 aa, Homo sapiens; identical to SEQ ID NO: 822632

SEQ ID NO: 822634 - protein, 986 aa, Homo sapiens
MEFHNSLQDFINWLTQAEQTLNVASRPSLILDTVLFQIDEHKVFANEVNSHREQIIELDKTGTHLKYFSQKQDVVLIKNLLISVQSRWEKVVQRLVERGRSLDDARKRAKQFHEAWSKLMEWLEESEKSLDSELEIANDPDKIKTQLAQHKEFQKSLGAKHSVYDTTNRTGRSLKEKTSLADDNLKLDDMLSELRDKWDTICGKSVERQNKLEEALLFSGQFTDALQALIDWLYRVEPQLAEDQPVHGDIDLVMNLIDNHKAFQKELGKRTSSVQALKRSARELIEGSRDDSSWVKVQMQELSTRWETVCALSISKQTRLEAALRQAEEFHSVVHALLEWLAEAEQTLRFHGVLPDDEDALRTLIDQHKEFMKKLEEKRAELNKATTMGDTVLAICHPDSITTIKHWITIIRARFEEVLAWAKQHQQRLASALAGLIAKQELLEALLAWLQWAETTLTDKDKEVIPQEIEEVKALIAEHQTFMEEMTRKQPDVDKVTKTYKRRAADPSSLQSHIPVLDKGRAGRKRFPASSLYPSGSQTQIETKNPRVNLLVSKWQQVWLLALERRRKLNDALDRLEELREFANFDFDIWRKKYMRWMNHKKSRVMDFFRRIDKDQDGKITRQEFIDGILSSKFPTSRLEMSAVADIFDRDGDGYIDYYEFVAALHPNKDAYKPITDADKIEDEVTRQVAKCKCAKRFQVEQIGDNKYRFFLGNQFGDSQQLRLVRILRSTVMVRVGGGWMALDEFLVKNDPCRAKGRTNMELREKFILADGASQGMAAFRPRGRRSRPSSRGASPNRSTSVSSQAAQAASPQVPATTTPKILHPLTRNYGKPWLTNSKMSTPCKAAECSDFPVPSAEGTPIQGSKLRLPGYLSGKGFHSGEDSGLITTAAARVRTQFADSKKTPSRPGSRAGSKAGSRASSRRGSDASDFDISEIQSVCSDVETVPQTHRPTPRAGSRPSTAKPSKIPTPQRKSPASKLDKSSKR

SEQ ID NO: 822635 - protein, 1111 aa, Homo sapiens
NLQNKLEVLNQRWQNVLEKTEQRKQQLDGALRQAKGFHGEIEDLQQWLTDTERHLLASKPLGGLPETAKEQLNVHMEVCAAFEAKEETYKSLMQKGQQMLARCPKSAETNIDQDINNLKEKWESVETKLNEEENFINWLTQAEQTLNVASRPSLILDTVLFQIDEHKVFANEVNSHREQIIELDKTGTHLKYFSQKQDVVLIKNLLISVQSRWEKVVQRLVERGRSLDDARKRAKQFHEAWSKLMEWLEESEKSLDSELEIANDPDKIKTQLAQHKEFQKSLGAKHSVYDTTNRTGRSLKEKTSLADDNLKLDDMLSELRDKWDTICGKSVERQNKLEEALLFSGQFTDALQALIDWLYRVEPQLAEDQPVHGDIDLVMNLIDNHKAFQKELGKRTSSVQALKRSARELIEGSRDDSSWVKVQMQELSTRWETVCALSISKQTRLEAALRQAEEFHSVVHALLEWLAEAEQTLRFHGVLPDDEDALRTLIDQHKEFMKKLEEKRAELNKATTMGDTVLAICHPDSITTIKHWITIIRARFEEVLAWAKQHQQRLASALAGLIAKQELLEALLAWLQWAETTLTDKDKEVIPQEIEEVKALIAEHQTFMEEMTRKQPDVDKVTKTYKRRAADPSSLQSHIPVLDKGRAGRKRFPASSLYPSGSQTQIETKNPRVNLLVSKWQQVWLLALERRRKLNDALDRLEELREFANFDFDIWRKKYMRWMNHKKSRVMDFFRRIDKDQDGKITRQEFIDGILSSKFPTSRLEMSAVADIFDRDGDGYIDYYEFVAALHPNKDAYKPITDADKIEDEVTRQVAKCKCAKRFQVEQIGDNKYRFFLGNQFGDSQQLRLVRILRSTVMVRVGGGWMALDEFLVKNDPCRAKGRTNMELREKFILADGASQGMAAFRPRGRRSRPSSRGASPNRSTSVSSQAAQAASPQVPATTTPKILHPLTRNYGKPWLTNSKMSTPCKAAECSDFPVPSAEGTPIQGSKLRLPGYLSGKGFHSGEDSGLITTAAARVRTQFADSKKTPSRPGSRAGSKAGSRASSRRGSDASDFDISEIQSVCSDVETVPQTHRPTPRAGSRPSTAKPSKIPTPQRKSPASKLDKSSKR

SEQ ID NO: 822636 - protein, 895 aa, Homo sapiens
LTQDTYLVQFPDIKNRIAKQFHEAWSKLMEWLEESEKSLDSELEIANDPDKIKTQLAQHKEFQKSLGAKHSVYDTTNRTGRSLKEKTSLADDNLKLDDMLSELRDKWDTICGKSVERQNKLEEALLFSGQFTDALQALIDWLYRVEPQLAEDQPVHGDIDLVMNLIDNHKAFQKELGKRTSSVQALKRSARELIEGSRDDSSWVKVQMQELSTRWETVCALSISKQTRLEAALRQAEEFHSVVHALLEWLAEAEQTLRFHGVLPDDEDALRTLIDQHKEFMKKLEEKRAELNKATTMGDTVLAICHPDSITTIKHWITIIRARFEEVLAWAKQHQQRLASALAGLIAKQELLEALLAWLQWAETTLTDKDKEVIPQEIEEVKALIAEHQTFMEEMTRKQPDVDKVTKTYKRRAADPSSLQSHIPVLDKGRAGRKRFPASSLYPSGSQTQIETKNPRVNLLVSKWQQVWLLALERRRKLNDALDRLEELREFANFDFDIWRKKYMRWMNHKKSRVMDFFRRIDKDQDGKITRQEFIDGILSSKFPTSRLEMSAVADIFDRDGDGYIDYYEFVAALHPNKDAYKPITDADKIEDEVTRQVAKCKCAKRFQVEQIGDNKYRFFLGNQFGDSQQLRLVRILRSTVMVRVGGGWMALDEFLVKNDPCRAKGRTNMELREKFILADGASQGMAAFRPRGRRSRPSSRGASPNRSTSVSSQAAQAASPQVPATTTPKILHPLTRNYGKPWLTNSKMSTPCKAAECSDFPVPSAEGTPIQGSKLRLPGYLSGKGFHSGEDSGLITTAAARVRTQFADSKKTPSRPGSRAGSKAGSRASSRRGSDASDFDISEIQSVCSDVETVPQTHRPTPRAGSRPSTAKPSKIPTPQRKSPASKLDKSSKR

SEQ ID NO: 822637 - protein, 874 aa, Homo sapiens
NRQLEGISVVAQQFHETLEPLNEWLTTIEKRLVNCEPIGTQASKLEEQIAQHKALEDDIINHNETFTPGDDNLKLDDMLSELRDKWDTICGKSVERQNKLEEALLFSGQFTDALQALIDWLYRVEPQLAEDQPVHGDIDLVMNLIDNHKAFQKELGKRTSSVQALKRSARELIEGSRDDSSWVKVQMQELSTRWETVCALSISKQTRLEAALRQAEEFHSVVHALLEWLAEAEQTLRFHGVLPDDEDALRTLIDQHKEFMKKLEEKRAELNKATTMGDTVLAICHPDSITTIKHWITIIRARFEEVLAWAKQHQQRLASALAGLIAKQELLEALLAWLQWAETTLTDKDKEVIPQEIEEVKALIAEHQTFMEEMTRKQPDVDKVTKTYKRRAADPSSLQSHIPVLDKGRAGRKRFPASSLYPSGSQTQIETKNPRVNLLVSKWQQVWLLALERRRKLNDALDRLEELREFANFDFDIWRKKYMRWMNHKKSRVMDFFRRIDKDQDGKITRQEFIDGILSSKFPTSRLEMSAVADIFDRDGDGYIDYYEFVAALHPNKDAYKPITDADKIEDEVTRQVAKCKCAKRFQVEQIGDNKYRFFLGNQFGDSQQLRLVRILRSTVMVRVGGGWMALDEFLVKNDPCRAKGRTNMELREKFILADGASQGMAAFRPRGRRSRPSSRGASPNRSTSVSSQAAQAASPQVPATTTPKILHPLTRNYGKPWLTNSKMSTPCKAAECSDFPVPSAEGTPIQGSKLRLPGYLSGKGFHSGEDSGLITTAAARVRTQFADSKKTPSRPGSRAGSKAGSRASSRRGSDASDFDISEIQSVCSDVETVPQTHRPTPRAGSRPSTAKPSKIPTPQRKSPASKLDKSSKR

SEQ ID NO: 822638 - protein, 1111 aa, Homo sapiens
NLQNKLEVLNQRWQNVLEKTEQRKQQLDGALRQAKGFHGEIEDLQQWLTDTERHLLASKPLGGLPETAKEQLNVHMEVCAAFEAKEETYKSLMQKGQQMLARCPKSAETNIDQDINNLKEKWESVETKLNERKTKLEEALNLAMEFHNSLQDFINWLTQAEQTLNVASRPSLILDTVLFQIDEHKVFANEVNSHREQIIELDKTGTHLKYFSQKQDVVLIKNLLISVQSRWEKVVQRLVERGRSLDDARKRAKQFHEAWSKLMEWLEESEKSLDSELEIANDPDKIKTQLAQHKEFQKSLGAKHSVYDTTNRTGRSLKEKTSLADDNLKLDDMLSELRDKWDTICGKSVERQNKLEEALLFSGQFTDALQALIDWLYRVEPQLAEDQPVHGDIDLVMNLIDNHKAFQKELGKRTSSVQALKRSARELIEGSRDDSSWVKVQMQELSTRWETVCALSISKQTRLEAALRQAEEFHSVVHALLEWLAEAEQTLRFHGVLPDDEDALRTLIDQHKEFMKKLEEKRAELNKATTMGDTVLAICHPDSITTIKHWITIIRARFEEVLAWAKQHQQRLASALAGLIAKQELLEALLAWLQWAETTLTDKDKEVIPQEIEEVKALIAEHQTFMEEMTRKQPDVDKVTKTYKRRAADPSSLQSHIPVLDKGRAGRKRFPASSLYPSGSQTQIETKNPRVNLLVSKWQQVWLLALERRRKLNDALDRLEELREFANFDFDIWRKKYMRWMNHKKSRVMDFFRRIDKDQDGKITRQEFIDGILSSKFPTSRLEMSAVADIFDRDGDGYIDYYEFVAALHPNKDAYKPITDAEFQVEQIGDNKYRFFLGNQFGDSQQLRLVRILRSTVMVRVGGGWMALDEFLVKNDPCRAKGRTNMELREKFILADGASQGMAAFRPRGRRSRPSSRGASPNRSTSVSSQAAQAASPQVPATTTPKILHPLTRNYGKPWLTNSKMSTPCKAAECSDFPVPSAEGTPIQGSKLRLPGYLSGKGFHSGEDSGLITTAAARVRTQFADSKKTPSRPGSRAGSKAGSRASSRRGSDASDFDISEIQSVCSDVETVPQTHRPTPRAGSRPSTAKPSKIPTPQRKSPASKLDKSSKR

SEQ ID NO: 822639 - protein, 948 aa, Homo sapiens
NLQNKLEVLNQRWQNVLEKTEQRKQQLDGALRQAKGFHGEIEDLQQWLTDTERHLLASKPLGGLPETAKEQLNVHMEVCAAFEAKEETYKSLMQKGQQMLARCPKSAETNIDQDINNLKEKWESVETKLNERKTKLEEALNLAMEFHNSLQDFINWLTQAEQTLNVASRPSLILDTVLFQIDEHKVFANEVNSHREQIIELDKTGTHLKYFSQKQDVVLIKNLLISVQSRWEKVVQRLVERGRSLDDARKRAKQFHEAWSKLMEWLEESEKSLDSELEIANDPDKIKTQLAQHKEFQKSLGAKHSVYDTTNRTGRSLKEKTSLADDNLKLDDMLSELRDKWDTICGKSVERQNKLEEALLFSGQFTDALQALIDWLYRVEPQLAEDQPVHGDIDLVMNLIDNHKAFQKELGKRTSSVQALKRSARELIEGSRDDSSWVKVQMQELSTRWETVCALSISKQTRLEAALRQAEEFHSVVHALLEWLAEAEQTLRFHGVLPDDEDALRTLIDQHKEFMKKLEEKRAELNKATTMGDTVLAICHPDSITTIKHWITIIRARFEEVLAWAKQHQQRLASALAGLIAKQELLEALLAWLQWAETTLTDKDKEVIPQEIEEVKALIAEHQTFMEEMTRKQPDVDKVTKTYKRRAADPSSLQSHIPVLDKGRAGRKRFPASSLYPSGSQTQIETKNPRVNLLVSKWQQVWLLALERRRKLNDALDRLEELREFANFDFDIWRKKYMRWMNHKKSRVMDFFRRIDKDQDGKITRQEFIDGILSSKFPTSRLEMSAVADIFDRDGDGYIDYYEFVAALHPNKDAYKPITDADKIEDEVTRQVAKCKCAKRFQVEQIGDNKYRFFLGNQFGDSQQLRLVRILRSTVMVRVGGGWMALDEFLVKNDPCRVHHHGSKMLRSESNSSITTTQPTIGWQPLSLPLPSFLFSFLLFHSCFSHLF

SEQ ID NO: 822640 - protein, 504 aa, Homo sapiens
MEEMTRKQPDVDKVTKTYKRRAADPSSLQSHIPVLDKGRAGRKRFPASSLYPSGSQTQIETKNPRVNLLVSKWQQVWLLALERRRKLNDALDRLEELREFANFDFDIWRKKYMRWMNHKKSRVMDFFRRIDKDQDGKITRQEFIDGILSSKFPTSRLEMSAVADIFDRDGDGYIDYYEFVAALHPNKDAYKPITDADKIEDEVTRQVAKCKCAKRFQVEQIGDNKYRFFLGNQFGDSQQLRLVRILRSTVMVRVGGGWMALDEFLVKNDPCRAKGRTNMELREKFILADGASQGMAAFRPRGRRSRPSSRGASPNRSTSVSSQAAQAASPQVPATTTPKILHPLTRNYGKPWLTNSKMSTPCKAAECSDFPVPSAEGTPIQGSKLRLPGYLSGKGFHSGEDSGLITTAAARVRTQFADSKKTPSRPGSRAGSKAGSRASSRRGSDASDFDISEIQSVCSDVETVPQTHRPTPRAGSRPSTAKPSKIPTPQRKSPASKLDKSSKR

SEQ ID NO: 822641 - protein, 1153 aa, Homo sapiens
NLQNKLEVLNQRWQNVLEKTEQRKQQLDGALRQAKGFHGEIEDLQQWLTDTERHLLASKPLGGLPETAKEQLNVHMEVCAAFEAKEETYKSLMQKGQQMLARCPKSAETNIDQDINNLKEKWESVETKLNERKTKLEEALNLAMEFHNSLQDFINWLTQAEQTLNVASRPSLILDTVLFQIDEHKVFANEVNSHREQIIELDKTGTHLKYFSQKQDVVLIKNLLISVQSRWEKVVQRLVERGRSLDDARKRAKQFHEAWSKLMEWLEESEKSLDSELEIANDPDKIKTQLAQHKEFQKSLGAKHSVYDTTNRTGRSLKEKTSLADDNLKLDDMLSELRDKWDTICGKSVERQNKLEEALLFSGQFTDALQALIDWLYRVEPQLAEDQPVHGDIDLVMNLIDNHKAFQKELGKRTSSVQALKRSARELIEGSRDDSSWVKVQMQELSTRWETVCALSISKQTRLEAALRQAEEFHSVVHALLEWLAEAEQTLRFHGVLPDDEDALRTLIDQHKEFMKKLEEKRAELNKATTMGDTVLAICHPDSITTIKHWITIIRARFEEVLAWAKQHQQRLASALAGLIAKQELLEALLAWLQWAETTLTDKDKEVIPQEIEEVKALIAEHQTFMEEMTRKQPDVDKVTKTYKRRAADPSSLQSHIPVLDKGRAGRKRFPASSLYPSGSQTQIETKNPRVNLLVSKWQQVWLLALERRRKLNDALDRLEELREFANFDFDIWRKKYMRWMNHKKSRVMDFFRRIDKDQDGKITRQEFIDGILSSKFPTSRLEMSAVADIFDRDGDGYIDYYEFVAALHPNKDAYKPITDADKIEDEVTRQVAKCKCAKRFQVEQIGDNKYRFFLGNQFGDSQQLRLVRILRSTVMVRVGGGWMALDEFLVKNDPCRVHHHGSKMLRSESNSSITTTQPTIAKGRTNMELREKFILADGASQGMAAFRPRGRRSRPSSRGASPNRSTSVSSQAAQAASPQVPATTTPKILHPLTRNYGKPWLTNSKMSTPCKAAECSDFPVPSAEGTPIQGSKLRLPGYLSGKGFHSGEDSGLITTAAARVRTQFADSKKTPSRPGSRAGSKAGSRASSRRGSDASDFDISEIQSVCSDVETVPQTHRPTPRAGSRPSTAKPSKIPTPQRKSPASKLDKSSKR

SEQ ID NO: 822642 - protein, 1129 aa, Homo sapiens; identical to SEQ ID NO: 822632

SEQ ID NO: 822643 - protein, 1129 aa, Homo sapiens; identical to SEQ ID NO: 822632

SEQ ID NO: 822644 - protein, 1129 aa, Homo sapiens; identical to SEQ ID NO: 822632

SEQ ID NO: 822645 - protein, 1092 aa, Homo sapiens
NLQNKLEVLNQRWQNVLEKTEQRKQQLDGALRQAKGFHGEIEDLQQWLTDTERHLLASKPLGGLPETAKEQLNVHMEVCAAFEAKEETYKSLMQKGQQMLARCPKSAETNIDQDINNLKEKWESVETKLNERKTKLEEALNLAMEFHNSLQDFINWLTQAEQTLNVASRPSLILDTVLFQIDEHKVFANEVNSHREQIIELDKTGTHLKYFSQKQDVVLIKNLLISVQSRWEKVVQRLVERGRSLDDARKRAKQFHEAWSKLMEWLEESEKSLDSELEIANDPDKIKTQLAQHKEFQKSLGAKHSVYDTTNRTGRSLKEKTSLADDNLKLDDMLSELRDKWDTICGKSVERQNKLEEALLFSGQFTDALQALIDWLYRVEPQLAEDQPVHGDIDLVMNLIDNHKAFQKELGKRTSSVQALKRSARELIEGSRDDSSWVKVQMQELSTRWETVCALSISKQTRLEAALRQAEEFHSVVHALLEWLAEAEQTLRFHGVLPDDEDALRTLIDQHKEFMKKLEEKRAELNKATTMGDTVLAICHPDSITTIKHWITIIRARFEEVLAWAKQHQQRLASALAGLIAKQELLEALLAWLQWAETTLTDKDKEVIPQEIEEVKALIAEHQTFMEEMTRKQPDVDKVTKTYKRRAADPSSLQSHIPVLDKGRAGRKRFPASSLYPSGSQTQIETKNPRVNLLVSKWQQVWLLALERRRKLNDALDRLEELREFANFDFDIWRKKYMRWMNHKKSRVMDFFRRIDKDQDGKITRQEFIDGILSSKFPTSRLEMSAVADIFDRDGDGYIDYYEFVAALHPNKDAYKPITDADKIEDEVTRQVAKCKCAKRFQVEQIGDNKYRFFLGNQFGDSQQLRLVRILRSTVMVRVGGGWMALDEFLVKNDPCRAKGRTNMELREKFILADGASQGMAAFRPRGRRSRPSSRGASPNRSTSVSSQAAQAASPQVPATTTPKGTPIQGSKLRLPGYLSGKGFHSGEDSGLITTAAARVRTQFADSKKTPSRPGSRAGSKAGSRASSRRGSDASDFDISEIQSVCSDVETVPQTHRPTPRAGSRPSTAKPSKIPTPQRKSPASKLDKSSKR

SEQ ID NO: 822646 - protein, 293 aa, Homo sapiens
MHCKGMHLTFCYAELELAWQKDVLEILNVISGARWPFFPLTIERLFFSVFSLCALLCVYNPAKGRTNMELREKFILADGASQGMAAFRPRGRRSRPSSRGASPNRSTSVSSQAAQAASPQVPATTTPKILHPLTRNYGKPWLTNSKMSTPCKAAECSDFPVPSAEGTPIQGSKLRLPGYLSGKGFHSGEDSGLITTAAARVRTQFADSKKTPSRPGSRAGSKAGSRASSRRGSDASDFDISEIQSVCSDVETVPQTHRPTPRAGSRPSTAKPSKIPTPQRKSPASKLDKSSKR

SEQ ID NO: 822647 - protein, 1010 aa, Homo sapiens
NLQNKLEVLNQRWQNVLEKTEQRKQQLDGALRQAKGFHGEIEDLQQWLTDTERHLLASKPLGGLPETAKEQLNVHMEVCAAFEAKEETYKSLMQKGQQMLARCPKSAETNIDQDINNLKEKWESVETKLNERKTKLEEALNLAMEFHNSLQDFINWLTQAEQTLNVASRPSLILDTVLFQIDEHKVFANEVNSHREQIIELDKTGTHLKYFSQKQDVVLIKNLLISVQSRWEKVVQRLVERGRSLDDARKRAKQFHEAWSKLMEWLEESEKSLDSELEIANDPDKIKTQLAQHKEFQKSLGAKHSVYDTTNRTGRSLKEKTSLADDNLKLDDMLSELRDKWDTICGKSVERQNKLEEALLFSGQFTDALQALIDWLYRVEPQLAEDQPVHGDIDLVMNLIDNHKAFQKELGKRTSSVQALKRSARELIEGSRDDSSWVKVQMQELSTRWETVCALSISKQTRLEAALRQAEEFHSVVHALLEWLAEAEQTLRFHGVLPDDEDALRTLIDQHKEFMKKLEEKRAELNKATTMGDTVLAICHPDSITTIKHWITIIRARFEEVLAWAKQHQQRLASALAGLIAKQELLEALLAWLQWAETTLTDKDKEVIPQEIEEVKALIAEHQTFMEEMTRKQPDVDKVTKTYKRRAADPSSLQSHIPVLDKGRAGRKRFPASSLYPSGSQTQIETKNPRVNLLVSKWQQVWLLALERRRKLNDALDRLEELREFANFDFDIWRKKYMRWMNHKKSRVMDFFRRIDKDQDGKITRQEFIDGILSSKFPTSRLEMSAVADIFDRDGDGYIDYYEFVAALHPNKDAYKPITDADKIEDEVTRQVAKCKCAKRFQVEQIGDNKYRFFLGNQFGDSQQLRLVRILRSTVMVRVGGGWMALDEFLVKNDPCRAKGRTNMELREKFILADGASQGMAAFRPRGRRSRPSSRGASPNRSTSVSSQAAQAASPQVPATTTPKILHPLTRNYGKPWLTNSKMERQYKEASFDFQDIYQGKASTLGRTVA

SEQ ID NO: 822648 - protein, 1092 aa, Homo sapiens; identical to SEQ ID NO: 822645

SEQ ID NO: 822649 - protein, 1164 aa, Homo sapiens
NLQNKLEVLNQRWQNVLEKTEQRKQQLDGALRQAKGFHGEIEDLQQWLTDTERHLLASKPLGGLPETAKEQLNVHMEVCAAFEAKEETYKSLMQKGQQMLARCPKSAETNIDQDINNLKEKWESVETKLNERKTKLEEALNLAMEFHNSLQDFINWLTQAEQTLNVASRPSLILDTVLFQIDEHKVFANEVNSHREQIIELDKTGTHLKYFSQKQDVVLIKNLLISVQSRWEKVVQRLVERGRSLDDARKRAKQFHEAWSKLMEWLEESEKSLDSELEIANDPDKIKTQLAQHKEFQKSLGAKHSVYDTTNRTGRSLKEKTSLADDNLKLDDMLSELRDKWDTICGKSVERQNKLEEALLFSGQFTDALQALIDWLYRVEPQLAEDQPVHGDIDLVMNLIDNHKAFQKELGKRTSSVQALKRSARELIEGSRDDSSWVKVQMQELSTRWETVCALSISKQTRLEAALRQAEEFHSVVHALLEWLAEAEQTLRFHGVLPDDEDALRTLIDQHKEFMKKLEEKRAELNKATTMGDTVLAICHPDSITTIKHWITIIRARFEEVLAWAKQHQQRLASALAGLIAKQELLEALLAWLQWAETTLTDKDKEVIPQEIEEVKALIAEHQTFMEEMTRKQPDVDKVTKTYKRRAADPSSLQSHIPVLDKGRAGRKRFPASSLYPSGSQTQIETKNPRVNLLVSKWQQVWLLALERRRKLNDALDRLEELREFANFDFDIWRKKYMRWMNHKKSRVMDFFRRIDKDQDGKITRQEFIDGILSSKFPTSRLEMSAVADIFDRDGDGYIDYYEFVAALHPNKDAYKPITDADKIEDEVTRQVAKCKCAKRFQVEQIGDNKYRFFLGNQFGDSQQLRLVRILRSTVMVRVGGGWMALDEFLVKNDPCRAKGRTNMELREKFILADGASQGMAAFRPRGRRSRPSSRGASPNRSTSVSSQAAQAASPQVPATTTPKILHPLTRNYGKPWLTNSKMSTPCKAAECSDFPVPSAEGTPIQGSKLRLPGYLSGKGFHSGEDSGLITTAAARVRTQFADSKKTPSRPGSRAGSKAGSRASSRRGSDASDFDISEIQSVCSDVETVPQTHRPTPRAGSRPSTAKPSKIPTPQRKSPASEHLLFKFERCKIWCRNSCEILQEASLKFCRWPYLCICLFILSV

SEQ ID NO: 822650 - protein, 189 aa, Homo sapiens
MELREKFILADGASQGMAAFRPRGRRSRPSSRGASPNRSTSVSSQAAQAASPQVPATTTPKGTPIQGSKLRLPGYLSGKGFHSGEDSGLITTAAARVRTQFADSKKTPSRPGSRAGSKAGSRASSRRGSDASDFDISEIQSVCSDVETVPQTHRPTPRAGSRPSTAKPSKIPTPQRKSPASKLDKSSKR

SEQ ID NO: 822651 - protein, 182 aa, Homo sapiens
MTLEYLQCHQVAFRPRGRRSRPSSRGASPNRSTSVSSQAAQAASPQVPATTTPKGTPIQGSKLRLPGYLSGKGFHSGEDSGLITTAAARVRTQFADSKKTPSRPGSRAGSKAGSRASSRRGSDASDFDISEIQSVCSDVETVPQTHRPTPRAGSRPSTAKPSKIPTPQRKSPASKLDKSSKR

SEQ ID NO: 822652 - protein, 1157 aa, Homo sapiens
NLQNKLEVLNQRWQNVLEKTEQRKQQLDGALRQAKGFHGEIEDLQQWLTDTERHLLASKPLGGLPETAKEQLNVHMEVCAAFEAKEETYKSLMQKGQQMLARCPKSAETNIDQDINNLKEKWESVETKLNERKTKLEEALNLAMEFHNSLQDFINWLTQAEQTLNVASRPSLILDTVLFQIDEHKVFANEVNSHREQIIELDKTGTHLKYFSQKQDVVLIKNLLISVQSRWEKVVQRLVERGRSLDDARKRAKQFHEAWSKLMEWLEESEKSLDSELEIANDPDKIKTQLAQHKEFQKSLGAKHSVYDTTNRTGRSLKEKTSLADDNLKLDDMLSELRDKWDTICGKSVERQNKLEEALLFSGQFTDALQALIDWLYRVEPQLAEDQPVHGDIDLVMNLIDNHKAFQKELGKRTSSVQALKRSARELIEGSRDDSSWVKVQMQELSTRWETVCALSISKQTRLEAALRQAEEFHSVVHALLEWLAEAEQTLRFHGVLPDDEDALRTLIDQHKEFMKKLEEKRAELNKATTMGDTVLAICHPDSITTIKHWITIIRARFEEVLAWAKQHQQRLASALAGLIAKQELLEALLAWLQWAETTLTDKDKEVIPQEIEEVKALIAEHQTFMEEMTRKQPDVDKVTKTYKRRAADPSSLQSHIPVLDKGRAGRKRFPASSLYPSGSQTQIETKNPRVNLLVSKWQQVWLLALERRRKLNDALDRLEELREFANFDFDIWRKKYMRWMNHKKSRVMDFFRRIDKDQDGKITRQEFIDGILSSKFPTSRLEMSAVADIFDRDGDGYIDYYEFVAALHPNKDAYKPITDADKIEDEVTRQVAKCKCAKRFQVEQIGDNKYRFFLGNQFGDSQQLRLVRILRSTVMVRVGGGWMALDEFLVKNDPCRAKGRTNMELREKFILADGASQGMAAFRPRGRRSRPSSRGASPNRSTSVSSQAAQAASPQVPATTTPKILHPLTRNYGKPWLTNSKMSTPCKAAECSDFPVPSAEGTPIQGSKLRLPGYLSGKGFHSGEDSGLITTAAARVRTQFADSKKTPSRPGSRAGSKAGSRASSRRGSDASDFDISEIQSVCSDVETVPQTHRPTPRAGSRPSTAKPSKIPTPQRKSPASPKDPVINSEFYTGWLDHWGQPHSTIKTEAVASSLYD

SEQ ID NO: 822653 - protein, 429 aa, Homo sapiens
NLQNKLEVLNQRWQNVLEKTEQRKQQLDGALRQAKGFHGEIEDLQQWLTDTERHLLASKPLGGLPETAKEQLNVHMEVCAAFEAKEETYKSLMQKGQQMLARCPKSAETNIDQDINNLKEKWESVETKLNERKTKLEEALNLAMEFHNSLQDFINWLTQAEQTLNVASRPSLILDTVLFQIDEHKVFANEVNSHREQIIELDKTGTHLKYFSQKQDVVLIKNLLISVQSRWEKVVQRLVERGRSLDDARKRAKQFHEAWSKLMEWLEESEKSLDSELEIANDPDKIKTQLAQHKEFQKSLGAKHSVYDTTNRTGRSLKEKTSLADDNLKLDDMLSELRDKWDTICGKSVERQNKLEEALLFSGQFTDALQALIDWLYRVEPQLAEDQPVHGDIDLVMNLIDNHKVLLSGTFYFILFDYSECTGNVNHLN

SEQ ID NO: 822654 - protein, 745 aa, Homo sapiens
NLQNKLEVLNQRWQNVLEKTEQRKQQLDGALRQAKGFHGEIEDLQQWLTDTERHLLASKPLGGLPETAKEQLNVHMEVCAAFEAKEETYKSLMQKGQQMLARCPKSAETNIDQDINNLKEKWESVETKLNERKTKLEEALNLAMEFHNSLQDFINWLTQAEQTLNVASRPSLILDTVLFQIDEHKVFANEVNSHREQIIELDKTGTHLKYFSQKQDVVLIKNLLISVQSRWEKVVQRLVERGRSLDDARKRAKQFHEAWSKLMEWLEESEKSLDSELEIANDPDKIKTQLAQHKEFQKSLGAKHSVYDTTNRTGRSLKEKTSLADDNLKLDDMLSELRDKWDTICGKSVERQNKLEEALLFSGQFTDALQALIDWLYRVEPQLAEDQPVHGDIDLVMNLIDNHKAFQKELGKRTSSVQALKRSARELIEGSRDDSSWVKVQMQELSTRWETVCALSISKQTRLEAALRQAEEFHSVVHALLEWLAEAEQTLRFHGVLPDDEDALRTLIDQHKEFMKKLEEKRAELNKATTMGDTVLAICHPDSITTIKHWITIIRARFEEVLAWAKQHQQRLASALAGLIAKQELLEALLAWLQWAETTLTDKDKEVIPQEIEEVKALIAEHQTFMEEMTRKQPDVDKVTKTYKRRAADPSSLQSHIPVLDKGRAGRKRFPASSLYPSGSQTQIETKNPRVNLLVSKWQQVWLLALERRRKLNDALDRLEELREFANFDLMLTTGILWNDMHPDT

SEQ ID NO: 822655 - protein, 750 aa, Homo sapiens
NLQNKLEVLNQRWQNVLEKTEQRKQQLDGALRQAKGFHGEIEDLQQWLTDTERHLLASKPLGGLPETAKEQLNVHMEVCAAFEAKEETYKSLMQKGQQMLARCPKSAETNIDQDINNLKEKWESVETKLNERKTKLEEALNLAMEFHNSLQDFINWLTQAEQTLNVASRPSLILDTVLFQIDEHKVFANEVNSHREQIIELDKTGTHLKYFSQKQDVVLIKNLLISVQSRWEKVVQRLVERGRSLDDARKRAKQFHEAWSKLMEWLEESEKSLDSELEIANDPDKIKTQLAQHKEFQKSLGAKHSVYDTTNRTGRSLKEKTSLADDNLKLDDMLSELRDKWDTICGKSVERQNKLEEALLFSGQFTDALQALIDWLYRVEPQLAEDQPVHGDIDLVMNLIDNHKAFQKELGKRTSSVQALKRSARELIEGSRDDSSWVKVQMQELSTRWETVCALSISKQTRLEAALRQAEEFHSVVHALLEWLAEAEQTLRFHGVLPDDEDALRTLIDQHKEFMKKLEEKRAELNKATTMGDTVLAICHPDSITTIKHWITIIRARFEEVLAWAKQHQQRLASALAGLIAKQELLEALLAWLQWAETTLTDKDKEVIPQEIEEVKALIAEHQTFMEEMTRKQPDVDKVTKTYKRRAADPSSLQSHIPVLDKGRAGRKRFPASSLYPSGSQTQIETKNPRVNLLVSKWQQVWLLALERRRKLNDALDRLEEVWKFIPSTPHCHLPSFLITHCHCQNLGIF

SEQ ID NO: 822656 - protein, 357 aa, Homo sapiens
NRQLEGISVVAQQFHETLEPLNEWLTTIEKRLVNCEPIGTQASKLEEQIAQHKALEDDIINHNKHLHQAVSIGQSLKVLSSREDKDMVQSKLDFSQVWYIEIQEKSHSRSELLQQALCNAKIFGEDEVELMNWLNEVHDKLSKLSVQDYSTEGLWKQQSELRVLQEDILLRKQNVDQALLNGLELLKQTTGDEVLIIQDKLEAIKARYKDITKLSTDVAKTLEQALQLARRLHSTHEELCTWLDKVEVELLSYETQVLKGEEASQAQMRPKELKKEAKNNKALLDSLNEVSSALLELVPWRAREGLEKMVAEDNERYRLVSDTITQKVEEIDAAILRSQQFDQAADAELSWITETEK

SEQ ID NO: 822657 - protein, 248 aa, Homo sapiens
NRQLEGISVVAQQFHETLEPLNEWLTTIEKRLVNCEPIGTQASKLEEQIAQHKVLQEDILLRKQNVDQALLNGLELLKQTTGDEVLIIQDKLEAIKARYKDITKLSTDVAKTLEQALQLARRLHSTHEELCTWLDKVEVELLSYETQVLKGEEASQAQMRPKELKKEAKNNKALLDSLNEVSSALLELVPWRAREGLEKMVAEDNERYRLVSDTITQKVEEIDAAILRSQQFDQAADAELSWITETEK

SEQ ID NO: 822658 - protein, 1475 aa, Homo sapiens
MASGAGGVGGGGGGKIRTRRCHQGPIKPYQQGRQQHQGILSRVTESVKNIVPGWLQRYFNKNEDVCSCSTDTSEVPRWPENKEDHLVYADEESSNITDGRITPEPAVSNTEEPSTTSTASNYPDVLTRPSLHRSHLNFSMLESPALHCQPSTSSAFPIGSSGFSLVKEIKDSTSQHDDDNISTTSGFSSRASDKDITVSKNTSLPPLWSPEAERSHSLSQHTATSSKKPAFNLSAFGTLSPSLGNSSILKTSQLGDSPFYPGKTTYGGAAAAVRQSKLRNTPYQAPVRRQMKAKQLSAQSYGVTSSTARRILQSLEKMSSPLADAKRIPSIVSSPLNSPLDRSGIDITDFQAKREKVDSQYPPVQRLMTPKPVSIATNRSVYFKPSLTPSGEFRKTNQRIDNKCSTGYEKNMTPGQNREQRESGFSYPNFSLPAANGLSSGVGGGGGKMRRERHAFVASKPLEEEEMEVPVLPKISLPITSSSLPTFNFSSPEITTSSPSPINSSQALTNKVQMTSPSSTGSPMFKFSSPIVKSTEANVLPPSSIGFTFSVPVAKTAELSGSSSTLEPIISSSAHHVTTVNSTNCKKTPPEDCEGPFRPAEILKEGSVLDILKSPGFASPKIDSVAAQPTATSPVVYTRPAISSFSSSGIGFGESLKAGSSWQCDTCLLQNKVTDNKCIACQAAKLSPRDTAKQTGIETPNKSGKTTLSASGTGFGDKFKPVIGTWDCDTCLVQNKPEAIKCVACETPKPGTCVKRALTLTVVSESAETMTASSSSCTVTTGTLGFGDKFKRPIGSWECSVCCVSNNAEDNKCVSCMSEKPGSSVPTSSSSTVPVSLPSGGSLGLEKFKKPEGSWDCELCLVQNKADSTKCLACESAKPGTKSGFKGFDTSSSSSNSAASSSFKFGVSSSSSGPSQTLTSTGNFKFGDQGGFKIGVSSDSGSINPMSEGFKFSKPIGDFKFGVSSESKPEEVKKDSKNDNFKFGLSSGLSNPVSLTPFQFGVSNLGQEEKKEELPKSSSAGFSFGTGVINSTPAPANTIVTSENKSSFNLGTIETKSASVAPFTCKTSEAKKEEMPATKGGFSFGNVEPASLPSASVFVLGRTEEKQQEPVTSTSLVFGKKADNEEPKCQPVFSFGNSEQTKDENSSKSTFSFSMTKPSEKESEQPAKATFAFGAQTSTTADQGAAKPVFSFLNNSSSSSSTPATSAGGGIFGSSTSSSNPPVATFVFGQSSNPVSSSAFGNTAESSTSQSLLFSQDSKLATTSSTGTAVTPFVFGPGASSNNTTTSGFGFGATTTSSSAGSSFVFGTGPSAPSASPAFGANQTPTFGQSQGASQPNPPGFGSISSSTALFPTGSQPAPPTFGTVSSSSQPPVFGQQPSQSAFGSGTTPNSSSAFQFGSSTTNFNFTNNSPSGVFTFGANSSTPAASAQPSGSGGFPFNQSPAAFTVGSNGKNVFSSSGTSFSGRKIKTAVRRRK

SEQ ID NO: 822659 - protein, 1475 aa, Homo sapiens [sequence omitted]

SEQ ID NO: 822660 - protein, 1457 aa, Homo sapiens
MASGAGGVGGGGGGKIRTRRCHQGPIKPYQQGRQQHQGILSRVTESVKNIVPGWLQRYFNKNEDVCSCSTDTSEVPRWPENKEDHLVYADEESSNITDGRITPEPAVSNTEEPSTTSTASNYPDVLTRPSLHRSHLNFSMLESPALHCQPSTSSAFPIGSSGFSLVKEIKDSTSQHDDDNISTTSGFSSRASDKDITVSKNTSLPPLWSPEAERSHSLSQHTATSSKKPAFNLSAFGTLSPSLGNSSILKTSQLGDSPFYPGKTTYGGAAAAVRQSKLRNTPYQAPVRRQMKAKQLSAQSYGVTSSTARRILQSLEKMSSPLADAKRIPSIVSSPLNSVDSQYPPVQRLMTPKPVSIATNRSVYFKPSLTPSGEFRKTNQRIDNKCSTGYEKNMTPGQNREQRESGFSYPNFSLPAANGLSSGVGGGGGKMRRERHAFVASKPLEEEEMEVPVLPKISLPITSSSLPTFNFSSPEITTSSPSPINSSQALTNKVQMTSPSSTGSPMFKFSSPIVKSTEANVLPPSSIGFTFSVPVAKTAELSGSSSTLEPIISSSAHHVTTVNSTNCKKTPPEDCEGPFRPAEILKEGSVLDILKSPGFASPKIDSVAAQPTATSPVVYTRPAISSFSSSGIGFGESLKAGSSWQCDTCLLQNKVTDNKCIACQAAKLSPRDTAKQTGIETPNKSGKTTLSASGTGFGDKFKPVIGTWDCDTCLVQNKPEAIKCVACETPKPGTCVKRALTLTVVSESAETMTASSSSCTVTTGTLGFGDKFKRPIGSWECSVCCVSNNAEDNKCVSCMSEKPGSSVPTSSSSTVPVSLPSGGSLGLEKFKKPEGSWDCELCLVQNKADSTKCLACESAKPGTKSGFKGFDTSSSSSNSAASSSFKFGVSSSSSGPSQTLTSTGNFKFGDQGGFKIGVSSDSGSINPMSEGFKFSKPIGDFKFGVSSESKPEEVKKDSKNDNFKFGLSSGLSNPVSLTPFQFGVSNLGQEEKKEELPKSSSAGFSFGTGVINSTPAPANTIVTSENKSSFNLGTIETKSASVAPFTCKTSEAKKEEMPATKGGFSFGNVEPASLPSASVFVLGRTEEKQQEPVTSTSLVFGKKADNEEPKCQPVFSFGNSEQTKDENSSKSTFSFSMTKPSEKESEQPAKATFAFGAQTSTTADQGAAKPVFSFLNNSSSSSSTPATSAGGGIFGSSTSSSNPPVATFVFGQSSNPVSSSAFGNTAESSTSQSLLFSQDSKLATTSSTGTAVTPFVFGPGASSNNTTTSGFGFGATTTSSSAGSSFVFGTGPSAPSASPAFGANQTPTFGQSQGASQPNPPGFGSISSSTALFPTGSQPAPPTFGTVSSSSQPPVFGQQPSQSAFGSGTTPNSSSAFQFGSSTTNFNFTNNSPSGVFTFGANSSTPAASAQPSGSGGFPFNQSPAAFTVGSNGKNVFSSSGTSFSGRKIKTAVRRRK

SEQ ID NO: 822661 - protein, 1403 aa, Homo sapiens
MASGAGGVGGGGGGKIRTRRCHQGPIKPYQQGRQQHQGILSRVTESVKNIVPGWLQRYFNKNEDVCSCSTDTSEVPRWPENKEDHLVYADEESSNITDGRITPEPAVSNTEEPSTTSTASNYPDVLTRPSLHRSHLNFSMLESPALHCQPSTSSAFPIGSSGFSLVKEIKDSTSQHDDDNISTTSGFSSRASDKDITVSKNTSLPPLWSPEAERSHSLSQHTATSSKKPAFNLSAFGTLSPSLGNSSILKTSQLGDSPFYPGKTTYGGAAAAVRQSKLRNTPYQVDSQYPPVQRLMTPKPVSIATNRSVYFKPSLTPSGEFRKTNQRIDNKCSTGYEKNMTPGQNREQRESGFSYPNFSLPAANGLSSGVGGGGGKMRRERHAFVASKPLEEEEMEVPVLPKISLPITSSSLPTFNFSSPEITTSSPSPINSSQALTNKVQMTSPSSTGSPMFKFSSPIVKSTEANVLPPSSIGFTFSVPVAKTAELSGSSSTLEPIISSSAHHVTTVNSTNCKKTPPEDCEGPFRPAEILKEGSVLDILKSPGFASPKIDSVAAQPTATSPVVYTRPAISSFSSSGIGFGESLKAGSSWQCDTCLLQNKVTDNKCIACQAAKLSPRDTAKQTGIETPNKSGKTTLSASGTGFGDKFKPVIGTWDCDTCLVQNKPEAIKCVACETPKPGTCVKRALTLTVVSESAETMTASSSSCTVTTGTLGFGDKFKRPIGSWECSVCCVSNNAEDNKCVSCMSEKPGSSVPTSSSSTVPVSLPSGGSLGLEKFKKPEGSWDCELCLVQNKADSTKCLACESAKPGTKSGFKGFDTSSSSSNSAASSSFKFGVSSSSSGPSQTLTSTGNFKFGDQGGFKIGVSSDSGSINPMSEGFKFSKPIGDFKFGVSSESKPEEVKKDSKNDNFKFGLSSGLSNPVSLTPFQFGVSNLGQEEKKEELPKSSSAGFSFGTGVINSTPAPANTIVTSENKSSFNLGTIETKSASVAPFTCKTSEAKKEEMPATKGGFSFGNVEPASLPSASVFVLGRTEEKQQEPVTSTSLVFGKKADNEEPKCQPVFSFGNSEQTKDENSSKSTFSFSMTKPSEKESEQPAKATFAFGAQTSTTADQGAAKPVFSFLNNSSSSSSTPATSAGGGIFGSSTSSSNPPVATFVFGQSSNPVSSSAFGNTAESSTSQSLLFSQDSKLATTSSTGTAVTPFVFGPGASSNNTTTSGFGFGATTTSSSAGSSFVFGTGPSAPSASPAFGANQTPTFGQSQGASQPNPPGFGSISSSTALFPTGSQPAPPTFGTVSSSSQPPVFGQQPSQSAFGSGTTPNSSSAFQFGSSTTNFNFTNNSPSGVFTFGANSSTPAASAQPSGSGGFPFNQSPAAFTVGSNGKNVFSSSGTSFSGRKIKTAVRRRK

SEQ ID NO: 822662 - protein, 1384 aa, Homo sapiens
MASGAGGVGGGGGGKIRTRRCHQGPIKPYQQGRQQHQGILSRVTESVKNIVPGWLQRYFNKNEDVCSCSTDTSEVPRWPENKEDHLVYADEESSNITDGRITPEPAVSNTEEPSTTSTASNYPDVLTRPSLHRSHLNFSMLESPALHCQPSTSSAFPIGSSGFSLVKEIKDSTSQHDDDNISTTSGFSSRASDKDITVSKNTSLPPLWSPEAERSHSLSQHTATSSKKPAFNLSAFGTLSPSLGNSSILKTSQLGDSPFYPGKTTYGGAAAAVRQSKLRNTPYQAPVRRQMKAKQLSAQSYGVTSSTARRILQSLEKMSSPLADAKRIPSIVSSPLNSPLDRSGIDITDFQAKREKVDSQYPPVQRLMTPKPVSIATNRSVYFKPSLTPSGEFRKTNQRIDNKCSTGYEKNMTPGQNREQRESGFSYPNFSLPAANGLSSGVGGGGGKMRRERHAFVASKPLEEEEMEVPVLPKISLPITSSSLPTFNFSSPEITTSSPSPINSSQALTNKVQMTSPSSTGSPMFKFSSPIVKSTEANVLPPSSIGFTFSVPVAKTAELSGSSSTLEPIISSSAHHVTTVNSTNCKKTPPEDCEGPFRPAEILKEGSVLDILKSPGFASPKIDSVAAQPTATSPVVYTRPAISSFSSSGIGFGESLKAGSSWQCDTCLLQNKVTDNKCIACQAAKLSPRDTAKQTGIETPNKSGKTTLSASGTGFGDKFKPVIGTWDCDTCLVQNKPEAIKCVACETPKPGTCVKRALTLTVVSESAETMTASSSSCTVTTGTLGFGDKFKRPIGSWECSVCCVSNNAEDNKCVSCMSEKPGSSVPTSSSSTVPVSLPSGGSLGLEKFKKPEGSWDCELCLVQNKADSTKCLACESAKPGTKSGFKGFDTSSSSSNSAASSSFKFGVSSSSSGPSQTLTSTGNFKFGDQGGFKIGVSSDSGSINPMSEGFKFSKPIGDFKFGVSSESKPEEVKKDSKNDNFKFGLSSGLSNPVSLTPFQFGVSNLGQEEKKEELPKSSSAGFSFGTGVINSTPAPANTIVTSENKSSFNLGTIETKSASVAPFTCKTSEAKKEEMPATKGGFSFGNVEPASLPSASVFVLGRTEEKQQEPVTSTSLVFGKKADNEEPKCQPVFSFGNSEQTKDENSSKSTFSFSMTKPSEKESEQPAKATFAFGAQTSTTADQGAAKPVFSFLNNSSSSSSTPATSAGGGIFGSSTSSSNPPVATFVFGQSSNPVSSSAFGNTAESSTSQSLLFSQDSKLATTSSTGTAVTPFVFGPGASSNNTTTSGFGFGATTTSSSAGSAFQFGSSTTNFNFTNNSPSGVFTFGANSSTPAASAQPSGSGGFPFNQSPAAFTVGSNGKNVFSSSGTSFSGRKIKTAVRRRK

SEQ ID NO: 822663 - protein, 1091 aa, Homo sapiens
MTEFLVFDCQETNQRIDYKCSTGYEKNMTPGQNREQRESGFSYPNFSLPAANGLSSGVGGGGGKMRRERHAFVASKPLEEEEMEVPVLPKISLPITSSSLPTFNFSSPEITTSSPSPINSSQALTNKVQMTSPSSTGSPMFKFSSPIVKSTEANVLPPSSIGFTFSVPVAKTAELSGSSSTLEPIISSSAHHVTTVNSTNCKKTPPEDCEGPFRPAEILKEGSVLDILKSPGFASPKIDSVAAQPTATSPVVYTRPAISSFSSSGIGFGESLKAGSSWQCDTCLLQNKVTDNKCIACQAAKLSPRDTAKQTGIETPNKSGKTTLSASGTGFGDKFKPVIGTWDCDTCLVQNKPEAIKCVACETPKPGTCVKRALTLTVVSESAETMTASSSSCTVTTGTLGFGDKFKRPIGSWECSVCCVSNNAEDNKCVSCMSEKPGSSVPTSSSSTVPVSLPSGGSLGLEKFKKPEGSWDCELCLVQNKADSTKCLACESAKPGTKSGFKGFDTSSSSSNSAASSSFKFGVSSSSSGPSQTLTSTGNFKFGDQGGFKIGVSSDSGSINPMSEGFKFSKPIGDFKFGVSSESKPEEVKKDSKNDNFKFGLSSGLSNPVSLTPFQFGVSNLGQEEKKEELPKSSSAGFSFGTGVINSTPAPANTIVTSENKSSFNLGTIETKSASVAPFTCKTSEAKKEEMPATKGGFSFGNVEPASLPSASVFVLGRTEEKQQEPVTSTSLVFGKKADNEEPKCQPVFSFGNSEQTKDENSSKSTFSFSMTKPSEKESEQPAKATFAFGAQTSTTADQGAAKPVFSFLNNSSSSSSTPATSAGGGIFGSSTSSSNPPVATFVFGQSSNPVSSSAFGNTAESSTSQSLLFSQDSKLATTSSTGTAVTPFVFGPGASSNNTTTSGFGFGATTTSSSAGSSFVFGTGPSAPSASPAFGANQTPTFGQSQGASQPNPPGFGSISSSTALFPTGSQPAPPTFGTVSSSSQPPVFGQQPSQSAFGSGTTPNSSSAFQFGSSTTNFNFTNNSPSGVFTFGANSSTPAASAQPSGSGGFPFNQSPAAFTVGSNGKNVFSSSGTSFSGRKIKTAVRRRK

SEQ ID NO: 822664 - protein, 1448 aa, Homo sapiens
MASGAGGVGGGGGGKIRTRRCHQGPIKPYQQGRQQHQGILSRVTESVKNIVPGWLQRYFNKNEDVCSCSTDTSEVPRWPENKEDHLVYADEESSNITDGRITPEPAVSNTEEPSTTSTASNYPDVLTRPSLHRSHLNFSMLESPALHCQPSTSSAFPIGSSGFSLVKEIKDSTSQHDDDNISTTSGFSSRASDKDITVSKNTSLPPLWSPEAERSHSLSQHTATSSKKPAFNLSAFGTLSPSLGNSSILKTSQLGDSPFYPGKTTYGGAAAAVRQSKLRNTPYQAPVRRQMKAKQLSAQSYGVTSSTARRILQSLEKMSSPLADAKRIPSIVSSPLNSPLDRSGIDITDFQAKREKVDSQYPPVQRLMTPKPVSIATNRSVYFKPSLTPSGEFRKTNQRIDNKCSTGYEKNMTPGQNREQRESGFSYPNFSLPAANGLSSGVGGGGGKMRRERHAFVASKPLEEEEMEVPVLPKISLPITSSSLPTFNFSSPEITTSSPSPINSSQALTNKVQMTSPSSTGSPMFKFSSPIVKSTEANVLPPSSIGFTFSVPVAKTAELSGSSSTLEPIISSSAHHVTTVNSTNCKKTPPEDCEGPFRPAEILKEGSVLDILKSPGFASPKIDSVAAQPTATSPVVYTRPAISSFSSSGIGFGESLKAGSSWQCDTCLLQNKVTDNKCIACQAAKLSPRDTAKQTGIETPNKSGKTTLSASGTGFGDKFKPVIGTWDCDTCLVQNKPEAIKCVACETPKPGTCVKRALTLTVVSESAETMTASSSSCTVTTGTLGFGDKFKRPIGSWECSVCCVSNNAEDNKCVSCMSEKPGSSVPTSSSSTVPVSLPSGGSLGLEKFKKPEGSWDCELCLVQNKADSTKCLACESAKPGTKSGFKGFDTSSSSSNSAASSSFKFGVSSSSSGPSQTLTSTGNFKFGDQGGFKIGVSSDSGSINPMSEGFKFSKPIGDFKFGVSSESKPEEVKKDSKNDNFKFGLSSGLSNPVSLTPFQFGVSNLGQEEKKEELPKSSSAGFSFGTGVINSTPAPANTIVTSENKSSFNLGTIETKSASVAPFTCKTSEAKKEEMPATKGGFSFGNVEPASLPSASVFVLGRTEEKQQEPVTSTSLVFGKKADNEEPKCQPVFSFGNSEQTKDENSSKSTFSFSMTKPSEKESEQPAKATFAFGAQTSTTADQGAAKPVFSFLNNSSSSSSTPATSAGGGIFGSSTSSSNPPVATFVFGQSSNPVSSSAFGNTAESSTSQSLLFSQDSKLATTSSTGTAVTPFVFGPGASSNNTTTSGFGFGATTTSSSAGSSFVFGTGPSAPSASPAFGANQTPTFGQSQGASQPNPPGFGSISSSTALFPTGSQPAPPTFGTVSSSSQPPVFGQQPSQSAFGSGTTPNSSSAFQFGSSTTNFNFTNNSPSGVFTFGANSSTPAASAQPSGSGGFPFNQSPAAFTVG

SEQ ID NO: 822665 - protein, 1475 aa, Homo sapiens; identical to SEQ ID NO: 822658

SEQ ID NO: 822666 - protein, 1475 aa, Homo sapiens; identical to SEQ ID NO: 822658

SEQ ID NO: 822667 - protein, 1475 aa, Homo sapiens; identical to SEQ ID NO: 822658

SEQ ID NO: 822668 - protein, 575 aa, Homo sapiens
MASGAGGVGGGGGGKIRTRRCHQGPIKPYQQGRQQHQGILSRVTESVKNIVPGWLQRYFNKNEDVCSCSTDTSEVPRWPENKEDHLVYADEESSNITDGRITPEPAVSNTEEPSTTSTASNYPDVLTRPSLHRSHLNFSMLESPALHCQPSTSSAFPIGSSGFSLVKEIKDSTSQHDDDNISTTSGFSSRASDKDITVSKNTSLPPLWSPEAERSHSLSQHTATSSKKPAFNLSAFGTLSPSLGNSSILKTSQLGDSPFYPGKTTYGGAAAAVRQSKLRNTPYQAPVRRQMKAKQLSAQSYGVTSSTARRILQSLEKMSSPLADAKRIPSIVSSPLNSPLDRSGIDITDFQAKREKVDSQYPPVQRLMTPKPVSIATNRSVYFKPSLTPSGEFRKTNQRIDNKCSTGYEKNMTPGQNREQRESGFSYPNFSLPAANGLSSGVGGGGGKMRRERHAFVASKPLEEEEMEVPVLPKISLPITSSSLPTFNFSSPEITTSSPSPINSSQALTNKVQMTSPSSTGSPMFKFSSPIVKSTEANVLPPSSIGFTFSVPVAKTAELSGSSSTLEPIISSSGK

SEQ ID NO: 822669 - protein, 333 aa, Homo sapiens
MASGAGGVGGGGGGKIRTRRCHQGPIKPYQQGRQQHQGILSRVTESVKNIVPGWLQRYFNKNEDVCSCSTDTSEVPRWPENKEDHLVYADEESSNITDGRITPEPAVSNTEEPSTTSTASNYPDVLTRPSLHRSHLNFSMLESPALHCQPSTSSAFPIGSSGFSLVKEIKDSTSQHDDDNISTTSGFSSRASDKDITVSKNTSLPPLWSPEAERSHSLSQHTATSSKKPAFNLSAFGTLSPSLGNSSILKTSQLGDSPFYPGKTTYGGAAAAVRQSKLRNTPYQAPVRRQMKAKQLSALLIYSLISLPEFTRRSQRWFKINTSICCYGNWLLV

SEQ ID NO: 822670 - protein, 194 aa, Homo sapiens
MASGAGGVGGGGGGKIRTRRCHQGPIKPYQQGRQQHQGILSRVTESVKNIVPGWLQRYFNKNEDVCSCSTDTSEVPRWPENKEDHLVYADEESSNITDGRITPEPAVSNTEEPSTTSTASNYPDVLTRPSLHRSHLNFSMLESPALHCQPSTSSAFPIGSSGFSLVKEIKDSTSHQDPEQSQLQHIHQQTMFNQ

SEQ ID NO: 822671 - protein, 519 aa, Homo sapiens
MFETEADEKREMALEEGKGPGAEDSPPSKEPSPGQELPPGQDLPPNKDSPSGQEPAPSQEPLSSKDSATSEGSPPGPDAPPSKDVPPCQEPPPAQDLSPCQDLPAGQEPLPHQDPLLTKDLPAIQESPTRDLPPCQDLPPSQVSLPAKALTEDTMSSGDLLAATGDPPAAPRPAFVIPEVRLDSTYSQKAGAEQGCSGDEEDAEEAEEVEEGEEGEEDEDEDTSDDNYGERSEAKRSSMIETGQGAEGGLSLRVQNSLRRRTHSEGSLLQEPRGPCFASDTTLHCSDGEGAASTWGMPSPSTLKKELGRNGGSMHHLSLFFTGHRKMSGADTVGDDDEASRKRKSKNLAKDMKNKLGIFRRRNESPGAPPAGKADKMMKSFKPTSEEALKWGESLEKLLVHKYGLAVFQAFLRTEFSEENLEFWLACEDFKKVKSQSKMASKAKKIFAEYIAIQACKEVNLDSYTREHTKDNLQSVTRGCFDLAQKRIFGLMEKDSYPRFLRSDLYLDLINQKKMSPPL

SEQ ID NO: 822672 - protein, 519 aa, Homo sapiens; identical to SEQ ID NO: 822671

SEQ ID NO: 822673 - protein, 340 aa, Homo sapiens
MVPQVKPGPDGGVLRRASCKSTHDLQSPPNKREKNCTHGVQARPEQRHSCHLVCDSSDGLLLGGWERYTEVAKRGGQHTLPALSRATAPTDPNYIILAPLNPGSQLLRPVYQEDTIPEESGSPSKGKSYTGLGKKSRLMKTVQTMKGHGNYQNCPVVRPHATHSSYGTYVTLAPKVLVFPVFVQPLDLCNPARTLLLSEELLLYEGRNKAAEVTLFAYSDLLLFTKEDEPGRCDVLRNPLYLQSVKLQEGSSEDLKFCVLYLAEKAECLFTLEAHSQEQKKRVCWCLSENIAKQQQLAASPPDSKKLHPFGSLQQEMGPVNSTNATQDRSFTSPGQTLIG

SEQ ID NO: 822674 - protein, 307 aa, Homo sapiens
RPVTNSWDWLPAGAAPEAVPCRHMPLSRLPLRVGQKEFFFPLPLLVPPISWLLLSESQPRLVPGSPVIRPGFQRACVAAACTVAARCPGRGVGDRSQSGASCRPIWGPKVGGPTEMLRGMYLTRNGNLQRRHTMKEAKDMKNKLGIFRRRNESPGAPPAGKADKMMKSFKPTSEEALKWGESLEKLLVHKYGLAVFQAFLRTEFSEENLEFWLACEDFKKVKSQSKMASKAKKIFAEYIAIQACKEVNLDSYTREHTKDNLQSVTRGCFDLAQKRIFGLMEKDSYPRFLRSDLYLDLINQKKMSPPL

SEQ ID NO: 822675 - protein, 924 aa, Homo sapiens
SLRPLRDPLLRMPGGGDTENGKKLKITIPRGKDGFGFTICCDSPVRVQAVDSGGPAERAGLQQLDTVLQLNERPVEHWKCVELAHEIRSCPSEIILLVWRMVPQVKPGPDGGVLRRASCKSTHDLQSPPNKREKNCTHGVQARPEQRHSCHLVCDSSDGLLLGGWERYTEVAKRGGQHTLPALSRATAPTDPNYIILAPLNPGSQLLRPVYQEDTIPEESGSPSKGKSYTGLGKKSRLMKTVQTMKGHGNYQNCPVVRPHATHSSYGTYVTLAPKVLVFPVFVQPLDLCNPARTLLLSEELLLYEGRNKAAEVTLFAYSDLLLFTKEDEPGRCDVLRNPLYLQSVKLQEGSSEDLKFCVLYLAEKAECLFTLEAHSQEQKKRVCWCLSENIAKQQQLAASPPDSKMFETEADEKREMALEEGKGPGAEDSPPSKEPSPGQELPPGQDLPPNKDSPSGQEPAPSQEPLSSKDSATSEGSPPGPDAPPSKDVPPCQEPPPAQDLSPCQDLPAGQEPLPHQDPLLTKDLPAIQESPTRDLPPCQDLPPSQVSLPAKALTEDTMSSGDLLAATGDPPAAPRPAFVIPEVRLDSTYSQKAGAEQGCSGDEEDAEEAEEVEEGEEGEEDEDEDTSDDNYGERSEAKRSSMIETGQGAEGGLSLRVQNSLRRRTHSEGSLLQEPRGPCFASDTTLHCSDGEGAASTWGMPSPSTLKKELGRNGGSMHHLSLFFTGHRKMSGADTVGDDDEASRKRKSKNLAKDMKNKLGIFRRRNESPGAPPAGKADKMMKSFKPTSEEALKWGESLEKLLVHKYGLAVFQAFLRTEFSEENLEFWLACEDFKKVKSQSKMASKAKKIFAEYIAIQACKEVNLDSYTREHTKDNLQSVTRGCFDLAQKRIFGLMEKDSYPRFLRSDLYLDLINQKKMSPPL

SEQ ID NO: 822676 - protein, 935 aa, Homo sapiens
AGGELGFHGAAAEAGPAAMNRFNGLCKVCSERRYRQITIPRGKDGFGFTICCDSPVRVQAVDSGGPAERAGLQQLDTVLQLNERPVEHWKCVELAHEIRSCPSEIILLVWRMVPQVKPGPDGGVLRRASCKSTHDLQSPPNKREKNCTHGVQARPEQRHSCHLVCDSSDGLLLGGWERYTEVAKRGGQHTLPALSRATAPTDPNYIILAPLNPGSQLLRPVYQEDTIPEESGSPSKGKSYTGLGKKSRLMKTVQTMKGHGNYQNCPVVRPHATHSSYGTYVTLAPKVLVFPVFVQPLDLCNPARTLLLSEELLLYEGRNKAAEVTLFAYSDLLLFTKEDEPGRCDVLRNPLYLQSVKLQEGSSEDLKFCVLYLAEKAECLFTLEAHSQEQKKRVCWCLSENIAKQQQLAASPPDSKMFETEADEKREMALEEGKGPGAEDSPPSKEPSPGQELPPGQDLPPNKDSPSGQEPAPSQEPLSSKDSATSEGSPPGPDAPPSKDVPPCQEPPPAQDLSPCQDLPAGQEPLPHQDPLLTKDLPAIQESPTRDLPPCQDLPPSQVSLPAKALTEDTMSSGDLLAATGDPPAAPRPAFVIPEVRLDSTYSQKAGAEQGCSGDEEDAEEAEEVEEGEEGEEDEDEDTSDDNYGERSEAKRSSMIETGQGAEGGLSLRVQNSLRRRTHSEGSLLQEPRGPCFASDTTLHCSDGEGAASTWGMPSPSTLKKELGRNGGSMHHLSLFFTGHRKMSGADTVGDDDEASRKRKSKNLAKDMKNKLGIFRRRNESPGAPPAGKADKMMKSFKPTSEEALKWGESLEKLLVHKYGLAVFQAFLRTEFSEENLEFWLACEDFKKVKSQSKMASKAKKIFAEYIAIQACKEVNLDSYTREHTKDNLQSVTRGCFDLAQKRIFGLMEKDSYPRFLRSDLYLDLINQKKMSPPL

SEQ ID NO: 822677 - protein, 519 aa, Homo sapiens; identical to SEQ ID NO: 822671

SEQ ID NO: 822678 - protein, 569 aa, Homo sapiens
VWGRQPLDTAARSCHSHGRPPAGGAGWKPGRASWQERQPGVAWVPAGVCWMFETEADEKREMALEEGKGPGAEDSPPSKEPSPGQELPPGQDLPPNKDSPSGQEPAPSQEPLSSKDSATSEGSPPGPDAPPSKDVPPCQEPPPAQDLSPCQDLPAGQEPLPHQDPLLTKDLPAIQESPTRDLPPCQDLPPSQVSLPAKALTEDTMSSGDLLAATGDPPAAPRPAFVIPEVRLDSTYSQKAGAEQGCSGDEEDAEEAEEVEEGEEGEEDEDEDTSDDNYGERSEAKRSSMIETGQGAEGGLSLRVQNSLRRRTHSEGSLLQEPRGPCFASDTTLHCSDGEGAASTWGMPSPSTLKKELGRNGGSMHHLSLFFTGHRKMSGADTVGDDDEASRKRKSKNLAKDMKNKLGIFRRRNESPGAPPAGKADKMMKSFKPTSEEALKWGESLEKLLVHKYGLAVFQAFLRTEFSEENLEFWLACEDFKKVKSQSKMASKAKKIFAEYIAIQACKEVNLDSYTREHTKDNLQSVTRGCFDLAQKRIFGLMEKDSYPRFLRSDLYLDLINQKKMSPPL

SEQ ID NO: 822679 - protein, 365 aa, Homo sapiens [sequence omitted]

SEQ ID NO: 822680 - protein, 307 aa, Homo sapiens; identical to SEQ ID NO: 822674

SEQ ID NO: 822681 - protein, 168 aa, Homo sapiens
MKNKLGIFRRRNESPGAPPAGKADKMMKSFKPTSEEALKWGESLEKLLVHKYGLAVFQAFLRTEFSEENLEFWLACEDFKKVKSQSKMASKAKKIFAEYIAIQACKEVNLDSYTREHTKDNLQSVTRGCFDLAQKRIFGLMEKDSYPRFLRSDLYLDLINQKKMSPPL

SEQ ID NO: 822682 - protein, 289 aa, Homo sapiens
GQSQIAGTGFLPGRPQRLSLADTCPFHGSLSGLARRNFFFRSPSWSLPFPGSSCLSPAPACAWESSHQARIPESVCGCSLHRCCPLPRTRGGGQEPEWCLLQTNLGPQGGGPYRDAPRAKDMKNKLGIFRRRNESPGAPPAGKADKMMKSFKPTSEEALKWGESLEKLLVHKYGLAVFQAFLRTEFSEENLEFWLACEDFKKVKSQSKMASKAKKIFAEYIAIQACKEVNLDSYTREHTKDNLQSVTRGCFDLAQKRIFGLMEKDSYPRFLRSDLYLDLINQKKMSPPL

SEQ ID NO: 822683 - protein, 261 aa, Homo sapiens
  misc_feature (27)..(27): Xaa can be any naturally occurring amino acid
MRCLLTVPRLCASHGAEVLQEYAFRGXCNRHIVQWRNLSTGADQHRLKDAEDALRAQVYSLISCECRKGGEHVAKDARNTSFVLLSACHVAKDMKNKLGIFRRRNESPGAPPAGKADKMMKSFKPTSEEALKWGESLEKLLVHKYGLAVFQAFLRTEFSEENLEFWLACEDFKKVKSQSKMASKAKKIFAEYIAIQACKEVNLDSYTREHTKDNLQSVTRGCFDLAQKRIFGLMEKDSYPRFLRSDLYLDLINQKKMSPPL

SEQ ID NO: 822684 - protein, 307 aa, Homo sapiens; identical to SEQ ID NO: 822674

SEQ ID NO: 822685 - protein, 188 aa, Homo sapiens
MFETEADEKREMALEEGKGPGAEDSPPSKEPSPGQELPPGQDLPPNKDSPSGQEPAPSQEPLSSKDSATSEGSPPGPDAPPSKDVPPCQEPPPAQDLSPCQDLPAGQEPLPHQDPLLTKDLPAIQEPAPSQEPLSSKDSATSEGSPPGPDAPPSKDVPPCQEPPPAKTSHPARTYLLVKNPCLTHPPH

SEQ ID NO: 822686 - protein, 113 aa, Homo sapiens
MWMSTEGPQWCERPCGHAETGSRKSQEERTQRLLPSKEEEEEDIPHLGFQWWLPDLPWGQQERLGEVTLMKNNAMICCCQRTSPPIHSFSTCTHWLIHSMDISGASTLCQALC

SEQ ID NO: 822687 - protein, 321 aa, Homo sapiens
RPGGAGGSHVGARAHMTGRAMDPLPAAAVGAAAEAEADEEADPPASDLPTPQAIEPQAIVQQVPAPSRMQMPQGNPLLLSHTLQELLARDTVQVELIPEKKGLFLKHVEYEVSSQRFKSSVYRRYNDFVVFQEMLLHKFPYRMVPALPPKRMLGADREFIEARRRALKRFVNLVARHPLFSEDVVLKLFLSFSGSDVQNKLKESAQCVGDEFLNCKLATRAKDFLPADIQAQFAISRELIRNIYNSFHKLRDRAERIASRAIDNAADLLIFGKELSAIGSDTTPLPSWAALNSSTWGVPEAGSERPVCGIRAARRQGCTTG

SEQ ID NO: 822688 - protein, 83 aa, Homo sapiens
DYFKIEKEFGASQRGPTRLEGRLPGAIQKWSPCVARAGLELLTSSDLPASASESVGITGMTRHTGLECTDLICYKLKNLHSYA

SEQ ID NO: 822689 - protein, 321 aa, Homo sapiens; identical to SEQ ID NO: 822687

SEQ ID NO: 822690 - protein, 251 aa, Homo sapiens
MPQGNPLLLSHTLQELLARDTVQVELIPEKKGLFLKHVEYEVSSQRFKSSVYRRYNDFVVFQEMLLHKFPYRMVPALPPKRMLGADREFIEARRRALKRFVNLVARHPLFSEDVVLKLFLSFSGSDVQNKLKESAQCVGDEFLNCKLATRAKDFLPADIQAQFAISRELIRNIYNSFHKLRDRAERIASRAIDNAADLLIFGKELSAIGSDTTPLPSWAALNSSTWGVPEAGSERPVCGIRAARRQGCTTG

SEQ ID NO: 822691 - protein, 304 aa, Homo sapiens
DYFKIEKEFGASQRGPTRLEGRLPGAIQKYLPTPQAIEPQAIVQQVPAPSRMQMPQGNPLLLSHTLQELLARDTVQVELIPEKKGLFLKHVEYEVSSQRFKSSVYRRYNDFVVFQEMLLHKFPYRMVPALPPKRMLGADREFIEARRRALKRFVNLVARHPLFSEDVVLKLFLSFSGSDVQNKLKESAQCVGDEFLNCKLATRAKDFLPADIQAQFAISRELIRNIYNSFHKLRDRAERIASRAIDNAADLLIFGKELSAIGSDTTPLPSWAALNSSTWGVPEAGSERPVCGIRAARRQGCTTG

SEQ ID NO: 822692 - protein, 310 aa, Homo sapiens
SGLLHPCPEPSPLAWATSMHPGLPSTLTCSCSLMSDLPTPQAIEPQAIVQQVPAPSRMQMPQGNPLLLSHTLQELLARDTVQVELIPEKKGLFLKHVEYEVSSQRFKSSVYRRYNDFVVFQEMLLHKFPYRMVPALPPKRMLGADREFIEARRRALKRFVNLVARHPLFSEDVVLKLFLSFSGSDVQNKLKESAQCVGDEFLNCKLATRAKDFLPADIQAQFAISRELIRNIYNSFHKLRDRAERIASRAIDNAADLLIFGKELSAIGSDTTPLPSWAALNSSTWGVPEAGSERPVCGIRAARRQGCTTG

SEQ ID NO: 822693 - protein, 251 aa, Homo sapiens; identical to SEQ ID NO: 822690

SEQ ID NO: 822694 - protein, 208 aa, Homo sapiens
RPGGAGGSHVGARAHMTGRAMDPLPAAAVGAAAEAEADEEADPPASDLPTPQAIEPQAIVQQVPAPSRMQMPQGNPLLLSHTDVQNKLKESAQCVGDEFLNCKLATRAKDFLPADIQAQFAISRELIRNIYNSFHKLRDRAERIASRAIDNAADLLIFGKELSAIGSDTTPLPSWAALNSSTWGVPEAGSERPVCGIRAARRQGCTTG

SEQ ID NO: 822695 - protein, 105 aa, Homo sapiens
MFHAKFIWSNSSLYDDVEQENAIQTMELRNYFSLYCLHQETQLIHVYLPLTSHILRAFVNSQIQGHKEMSKVWNDLRPKLSCLFAGPHSTLTPPCSPPEDGLCPH

SEQ ID NO: 822696 - protein, 509 aa, Homo sapiens
MGCSAKARWAAGALGVAGLLCAVLGAVMIVMVPSLIKQQVLKNVRIDPSSLSFNMWKEIPIPFYLSVYFFDVMNPSEILKGEKPQVRERGPYVYREFRHKSNITFNNNDTVSFLEYRTFQFQPSKSHGSESDYIVMPNILVLGAAVMMENKPMTLKLIMTLAFTTLGERAFMNRTVGEIMWGYKDPLVNLINKYFPGMFPFKDKFGLFAELNNSDSGLFTVFTGVQNISRIHLVDKWNGLSKVDFWHSDQCNMINGTSGQMWPPFMTPESSLEFYSPEACRSMKLMYKESGVFEGIPTYRFVAPKTLFANGSIYPPNEGFCPCLESGIQNVSTCRFSAPLFLSHPHFLNADPVLAEAVTGLHPNQEAHSLFLDIHPVTGIPMNCSVKLQLSLYMKSVAGIGQTGKIEPVVLPLLWFAESGAMEGETLHTFYTQLVLMPKVMHYAQYVLLALGCVLLLVPVICQIRSQEKCYLFWSSSKKGSKDKEAIQAYSESLMTSAPKGSVLQEAKL

SEQ ID NO: 822697 - protein, 509 aa, Homo sapiens; identical to SEQ ID NO: 822696

SEQ ID NO: 822698 - protein, 509 aa, Homo sapiens; identical to SEQ ID NO: 822696

SEQ ID NO: 822699 - protein, 562 aa, Homo sapiens
AHDRARTRPGVTDPPCLCGLRARSPRLCRLCRRPRLLPGAEPCEPRVGPRRADMGCSAKARWAAGALGVAGLLCAVLGAVMIVMVPSLIKQQVLKNVRIDPSSLSFNMWKEIPIPFYLSVYFFDVMNPSEILKGEKPQVRERGPYVYREFRHKSNITFNNNDTVSFLEYRTFQFQPSKSHGSESDYIVMPNILVLGAAVMMENKPMTLKLIMTLAFTTLGERAFMNRTVGEIMWGYKDPLVNLINKYFPGMFPFKDKFGLFAELNNSDSGLFTVFTGVQNISRIHLVDKWNGLSKVDFWHSDQCNMINGTSGQMWPPFMTPESSLEFYSPEACRSMKLMYKESGVFEGIPTYRFVAPKTLFANGSIYPPNEGFCPCLESGIQNVSTCRFSAPLFLSHPHFLNADPVLAEAVTGLHPNQEAHSLFLDIHPVTGIPMNCSVKLQLSLYMKSVAGIGQTGKIEPVVLPLLWFAESGAMEGETLHTFYTQLVLMPKVMHYAQYVLLALGCVLLLVPVICQIRSQEKCYLFWSSSKKGSKDKEAIQAYSESLMTSAPKGSVLQEAKL

SEQ ID NO: 822700 - protein, 509 aa, Homo sapiens; identical to SEQ ID NO: 822696

SEQ ID NO: 822701 - protein, 515 aa, Homo sapiens
MGCSAKARWAAGALGVAGLLCAVLGAVMIVMVPSLIKQQVLKNVRIDPSSLSFNMWKEIPIPFYLSVYFFDVMNPSEILKGEKPQVRERGPYVYREFRHKSNITFNNNDTVSFLEYRTFQFQPSKSHGSESDYIVMPNILVLGAAVMMENKPMTLKLIMTLAFTTLGERAFMNRTVGEIMWGYKDPLVNLINKYFPGMFPFKDKFGLFAELNNSDSGLFTVFTGVQNISRIHLVDKWNGLSKVDFWHSDQCNMINGTSGQMWPPFMTPESSLEFYSPEACRSMKLMYKESGVFEGIPTYRFVAPKTLFANGSIYPPNEGFCPCLESGIQNVSTCRFSAPLFLSHPHFLNADPVLAEAVTGLHPNQEAHSLFLDIHPVTGIPMNCSVKLQLSLYMKSVAGIGQTGKIEPVVLPLLWFAESGAMEGETLHTFYTQLVLMPKVMHYAQYVLLALGCVLLLVPVICQIRSQNRVKPFLCGFNVNYKLAWLSSRRNAIYFGVVVKRAQRIRRPFRPILNP

SEQ ID NO: 822702 - protein, 509 aa, Homo sapiens; identical to SEQ ID NO: 822696

SEQ ID NO: 822703 - protein, 506 aa, Homo sapiens
MGCSAKARWAAGALGVAGLLCAVLGAVMIVMVPSLIKQQVLKNVRIDPSSLSFNMWKEIPIPFYLSVYFFDVMNPSEILKGEKPQVRERGPYVYREFRHKSNITFNNNDTVSFLEYRTFQFQPSKSHGSESDYIVMPNILVLGAAVMMENKPMTLKLIMTLAFTTLGERAFMNRTVGEIMWGYKDPLVNLINKYFPGMFPFKDKFGLFAELNNSDSGLFTVFTGVQNISRIHLVDKWNGLSKVDFWHSDQCNMINGTSGQMWPPFMTPESSLEFYSPEACRSMKLMYKESGVFEGIPTYRFVAPKTLFANGSIYPPNEGFCPCLESGIQNVSTCRFSAPLFLSHPHFLNADPVLAEAVTGLHPNQEAHSLFLDIHPVTGIPMNCSVKLQLSLYMKSVAGIGQTGKIEPVVLPLLWFAESGAMEGETLHTFYTQLVLMPKVMHYAQYVLLALGCVLLLVPVICQIRSQGPEDTVSQPGLAAGPDRPPSPYTPLLPDSPSGQPPSPTA

SEQ ID NO: 822704 - protein, 509 aa, Homo sapiens; identical to SEQ ID NO: 822696

SEQ ID NO: 822705 - protein, 509 aa, Homo sapiens; identical to SEQ ID NO: 822696

SEQ ID NO: 822706 - protein, 509 aa, Homo sapiens; identical to SEQ ID NO: 822696

SEQ ID NO: 822707 - protein, 509 aa, Homo sapiens; identical to SEQ ID NO: 822696

SEQ ID NO: 822708 - protein, 509 aa, Homo sapiens; identical to SEQ ID NO: 822696

SEQ ID NO: 822709 - protein, 525 aa, Homo sapiens
MGCSAKARWAAGALGVAGLLCAVLGAVMIVMVPSLIKQQVLKNVRIDPSSLSFNMWKEIPIPFYLSVYFFDVMNPSEILKGEKPQVRERGPYVYREFRHKSNITFNNNDTVSFLEYRTFQFQPSKSHGSESDYIVMPNILVLGAAVMMENKPMTLKLIMTLAFTTLGERAFMNRTVGEIMWGYKDPLVNLINKYFPGMFPFKDKFGLFAELNNSDSGLFTVFTGVQNISRIHLVDKWNGLSKVDFWHSDQCNMINGTSGQMWPPFMTPESSLEFYSPEACRSMKLMYKESGVFEGIPTYRFVAPKTLFANGSIYPPNEGFCPCLESGIQNVSTCRFSAPLFLSHPHFLNADPVLAEAVTGLHPNQEAHSLFLDIHPVTGIPMNCSVKLQLSLYMKSVAGIGQTGKIEPVVLPLLWFAESGAMEGETLHTFYTQLVLMPKVMHYAQYVLLALGCVLLLVPVICQIRSQVGAGQRAARADSHSLFLQPKLTSSYGLSRPLSGRSGRRLCPRAAPTPSQGPSDYRCPG

SEQ ID NO: 822710 - protein, 509 aa, Homo sapiens; identical to SEQ ID NO: 822696

SEQ ID NO: 822711 - protein, 509 aa, Homo sapiens; identical to SEQ ID NO: 822696

SEQ ID NO: 822712 - protein, 589 aa, Homo sapiens
ASRAEEKMEELVVEVRGSNGAFYKAFVKDVHEDSITVAFENNWQPDRQIPFHDVRFPPPVGYNKDINESDEVEVYSRANEKEPCCWWLAKVRMIKGEFYVIEYAACDATYNEIVTIERLRSVNPNKPATKDTFHKIKLDVPEDLRQMCAKEAAHKDFKKAVGAFSVTYDPENYQLVILSINEVTSKRAHMLIDMHFRSLRTKLSLIMRNEEASKQLESSRQLASRFHEQFIVREDLMGLAIGTHGANIQQARKVPGVTAIDLDEDTCTFHIYGEDQDAVKKARSFLEFAEDVIQVPRNLVGKVIGKNGKLIQEIVDKSGVVRVRIEAENEKNVPQEEEIMPPNSLPSNNSRVGPNAPEEKKHLDIKENSTHFSQPNSTKVQRGMVPFVFVGTKDSIANATVLLDYHLNYLKEVDQLRLERLQIDEQLRQIGASSRPPPNRTDKEKSYVTDDGQGMGRGSRPYRNRGHGRRGPGYTSESDHRDELSDWSLAPTEEERESFLRRGDGRRRGGGGRGQGGRGRGGGFKGNDDHSRTDNRPRNPREAKGRTTDGSLQNTSSEGSRLRTGKDRNQKKEKPDSVDGQQPLVNGVP

SEQ ID NO: 822713 - protein, 601 aa, Homo sapiens
ASRAEEKMEELVVEVRGSNGAFYKAFVKDVHEDSITVAFENNWQPDRQIPFHDVRFPPPVGYNKDINESDEVEVYSRANEKEPCCWWLAKVRMIKGEFYVIEYAACDATYNEIVTIERLRSVNPNKPATKDTFHKIKLDVPEDLRQMCAKEAAHKDFKKAVGAFSVTYDPENYQLVILSINEVTSKRAHMLIDMHFRSLRTKLSLIMRNEEASKQLESSRQLASRFHEQFIVREDLMGLAIGTHGANIQQARKVPGVTAIDLDEDTCTFHIYGEDQDAVKKARSFLEFAEDVIQVPRNLVGKVIGKNGKLIQEIVDKSGVVRVRIEAENEKNVPQEEEIMPPNSLPSNNSRVGPNAPEEKKHLDIKENSTHFSQPNSTKVQRGMVPFVFVGTKDSIANATVLLDYHLNYLKEVDQLRLERLQIDEQLRQIGASSRPPPNRTDKEKSYVTDDGQGMGRGSRPYRNRGHGRRGPGYTSGTNSEASNASETESDHRDELSDWSLAPTEEERESFLRRGDGRRRGGGGRGQGGRGRGGGFKGNDDHSRTDNRPRNPREAKGRTTDGSLQNTSSEGSRLRTGKDRNQKKEKPDSVDGQQPLVNGVP

SEQ ID NO: 822714 - protein, 606 aa, Homo sapiens
ASRAEEKMEELVVEVRGSNGAFYKAFVKDVHEDSITVAFENNWQPDRQIPFHDVRFPPPVGYNKDINESDEVEVYSRANEKEPCCWWLAKVRMIKGEFYVIEYAACDATYNEIVTIERLRSVNPNKPATKDTFHKIKLDVPEDLRQMCAKEAAHKDFKKAVGAFSVTYDPENYQLVILSINEVTSKRAHMLIDMHFRSLRTKLSLIMRNEEASKQLESSRQLASRFHEQFIVREDLMGLAIGTHGANIQQARKVPGVTAIDLDEDTCTFHIYGEDQDAVKKARSFLEFAEDVIQVPRNLVGKVIGKNGKLIQEIVDKSGVVRVRIEAENEKNVPQEEEIMPPNSLPSNNSRVGPNAPEEKKHLDIKENSTHFSQPNSTKVQRGMVPFVFVGTKDSIANATVLLDYHLNYLKEVDQLRLERLQIDEQLRQIGASSRPPPNRTDKEKSYVTDDGQGMGRGSRPYRNRGHGRRGPGYTSESDHRDELSDWSLAPTEEERESFLRRGDGRRRGGGGRGQGGRGRGGGFKGNDDHSRTDNRPRNPREAKGRTTDGSLQIRVDCNNERSVHTKTLQNTSSEGSRLRTGKDRNQKKEKPDSVDGQQPLVNGVP

SEQ ID NO: 822715 - protein, 589 aa, Homo sapiens; identical to SEQ ID NO: 822712

SEQ ID NO: 822716 - protein, 589 aa, Homo sapiens; identical to SEQ ID NO: 822712

SEQ ID NO: 822717 - protein, 589 aa, Homo sapiens; identical to SEQ ID NO: 822712

SEQ ID NO: 822718 - protein, 568 aa, Homo sapiens
ASRAEEKMEELVVEVRGSNGAFYKAFVKDVHEDSITVAFENNWQPDRQIPFHDVRFPPPVGYNKDINESDEVEVYSRANEKEPCCWWLAKVRMIKGEFYVIEYAACDATYNEIVTIERLRSVNPNKPATKDTFHKIKLDVPEDLRQMCAKEAAHKDFKKAVGAFSVTYDPENYQLVILSINEVTSKRAHMLIDMHFRSLRTKLSLIMRNEEASKQLESSRQLASRFHEQFIVREDLMGLAIGTHGANIQQARKVPGVTAIDLDEDTCTFHIYGEDQDAVKKARSFLEFAEDVIQVPRNLVGKVIGKNGKLIQEIVDKSGVVRVRIEAENEKNVPQEEEIMPPNSLPSNNSRVGPNAPEEKKHLDIKENSTHFSQPNSTKVQRGMVPFVFVGTKDSIANATVLLDYHLNYLKEVDQLRLERLQIDEQLRQIGASSRPPPNRTDKEKSYVTDDGQGMGRGSRPYRNRGHGRRGPGYTSGTNSEASNASETESDHRDELSDWSLAPTEEERESFLRRGDGRRRGGGGRGQGGRGRGGGFKGNDDHSRTDNRPRNPREAKGRTTDGSLQKKT

SEQ ID NO: 822719 - protein, 521 aa, Homo sapiens
MGIKVLQQSKSQKQKEEAYLLFAKAADMGNLKAMEKMADALLFGNFGVQNITAAIQLYESLAKEGSCKAQNALGFLSSYGIGMEYDQAKALIYYTFGSAGGNMMSQMILGYRYLSGINVLQNCEVALSYYKKVADYIADTFEKSEGVPVEKVRLTERPENLSSNSEILDWDIYQYYKFLAERGDVQIQVSLGQLHLIGRKGLDQDYYKALHYFLKAAKAGSANAMAFIGKMYLEGNAAVPQNNATAFKYFSMAASKGNAIGLHGLGLLYFHGKGVPLNYAEALKYFQKAAEKGWPDAQFQLGFMYYSGSGIWKDYKLAFKYFYLASQSGQPLAIYYLAKMYATGTGVVKIMQNCCGEKANILEKEKMYPMALLLWNRAAIQGNAFARVKIGDYHYYGYGTKKDYQTAATHYSIAANKYHNAQAMFNLAYMYEHGLGITKDIHLARRLYDMAAQTSPDAHIPVLFAVMKLETTHLLRDILFFNFTTRWNWLKLDNTIGPHWDLFVIGLIVPGLILLLRNHHG

SEQ ID NO: 822720 - protein, 643 aa, Homo sapiens [sequence omitted]

SEQ ID NO: 822721 - protein, 108 aa, Homo sapiens
MAPIIRLPKGIRNPNETQNNSTSWPVFKSTEQKYLTLNTESTRIMTKLRAQQCRFWTSFFPKVLEMTGNIDEAEWEWKAGFHRWNNYMMDWKNQFNDYTSKKESCVGL

SEQ ID NO: 822722 - protein, 64 aa, Homo sapiens
MTKLRAQQCRFWTSFFPKVLEMTGNIDEAEWEWKAGFHRWNNYMMDWKNQFNDYTSKKESCVGL

SEQ ID NO: 822723 - protein, 108 aa, Homo sapiens; identical to SEQ ID NO: 822721

SEQ ID NO: 822724 - protein, 64 aa, Homo sapiens; identical to SEQ ID NO: 822722

SEQ ID NO: 822725 - protein, 64 aa, Homo sapiens; identical to SEQ ID NO: 822722

SEQ ID NO: 822726 - protein, 108 aa, Homo sapiens
  misc_feature (4)..(4): Xaa can be any naturally occurring amino acid
  misc_feature (7)..(7): Xaa can be any naturally occurring amino acid
MSNXALXLHGYTNPNETQNNSTSWPVFKSTEQKYLTLNTESTRIMTKLRAQQCRFWTSFFPKVLEMTGNIDEAEWEWKAGFHRWNNYMMDWKNQFNDYTSKKESCVGL

SEQ ID NO: 822727 - protein, 129 aa, Homo sapiens
ISMLITAPVNRHATAAWNPNETQNNSTSWPVFKSTEQKYLTLNTESTRIMTKLRAQQCRFWTSFFPKVLEMTGNIDEAEWEWKAGFHRWNNYMMDWKNQFNDYTTACARFYLKHQPFINSCPLKQAPIR

SEQ ID NO: 822728 - protein, 112 aa, Homo sapiens
LRQRITKTRHTQNMSKNPNETQNNSTSWPVFKSTEQKYLTLNTESTRIMTKLRAQQCRFWTSFFPKVLEMTGNIDEAEWEWKAGFHRWNNYMMDWKNQFNDYTSKKESCVGL

SEQ ID NO: 822729 - protein, 108 aa, Homo sapiens
NISVCIFPNCFRNPNETQNNSTSWPVFKSTEQKYLTLNTESTRIMTKLRAQQCRFWTSFFPKVLEMTGNIDEAEWEWKAGFHRWNNYMMDWKNQFNDYTSKKESCVGL

SEQ ID NO: 822730 - protein, 110 aa, Homo sapiens
  misc_feature (10)..(10): Xaa can be any naturally occurring amino acid
GARPAPALGXGFSENPNETQNNSTSWPVFKSTEQKYLTLNTESTRIMTKLRAQQCRFWTSFFPKVLEMTGNIDEAEWEWKAGFHRWNNYMMDWKNQFNDYTSKKESCVGL

SEQ ID NO: 822731 - protein, 127 aa, Homo sapiens
  misc_feature (1)..(1): Xaa can be any naturally occurring amino acid
XLHQLVFFHQILNYNSGHFLITPPRGIPIRLNPNETQNNSTSWPVFKSTEQKYLTLNTESTRIMTKLRAQQCRFWTSFFPKVLEMTGNIDEAEWEWKAGFHRWNNYMMDWKNQFNDYTSKKESCVGL

SEQ ID NO: 822732 - protein, 121 aa, Homo sapiens
  misc_feature (15)..(16): Xaa can be any naturally occurring amino acid
  misc_feature (19)..(19): Xaa can be any naturally occurring amino acid
  misc_feature (25)..(25): Xaa can be any naturally occurring amino acid
RGEAQKGKDQPRFWXXVRXNHESSXNPNETQNNSTSWPVFKSTEQKYLTLNTESTRIMTKLRAQQCRFWTSFFPKVLEMTGNIDEAEWEWKAGFHRWNNYMMDWKNQFNDYTSKKESCVGL

SEQ ID NO: 822733 - protein, 171 aa, Homo sapiens
SYRSVHKDAATEHKGAGRHRGSNFRNPNETQNNSTSWPVFKSTEQKYLTLNTESTRIMTKLRAQQCRFWTSFFPKVLEMTAAPEIPVEITVGSDQPLLSTVLLTGLFWKNKFIHTPLIDHKRPTAPRIIHRAFNNFHRPLHPQLNPLPVKAQSLLMPLLINTLDPIPNNGP

SEQ ID NO: 822734 - protein, 123 aa, Homo sapiens
  misc_feature (13)..(13): Xaa can be any naturally occurring amino acid
RAGPPGLPRTGLXGVSSLPSDNINEARNPNETQNNSTSWPVFKSTEQKYLTLNTESTRIMTKLRAQQCRFWTSFFPKVLEMTGNIDEAEWEWKAGFHRWNNYMMDWKNQFNDYTSKKESCVGL

SEQ ID NO: 822735 - protein, 123 aa, Homo sapiens; identical to SEQ ID NO: 822734
  misc_feature (13)..(13): Xaa can be any naturally occurring amino acid

SEQ ID NO: 822736 - protein, 123 aa, Homo sapiens
TPQIKVYGYNILTFRCQVLLEFTTRYKNPNETQNNSTSWPVFKSTEQKYLTLNTESTRIMTKLRAQQCRFWTSFFPKVLEMTGNIDEAEWEWKAGFHRWNNYMMDWKNQFNDYTSKKESCVGL

SEQ ID NO: 822737 - protein, 136 aa, Homo sapiens
MSYDFFPYTHTTQKARQQKGVLQYIPHLSNLIILSARSKNSKYIIANEPKRAVFYNGLAQKYLTLNTESTRIMTKLRAQQCRFWTSFFPKVLEMTGNIDEAEWEWKAGFHRWNNYMMDWKNQFNDYTSKKESCVGL

SEQ ID NO: 822738 - protein, 133 aa, Homo sapiens
PSYISPLARPHPQVFLPLIRAHQLFIVPAAQTSTITSPENTNLPFFQTPLPQLSTFQPRVPEINPHLGAPQFWFLPPFFPKVLAIHPISIKPRNIDEAEWEWKAGFHRWNNYMMDWKNQFNDYTSKKESCVGL

SEQ ID NO: 822739 - protein, 107 aa, Homo sapiens
MLCQYSVIAQKYDTSISINTLPQPTLSALITYNSHRYRTNRVIRANDVSTSPPTPIKTIIGHAKSRKYQSDLMNQYGMWTQYSHLWPIDTDGLHNPIPRKKESCVGL

SEQ ID NO: 822740 - protein, 104 aa, Homo sapiens
RGDALYHRHKDILMCAGSIRTQNEVSAQIAQHALLSKASTKKNHTLRPKVNQEMRAEITVLTKCGFWHIIFSKKFLEITAKFIKEILMKQNGSGKQDSIAGTIT

SEQ ID NO: 822741 - protein, 64 aa, Homo sapiens; identical to SEQ ID NO: 822722

SEQ ID NO: 822742 - protein, 109 aa, Homo sapiens
RSETDSLLNQRYRNPNETQNNSTSWPVFKSTEQKYLTLNTESTRIMTKLRAQQCRFWTSFFPKVLEMTGNIDEAEWEWKAGFHRWNNYMMDWKNQFNDYTSKKESCVGL

SEQ ID NO: 822743 - protein, 109 aa, Homo sapiens; identical to SEQ ID NO: 822742

SEQ ID NO: 822744 - protein, 109 aa, Homo sapiens; identical to SEQ ID NO: 822742

SEQ ID NO: 822745 - protein, 109 aa, Homo sapiens; identical to SEQ ID NO: 822742

SEQ ID NO: 822746 - protein, 109 aa, Homo sapiens; identical to SEQ ID NO: 822742

SEQ ID NO: 822747 - protein, 109 aa, Homo sapiens; identical to SEQ ID NO: 822742

SEQ ID NO: 822748 - protein, 109 aa, Homo sapiens; identical to SEQ ID NO: 822742

SEQ ID NO: 822749 - protein, 69 aa, Homo sapiens
RSETDSLLNQRYRNPNETQNNSTSWPVFKSTEQKYLTLNTESTRIMTKLRAQQCRFWTSFFPKVLEMTG

SEQ ID NO: 822750 - protein, 101 aa, Homo sapiens
RSETDSLLNQRYRNPNETQNNSTSWPVFKSTEQKYLTLNTERAQQCRFWTSFFPKVLEMTGNIDEAEWEWKAGFHRWNNYMMDWKNQFNDYTSKKESCVGL

SEQ ID NO: 822751 - protein, 109 aa, Homo sapiens; identical to SEQ ID NO: 822742

SEQ ID NO: 822752 - protein, 109 aa, Homo sapiens; identical to SEQ ID NO: 822742

SEQ ID NO: 822753 - protein, 109 aa, Homo sapiens; identical to SEQ ID NO: 822742

SEQ ID NO: 822754 - protein, 109 aa, Homo sapiens; identical to SEQ ID NO: 822742

SEQ ID NO: 822755 - protein, 109 aa, Homo sapiens; identical to SEQ ID NO: 822742

SEQ ID NO: 822756 - protein, 109 aa, Homo sapiens; identical to SEQ ID NO: 822742

SEQ ID NO: 822757 - protein, 109 aa, Homo sapiens; identical to SEQ ID NO: 822742

SEQ ID NO: 822758 - protein, 109 aa, Homo sapiens; identical to SEQ ID NO: 822742

SEQ ID NO: 822759 - protein, 109 aa, Homo sapiens; identical to SEQ ID NO: 822742

SEQ ID NO: 822760 - protein, 77 aa, Homo sapiens
RSETDSLLNQRYRNPNETQNNSTSWPVFKSTEQKYLTLNTESTRIMTKLFWTSFFPKVLEMTGNIDEAEWEWKAGIT

SEQ ID NO: 822761 - protein, 109 aa, Homo sapiens; identical to SEQ ID NO: 822742

SEQ ID NO: 822762 - protein, 109 aa, Homo sapiens; identical to SEQ ID NO: 822742

SEQ ID NO: 822763 - protein, 109 aa, Homo sapiens; identical to SEQ ID NO: 822742

SEQ ID NO: 822764 - protein, 109 aa, Homo sapiens; identical to SEQ ID NO: 822742

SEQ ID NO: 822765 - protein, 109 aa, Homo sapiens; identical to SEQ ID NO: 822742

SEQ ID NO: 822766 - protein, 109 aa, Homo sapiens; identical to SEQ ID NO: 822742

SEQ ID NO: 822767 - protein, 109 aa, Homo sapiens; identical to SEQ ID NO: 822742

SEQ ID NO: 822768 - protein, 109 aa, Homo sapiens; identical to SEQ ID NO: 822742

SEQ ID NO: 822769 - protein, 109 aa, Homo sapiens; identical to SEQ ID NO: 822742

SEQ ID NO: 822770 - protein, 109 aa, Homo sapiens; identical to SEQ ID NO: 822742

SEQ ID NO: 822771 - protein, 102 aa, Homo sapiens
RSETDSLLNQRYRNPNETQNNSTSWPVFKSTEQKYLTLNTESTRIMTKLRAQQCRFWTSFFPKVLEMTGNIDEAEWEWKAGFHRWNNYMMDWKNQFNDYTIE

SEQ ID NO: 822772 - protein, 77 aa, Homo sapiens; identical to SEQ ID NO: 822760

SEQ ID NO: 822773 - protein, 101 aa, Homo sapiens; identical to SEQ ID NO: 822750

SEQ ID NO: 822774 - protein, 77 aa, Homo sapiens; identical to SEQ ID NO: 822760

SEQ ID NO: 822775 - protein, 142 aa, Homo sapiens
MSDSLVVCEVDPELTEKLRKFRFRKETDNAAIIMKVDKDRQMVVLEEEFQNISPEELKMELPERQPRFVVYSYKYVHDDGRVSYPLCFIFSSPVGCKPEQQMMYAGSKNRLVQTAELTKVFEIRTTDDLTEAWLQEKLSFFR

SEQ ID NO: 822776 - protein, 159 aa, Homo sapiens
MCEAGVLEKKRPVDRTIMSDSLVVCEVDPELTEKLRKFRFRKETDNAAIIMKVDKDRQMVVLEEEFQNISPEELKMELPERQPRFVVYSYKYVHDDGRVSYPLCFIFSSPVGCKPEQQMMYAGSKNRLVQTAELTKVFEIRTTDDLTEAWLQEKLSFFR

SEQ ID NO: 822777 - protein, 142 aa, Homo sapiens; identical to SEQ ID NO: 822775

SEQ ID NO: 822778 - protein, 106 aa, Homo sapiens
MIVTRKSFTLHDHESVHSVVIYRLESTHDLRFVVYSYKYVHDDGRVSYPLCFIFSSPVGCKPEQQMMYAGSKNRLVQTAELTKVFEIRTTDDLTEAWLQEKLSFFR

SEQ ID NO: 822779 - protein, 138 aa, Homo sapiens
MSDSLVVCEVDPELTEKLRKFRFRKETDNAAIIMKVDKDRQMVVLEEEFQNISPEELKMELPERQPRFVVYSYKYVHDDGRVSYPLCFIFSSPVGCKPEQQMMYAGSKNRLVQTAELTKVQTGMGLQSVRERWCGSWV

SEQ ID NO: 822780 - protein, 147 aa, Homo sapiens
VLDETFLLLHSPPPYSPGPHAKKTAELRKEEACGQNNHVKVDKDRQMVVLEEEFQNISPEELKMELPERQPRFVVYSYKYVHDDGRVSYPLCFIFSSPVGCKPEQQMMYAGSKNRLVQTAELTKVFEIRTTDDLTEAWLQEKLSFFR

SEQ ID NO: 822781 - protein, 444 aa, Homo sapiens
KRRRHRLPALPPRLLSPSAATMSASAVFILDVKGKPLISRNYKGDVAMSKIEHFMPLLVQREEEGALAPLLSHGQVHFLWIKHSNLYLVATTSKNANASLVYSFLYKTIEVFCEYFKELEEESIRDNFVIVYELLDELMDFGFPQTTDSKILQEYITQQSNKLETGKSRVPPTVTNAVSWRSEGIKYKKNEVFIDVIESVNLLVNANGSVLLSEIVGTIKLKVFLSGMPELRLGLNDRVLFELTGRSKNKSVELEDVKFHQCVRLSRFDNDRTISFIPPDGDFELMSYRLSTQVKPLIWIESVIEKFSHSRVEIMVKAKGQFKKQSVANGVEISVPVPSDADSPRFKTSVGSAKYVPERNVVIWSIKSFPGGKEYLMRAHFGLPSVEKEEVEGRPPIGVKFEIPYFTVSGIQVRYMKIIEKSGYQALPWVRYITQSGDYQLRTS

SEQ ID NO: 822782 - protein, 433 aa, Homo sapiens
SLGRGGCQIGRGRSAVFILDVKGKPLISRNYKGDVAMSKIEHFMPLLVQREEEGALAPLLSHGQVHFLWIKHSNLYLVATTSKNANASLVYSFLYKTIEVFCEYFKELEEESIRDNFVIVYELLDELMDFGFPQTTDSKILQEYITQQSNKLETGKSRVPPTVTNAVSWRSEGIKYKKNEVFIDVIESVNLLVNANGSVLLSEIVGTIKLKVFLSGMPELRLGLNDRVLFELTGRSKNKSVELEDVKFHQCVRLSRFDNDRTISFIPPDGDFELMSYRLSTQVKPLIWIESVIEKFSHSRVEIMVKAKGQFKKQSVANGVEISVPVPSDADSPRFKTSVGSAKYVPERNVVIWSIKSFPGGKEYLMRAHFGLPSVEKEEVEGRPPIGVKFEIPYFTVSGIQVRYMKIIEKSGYQALPWVRYITQSGDYQLRTS

SEQ ID NO: 822783 - protein, 402 aa, Homo sapiens
KRRRHRLPALPPRLLSPSAATMSASAVFILDVKGKPLISRNYKGDVAMSKIEHFMPLLVQREEEGALAPLLSHGQVHFLWIKHSNLYLVATTSKNANASLVYSFLYKTIEVFCEYFKELEEESIRDNFVIVYELLDELMDFGFPQTTDSKILQEYITQQSNKLETGKSRVPPTVTNAVSWRSEGIKYKKNEVFIDVIESVNLLVNANGSVLLSEIVGTIKLKVFLSGMPELRLGLNDRVLFELTGRSKNKSVELEDVKFHQCVRLSRFDNDRTISFIPPDGDFELMSYRLSTQVKPLIWIESVIEKFSHSRVEIMVKAKGQFKKQSVANGVEISVPVPSDADSPRFKTSVGSAKYVPERNVVIWSIKSFPVRYMKIIEKSGYQALPWVRYITQSGDYQLRTS

SEQ ID NO: 822784 - protein, 459 aa, Homo sapiens
KRRRHRLPALPPRLLSPSAATMSASAVFILDVKGKPLISRNYKGDVAMSKIEHFMPLLVQREEEGALAPLLSHGQVHFLWIKHSNLYLVATTSKNANASLVYSFLYKTIEVFCEYFKELEEESIRDNFVIVYELLDELMDFGFPQTTDSKILQEYITQQSNKLETGKSRVPPTVTNAVSWRSEGIKYKKNEVFIDVIESVNLLVNANGSVLLSEIVGTIKLKVFLSGMPELRLGLNDRVLFELTGRSKNKSVELEDVKFHQCVRLSRFDNDRTISFIPPDGDFELMSYRLSTQVKPLIWIESVIEKFSHSRVEIMVKAKGQFKKQSVANGVEISVPVPSDADSPRFKTSVGSAKYVPERNVVIWSIKSFPGGKEYLMRAHFGLPSVEKEEVEGRPPIGVKFEIPYFTVSGIQVRYMKIIEKSGYQALPWVRYITQSGGWERNSLCFPRPWSFPHPPDFI

SEQ ID NO: 822785 - protein, 92 aa, Homo sapiens
VDSTPLALTVLKRLGLDHDLHAAVGELLHDADSPRFKTSVGSAKYVPERNVVIWSIKSFPVRYMKIIEKSGYQALPWVRYITQSGDYQLRTS

SEQ ID NO: 822786 - protein, 278 aa, Homo sapiens
MSKIEHFMPLLVQREEEGALAPLLSHGQVHFLWIKHSNLYLVATTSKNANASLVYSFLYKTIEVFCEYFKELEEESIRDNFVIVYELLDELMDFGFPQTTDSKILQEYITQQSNKLETGKSRVPPTVTNAVSWRSEGIKYKKNEVFIDVIESVNLLVNANGSVLLSEIVGTIKLKVFLSGMPELRLGLNDRVLFELTGRSKNKSVELEDVKFHQCVRLSRFDNDRTISFIPPDGDFELMSYRLSTQSAWSDGLLGGPTGGQDGGVKAAGGMRGALNGL

SEQ ID NO: 822787 - protein, 84 aa, Homo sapiens
KRRRHRLPALPPRLLSPSAATMSASAVFILDVKGKPLISRNYKGDVAMSKIEHFMPLLVQREEEGALAPLLSLSGCCGSLLHSR

SEQ ID NO: 822788 - protein, 325 aa, Homo sapiens
MALADSTRGLPNGGGGGGGSGSSSSSAEPPLFPDIVELNVGGQVYVTRRCTVVSVPDSLLWRMFTQQQPQELARDSKGRFFLDRDGFLFRYILDYLRDLQLVLPDYFPERSRLQREAEYFELPELVRRLGAPQQPGPGPPPSRRGVHKEGSLGDELLPLGYSEPEQQEGASAGAPSPTLELASRSPSGGAAGPLLTPSQSLDGSRRSGYITIGYRGSYTIGRDAQADAKFRRVARITVCGKTSLAKEVFGDTLNESRDPDRPPERYTSRYYLKFNFLEQAFDKLSESGFHMVACSSTGTCAFASSTDQSEDKIWTSYTEYVFCRE

SEQ ID NO: 822789 - protein, 325 aa, Homo sapiens; identical to SEQ ID NO: 822788

SEQ ID NO: 822790 - protein, 325 aa, Homo sapiens; identical to SEQ ID NO: 822788

SEQ ID NO: 822791 - protein, 325 aa, Homo sapiens; identical to SEQ ID NO: 822788

SEQ ID NO: 822792 - protein, 325 aa, Homo sapiens; identical to SEQ ID NO: 822788

SEQ ID NO: 822793 - protein, 205 aa, Homo sapiens
MSLRDSSYSMAPGPCVVAQLPSEDMGHLTDPQSRDHGFLRTKMKVTLGDSPSGDLFTCRVCQKAFTYQRMLNRHMKCHNDVKRHLCTYCGKGFNDTFDLKRHVRTHTGVRPYKCSLCDKAFTQRCSLESHLKKIHGVQQKYAYKERRAKLYVCEECGCTSESQEGHVLHLKEHHPDSPLLRKTSKKVAVALQNTVTSLLQGSPHL

SEQ ID NO: 822794 - protein, 205 aa, Homo sapiens; identical to SEQ ID NO: 822793

SEQ ID NO: 822795 - protein, 255 aa, Homo sapiens
AGLPAWGTRGGVEAAGGRAGAVSLGFCPPQPYREPEPSVAEPPSCPLALNMSLRDSSYSMAPGPCVVAQLPSEDMGHLTDPQSRDHGFLRTKMKVTLGDSPSGDLFTCRVCQKAFTYQRMLNRHMKCHNDVKRHLCTYCGKGFNDTFDLKRHVRTHTGVRPYKCSLCDKAFTQRCSLESHLKKIHGVQQKYAYKERRAKLYVCEECGCTSESQEGHVLHLKEHHPDSPLLRKTSKKVAVALQNTVTSLLQGSPHL

SEQ ID NO: 822796 - protein, 255 aa, Homo sapiens; identical to SEQ ID NO: 822795

SEQ ID NO: 822797 - protein, 120 aa, Homo sapiens
TQAEPLACSSRSKVTETNCQLPLAYQEHLEMDDMSPRLRAFLSEPIGEKDVCWVDGISHELAINLVTKGINKAYILLGQFLLMHKNEAEFQRWLICCFGATECEAQQTSHCLKEWCACFL

SEQ ID NO: 822798 - protein, 216 aa, Homo sapiens
MSTNENANTPAARLHRFKNKGKDSTEMRRRRIEVNVELRKAKKDDQMLKRRNVSSFPDDATSPLQENRNNQGTVNWSVDDIVKGINSSNVENQLQATQAARKLLSREKQPPIDNIIRAGLIPKFVSFLGRTDCSPIQFESAWALTNIASGTSEQTKAVVDGGAIPAFISLLASPHAHISEQAVWALGNIAGDGSVFRDLVIKVRCQLNHCWVSLQS

SEQ ID NO: 822799 - protein, 2940 aa, Homo sapiens
APPAPAPPPSLSFSPRLGSDMRGRRGRPPKQPAAPAAERCAPAPPPPPPPPTSGPIGGLRSRHRGSSRGRWAAAQAEVAPKTRLSSPRGGSSSRRKPPPPPPAPPSTSAPGRGGRGGGGGRTGGGGGGGHLARTTAARRAVNKVVYDDHESEEEEEEEDMVSEEEEEEDGDAEETQDSEDDEEDEMEEDDDDSDYPEEMEDDDDDASYCTESSFRSHSTYSSTPGRRKPRVHRPRSPILEEKDIPPLEFPKSSEDLMVPNEHIMNVIAIYEVLRNFGTVLRLSPFRFEDFCAALVSQEQCTLMAEMHVVLLKAVLREEDTSNTTFGPADLKDSVNSTLYFIDGMTWPEVLRVYCESDKEYHHVLPYQEAEDYPYGPVENKIKVLQFLVDQFLTTNIAREELMSEGVIQYDDHCRVCHKLGDLLCCETCSAVYHLECVKPPLEEVPEDEWQCEVCVAHKVPGVTDCVAEIQKNKPYIRHEPIGYDRSRRKYWFLNRRLIIEEDTENENEKKIWYYSTKVQLAELIDCLDKDYWEAELCKILEEMREEIHRHMDITEDLTNKARGSNKSFLAAANEEILESIRAKKGDIDNVKSPEETEKDKNETENDSKDAEKNREEFEDQSLEKDSDDKTPDDDPEQGKSEVGDFTSEKSNGELSESPGAGKGASGSTRIITRLRNPDSKLSQLKSQQVAAAAHEANKLFKEGKEVLVVNSQGEISRLSTKKEVIMKGNINNYFKLGQEGKYRVYHNQYSTNSFALNKHQHREDHDKRRHLAHKFCLTPAGEFKWNGSVHGSKVLTISTLRLTITQLENNIPSSFLHPNWASHRANWIKAVQMCSKPREFALALAILECAVKPVVMLPIWRESLGHTRLHRMTSIEREEKEKVKKKEKKQEEEETMQQATWVKYTFPVKHQVWKQKGEEYRVTGYGGWSWISKTHVYRFVPKLPGNTNVNYRKSLEGTKNNMDENMDESDKRKCSRSPKKIKIEPDSEKDEVKGSDAAKGADQNEMDISKITEKKDQDVKELLDSDSDKPCKEEPMEVDDDMKTESHVNCQESSQVDVVNVSEGFHLRTSYKKKTKSSKLDGLLERRIKQFTLEEKQRLEKIKLEGGIKGIGKTSTNSSKNLSESPVITKAKEGCQSDSMRQEQSPNANNDQPEDLIQGCSQSDSSVLRMSDPSHTTNKLYPKDRVLDDVSIRSPETKCPKQNSIENDIEEKVSDLASRGQEPTKSKTKGNDFFIDDSKLASADDIGTLICKNKKPLIQEESDTIVSSSKSALHSSVPKSTNDRDATPLSRAMDFEGKLGCDSESNSTLENSSDTVSIQDSSEEDMIVQNSNESISEQFRTREQDVEVLEPLKCELVSGESTGNCEDRLPVKGTEANGKKPSQQKKLEERPVNKCSDQIKLKNTTDKKNNENRESEKKGQRTSTFQINGKDNKPKIYLKGECLKEISESRVVSGNVEPKVNNINKIIPENDIKSLTVKESAIRPFINGDVIMEDFNERNSSETKSHLLSSSDAEGNYRDSLETLPSTKESDSTQTTTPSASCPESNSVNQVEDMEIETSEVKKVTSSPITSEEESNLSNDFIDENGLPINKNENVNGESKRKTVITEVTTMTSTVATESKTVIKVEKGDKQTVVSSTENCAKSTVTTTTTTVTKLSTPSTGGSVDIISVKEQSKTVVTTTVTDSLTTTGGTLVTSMTVSKEYSTRDKVKLMKFSRPKKTRSGTALPSYRKFVTKSTKKSIFVLPNDDLKKLARKGGIREVPYFNYNAKPALDIWPYPSPRPTFGITWRYRLQTVKSLAGVSLMLRLLWASLRWDDMAAKVPPGGGSTRTETSETEITTTEIIKRRDVGPYGIRFEYCIRKIICPIGVPETPKETPTPQRKGLRSSALRPKRPETPKQTGPVIIETWVAEEELELWEIRAFAERVEKEKAQAVEQQAKKRLEQQKPTVIATSTTSPTSSTTSTISPAQKVMVAPISGSVTTGTKMVLTTKVGSPATVTFQQNKNFHQTFATWVKQGQSNSGVVQVQQKVLGIIPSSTGTSQQTFTSFQPRTATVTIRPNTSGSGGTTSNSQVITGPQIRPGMTVIRTPLQQSTLGKAIIRTPVMVQPGAPQQVMTQIIRGQPVSTAVSAPNTVSSTPGQKSLTSATSTSNIQSSASQPPRPQQGQVKLTMAQLTQLTQGHGGNQGLTVVIQGQGQTTGQLQLIPQGVTVLPGPGQQLMQAAMPNGTVQRFLFTPLATTATTASTTTTTVSTTAAGTGEQRQSKLSPQMQVHQDKTLPPAQSSSVGPAKAQPQTAQPSARPQPQTQPQSPAQPEVQTQPEVQTQTTVSSHVPSEAQPTHAQSSKPQVAAQSQPQSNVQGQSPVQCPKSITDSNTSINSIPTVSWTTIPGSDYNLTTDSNSTTYISSDTFPRPATVTTPGQSSTQTLSSGQTLNQVSVSSPSRPQLQIQQPQPQVIAVPQLQQQVQVLSQIQSQVVAQIQAQQSGVPQQIKLQLPIQIQQSSAVQTHQIQNVVTVQAASVQEQLQRVQQLRDQQQKKKQQQIEIKREHTLQASNQSEIIQKQVVMKHNAVIEHLKQKKSMTPAEREENQRMIVCNQVMKYILDKIDKEEKQAAKKRKREESVEQKRSKQNATKLSALLFKHKEQLRAEILKKRALLDKDLQIEVQEELKRDLKIKKEKDLMQLAQATAVAAPCPPVTPVLPAPPAPPPSPPPPPGVQHTGLLSTPTLPVASQKRKREEEKDSSSKSKKKKMISTTSKETKKDTKLYCICKTPYDESKFYIGCDRCQNWYHGRCVGILQSEAELIDEYVCPQCQSTEDAMTVLTPLTEKDYEGLKRVLRSLQAHKMAWPFLEPVDPNDAPDYYGVIKEPMDLATMEERVQRRYYEKLTEFVADMTKIFDNCRYYNPSDSPFYQCAEVLESFFVQKLKGFKASRSHNNKLQSTAS

SEQ ID NO: 822800 - protein, 221 aa, Homo sapiens
MSTNENANTPAARLHRFKNKGKDSTEMRRRRIEVNVELRKAKKDDQMLKRRNVSSFPDDATSPLQENRNNQGTVNWSVDDIVKGINSSNVENQLQATQAARKLLSREKQPPIDNIIRAGLIPKFVSFLGRTDCSPIQFESAWALTNIASGTSEQTKAVVDGGAIPAFISLLASPHAHISEQAVWALGNIAGDGSVFRDLVIKVRCQLTHCWLSLQFLICHL

SEQ ID NO: 822801 - protein, 221 aa, Homo sapiens; identical to SEQ ID NO: 822800

SEQ ID NO: 822802 - protein, 221 aa, Homo sapiens; identical to SEQ ID NO: 822800

SEQ ID NO: 822803 - protein, 221 aa, Homo sapiens; identical to SEQ ID NO: 822800

SEQ ID NO: 822804 - protein, 221 aa, Homo sapiens; identical to SEQ ID NO: 822800

SEQ ID NO: 822805 - protein, 221 aa, Homo sapiens; identical to SEQ ID NO: 822800

SEQ ID NO: 822806 - protein, 221 aa, Homo sapiens; identical to SEQ ID NO: 822800

SEQ ID NO: 822807 - protein, 221 aa, Homo sapiens; identical to SEQ ID NO: 822800

SEQ ID NO: 822808 - protein, 221 aa, Homo sapiens; identical to SEQ ID NO: 822800

SEQ ID NO: 822809 - protein, 221 aa, Homo sapiens; identical to SEQ ID NO: 822800

SEQ ID NO: 822810 - protein, 221 aa, Homo sapiens; identical to SEQ ID NO: 822800

SEQ ID NO: 822811 - protein, 221 aa, Homo sapiens; identical to SEQ ID NO: 822800

SEQ ID NO: 822812 - protein, 221 aa, Homo sapiens; identical to SEQ ID NO: 822800

SEQ ID NO: 822813 - protein, 221 aa, Homo sapiens; identical to SEQ ID NO: 822800

SEQ ID NO: 822814 - protein, 221 aa, Homo sapiens; identical to SEQ ID NO: 822800

SEQ ID NO: 822815 - protein, 221 aa, Homo sapiens; identical to SEQ ID NO: 822800

SEQ ID NO: 822816 - protein, 221 aa, Homo sapiens; identical to SEQ ID NO: 822800

SEQ ID NO: 822817 - protein, 221 aa, Homo sapiens; identical to SEQ ID NO: 822800

SEQ ID NO: 822818 - protein, 221 aa, Homo sapiens; identical to SEQ ID NO: 822800

SEQ ID NO: 822819 - protein, 221 aa, Homo sapiens; identical to SEQ ID NO: 822800

SEQ ID NO: 822820 - protein, 221 aa, Homo sapiens; identical to SEQ ID NO: 822800

SEQ ID NO: 822821 - protein, 221 aa, Homo sapiens; identical to SEQ ID NO: 822800

SEQ ID NO: 822822 - protein, 221 aa, Homo sapiens; identical to SEQ ID NO: 822800

SEQ ID NO: 822823 - protein, 221 aa, Homo sapiens; identical to SEQ ID NO: 822800

SEQ ID NO: 822824 - protein, 221 aa, Homo sapiens; identical to SEQ ID NO: 822800

SEQ ID NO: 822825 - protein, 221 aa, Homo sapiens; identical to SEQ ID NO: 822800

SEQ ID NO: 822826 - protein, 221 aa, Homo sapiens; identical to SEQ ID NO: 822800

SEQ ID NO: 822827 - protein, 221 aa, Homo sapiens; identical to SEQ ID NO: 822800

SEQ ID NO: 822828 - protein, 451 aa, Homo sapiens
MSTNENANTPAARLHRFKNKGKDSTEMRRRRIEVNVELRKAKKDDQMLKRRNVSSFPDDATSPLQENRNNQGTVNWSVDDIVKGINSSNVENQLQATQAARKLLSREKQPPIDNIIRAGLIPKFVSFLGRTDCSPIQFESAWALTNIASGTSEQTKAVVDGGAIPAFISLLASPHAHISEQAVWALGNIAGDGSVFRDLVIKVRCQLTTVGSPCSPDMSSLACGYLRNLTWTLSNLCRNKNPAPPIDAVEQILPTLVRLLHHDDPEVLADTCWAISYLTDGPNERIGMVVKTGVVPQLVKLLGASELPIVTPALRAIGNIVTGTDEQTQVVIDAGALAVFPSLLTNPKTNIQKEATWTMSNITAGRQDQIQQVVNHGLVPFLVSVLSKADFKTQKEAVWAVTNYTSGGTVEQIVYLVHCGIIEPLMNLLTAKDTKIILVILDAISNIFPGC

SEQ ID NO: 822829 - protein, 474 aa, Homo sapiens
MSTNENANTPAARLHRFKNKGKDSTEMRRRRIEVNVELRKAKKDDQMLKRRNVSSFPDDATSPLQENRNNQGTVNWSVDDIVKGINSSNVENQLQATQAARKLLSREKQPPIDNIIRAGLIPKFVSFLGRTDCSPIQFESAWALTNIASGTSEQTKAVVDGGAIPAFISLLASPHAHISEQAVWALGNIAGDGSVFRDLVIKVRCQLNHCWVSLQWVNCTVLKTKSRNTDPLLALLAVPDMSSLACGYLRNLTWTLSNLCRNKNPAPPIDAVEQILPTLVRLLHHDDPEVLADTCWAISYLTDGPNERIGMVVKTGVVPQLVKLLGASELPIVTPALRAIGNIVTGTDEQTQVVIDAGALAVFPSLLTNPKTNIQKEATWTMSNITAGRQDQIQQVVNHGLVPFLVSVLSKADFKTQKEAVWAVTNYTSGGTVEQIVYLVHCGIIEPLMNLLTAKDTKIILVILDAISNIFPGC

SEQ ID NO: 822830 - protein, 221 aa, Homo sapiens; identical to SEQ ID NO: 822800

SEQ ID NO: 822831 - protein, 234 aa, Homo sapiens
MSSLACGYLRNLTWTLSNLCRNKNPAPPIDAVEQILPTLVRLLHHDDPEVLADTCWAISYLTDGPNERIGMVVKTGVVPQLVKLLGASELPIVTPALRAIGNIVTGTDEQTQVVIDAGALAVFPSLLTNPKTNIQKEATWTMSNITAGRQDQIQQVVNHGLVPFLVSVLSKADFKTQKEAVWAVTNYTSGGTVEQIVYLVHCGIIEPLMNLLTAKDTKIILVILDAISNIFPGC

SEQ ID NO: 822832 - protein, 221 aa, Homo sapiens; identical to SEQ ID NO: 822800

SEQ ID NO: 822833 - protein, 217 aa, Homo sapiens
MSTNENANTPAARLHRFKNKGKDSTEMRRRRIEVNVELRKAKKDDQMLKRRNVSSFPDDATSPLQENRNNQGTVNWSVDDIVKGINSSNVENQLQATQAARKLLSREKQPPIDNIIRAGLIPKFVSFLGRTDCSPIQFESAWALTNIASGTSEQTKAVVDGGAIPAFISLLASPHAHISEQAVWALGNIAGDGSVFRDLVIKVRCQLNHMFGSPCQS

SEQ ID NO: 822834 - protein, 216 aa, Homo sapiens; identical to SEQ ID NO: 822798

SEQ ID NO: 822835 - protein, 268 aa, Homo sapiens
GLPWFQRVTGNKGSSCGSRAGRSRMAAAAAAGEARRVLVYGGRGALGSRCVQAFRARNWWVASVDVVENEEASASIIVKMTDSFTEQADQVTAEVGKLLGEEKVDAILCVAGGWAGGNAKSKSLFKNCDLMWKQSIWTSTISSHLATKHLKEGGLLTLAGAKAALDGTPGMIGYGMAKGAVHQLCQSLAGKNSGMPPGAAAIAVLPVTLDTPMNRKSMPEADFSSWTPLEFLVETFHDWITGKNRPSSGSLIQVVTTEGRTELTPAYF

SEQ ID NO: 822836 - protein, 305 aa, Homo sapiens
VTVPPGGGAPRAWQRARRQQRARSGARPPRVPSWRGWPAGAGRGAPARGIRSCGSRAGRSRMAAAAAAGEARRVLVYGGRGALGSRCVQAFRARNWWVASVDVVENEEASASIIVKMTDSFTEQADQVTAEVGKLLGEEKVDAILCVAGGWAGGNAKSKSLFKNCDLMWKQSIWTSTISSHLATKHLKEGGLLTLAGAKAALDGTPGMIGYGMAKGAVHQLCQSLAGKNSGMPPGAAAIAVLPVTLDTPMNRKSMPEADFSSWTPLEFLVETFHDWITGKNRPSSGSLIQVVTTEGRTELTPAYF

SEQ ID NO: 822837 - protein, 305 aa, Homo sapiens; identical to SEQ ID NO: 822836

SEQ ID NO: 822838 - protein, 305 aa, Homo sapiens; identical to SEQ ID NO: 822836

SEQ ID NO: 822839 - protein, 305 aa, Homo sapiens; identical to SEQ ID NO: 822836

SEQ ID NO: 822840 - protein, 305 aa, Homo sapiens; identical to SEQ ID NO: 822836

SEQ ID NO: 822841 - protein, 305 aa, Homo sapiens; identical to SEQ ID NO: 822836

SEQ ID NO: 822842 - protein, 305 aa, Homo sapiens; identical to SEQ ID NO: 822836

SEQ ID NO: 822843 - protein, 305 aa, Homo sapiens; identical to SEQ ID NO: 822836

SEQ ID NO: 822844 - protein, 274 aa, Homo sapiens
VTVPPGGGAPRAWQRARRQQRARSGARPPRVPSWRGWPAGAGRGAPARGIRSCGSRAGRSRMAAAAAAGEARRVLVYGGRGALGSRCVQAFRARNWVTAEVGKLLGEEKVDAILCVAGGWAGGNAKSKSLFKNCDLMWKQSIWTSTISSHLATKHLKEGGLLTLAGAKAALDGTPGMIGYGMAKGAVHQLCQSLAGKNSGMPPGAAAIAVLPVTLDTPMNRKSMPEADFSSWTPLEFLVETFHDWITGKNRPSSGSLIQVVTTEGRTELTPAYF

SEQ ID NO: 822845 - protein, 189 aa, Homo sapiens
MTDSFTEQADQVTAEVGKLLGEEKVDAILCVAGGWAGGNAKSKSLFKNCDLMWKQSIWTSTISSHLATKHLKEGGLLTLAGAKAALDGTPGMIGYGMAKGAVHQLCQSLAGKNSGMPPGAAAIAVLPVTLDTPMNRKSMPEADFSSWTPLEFLVETFHDWITGKNRPSSGSLIQVVTTEGRTELTPAYF

SEQ ID NO: 822846 - protein, 292 aa, Homo sapiens
VTVPPGGGAPRAWQRARRQQRARSGARPPRVPSWRGWPAGAGRGAPARGIRSCGSRAGRSRMAAAAAAGEARRVLVYGGRGALGSRCVQAFRARNWWVASVDVVENEEASASIIVKMTDSFTEQADQVTAEVGKLLGEEKVDAILCVAGGWAGGNAKSKSLFKNCDLMWKQSIWTSTISSHLATKHLKEGGLLTLAGAKAALDGTPGMIGYGMAKGAVHQLCQSLAGKNSGMPPGAAAIAVLPVTLDTPMNRKSMPEADFSSWTPLEFLVETFHDWITGKNRPRTELTPAYF

SEQ ID NO: 822847 - protein, 182 aa, Homo sapiens
ASRVMKIVSGAGRYPRKVDAILCVAGGWAGGNAKSKSLFKNCDLMWKQSIWTSTISSHLATKHLKEGGLLTLAGAKAALDGTPGMIGYGMAKGAVHQLCQSLAGKNSGMPPGAAAIAVLPVTLDTPMNRKSMPEADFSSWTPLEFLVETFHDWITGKNRPSSGSLIQVVTTEGRTELTPAYF

SEQ ID NO: 822848 - protein, 244 aa, Homo sapiens
VTVPPGGGAPRAWQRARRQQRARSGARPPRVPSWRGWPAGAGRGAPARGIRSCGSRAGRSRMAAAAAAGEARRVLVYGGRGALGSRCVQAFRARNWWVASVDVVENEEASASIIVKMTDSFTEQADQEGGLLTLAGAKAALDGTPGMIGYGMAKGAVHQLCQSLAGKNSGMPPGAAAIAVLPVTLDTPMNRKSMPEADFSSWTPLEFLVETFHDWITGKNRPSSGSLIQVVTTEGRTELTPAYF

SEQ ID NO: 822849 - protein, 334 aa, Homo sapiens
VTVPPGGGAPRAWQRARRQQRARSGARPPRVPSWRGWPAGAGRGAPARGIRSCGSRAGRSRMAAAAAAGEARRVLVYGGRGALGSRCVQAFRARNWWVASVDVVENEEASASIIVKMTDSFTEQADQVTAEVGKLLGEEKVDAILCVAGGWAGGNAKSKSLFKNCDLMWKQSIWTSTISSHLATKHLKEGGLLTLAGAKAALDGTPGMIGYGMAKGAVHQLCQSLAGKNSGMPPGAAAIAVLPVTLDTPMNRKSMPEADFSSWTPLEFLVETFHDWITGKNRPRPHLSAYEGPARKVTNLSQCGLVQPCVFCNPCLWYEIMSPIFLSHNMHLLS

SEQ ID NO: 822850 - protein, 119 aa, Homo sapiens
MSLLSPWPPVVTEPSSPHFPGMIGYGMAKGAVHQLCQSLAGKNSGMPPGAAAIAVLPVTLDTPMNRKSMPEADFSSWTPLEFLVETFHDWITGKNRPSSGSLIQVVTTEGRTELTPAYF

SEQ ID NO: 822851 - protein, 213 aa, Homo sapiens
VTVPPGGGAPRAWQRARRQQRARSGARPPRVPSWRGWPAGAGRGAPARGIRSCGSRAGRSRMAAAAAAGEARRVLVYGGRGALGSRCVQAFRARNWWVASVDVVENEEASASIIVKMTDSFTEQADQVTAEVGKLLGEEKVDAILCVAGGWAGGNAKSKSLFKNCDLMWKQSIWTSTISSHLATKHLKEGGLLTLAGAKAALDGTPGLPWIPR

SEQ ID NO: 822852 - protein, 189 aa, Homo sapiens
RACTPLAHTPTGARGVPLAGGAGGRGSVEGIGLPSGCGRMRGGCGEARRVLVYGGRGALGSRCVQAFRARNWWVASVDVVENEEASASIIVKMTDSFTEQADQVTAEVGKLLGEEKVDAILCVAGGWAGGNAKSKSLFKNCDLMWKQSIWTSTISSHLATKHLKEGGLLTLAGAKAALDGTPGLPWIPR

SEQ ID NO: 822853 - protein, 166 aa, Homo sapiens
MAAAAAAGEARRVLVYGGRGALGSRCVQAFRARNWIGVTTDTIWPAKPKWVASVDVVENEEASASIIVKMTDSFTEQADQVTAEVGKLLGEEKVDAILCVAGGWAGGNAKSKSLFKNCDLMWKQSIWTSTISSHLATKHLKEGGLLTLAGAKAALDGTPGLPWIPR

SEQ ID NO: 822854 - protein, 182 aa, Homo sapiens
VTVPPGGGAPRAWQRARRQQRARSGARPPRVPSWRGWPAGAGRGAPARGIRSCGSRAGRSRMAAAAAAGEARRVLVYGGRGALGSRCVQAFRARNWVTAEVGKLLGEEKVDAILCVAGGWAGGNAKSKSLFKNCDLMWKQSIWTSTISSHLATKHLKEGGLLTLAGAKAALDGTPGLPWIPR

SEQ ID NO: 822855 - protein, 190 aa, Homo sapiens
MWTSTISSHLATKHLKEGGLLTLAGAKAALDGTPGMIGYGGRGALGSRCVQAFRARNWWVASVDVVENEEASASIIVKMTDSFTEQADQVTAEVGKLLGEEKVDAILCVAGGWAGGNAKSKFICVHCRVTLDTPMNRKSMPEADFSSWTPLEFLVETFHDWITGKNRPSSGSLIQVVTTEGRTELTPAYF

SEQ ID NO: 822856 - protein, 129 aa, Homo sapiens
VTVPPGGGAPRAWQRARRQQRARSGARPPRVPSWRGWPAGAGRGAPARGIRSCGSRAGRSRMAAAAAAGEARRVLVYGGRGALGSRCVQAFRARNWWVASVDVVENEEASASIIVKMTDSFTEQADQNA

SEQ ID NO: 822857 - protein, 223 aa, Homo sapiens
VTVPPGGGAPRAWQRARRQQRARSGARPPRVPSWRGWPAGAGRGAPARGIRSCGSRAGRSRMAAAAAAGEARRVLVYGGRGALGSRCVQAFRARNWWVASVDVVENEEASASIIVKMTDSFTEQADQVTAEVGKLLGEEKVDAILCVAGGWAGGNAKSKSLFKNCDLMWKQSIWTSTISSHLATKHLKEGGLLTLAGAKAALDGTPELSMTGSQGKTDRAQEA

SEQ ID NO: 822858 - protein, 280 aa, Homo sapiens
VTVPPGGGAPRAWQRARRQQRARSGARPPRVPSWRGWPAGAGRGAPARGIRSCGSRAGRSRMAAAAAAGEARRVLVYGGRGALGSRCVQAFRARNWWVASVDVVENEEASASIIVKMTDSFTEQADQVTAEVGKLLGEEKVDAILCVAGGWAGGNAKSKSLFKNCDLMWKQSIWTSTISSHLATKHLKEGGLLTLAGAKAALDGTPGMIGYGMAKGAVHQLCQSLAGKNSGMPPGAAAIAVLPVTLDTPMNRKSMPEADFSSWTPLEFLVEPTLPPHLRY

SEQ ID NO: 822859 - protein, 246 aa, Homo sapiens
VTVPPGGGAPRAWQRARRQQRARSGARPPRVPSWRGWPAGAGRGAPARGIRSCGSRAGRSRMAAAAAAGEARRVLVYGGRGALGSRCVQAFRARNWWVASVDVVENEEASASIIVKMTDSFTEQADQVTAEVGKLLGEEKVDAILCVAGGWAGGNAKSKSLFKNCDLMWKQSIWTSTISSHLATKHLKLRKPNPGGNHRRKDGTHPSIFLGLISVPMRGLPEKSLTCLSVALSSLVFSVTPVCGTR

SEQ ID NO: 822860 - protein, 167 aa, Homo sapiens
MWKQSIWTSTISSHLATKHLKEGGLLTLAGAKAALDGTPGMIGYGMAKGAVHQLCQSLAGKNSGMPPGAAAIAVLPVTLDTPMNRKSMPEADFSSWTPLEFLVETFHDWITGKNRPRPHLSAYEGPARKVTNLSQCGLVQPCVFCNPCLWYEIMSPIFLSHNMHLLS

SEQ ID NO: 822861 - protein, 310 aa, Homo sapiens
MAAAAAAGEARRVLVYGGRGALGSRCVQAFRARNWWVASVDVVENEEASASIIVKMTDSFTEQADQVTAEVGKLLGEEKVDAILCVAGGWAGGNAKSKSLFKNCDLMWKQSIWTSTISSHLATKHLKAYQDQELGAKSNPEKGHQEKTDSRQSQKEQSPATIQSLGKGRNKRQSQPENSCHADSEKRPRWSARESCQRYAWKIYSADIEINRAYRETPRKEEPEEKDNEELHKTEKDNEQEKESRIRRSHKKKARRNQDKMKTRDEYLTESRKLNKPPKSVKKVGLSHLEQLEAKKRIIVPKRRKGSTRE

SEQ ID NO: 822862 - protein, 261 aa, Homo sapiens
MASPDWGYDDKNGPEQWSKLYPIANGNNQSPVDIKTSETKHDTSLKPISVSYNPATAKEIINVGHSFHVNFEDNDNRSVLKGGPFSDSYRLFQFHFHWGSTNEHGSEHTVDGVKYSAELHVAHWNSAKYSSLAEAASKADGLAVIGVLMKVGEANPKLQKVLDALQAIKTKGKRAPFTNFDPSTLLPSSLDFWTYPGSLTHPPLYESVTWIICKESISVSSEQLAQFRSLLSNVEGDNAVPMQHNNRPTQPLKGRTVRASF

SEQ ID NO: 822863 - protein, 261 aa, Homo sapiens; identical to SEQ ID NO: 822862

SEQ ID NO: 822864 - protein, 261 aa, Homo sapiens; identical to SEQ ID NO: 822862

SEQ ID NO: 822865 - protein, 261 aa, Homo sapiens; identical to SEQ ID NO: 822862

SEQ ID NO: 822866 - protein, 261 aa, Homo sapiens; identical to SEQ ID NO: 822862

SEQ ID NO: 822867 - protein, 111 aa, Homo sapiens
SLSVSAYLQKVLDALQAIKTKGKRAPFTNFDPSTLLPSSLDFWTYPGSLTHPPLYESVTWIICKESISVSSEQLAQFRSLLSNVEGDNAVPMQHNNRPTQPLKGRTVRASF

SEQ ID NO: 822868 - protein, 162 aa, Homo sapiens
IPAHAQTPNLQLPTSPSALASYSPSTTDMAQSLALSLLILVLAFGIPRTQGSDGGAQDCCLKYSQRKIPAKVVRSYRKQEPSLGCSIPAILFLPRKRSQAELCADPKELWVQQLMQHLDKTPSPQKPAQGCRKDRGASKTGKKGKGSKGCKRTERSQTPKGP

SEQ ID NO: 822869 - protein, 152 aa, Homo sapiens
IPAHAQTPNLQLPTSPSALASYSPSTTDMAQSLALSLLILVLAFGIPRTQGSDGGAQDCCLKYSQRKIPAKVVRSYRKQEPSLGCSIPAILFLPRKRSQAELCADPKELWVQQLMQHLDKTPSPQKPAQGCRKDRGASKTGKKGKGSKGCKR

SEQ ID NO: 822870 - protein, 198 aa, Homo sapiens
MPLGLLWLGLALLGALHAQAQDSTSDLIPAPPLSKVPLQQNFQDNQFQGKWYVVGLAGNAILREDKDPQKMYATIYELKEDKSYNVTSVLFRKKKCDYWIRTFVPGCQPGEFTLGNIKSYPGLTSYLVRVVSTNYNQHAMVFFKKVSQNREYFKITLYGRTKELTSELKENFIRFSKSLGLPENHIVFPVPIDQCIDG

SEQ ID NO: 822871 - protein, 198 aa, Homo sapiens; identical to SEQ ID NO: 822870

SEQ ID NO: 822872 - protein, 159 aa, Homo sapiens
MTLPILRFQGKWYVVGLAGNAILREDKDPQKMYATIYELKEDKSYNVTSVLFRKKKCDYWIRTFVPGCQPGEFTLGNIKSYPGLTSYLVRVVSTNYNQHAMVFFKKVSQNREYFKITLYGRTKELTSELKENFIRFSKSLGLPENHIVFPVPIDQCIDG

SEQ ID NO: 822873 - protein, 164 aa, Homo sapiens
PLLVYNYYQDNQFQGKWYVVGLAGNAILREDKDPQKMYATIYELKEDKSYNVTSVLFRKKKCDYWIRTFVPGCQPGEFTLGNIKSYPGLTSYLVRVVSTNYNQHAMVFFKKVSQNREYFKITLYGRTKELTSELKENFIRFSKSLGLPENHIVFPVPIDQCIDG

SEQ ID NO: 822874 - protein, 198 aa, Homo sapiens; identical to SEQ ID NO: 822870

SEQ ID NO: 822875 - protein, 198 aa, Homo sapiens; identical to SEQ ID NO: 822870

SEQ ID NO: 822876 - protein, 198 aa, Homo sapiens; identical to SEQ ID NO: 822870

SEQ ID NO: 822877 - protein, 159 aa, Homo sapiens
MDPDALLWGMSCHGLGRTESNRTLLLPWPHLVQHRRPKPGLSPLSPTHLSLPRKKKCDYWIRTFVPGCQPGEFTLGNIKSYPGLTSYLVRVVSTNYNQHAMVFFKKVSQNREYFKITLYGRTKELTSELKENFIRFSKSLGLPENHIVFPVPIDQCIDG

SEQ ID NO: 822878 - protein, 198 aa, Homo sapiens; identical to SEQ ID NO: 822870

SEQ ID NO: 822879 - protein, 102 aa, Homo sapiens
RGRSKDSCKRWAARRVHAGNIKSYPGLTSYLVRVVSTNYNQHAMVFFKKVSQNREYFKITLYGRTKELTSELKENFIRFSKSLGLPENHIVFPVPIDQCIDG

SEQ ID NO: 822880 - protein, 89 aa, Homo sapiens
VPFLRKAHLSYPGLTSYLVRVVSTNYNQHAMVFFKKVSQNREYFKITLYGRTKELTSELKENFIRFSKSLGLPENHIVFPVPIDQCIDG

SEQ ID NO: 822881 - protein, 109 aa, Homo sapiens
MKSELESEYFRSRLLGARLSSRWAYIEELPWEYPYVYLVRVVSTNYNQHAMVFFKKVSQNREYFKITLYGRTKELTSELKENFIRFSKSLGLPENHIVFPVPIDQCIDG

SEQ ID NO: 822882 - protein, 117 aa, Homo sapiens
SLATSSSTPARPSSHHSACFLGPEIMPLGLLWLGLALLGALHAQAQDSTSDLIPAPPLSKVPLQQNFQDNQFQGKWYVVGLAGNAILREDKDPQKMYATIYELKEDKSYNVTSVLFR

SEQ ID NO: 822883 - protein, 121 aa, Homo sapiens
SLATSSSTPARPSSHHSACFLGPEIMPLGLLWLGLALLGALHAQAQDSTSDLIPAPPLSKVPLQQNFQDNQVRADISWGCESQTDVTGKGWPKLRDPVVHLAVLPGIHLCSSFLCSLEQRL

SEQ ID NO: 822884 - protein, 212 aa, Homo sapiens
MKPPSSIQTSEFDSSDEEPIEDEQTPIHISWLSLSRVNCSQFLGLCALPGCKFKDVRRNVQKDTEELKSCGIQDIFVFCTRGELSKYRVPNLLDLYQQCGIITHHHPIADGGTPDIASCCEIMEELTTCLKNYRKTLIHCYGGLGRSCLVAACLLLYLSDTISPEQAIDSLRDLRGSGAIQTIKQYNYLHEFRDKLAAHLSSRDSQSRSVSR

SEQ ID NO: 822885 - protein, 172 aa, Homo sapiens
MKPPSSIQTSCKFKDVRRNVQKDTEELKSCGIQDIFVFCTRGELSKYRVPNLLDLYQQCGIITHHHPIADGGTPDIASCCEIMEELTTCLKNYRKTLIHCYGGLGRSCLVAACLLLYLSDTISPEQAIDSLRDLRGSGAIQTIKQYNYLHEFRDKLAAHLSSRDSQSRSVSR

SEQ ID NO: 822886 - protein, 206 aa, Homo sapiens [sequence omitted]

SEQ ID NO: 822887 - protein, 178 aa, Homo sapiens
MKSLLKMNRLQFIYHGCKFKDVRRNVQKDTEELKSCGIQDIFVFCTRGELSKYRVPNLLDLYQQCGIITHHHPIADGGTPDIASCCEIMEELTTCLKNYRKTLIHCYGGLGRSCLVAACLLLYLSDTISPEQAIDSLRDLRGSGAIQTIKQYNYLHEFRDKLAAHLSSRDSQSRSVSR

SEQ ID NO: 822888 - protein, 212 aa, Homo sapiens; identical to SEQ ID NO: 822884

SEQ ID NO: 822889 - protein, 203 aa, Homo sapiens
MKPPSSIQTSEFDSSDEEPIEDEQTPIHISWLSLSRVNCSQFLGLCALPGCKFKDVRRNVQKDTEELKSCGIQDIFVFCTRGELSKYRVPNLLDLYQQCGIITHHHPIADGGTPDIASCCEIMEELTTCLKNYRKTLIHCYGGLGRSCLVAACLLLYLSDTISPEQAIDSLRDLRGSGAIQTIKDLPTSQFLPQSVLGMDPLT

SEQ ID NO: 822890 - protein, 148 aa, Homo sapiens
MKPPSSIQTSEFDSSDEEPIEDEQTPIHISWLSLSRVNCSQFLGLCALPGCKFKDVRRNVQKDTEELKSCGIQDIFVFCTRGELSKYRVPNLLDLYQQCGIITHHHPIADGGTPDIASCCEIMEELTTCLKNYRKTLIHSCLSPTIPV

SEQ ID NO: 822891 - protein, 103 aa, Homo sapiens [sequence omitted]

SEQ ID NO: 822892 - protein, 207 aa, Homo sapiens
MSCTIEKILTDAKTLLERLREHDAAAESLVDQSAALHRRVAAMREAGTALPDQYQEDASDMKDMSKYKPHILLSQENTQIRDLQQENRELWISLEEHQDALELIMSKYRKQMLQLMVAKKAVDAEPVLKAHQSHSAEIESQIDRICEMGEVMRKAVQVDDDQFCKIQEKLAQLELENKELRELLSISSESLQARKENSMDTASQAIK

SEQ ID NO: 822893 - protein, 141 aa, Homo sapiens
MSCTIEKILTDAKTLLERLREHDAAAESLVDQSAALHRRVAAMREAGTALPDQYQEDASDMKDMSKYKPHILLSQENTQIRDLQQENRELWISLEEHQDALELIMSKYRKQMLQLMVAKKAVDAEPVLKAHQSHSAVRNFE

SEQ ID NO: 822894 - protein, 207 aa, Homo sapiens; identical to SEQ ID NO: 822892

SEQ ID NO: 822895 - protein, 207 aa, Homo sapiens; identical to SEQ ID NO: 822892

SEQ ID NO: 822896 - protein, 103 aa, Homo sapiens [sequence omitted]

SEQ ID NO: 822897 - protein, 163 aa, Homo sapiens [sequence omitted]

SEQ ID NO: 822898 - protein, 169 aa, Homo sapiens
MSCTIEKILTDAKTLLERLREHDAAAESLVDQSAALHRRVAAMREAGTALPDQYQEDASDMKDMSKYKPHILLSQENTQIRDLQQENRELWISLEEHQDALELIMSKYRKQMLQLMVAKKAVDAEPVLKAHQSHSALENKELRELLSISSESLQARKENSMDTASQAIK

SEQ ID NO: 822899 - protein, 475 aa, Homo sapiens
QLRAHLDPRKARAAPIPAGRAALGASRLPPCPSRPPAARRPAPCRDGCRIAGTNSAAEAKLFPLPGSGIPTGKMVPSSPRALFLLLLILACPEPRASQNCLSKQQLLSAIRQLQQLLKGQETRFAEGIRHMKSRLAALQNSVGRVGPDALPVSCPALNTPADGRKFGSKYLVDHEVHFTCNPGFRLVGPSSVVCLPNGTWTGEQPHCRGISECSSQPCQNGGTCVEGVNQYRCICPPGRTGNRCQHQAQTAAPEGSVAGDSAFSRAPRCAQVERAQHCSCEAGFHLSGAAGDSVCQGRRGLRQDTGDSTGRTWGGEGALTHRPPAGTGGFLRAVSEGLATLHYDVNECELYGQEGRPRLCMHACVNTPGSYRCTCPGGYRTLADGKSCEDVDECVGLQPVCPQGTTCINTGGSFQCVSPECPEGSGNVSYVKTSPFNLEGPQTLEVDVDMSEYLDRSFQANHVSKVTIFVSPYDF

SEQ ID NO: 822900 - protein, 475 aa, Homo sapiens; identical to SEQ ID NO: 822899

SEQ ID NO: 822901 - protein, 456 aa, Homo sapiens
QLRAHLDPRKARAAPIPAGRAALGASRLPPCPSRPPAARRPAPCRDGCRIAGTNSAAEAKLFPLPGSGIPTGKMVPSSPRALFLLLLILACPEPRASQNCLSKQQLLSAIRQLQQLLKGQETRFAEGIRHMKSRLAALQNSVGRVGPDALPVSCPALNTPADGRKFGSKYLVDHEVHFTCNPGFRLVGPSSVVCLPNGTWTGEQPHCRGISECSSQPCQNGGTCVEGVNQYRCICPPGRTGNRCQHQAQTAAPEGSVAGDSAFSRAPRCAQVERAQHCSCEAGFHLSGAAGDSVCQGRRGLRQDTGDSTGRTWGGEGALTHRPPAGTGGFLRAVSEGLATLHYDVNECELYGQEGRPRLCMHACVNTPGSYRCTCPGGYRTLADGKSCEDVDECVGLQPVCPQGTTCINTGGSFQCVSPECPEGSGNVSYVKTSPFLTEVFWRASLPALRFLLQLG

SEQ ID NO: 822902 - protein, 447 aa, Homo sapiens
QLRAHLDPRKARAAPIPAGRAALGASRLPPCPSRPPAARRPAPCRDGCRIAGTNSAAEAKLFPLPGSGIPTGKMVPSSPRALFLLLLILACPEPRASQNCLSKQQLLSAIRQLQQLLKGQETRFAEGIRHMKSRLAALQNSVGRVGPDALPVSCPALNTPADGRKFGSKYLVDHEVHFTCNPGFRLVGPSSVVCLPNGTWTGEQPHCRGISECSSQPCQNGGTCVEGVNQYRCICPPGRTGNRCQHQAQTAAPEGSVAGDSAFSRAPRCAQVERAQHCSCEAGFHLSGAAGDSVCQGRRGLRQDTGDSTGRTWGGEGALTHRPPAGTGGFLRAVSEGLATLHYDVNECELYGQEGRPRLCMHACVNTPGSYRCTCPGGYRTLADGKSCEDVDECVGLQPVCPQGTTCINTGGSFQCVSPECPEGSGNVSYVKTSPFQCERNPCPMDS

SEQ ID NO: 822903 - protein, 97 aa, Homo sapiens
MGGGGDVFSPQNCLSKQQLLSAIRQLQQLLKGQETRFAEGIRHMKSRLAALQNSVGRVGPDALPGGSPRRHRWGGSAALEHSPRDAPSWRPLVTPHP

SEQ ID NO: 822904 - protein, 358 aa, Homo sapiens
KYAGAMESEPCVCTEADFDCDYGYERHSNGQCLPAFWFNPSSLSKDCSLGQSYLNSTGYRKVVSNNCTDGVREQYTAKPQKCPGKAPRGLRIVTADGKLTAEQGHNVTLMVQLEEGDVQRTLIQVDFGDGIAVSYVNLSSMEDGIKHVYQNVGIFRVTVQVDNSLGSDSAVLYLHVTCPLEHVHLSLPFVTTKNKEVNATAVQWPSQVGTLTYVWWYGNNTEPLITLEGSISFRFTSEGMNTITVQVSAGNAILQDTKTIAVYEEFRSLRLSFSPNLDDYNPDIPEWRRDIGRVIKKSLVEATGVPGQHILVAVLPGLPTTAELFVLPYQDPAGENKRSTDDLEQLHVPFHEDASTDT

SEQ ID NO: 822905 - protein, 254 aa, Homo sapiens
KYAGAMESEPCVCTEADFDCDYGYERHSNGQCLPAFWFNPSSLSKDCSLGQSYLNSTGYRKVVSNNCTDGVREQYTAKPQKCPGKAPRGLRIVTADGKLTAEQGHNVTLMVQLEEGDVQRTLIQVDFGDGIAVSYVNLSSMEDGIKHVYQNVGIFRVTVQVDNSLGSDSAVLYLHVTCPLEHVHLSLPFVTTKNKEVNATAVQWPSQVGTLTYVWWYGNNTEVGSPSTCDLGTEAQFTLPEAKEGMKWLMNPRV

SEQ ID NO: 822906 - protein, 103 aa, Homo sapiens
PRQRAARGSRFRPGTNSRSARVQRARLSTGLLAPNDHGFQPASVRPTTMTPNRPPVSNCFSNREAAMTQLTTPLVTGDLRSSTIYGTGATSGSNHPLDRAAAK

SEQ ID NO: 822907 - protein, 103 aa, Homo sapiens; identical to SEQ ID NO: 822906

SEQ ID NO: 822908 - protein, 661 aa, Homo sapiens
REESGAGARPRRRSADSGAAGAGRGGGGEAAGKEEEGESRSRRASMGRLASRPLLLALLSLALCRGRVVRVPTATLVRVVGTELVIPCNVSDYDGPSEQNFDWSFSSLGSSFVELASTWEVGFPAQLYQERLQRGEILLRRTANDAVELHIKNVQPSDQGHYKCSTPSTDATVQGNYEDTVQVKVLADSLHVGPSARPPPSLSLREGEPFELRCTAASASPLHTHLALLWEVHRGPARRSVLALTHEGRFHPGLGYEQRYHSGDVRLDTVGSDAYRLSVSRALSADQGSYRCIVSEWIAEQGNWQEIQEKAVEVATVVIQPSVLRAAVPKNVSVAEGKELDLTCNITTDRADDVRPEVTWSFSRMPDSTLPGSRVLARLDRDSLVHSSPHVALSHVDARSYHLLVRDVSKENSGYYYCHVSLWAPGHNRSWHKVAEAVSSPAGVGVTWLEPDYQVYLNASKVPGFADDPTELACRVVDTKSGEANVRFTVSWYYRMNRRSDNVVTSELLAVMDGDWTLKYGERSKQRAQDGDFIFSKEHTDTFNFRIQRTTEEDRGNYYCVVSAWTKQRNNSWVKSKDVFSKPVNIFWALEDSVLVVKARQPKPFFAAGNTFEMTCKVSSKNIKSPRYSVLIMAEKPVGDLSSPNETETKYIHLSGPVILW

SEQ ID NO: 822909 - protein, 259 aa, Homo sapiens
MHHWVDGVVLEKVQEDEFRYRMYQTQVSDAGLYRCMVTAWSPVRGSLWREAATSLSNPIEIDFQTSGPIFNASVHSDTPSVIRGDLIKLFCIITVEGAALDPDDMAFDVSWFAVHSFGLDKAPVLLSSLDRKGIVTTSRRDWKSDLSLERVSVLEFLLQVHGSEDQDFGNYYCSVTPWVKSPTGSWQKEAEIHSKPVFITVKMDVLNAFKYPLLIGVGLSTVIGLLSCLIGYCSSHWCCKKEVQETRRERRRLMSMEMD

SEQ ID NO: 822910 - protein, 259 aa, Homo sapiens; identical to SEQ ID NO: 822909

SEQ ID NO: 822911 - protein, 259 aa, Homo sapiens; identical to SEQ ID NO: 822909

SEQ ID NO: 822912 - protein, 259 aa, Homo sapiens; identical to SEQ ID NO: 822909

SEQ ID NO: 822913 - protein, 259 aa, Homo sapiens; identical to SEQ ID NO: 822909

SEQ ID NO: 822914 - protein, 259 aa, Homo sapiens; identical to SEQ ID NO: 822909

SEQ ID NO: 822915 - protein, 259 aa, Homo sapiens; identical to SEQ ID NO: 822909

SEQ ID NO: 822916 - protein, 259 aa, Homo sapiens; identical to SEQ ID NO: 822909

SEQ ID NO: 822917 - protein, 259 aa, Homo sapiens; identical to SEQ ID NO: 822909

SEQ ID NO: 822918 - protein, 259 aa, Homo sapiens; identical to SEQ ID NO: 822909

SEQ ID NO: 822919 - protein, 259 aa, Homo sapiens; identical to SEQ ID NO: 822909

SEQ ID NO: 822920 - protein, 94 aa, Homo sapiens
MHHWVDGVVLEKVQEDEFRYRMYQTQVSDAGLYRCMVTAWSPVRGSLWREAATSLSNPIEIDFQTSGPIFNASVHSDTPSVIRFAVLYHLRVPS

SEQ ID NO: 822921 - protein, 153 aa, Homo sapiens
MHHWVDGVVLEKVQEDEFRYRMYQTQVSDAGLYRCMVTAWSPVRGSLWREAATSLSNPIEIDFQTSGPIFNASVHSDTPSVIRGDLIKLFCIITVEGAALDPGTSLHPHPFTMLLSVNVSHIIRTVLHRCGLGIGLSIYPLTAWPSTLYSLSV

SEQ ID NO: 822922 - protein, 144 aa, Homo sapiens
MPKNKGKGGKNRRRGKNENESEKRELVFKEDGQEYAQVIKMLGNGRLEAMCFDGVKRLCHIRGKLRKKVWINTSDIILVGLRDYQDNKADVILKYNADEARSLKAYGELPEHAKINETDTFGPGDDDEIQFDDIGDDDEDIDDI

SEQ ID NO: 822923 - protein, 144 aa, Homo sapiens; identical to SEQ ID NO: 822922

SEQ ID NO: 822924 - protein, 144 aa, Homo sapiens; identical to SEQ ID NO: 822922

SEQ ID NO: 822925 - protein, 104 aa, Homo sapiens
MLGNGRLEAMCFDGVKRLCHIRGKLRKKVWINTSDIILVGLRDYQDNKADVILKYNADEARSLKAYGELPEHAKINETDTFGPGDDDEIQFDDIGDDDEDIDDI

SEQ ID NO: 822926 - protein, 35 aa, Homo sapiens
MPKNKGNVRPDPGPRVFSAGFPGPVPEIAGTPAGS

SEQ ID NO: 822927 - protein, 144 aa, Homo sapiens; identical to SEQ ID NO: 822922

SEQ ID NO: 822928 - protein, 144 aa, Homo sapiens; identical to SEQ ID NO: 822922

SEQ ID NO: 822929 - protein, 144 aa, Homo sapiens; identical to SEQ ID NO: 822922

SEQ ID NO: 822930 - protein, 126 aa, Homo sapiens
MPKNKGKGGKNRRRGKNENESEKRELVFKEDGQEYAQVIKMLGNGRLEAMCFDGVKRLCHIRGKLRKKVWINTSDIILVGLRDYQDNKADVILKYNADEARSLKAYGELPEHFDDIGDDDEDIDDI

SEQ ID NO: 822931 - protein, 144 aa, Homo sapiens; identical to SEQ ID NO: 822922

SEQ ID NO: 822932 - protein, 583 aa, Homo sapiens
MAAAAVSESWPELELAERERRRELLLTGPGLEERVRAAGGQLPPRLFTLPLLHYLEVSGCGSLRAPGPGLAQGLPQLHSLVLRRNALGPGLSPELGPLPALRVLDLSGNALEALPPGQGLGPAEPPGLPQLQSLNLSGNRLRELPADLARCAPRLQSLNLTGNCLDSFPAELFRPGALPLLSELAAADNCLRELSPDIAHLASLKTLDLSNNQLSEIPAELADCPKLKEINFRGNKLRDKRLEKMVSGCQTRSILEYLRVGGRGGGKGKGRAEGSEKEESRRKRRERKQRREGGDGEEQDVGDAGRLLLRVLHVSENPVPLTVRVSPEVRDVRPYIVGAVVRGMDLQPGNALKRFLTSQTKLHEDLCEKRTAATLATHELRAVKGPLLYCARPPQDLKIVPLGRKEAKAKELVRQLQLEAEEQRKQKKRQSVSGLHRYLHLLDGNENYPCLVDADGDVISFPPITNSEKTKVKKTTSDLFLEVTSATSLQICKDVMDALILKMAEMKKYTLENKEEGSLSDTEADAVSGQLPDPTTNPSAGKDGPSLLVVEQVRVVDLEGSLKVVYPSKADLATAPPHVTVVR

SEQ ID NO: 822933 - protein, 583 aa, Homo sapiens; identical to SEQ ID NO: 822932

SEQ ID NO: 822934 - protein, 92 aa, Homo sapiens
QVKKVIFYLQKMAEMKKYTLENKEEGSLSDTEADAVSGQLPDPTTNPSAGKDGPSLLVVEQVRVVDLEGSLKVVYPSKADLATAPPHVTVVR

SEQ ID NO: 822935 - protein, 161 aa, Homo sapiens
MWSRHVAQAGVRWLIIGAVPLLISTGAFCPALFLTWAGSLLFRQPGGPPLPGAHHSDDRLSVDTPLAQHTPANSWAHAALLSQPPECWDHRHMPPHPAQCFFYNYAWNLYFFPYRYLHLLDGNENYPCLVDADGDVISFPPITNSEKTKVGWHVCEHGVSS

SEQ ID NO: 822936 - protein, 107 aa, Homo sapiens
SLRQSLLLLPRLEFNGTILAYHNLCLLGSSNSPASGSQVAGITGMCHHTRLIFVFLVETGYLHVGQAGLELLTSGDPPTSASQSAGITGVSRHAWPSSAFIHIFSPK

SEQ ID NO: 822937 - protein, 228 aa, Homo sapiens
LGLLQLREGASGRSMRSALCCLTILAFHTYISLILGTGEVNVAEAERLLAPFLQQFPNGSLVLFYHARIELLKGNLEEAQEVFQKCISVQEEWKQFHHLCYWELMWINVFQQNWMQAYYYSDLLCKESKWSKATYVFLKAAILSMLPEEDVVATNENVVTLFRQVDSLKQRIAGKSIPTEKFAVRKARRYSASLPAPVKLILPALVSAFIFFSCTRNKLPTHSSREHI

SEQ ID NO: 822938 - protein, 390 aa, Homo sapiens
LGLLQLREGASGRSMRSALCCLTILAFHTYISLILGTGEVNVAEAERLLAPFLQQFPNGSLVLFYHARIELLKGNLEEAQEVFQKCISVQEEWKQFHHLCYWELMWINVFQQNWMQAYYYSDLLCKESKWSKATYVFLKAAILSMLPEEDVVATNENVVTLFRFPGDAAAAAGGAVKFTVKTTGTNNVCVAMTFLWGWAGVLHRQVDSLKQRIAGKSIPTEKFAVRKARRYSASLPAPVKLILPALEMMYVWNGFSIVSKRKDLSENLLVTVEKAEAALQSQNFNSFSVDDECLVKLLKGCCLKNLQRPLQAELCYNHVVESEKLLKYDHYLVPFTLFELASLYKSQGEIDKAIKFLETARNNYKDYSLESRLHFRIQAALHLWRKPSSD

SEQ ID NO: 822939 - protein, 349 aa, Homo sapiens
LGLLQLREGASGRSMRSALCCLTILAFHTYISLILGTGEVNVAEAERLLAPFLQQFPNGSLVLFYHARIELLKGNLEEAQEVFQKCISVQEEWKQFHHLCYWELMWINVFQQNWMQAYYYSDLLCKESKWSKATYVFLKAAILSMLPEEDVVATNENVVTLFRQVDSLKQRIAGKSIPTEKFAVRKARRYSASLPAPVKLILPALEMMYVWNGFSIVSKRKDLSENLLVTVEKAEAALQSQNFNSFSVDDECLVKLLKGCCLKNLQRPLQAELCYNHVVESEKLLKYDHYLVPFTLFELASLYKSQGEIDKAIKFLETARNNYKDYSLESRLHFRIQAALHLWRKPSSD

SEQ ID NO: 822940 - protein, 183 aa, Homo sapiens
MIGEDKLIHFSGVALGEACTIVLRGATQQILDEAERSLHDALCVLAQTVKDSRTVYGGGCSEMLMAHAVTQLANRTPGKEAVAMESYAKALRMLPTIIADNAGYDSADLVAQLRAAHSEGNTTAGLDMREGTIGDMAILGITESFQVKRQVLLSAAEAAEVILRVDNIIKAAPRKRVPDHHPC

SEQ ID NO: 822941 - protein, 254 aa, Homo sapiens
EVGRVASLPASFSPLVPSTSCEGIHLCAELLGTMASLSLAPVNIFKAGADEERAETARLTSFIGAIAIGDLVKSTLGPKGMDKILLSSGRDASLMVTNDGATILKNIGVDNPAAKVLVDMSRVQDDEVGDGTTSVTVLAAELLREAESLIAKKIHPQTIIAGWREATKAAREALLSSAVDHGSDEVKFRQDLMNIAGTTLSSKLLTHHKDHFTKLAVEAVLRLKGSGNLEAIHIIKKLGGSLADSYLDEGFLLG

SEQ ID NO: 822942 - protein, 171 aa, Homo sapiens
MYIWLVLFSSDEVKFRQDLMNIAGTTLSSKLLTHHKDHFTKLAVEAVLRLKGSGNLEAIHIIKKLGGSLADSYLDEGFLLDKKIGVNQPKRIENAKILIANTGMDTDKIKIFGSRVRVDSTAKVAEIEHAEKEKMKEKVERILKHGINCFINRHLFFIFLNTLFGACGTGL

SEQ ID NO: 822943 - protein, 72 aa, Homo sapiens
CRFDDVVHTQKSPLLLQLHPGNVSLITTPVKHSHVLSIFGPVSSKVVFERYSIKEDCGICLSVPIISLSLDI

SEQ ID NO: 822944 - protein, 91 aa, Homo sapiens
MVTNDGATILKNIGVDNPAAKVLVDMSRVQDDEVGDGTTSVTVLAAELLRHADFELPIPPQAIMRVGEPHQACSEPLESSPPHRPTVPLVI

SEQ ID NO: 822945 - protein, 568 aa, Homo sapiens
EVGRVASLPASFSPLVPSTSCEGIHLCAELLGTMASLSLAPVNIFKAGADEERAETARLTSFIGAIAIGDLVKSTLGPKGMDKILLSSGRDASLMVTNDGATILKNIGVDNPAAKVLVDMSRVQDDEVGDGTTSVTVLAAELLREAESLIAKKIHPQTIIAGWREATKAAREALLSSAVDHGSDEVKFRQDLMNIAGTTLSSKLLTHHKDHFTKLAVEAVLRLKGSGNLEAIHIIKKLGGSLADSYLDEGFLLDKKIGVNQPKRIENAKILIANTGMDTDKIKIFGSRVRVDSTAKVAEIEHAEKEKMKEKVERILKHGINCFINRQLIYNYPEQLFGAAGVMAIEHADFAGVERLALVTGGEIASTFDHPELVKLGSCKLIEEVMIGEDKLIHFSGVALGEACTIVLRGATQQILDEAERSLHDALCVLAQTVKDSRTVYGGGCSEMLMAHAVTQLANRTPGKEAVAMESYAKALRMLPTIIADNAGYDSADLVAQLRAAHSEGNTTAGLDMREGTIGDMAILGITESFQVKRQVLLSAAEAAEVILRVDNIIKAAPRKRVPDHHPC

SEQ ID NO: 822946 - protein, 568 aa, Homo sapiens; identical to SEQ ID NO: 822945

SEQ ID NO: 822947 - protein, 488 aa, Homo sapiens
MDKILLSSGRDASLMVTNDGATILKNIGVDNPAAKVLVDMSRVQDDEVGDGTTSVTVLAAELLREAESLIAKKIHPQTIIAGWREATKAAREALLSSAVDHGSDEVKFRQDLMNIAGTTLSSKLLTHHKDHFTKLAVEAVLRLKGSGNLEAIHIIKKLGGSLADSYLDEGFLLDKKIGVNQPKRIENAKILIANTGMDTDKIKIFGSRVRVDSTAKVAEIEHAEKEKMKEKVERILKHGINCFINRQLIYNYPEQLFGAAGVMAIEHADFAGVERLALVTGGEIASTFDHPELVKLGSCKLIEEVMIGEDKLIHFSGVALGEACTIVLRGATQQILDEAERSLHDALCVLAQTVKDSRTVYGGGCSEMLMAHAVTQLANRTPGKEAVAMESYAKALRMLPTIIADNAGYDSADLVAQLRAAHSEGNTTAGLDMREGTIGDMAILGITESFQVKRQVLLSAAEAAEVILRVDNIIKAAPRKRVPDHHPC

SEQ ID NO: 822948 - protein, 488 aa, Homo sapiens; identical to SEQ ID NO: 822947

SEQ ID NO: 822949 - protein, 569 aa, Homo sapiens
EVGRVASLPASFSPLVPSTSCEGIHLCAELLGTMASLSLAPVNIFKAGADEERAETARLTSFIGAIAIGDLVKSTLGPKGMDKILLSSGRDASLMVTNDGATILKNIGVDNPAAKVLVDMSRVQDDEVGDGTTSVTVLAAELLREAESLIAKKIHPQTIIAGWREATKAAREALLSSAVDHGSDEVKFRQDLMNIAGTTLSSKLLTHHKDHFTKLAVEAVLRLKGSGNLEAIHIIKKLGGSLADSYLDEGFLLDKKIGVNQPKRIENAKILIANTGMDTDKIKIFGSRVRVDSTAKVAEIEHAEKEKMKEKVERILKHGINCFINRQLIYNYPEQLFGAAGVMAIEHADFAGVERLALVTGGEIASTFDHPELVKLGSCKLIEEVMIGEDKLIHFSGVALGEACTIVLRGATQQILDEAERSLHDALCVLAQTVKDSRTVYGGGCSEMLMAHAVTQLANRTPGKEAVAMESYAKALRMLPTIIADNAGYDSADLVAQLRAAHSEGNTTAGLDMREGTIGDMAILGITESFQVKRQVLLSAAEAAEVILRVDNIIKAAPRYPNTFLRKNY

SEQ ID NO: 822950 - protein, 395 aa, Homo sapiens [sequence omitted]

SEQ ID NO: 822951 - protein, 415 aa, Homo sapiens
GDLRVDNIIKAAPRKRVPDHLLSSAVDHGSDEVKFRQDLMNIAGTTLSSKLLTHHKDHFTKLAVEAVLRLKGSGNLEAIHIIKKLGGSLADSYLDEGFLLDKKIGVNQPKRIENAKILIANTGMDTDKIKIFGSRVRVDSTAKVAEIEHAEKEKMKEKVERILKHGINCFINRQLIYNYPEQLFGAAGVMAIEHADFAGVERLALVTGGEIASTFDHPELVKLGSCKLIEEVMIGEDKLIHFSGVALGEACTIVLRGATQQILDEAERSLHDALCVLAQTVKDSRTVYGGGCSEMLMAHAVTQLANRTPGKEAVAMESYAKALRMLPTIIADNAGYDSADLVAQLRAAHSEGNTTAGLDMREGTIGDMAILGITESFQVKRQVLLSAAEAAEVILRVDNIIKAAPRKRVPDHHPC

SEQ ID NO: 822952 - protein, 335 aa, Homo sapiens
EVGRVASLPASFSPLVPSTSCEGIHLCAELLGTMASLSLAPVNIFKAGADEERAETARLTSFIGAIAIGDLVKSTLGPKGMDKILLSSGRDASLMVTNDGATILKNIGVMAIEHADFAGVERLALVTGGEIASTFDHPELVKLGSCKLIEEVMIGEDKLIHFSGVALGEACTIVLRGATQQILDEAERSLHDALCVLAQTVKDSRTVYGGGCSEMLMAHAVTQLANRTPGKEAVAMESYAKALRMLPTIIADNAGYDSADLVAQLRAAHSEGNTTAGLDMREGTIGDMAILGITESFQVKRQVLLSAAEAAEVILRVDNIIKAAPRKRVPDHHPC

SEQ ID NO: 822953 - protein, 289 aa, Homo sapiens
EVGRVASLPASFSPLVPSTSCEGIHLCAELLGTMASLSLAPVNIFKAGADEERAETARLTSFIGAIAIGDLVKSTLGPKGMDKILLSSGRDASLMVTNDGATILKNIGVDNPAAKVLVDMSRVQDDEVGDGTTSVTVLAAELLREAESLIAKKIHPQTIIAGWREATKAAREALLSSAVDHGSDEVKFRQDLMNIAGTTLSSKLLTHHKDHFTKLAVEAVLRLKGSGNLEAIHIIKKLGGSLADSYLDEGFLLDKKIGVNQPKRIENAKILIANTGMDTDKIKVCNSTF

SEQ ID NO: 822954 - protein, 263 aa, Homo sapiens
EVGRVASLPASFSPLVPSTSCEGIHLCAELLGTMASLSLAPVNIFKAGADEERAETARLTSFIGAIAIGDLVKSTLGPKGMDKILLSSGRDASLMVTNDGATILKNIGVDNPAAKVLVDMSRVQDDEVGDGTTSVTVLAAELLREAESLIAKKIHPQTIIAGWREATKAAREALLSSAVDHGSDEVKFRQDLMNIAGTTLSSKLLTHHKDHFTKLAVEAVLRLKGSGNLEAIHIIKKLGGSLADSYLDEGMYECQIQEALIRC

SEQ ID NO: 822955 - protein, 174 aa, Homo sapiens
MDKILLSSGRDASLMVTNDGATILKNIGVDNPAAKVLVDMSRVQDDEVGDGTTSVTVLAAELLREAESLIAKKIHPQTIIAGWREATKAAREALLSSAVDHGSDEVKFRQDLMNIAGTTLSSKLLTHHKDHFTKLAVEAVLRLKGSGNLEAIHIIKKLGGSLADSYLDEGFLLG

SEQ ID NO: 822956 - protein, 552 aa, Homo sapiens
MRRLTRRLVLPVFGVLWITVLLFFWVTKRKLEVPTGPEVQTPKPSDADWDDLWDQFDERRYLNAKKWRVGDDPYKLYAFNQRESERISSNRAIPDTRHLRCTLLVYCTDLPPTSIIITFHNEARSTLLRTIRSVLNRTPTHLIREIILVDDFSNDPDDCKQLIKLPKVKCLRNNERQGLVRSRIRGADIAQGTTLTFLDSHCEVNRDWLQPLLHRVKEDYTRVVCPVIDIINLDTFTYIESASELRGGFDWSLHFQWEQLSPEQKARRLDPTEPIRTPIIAGGLFVIDKAWFDYLGKYDMDMDIWGGENFEISFRVWMCGGSLEIVPCSRVGHVFRKKHPYVFPDGNANTYIKNTKRTAEVWMDEYKQYYYAARPFALERPFGNVESRLDLRKNLRCQSFKWYLENIYPELSIPKESSIQKGNIRQRQKCLESQRQNNQETPNLKLSPCAKVKGEDAKSQVWAFTYTQQILQEELCLSVITLFPGAPVVLVLCKNGDDRQQWTKTGSHIEHIASHLCLDTDMFGDGTENGKEIVVNPCESSLMSQHWDMVSS

SEQ ID NO: 822957 - protein, 557 aa, Homo sapiens
MRRLTRRLVLPVFGVLWITVLLFFWVTKRKLEVPTGPEVQTPKVWSLFFKVAGMSPWAPQVPVSPTPPYQRGHLPTGGHLAVCHFPCLLQEAQFHLQTQVFLQVRCTLLVYCTDLPPTSIIITFHNEARSTLLRTIRSVLNRTPTHLIREIILVDDFSNDPDDCKQLIKLPKVKCLRNNERQGLVRSRIRGADIAQGTTLTFLDSHCEVNRDWLQPLLHRVKEDYTRVVCPVIDIINLDTFTYIESASELRGGFDWSLHFQWEQLSPEQKARRLDPTEPIRTPIIAGGLFVIDKAWFDYLGKYDMDMDIWGGENFEISFRVWMCGGSLEIVPCSRVGHVFRKKHPYVFPDGNANTYIKNTKRTAEVWMDEYKQYYYAARPFALERPFGNVESRLDLRKNLRCQSFKWYLENIYPELSIPKESSIQKGNIRQRQKCLESQRQNNQETPNLKLSPCAKVKGEDAKSQVWAFTYTQQILQEELCLSVITLFPGAPVVLVLCKNGDDRQQWTKTGSHIEHIASHLCLDTDMFGDGTENGKEIVVNPCESSLMSQHWDMVSS

SEQ ID NO: 822958 - protein, 763 aa, Homo sapiens
  misc_feature (109)..(109): Xaa can be any naturally occurring amino acid
MSMLVVNLDESHLGSLRVGLSVGPALPAHSLRPRAPPGVLGTASDSSLSLLESVSLSVLCMLWQWLAVLCCAVLCMPAVLCCAVGVTHLCACQPAAFSLSVMLCAVHAXCLPSVILPLPLFLCVCPCTLPAHVLCYLLLAAGDMCAALHVILPAPSKPVILVVRCSPEADVLLCQLNSLAPAKPLTCLWCVCPPCDVSCLLDDVNAGNWGTMRRLTRRLVLPVFGVLWITVLLFFWVTKRKLEVPTGPEVQTPKPSDADWDDLWDQFDERRYLNAKKWRVGDDPYKLYAFNQRESERISSNRAIPDTRHLRCTLLVYCTDLPPTSIIITFHNEARSTLLRTIRSVLNRTPTHLIREIILVDDFSNDPDDCKQLIKLPKVKCLRNNERQGLVRSRIRGADIAQGTTLTFLDSHCEVNRDWLQPLLHRVKEDYTRVVCPVIDIINLDTFTYIESASELRGGFDWSLHFQWEQLSPEQKARRLDPTEPIRTPIIAGGLFVIDKAWFDYLGKYDMDMDIWGGENFEISFRVWMCGGSLEIVPCSRVGHVFRKKHPYVFPDGNANTYIKNTKRTAEVWMDEYKQYYYAARPFALERPFGNVESRLDLRKNLRCQSFKWYLENIYPELSIPKESSIQKGNIRQRQKCLESQRQNNQETPNLKLSPCAKVKGEDAKSQVWAFTYTQQILQEELCLSVITLFPGAPVVLVLCKNGDDRQQWTKTGSHIEHIASHLCLDTDMFGDGTENGKEIVVNPCESSLMSQHWDMVSS

SEQ ID NO: 822959 - protein, 592 aa, Homo sapiens
MRRLTRRLVLPVFGVLWITVLLFFWVTKRKLEVPTGPEVQTPKLGTYSFLNGCAGHEPLGAPLGCACITLTSFPTNMRASSYEPSDADWDDLWDQFDERRYLNAKKWRVGDDPYKLYAFNQRESERISSNRAIPDTRHLRCTLLVYCTDLPPTSIIITFHNEARSTLLRTIRSVLNRTPTHLIREIILVDDFSNDPDDCKQLIKLPKVKCLRNNERQGLVRSRIRGADIAQGTTLTFLDSHCEVNRDWLQPLLHRVKEDYTRVVCPVIDIINLDTFTYIESASELRGGFDWSLHFQWEQLSPEQKARRLDPTEPIRTPIIAGGLFVIDKAWFDYLGKYDMDMDIWGGENFEISFRVWMCGGSLEIVPCSRVGHVFRKKHPYVFPDGNANTYIKNTKRTAEVWMDEYKQYYYAARPFALERPFGNVESRLDLRKNLRCQSFKWYLENIYPELSIPKESSIQKGNIRQRQKCLESQRQNNQETPNLKLSPCAKVKGEDAKSQVWAFTYTQQILQEELCLSVITLFPGAPVVLVLCKNGDDRQQWTKTGSHIEHIASHLCLDTDMFGDGTENGKEIVVNPCESSLMSQHWDMVSS

SEQ ID NO: 822960 - protein, 519 aa, Homo sapiens
MRRLTRRLVLPVFGVLWITVLLFFWVTKRKLEVPTGPEVQTPKPSDADWDDLWDQFDERRYLNAKKWRVGDDPYKLYAFNQRESERISSNRAIPDTRHLSVLNRTPTHLIREIILVDDFSNDPDDCKQLIKLPKVKCLRNNERQGLVRSRIRGADIAQGTTLTFLDSHCEVNRDWLQPLLHRVKEDYTRVVCPVIDIINLDTFTYIESASELRGGFDWSLHFQWEQLSPEQKARRLDPTEPIRTPIIAGGLFVIDKAWFDYLGKYDMDMDIWGGENFEISFRVWMCGGSLEIVPCSRVGHVFRKKHPYVFPDGNANTYIKNTKRTAEVWMDEYKQYYYAARPFALERPFGNVESRLDLRKNLRCQSFKWYLENIYPELSIPKESSIQKGNIRQRQKCLESQRQNNQETPNLKLSPCAKVKGEDAKSQVWAFTYTQQILQEELCLSVITLFPGAPVVLVLCKNGDDRQQWTKTGSHIEHIASHLCLDTDMFGDGTENGKEIVVNPCESSLMSQHWDMVSS

SEQ ID NO: 822961 - protein, 510 aa, Homo sapiens
MPSDADWDDLWDQFDERRYLNAKKWRVGDDPYKLYAFNQRESERISSNRAIPDTRHLRCTLLVYCTDLPPTSIIITFHNEARSTLLRTIRSVLNRTPTHLIREIILVDDFSNDPDDCKQLIKLPKVKCLRNNERQGLVRSRIRGADIAQGTTLTFLDSHCEVNRDWLQPLLHRVKEDYTRVVCPVIDIINLDTFTYIESASELRGGFDWSLHFQWEQLSPEQKARRLDPTEPIRTPIIAGGLFVIDKAWFDYLGKYDMDMDIWGGENFEISFRVWMCGGSLEIVPCSRVGHVFRKKHPYVFPDGNANTYIKNTKRTAEVWMDEYKQYYYAARPFALERPFGNVESRLDLRKNLRCQSFKWYLENIYPELSIPKESSIQKGNIRQRQKCLESQRQNNQETPNLKLSPCAKVKGEDAKSQVWAFTYTQQILQEELCLSVITLFPGAPVVLVLCKNGDDRQQWTKTGSHIEHIASHLCLDTDMFGDGTENGKEIVVNPCESSLMSQHWDMVSS

SEQ ID NO: 822962 - protein, 435 aa, Homo sapiens
MRRLTRRLVLPVFGVLWITVLLFFWVTKRKLEVPTGPEVQTPKPSDADWDDLWDQFDERRYLNAKKWRVGDDPYKLYAFNQRESERISSNRAIPDTRHLRCTLLVYCTDLPPTSIIITFHNEARSTLLRTIRSVLNRTPTHLIREIILVDDFSNDPDDCKQLIKLPKVKCLRNNERQGLVRSRIRGADIAQGTTLTFLDSHCEVNRDWLQPLLHRVKEDYTRVVCPVIDIINLDTFTYIESASELRGGFDWSLHFQWEQLSPEQKARRLDPTEPIRTPIIAGGLFVIDKAWFDYLGKYDMDMDIWGGENFEISFRVWMCGGSLEIVPCSRVGHVFRKKHPYVFPDGNANTYIKNTKRTAEVWMDEYKQYYYAARPFALERPFGKYGPSHTPSRSSRRSCACQSSPCSLAPQWFLSFARMEMTDSNGPKLVPTSST

SEQ ID NO: 822963 - protein, 508 aa, Homo sapiens [sequence omitted]

SEQ ID NO: 822964 - protein, 552 aa, Homo sapiens; identical to SEQ ID NO: 822956

SEQ ID NO: 822965 - protein, 556 aa, Homo sapiens
MRRLTRRLVLPVFGVLWITVLLFFWVTKRKLEVPTGPEVQTPKPSDADWDDLWDQFDERRYLNAKKWRVGDDPYKLYAFNQRESERISSNRAIPDTRHLSVLNRTPTHLIREIILVDDFSNDPDDCKQLIKLPKVKCLRNNERQGLVRSRIRGADIAQGTTLTFLDSHCEVNRDWLQPLLHRVKEDYTRVVCPVIDIINLDTFTYIESASELRGGFDWSLHFQWEQLSPEQKARRLDPTEPIRTPIIAGGLFVIDKAWFDYLGKYDMDMDIWGGENFEISFRVWMCGGSLEIVPCSRVGHVFRKKHPYVFPDGNANTYIKNTKRTAEVWMDEYKQYYYAARPFALERPFGNVESRLDLRKNLRCQSFKWYLENIYPELSIPKESSIQKGNIRQRQKCLESQANGTTGSSGQRPAGGTSEIWVQKPRVRNRGMLRPKALTQVLSQANTGGVQSTLLLNNEGSLLAYSGYGDTDARVTAAIASNIWAAYDRNGNQAFNEDNLKFILMDCMEGRVAITRVANLLLCMYAKETVGFGMLKAKAQALVQYLEEPLTQVAAS

SEQ ID NO: 822966 - protein, 74 aa, Homo sapiens
MIIAYWDPWCFLPACANHTRKCGCIPRVVASWILNKPSWSLSPQVWAFTYTQQILQEELCLSVITLFPGAPVVL

SEQ ID NO: 822967 - protein, 412 aa, Homo sapiens
MGQDQTKQQIEKGLQLYQSNQTEKALQVWTKVLEKSSDLMGRFRVLGCLVTAHSEMGRYKEMLKFAVVQIDTARELEDADFLLESYLNLARSNEKLCEFHKTISYCKTCLGLPGTRAGAQLGGQVSLSMGNAFLGLSVFQKALESFEKALRYAHNNDDAMLECRVCCSLGSFYAQVKDYEKALFFPCKAAELVNNYGKGWSLKYRAMSQYHMAVAYRLLGRLGSAMECCEESMKIALQHGDRPLQALCLLCFADIHRSRGDLETAFPRYDSAMSIMTEIGNRLGQVQALLGVAKCWVARKALDKALDAIERAQDLAEEVGNKLSQLKLHCLSESIYRSKGLQRELRAHVVRFHECVEETELYCGLCGESIGEKNSRLQALPCSHIFHLRCLQNNGTRSCPNCRRSSMKPGFV

SEQ ID NO: 822968 - protein, 353 aa, Homo sapiens
MGQDQTKQQIEKGLQLYQSNQTEKALQVWTKVLEKSSDLMGRFRVLGCLVTAHSEMGRYKEMLKFAVVQIDTARELEDADFLLESYLNLARSNEKLCEFHKTISYCKTCLGLPGTRAGAQLGGQVSLSMGNAFLGLSVFQKALESFEKALRYAHNNDDAMLECRVCCSLGSFYAQVKDYEKALFFPCKAAELVNNYGKGWSLKYRAMSQYHMAVAYRLLGRLGSAMECCEESMKIALQHGDRPLQALCLLCFADIHRSRGDLELSQLKLHCLSESIYRSKGLQRELRAHVVRFHECVEETELYCGLCGESIGEKNSRLQALPCSHIFHLRCLQNNGTRSCPNCRRSSMKPGFV

SEQ ID NO: 822969 - protein, 420 aa, Homo sapiens
MGQDQTKQQIEKGLQLYQSNQTEKALQVWTKVLEKSSDLMGRFRVLGCLVTAHSEMGRYKEMLKFAVVQIDTARELEDADFLLESYLNLARSNEKLCEFHKTISYCKTCLGLPGTRAGAQLGGQVSLSMGNAFLGLSVFQKALESFEKALRYAHNNDDAMLECRVCCSLGSFYAQVKDYEKALFFPCKAAELVNNYGKGWSLKYRAMSQYHMAVAYRLLGRLGSAMECCEESMKIALQHGDRPLQALCLLCFADIHRSRGDLEVKVTGMQGLGAGGRGTGLIQPDSIPHLALQTAFPRYDSAMSIMTEIGNRLGQVQALLGVAKCWVARKALDKVPAEQRDPELSQLPPLIHEAWLCMTPGSRRGLPPRHSCSFSTARQRPIYSWGSCQVVLTIAKALGPAQGCSPGPSSPPCLFVLCSL

SEQ ID NO: 822970 - protein, 208 aa, Homo sapiens
HSSGGGRGVGLSHWPPSQESMKIALQHGDRPLQALCLLCFADIHRSRGDLEVEVTGMQGLGAGGRGTGLIQPDSIPHLALQTAFPRYDSAMSIMTEIGNRLGQVQALLGVAKCWVARKALDKVPAEQRDPELSQLPPLIHEAWLCMTPGSRRGLPPRHSCSFSTARQRPIYSWGSCQVVLTIAKALGPAQGCSPGPSSPPCLFVLCSL

SEQ ID NO: 822971 - protein, 69 aa, Homo sapiens
PVSKACQTALPAALAYAPFQALDAIERAQDLAEEVGNKVRLDSVSWIWGQGPKWGTWVWGRAFLSLLTS

SEQ ID NO: 822972 - protein, 116 aa, Homo sapiens
MPRGSRSRTSRMAPPASRAPQMRAAPRPAPVAQPPAAAPPSAVGSSAAAPRQPGLMAQMATTAAGVAVGSAVGHTLGHAITGGFSGGSNAEPARPDITYQEPQGTQPSTAAAALPL

SEQ ID NO: 822973 - protein, 116 aa, Homo sapiens; identical to SEQ ID NO: 822972

SEQ ID NO: 822974 - protein, 116 aa, Homo sapiens; identical to SEQ ID NO: 822972

SEQ ID NO: 822975 - protein, 116 aa, Homo sapiens; identical to SEQ ID NO: 822972

SEQ ID NO: 822976 - protein, 116 aa, Homo sapiens; identical to SEQ ID NO: 822972

SEQ ID NO: 822977 - protein, 116 aa, Homo sapiens; identical to SEQ ID NO: 822972

SEQ ID NO: 822978 - protein, 116 aa, Homo sapiens; identical to SEQ ID NO: 822972

SEQ ID NO: 822979 - protein, 116 aa, Homo sapiens; identical to SEQ ID NO: 822972

SEQ ID NO: 822980 - protein, 133 aa, Homo sapiens
TLEDPPTRRSSNRRVPRMPRGSRSRTSRMAPPASRAPQMRAAPRPAPVAQPPAAAPPSAVGSSAAAPRQPGLMAQMATTAAGVAVGSAVGHTLGHAITGGFSGGSNAEPARPDITYQEPQGTQPSTAAAALPL

SEQ ID NO: 822981 - protein, 108 aa, Homo sapiens
MLSRMAPRPRAPQMRAAPRPAPVAQPPAAAPPSAVGSSAAAPRQPGLMAQMATTAAGVAVGSAVGHTLGHAITGGFSGGSNAEPARPDITYQEPQGTQPSTAAAALPL

SEQ ID NO: 822982 - protein, 116 aa, Homo sapiens; identical to SEQ ID NO: 822972

SEQ ID NO: 822983 - protein, 116 aa, Homo sapiens
MVALRWLSHVRRPSRRVPRMPRGSRSRTSRMAPPASRAPQMRAAPRPAPVAQPGLMAQMATTAAGVAVGSAVGHTLGHAITGGFSGGSNAEPARPDITYQEPQGTQPSTAAAALPL

SEQ ID NO: 822984 - protein, 110 aa, Homo sapiens
MPRGSRSRTSRMAPPASRAPQMRAAPRPAPVAQPPAAAPPSSVEEVMLSLRGLTSLTRSLREPSPAQQQQPCLYEIKQFPGSVPRTRVTSRLCEGFNEVLKQCRLANGLA

SEQ ID NO: 822985 - protein, 69 aa, Homo sapiens
QVQGVDREGRGVPVTSCSSNELQACGDDGERKFSACVLVGCALRPAPPPIFRSPQKSLSSSVVVTRPEA

SEQ ID NO: 822986 - protein, 51 aa, Homo sapiens
MANCSLDFLGSSYSTTSASRVTGTTGMRHLCTTLGDFILFYILAETGSHYV

SEQ ID NO: 822987 - protein, 116 aa, Homo sapiens; identical to SEQ ID NO: 822972

SEQ ID NO: 822988 - protein, 116 aa, Homo sapiens; identical to SEQ ID NO: 822972

SEQ ID NO: 822989 - protein, 116 aa, Homo sapiens; identical to SEQ ID NO: 822972

SEQ ID NO: 822990 - protein, 116 aa, Homo sapiens; identical to SEQ ID NO: 822972

SEQ ID NO: 822991 - protein, 116 aa, Homo sapiens; identical to SEQ ID NO: 822972

SEQ ID NO: 822992 - protein, 130 aa, Homo sapiens
MRLVQIRQSRRVPRMPRGSRSRTSRMAPPASRAPQMRAAPRPAPVAQPPAAAPPSAVGSSAAAPRQPGLMAQMATTAAGVAVGSAVGHTLGHAITGGFSGGSNAEPARPDITYQEPQGTQPSTAAAALPL

SEQ ID NO: 822993 - protein, 112 aa, Homo sapiens
MTQREAAGGGELSRAPQMRAAPRPAPVAQPPAAAPPSAVGSSAAAPRQPGLMAQMATTAAGVAVGSAVGHTLGHAITGGFSGGSNAEPARPDITYQEPQGTQPSTAAAALPL

SEQ ID NO: 822994 - protein, 130 aa, Homo sapiens; identical to SEQ ID NO: 822992

SEQ ID NO: 822995 - protein, 98 aa, Homo sapiens
GLRQWEFGTRYMAVLSGVRWLTRALVSAGNPGAWRGLMAQMATTAAGVAVGSAVGHTLGHAITGGFSGGSNAEPARPDITYQEPQGTQPSTAAAALPL

SEQ ID NO: 822996 - protein, 116 aa, Homo sapiens; identical to SEQ ID NO: 822972

SEQ ID NO: 822997 - protein, 116 aa, Homo sapiens; identical to SEQ ID NO: 822972

SEQ ID NO: 822998 - protein, 932 aa, Homo sapiens
PGYTAQSGGGAGVQASEEVNANLSERCGALFRMSSKESCGKKETSQRKDTTTSSPNFGEKDKKERKTPASSTSSSSIRSVSSEKRKLKSDHTDVLYYNIKRRQGLKRLSVEIDTLRRRPKIGSSSQRPIKLKEASYSNDNQIILQSPSSNGTKKDIHKCVDFKPKDIKLTNAGSKLDHGIKSLSSPKIASDVKPKAEGQASENKWSHLLVQREKMKELKKGRNSKFRDNSEKCVLEKWKRNQFSQDYNSNKIIKEPLGSRRQKISFKIPIKSRDTLQKLVEENVFNIDSNNSKTKQEEREYLESSQVSLNVTRQKTEHLLSDFTYKRTVHEWKRKHHYDHQESNDSHSRENLTQSFEAPCCSVSSESIQDADQEMQIVEELHAARVGKSVDLPGELMSMEIDLEDDVHSSSANNTSDRKLLIVIDTNILMNHLKFVRILKTTEVPGFDKLVLIIPWVVMQELDRMKEGKLLKRAQHKAIPAVHFINDSLKNQDRKLWGQSIQLASQKHYGLSDENNDDRVLKCCLQHQELFPCSFVILCTDDRNLRNKGLISGVKSLSKEELSAELLHLSLNTDVCHQPCIPKQQLKAETTPLKESYKEESTNSGLSILLESIVSDLEKSLGTGLSSILETEMKIAFGNLWMEILYLKPPWTLLHLLQCFKKHWLAVFGLVMEKNLLLTIESLYKNLRKANKAVDFTTVKFLLQDSRSLLHAFSTRSNYDGILPQTFAQVNNLLQTFAEVKTKLKPNSSENTVTKKQEGTSLKNSHNQEITVFSSSHLPQPSRHQEIWSILESVWITIYQNSTDVFQRLGSNSALTTSNIASFEEAFICLQKLMAAVRDILEGIQRILAPNSNYQDVETLYNFLIKYEVNKNVKFTAQEIYDCVSQTEYREKLTIGCRQLVEMEYTMQQCNASVYMEAKNRGWCEDMLNYRI

SEQ ID NO: 822999 - protein, 900 aa, Homo sapiens
MSSKESCGKKETSQRKDTTTSSPNFGEKDKKERKTPASSTSSSSIRSVSSEKRKLKSDHTDVLYYNIKRRQGLKRLSVEIDTLRRRPKIGSSSQRPIKLKEASYSNDNQIILQSPSSNGTKKDIHKCVDFKPKDIKLTNAGSKLDHGIKSLSSPKIASDVKPKAEGQASENKWSHLLVQREKMKELKKGRNSKFRDNSEKCVLEKWKRNQFSQDYNSNKIIKEPLGSRRQKISFKIPIKSRDTLQKLVEENVFNIDSNNSKTKQEEREYLESSQVSLNVTRQKTEHLLSDFTYKRTVHEWKRKHHYDHQESNDSHSRENLTQSFEAPCCSVSSESIQDADQEMQIVEELHAARVGKSVDLPGELMSMEIDLEDDVHSSSANNTSDRKLLIVIDTNILMNHLKFVRILKTTEVPGFDKLVLIIPWVVMQELDRMKEGKLLKRAQHKAIPAVHFINDSLKNQDRKLWGQSIQLASQKHYGLSDENNDDRVLKCCLQHQELFPCSFVILCTDDRNLRNKGLISGVKSLSKEELSAELLHLSLNTDVCHQPCIPKQQLKAETTPLKESYKEESTNSGLSILLESIVSDLEKSLGTGLSSILETEMKIAFGNLWMEILYLKPPWTLLHLLQCFKKHWLAVFGLVMEKNLLLTIESLYKNLRKANKAVDFTTVKFLLQDSRSLLHAFSTRSNYDGILPQTFAQVNNLLQTFAEVKTKLKPNSSENTVTKKQEGTSLKNSHNQEITVFSSSHLPQPSRHQEIWSILESVWITIYQNSTDVFQRLGSNSALTTSNIASFEEAFICLQKLMAAVRDILEGIQRILAPNSNYQDVETLYNFLIKYEVNKNVKFTAQEIYDCVSQTEYREKLTIGCRQLVEMEYTMQQCNASVYMEAKNRGWCEDMLNYRI

SEQ ID NO: 823000 - protein, 929 aa, Homo sapiens
RGCGPEPSLAGGSRTDHERQAVTIARTIACPGPQSCGKKETSQRKDTTTSSPNFGEKDKKERKTPASSTSSSSIRSVSSEKRKLKSDHTDVLYYNIKRRQGLKRLSVEIDTLRRRPKIGSSSQRPIKLKEASYSNDNQIILQSPSSNGTKKDIHKCVDFKPKDIKLTNAGSKLDHGIKSLSSPKIASDVKPKAEGQASENKWSHLLVQREKMKELKKGRNSKFRDNSEKCVLEKWKRNQFSQDYNSNKIIKEPLGSRRQKISFKIPIKSRDTLQKLVEENVFNIDSNNSKTKQEEREYLESSQVSLNVTRQKTEHLLSDFTYKRTVHEWKRKHHYDHQESNDSHSRENLTQSFEAPCCSVSSESIQDADQEMQIVEELHAARVGKSVDLPGELMSMEIDLEDDVHSSSANNTSDRKLLIVIDTNILMNHLKFVRILKTTEVPGFDKLVLIIPWVVMQELDRMKEGKLLKRAQHKAIPAVHFINDSLKNQDRKLWGQSIQLASQKHYGLSDENNDDRVLKCCLQHQELFPCSFVILCTDDRNLRNKGLISGVKSLSKEELSAELLHLSLNTDVCHQPCIPKQQLKAETTPLKESYKEESTNSGLSILLESIVSDLEKSLGTGLSSILETEMKIAFGNLWMEILYLKPPWTLLHLLQCFKKHWLAVFGLVMEKNLLLTIESLYKNLRKANKAVDFTTVKFLLQDSRSLLHAFSTRSNYDGILPQTFAQVNNLLQTFAEVKTKLKPNSSENTVTKKQEGTSLKNSHNQEITVFSSSHLPQPSRHQEIWSILESVWITIYQNSTDVFQRLGSNSALTTSNIASFEEAFICLQKLMAAVRDILEGIQRILAPNSNYQDVETLYNFLIKYEVNKNVKFTAQEIYDCVSQTEYREKLTIGCRQLVEMEYTMQQCNASVYMEAKNRGWCEDMLNYRI

SEQ ID NO: 823001 - protein, 932 aa, Homo sapiens; identical to SEQ ID NO: 822998

SEQ ID NO: 823002 - protein, 356 aa, Homo sapiens
PGYTAQSGGGAGVQASEEVNANLSERCGALFRMSSKESCGKKETSQRKDTTTSSPNFGEKDKKERKTPASSTSSSSIRSVSSEKRKLKSDHTDVLYYNIKRRQGLKRLSVEIDTLRRRPKIGSSSQRPIKLKEASYSNDNQIILQSPSSNGTKKDIHKCVDFKPKDIKLTNAGSKLDHGIKSLSSPKIASDVKPKAEGQASENKWSHLLVQREKMKELKKGRNSKFRDNSEKCVLEKWKRNQFSQDYNSNKIIKEPLGSRRQKISFKIPIKSRDTLQKLVEENVFNIDSNNSKTKQEEREYLESSQVSLNVTRQKTEHLLSDFTYKRTVHEWKRKHHYDHQESNDSHSRENLTQVR

SEQ ID NO: 823003 - protein, 432 aa, Homo sapiens
MTELQQDVEDTKPAKVLGKRESKLGSAHSEAENGVEEKKKACRSPTAQSPTPSVEADSPDQKKIISLWSKSSFDGASLASDKNDCKTESKNDPKTERKKSSSSSQYKANMHFHKLFLSVPTEEPLKQSFTCALQKEILYQGKLFVSENWICFHSKVFGKDTKISIPAFSVTLIKKTKTALLVPNALIIATVTDRYIFVSLLSRDSTYKLLKSVCGHLENTSVGNSPNPSSAENSFRADRPSSLPLDFNDEFSDLDGVVQQRRQDMEGYSSSGSQTPESENSRDFHATESQTVLNVSKGEAKPTRADAHVNRVPEGKAKSLPVQGLSETVGILHKVKSQKCPMLHHILIFYAIVVCALIISTFYMRYRINTLEEQLGLLTSIVDTHNTEQAAPSGLRSQVQFNVEVLCQELTANIVKLEKIQNNLQKLLENGD

SEQ ID NO: 823004 - protein, 432 aa, Homo sapiens; identical to SEQ ID NO: 823003

SEQ ID NO: 823005 - protein, 277 aa, Homo sapiens [sequence omitted]

SEQ ID NO: 823006 - protein, 414 aa, Homo sapiens
MTELQQDVEDTKPAKVLGKRESKLGSAHSEAENGVEEKKKACRSPTAQSPTPSVEADSPDQKKIISLWSKSSFDGASLASDKNDCKTESKNDPKTERKKSSSSSQYKANMHFHKLFLSVPTEEPLKQSFTCALQKEILYQGKLFVSENWICFHSKVFGKDTKISIPAFSVTLIKKTKTALLVPNALIIATVTDRYIFVSLLSRDSTYKLLKSVCGHLENTSVGNSPNPSSAENSFRADRPSSLPLDFNDEFSDLDGVVQQRRQDMEGYSSSGSQTPESENSRDFHATESQTVLNVSKGEAKPTRADAHVNRVPEGKVKSQKCPMLHHILIFYAIVVCALIISTFYMRYRINTLEEQLGLLTSIVDTHNTEQAAPSGLRSQVQFNVEVLCQELTANIVKLEKIQNNLQKLLENGD

SEQ ID NO: 823007 - protein, 293 aa, Homo sapiens
MTELQQDVEDTKPAKVLGKRESKLGSAHSEAENGVEEKKKACRSPTAQSPTPSVEADSPDQKKIISLWSKSSFDGASLASDKNDCKTESKNDPKTERKKSSSSSQYKANMHFHKLFLSVPTEEPLKQSFTCALQKEILYQGKLFVSENWICFHSKVFGKDTKISIPAFSVTLIKKTKTALLVPNALIIATVTDRYIFVSLLSRDSTYKLLKSVCGHLENTSVGNSPNPSSAENSFRADRPSSLPLDFNDEFSDLDGVVQQRRQDMEGYSSSGSQTPESENSRDLGNCCILTKI

SEQ ID NO: 823008 - protein, 285 aa, Homo sapiens
MWKTQSLRKCSGRGRANLAQPTQRLRMVWRRKRKPAGRQQPNPLPHLWRRTPQTRRKSLAYAHIFSPNLCFIQDQESKSSFDGASLASDKNDCKTESKNDPKTERKKSSSSSQYKANMHFHKLFLSVPTEEPLKQSFTCALQKEILYQGKLFVSENWICFHSKVFGKDTKISIPAFSVTLIKKTKTALLVPNALIIATVTDRYIFVSLLSRDSTYKLLKSVCGHLENTSVGNSPNPSSAENSFRADRPSSLPLVSCPHNYLNAKEREYVPQLHLCLHHDQGVGRA

SEQ ID NO: 823009 - protein, 355 aa, Homo sapiens
VGFKCGWCHPSEQTLKEKTSEIALVSEKHTNWLKELWLGRSGVNTKFLPDISQSFLKITWPLEDDKETASPTSKKEHSANIPSTAYALEEYVPRERSEASGSDLELSEAENGVEEKKKACRSPTAQSPTPSVEADSPDQKKIISLWSKSSFDGASLASDKNDCKTESKNDPKTERKKSSSSSQYKANMHFHKLFLSVPTEEPLKQSFTCALQKEILYQGKLFVSENWICFHSKVFGKDTKISIPAFSVTLIKKTKTALLVPNALIIATVTDRYIFVSLLSRDSTYKLLKSVCGHLENTSVGNSPNPSSAENSFRADRPSSLPLVSCPHNYLNAKEREYVPQLHLCLHHDQGVGRA

SEQ ID NO: 823010 - protein, 372 aa, Homo sapiens
VGFKCGWCHPSEQTLKEKTSEIALVSEKHTNWLKELWLGRSGVNTKFLPDISQSFLKITWPLEDDKETASPTSKKEHSANIPSTAYALEEYVPRERSEASGSRPGTLPLSECTKVKRFPFFFSSEAENGVEEKKKACRSPTAQSPTPSVEADSPDQKKIISLWSKSSFDGASLASDKNDCKTESKNDPKTERKKSSSSSQYKANMHFHKLFLSVPTEEPLKQSFTCALQKEILYQGKLFVSENWICFHSKVFGKDTKISIPAFSVTLIKKTKTALLVPNALIIATVTDRYIFVSLLSRDSTYKLLKSVCGHLENTSVGNSPNPSSAENSFRADRPSSLPLVSCPHNYLNAKEREYVPQLHLCLHHDQGVGRA

SEQ ID NO: 823011 - protein, 446 aa, Homo sapiens
MVKKRLPSSDTVFRFETPGSPRKANVEASRSSTDSPSSVFLSSEAENGVEEKKKACRSPTAQSPTPSVEADSPDQKKIISLWSKSSFDGASLASDKNDCKTESKNDPKTERKKSSSSSQYKANMHFHKLFLSVPTEEPLKQSFTCALQKEILYQGKLFVSENWICFHSKVFGKDTKISIPAFSVTLIKKTKTALLVPNALIIATVTDRYIFVSLLSRDSTYKLLKSVCGHLENTSVGNSPNPSSAENSFRADRPSSLPLDFNDEFSDLDGVVQQRRQDMEGYSSSGSQTPESENSRDFHATESQTVLNVSKGEAKPTRADAHVNRVPEGKAKSLPVQGLSETVGILHKVKSQKCPMLHHILIFYAIVVCALIISTFYMRYRINTLEEQLGLLTSIVDTHNTEQAAPSGLRSQVQFNVEVLCQELTANIVKLEKIQNNLQKLLENGD

SEQ ID NO: 823012 - protein, 178 aa, Homo sapiens
THVGFKCGWCHPSEQTLKEKTSEIALVSEKHTNWLKELWLGRSGVNTKFLPDISQSFLKITWPLEDDKETASPTSKKEHSANIPSTAYALEEYVPRERSEASGSRPGTVSDRSQTWKNHLGVECGFCGLKGLFGILRTECLHMENVFDCPLGEFSLFIIRVLSKSKNYPTYCNVLRNP

SEQ ID NO: 823013 - protein, 234 aa, Homo sapiens [sequence omitted]

SEQ ID NO: 823014 - protein, 234 aa, Homo sapiens [sequence omitted]

SEQ ID NO: 823015 - protein, 177 aa, Homo sapiens
MKICSLTLLSFLLLAAQVLLVEGKKKVKNGLHSKVVSEQKDTLGNTQIKQKSRPGNKGKFVTKDQANCRWAATEQEEGISLKVECTQLDHEFSCVFAGNPTSCLKLKDERVYWKQVARNLRSQKDICRYSKTAVKTRVCRKDFPESSLKPSTPFCKRCPSCPFQIATSSFEGPLERP

SEQ ID NO: 823016 - protein, 262 aa, Homo sapiens
MADFDTYDDRAYSSFGGGRGSRGSAGGHGSRSQKELPTEPPYTAYVGNLPFNTVQGDIDAIFKDLSIRSVRLVRDKDTDKFKGFCYVEFDEVDSLKEALTYDGALLGDRSLRVDIAEGRKQDKGGFGFRKGGPDDRGMGSSRESRGGWDSRDDFNSGFRDDFLGGRGGSRPGDRRTGPPMGSRFRDGPPLRGSNMDFREPTEEERAQRPRLQLKPRTVATPLNQVANPNSAIFGGARPREAERVSKRDDWVQEGMGKRPTVP

SEQ ID NO: 823017 - protein, 261 aa, Homo sapiens
QAARRTAPAAGRGELYCGVLPRSPWFLSERRRQMADFDTYDDRAYSSFGGGRGSRGSAGGHGSRSQKELPTEPPYTAYVGNLPFNTVQGDIDAIFKDLSIRSVRLVRDKDTDKFKGFCYVEFDEVDSLKEALTYDGALLGDRSLRVDIAEGRKQDKGGFGFRKGGPDDRGFRDDFLGGRGGSRPGDRRTGPPMGSRFRDGPPLRGSNMDFREPTEEERAQRPRLQLKPRTVATPLNQVANPNSAIFGGARPREEVVQKEQE

SEQ ID NO: 823018 - protein, 228 aa, Homo sapiens
MADFDTYDDRAYSSFGGGRGSRGSAGGHGSRSQKELPTEPPYTAYVGNLPFNTVQGDIDAIFKDLSIRSVRLVRDKDTDKFKGFCYVEFDEVDSLKEALTYDGALLGDRSLRVDIAEGRKQDKGGFGFRKGGPDDRGFRDDFLGGRGGSRPGDRRTGPPMGSRFRDGPPLRGSNMDFREPTEEERAQRPRLQLKPRTVATPLNQVANPNSAIFGGARPREEVVQKEQE

SEQ ID NO: 823019 - protein, 228 aa, Homo sapiens; identical to SEQ ID NO: 823018

SEQ ID NO: 823020 - protein, 261 aa, Homo sapiens; identical to SEQ ID NO: 823017

SEQ ID NO: 823021 - protein, 261 aa, Homo sapiens; identical to SEQ ID NO: 823017

SEQ ID NO: 823022 - protein, 261 aa, Homo sapiens; identical to SEQ ID NO: 823017

SEQ ID NO: 823023 - protein, 261 aa, Homo sapiens; identical to SEQ ID NO: 823017

SEQ ID NO: 823024 - protein, 261 aa, Homo sapiens; identical to SEQ ID NO: 823017

SEQ ID NO: 823025 - protein, 248 aa, Homo sapiens
MADFDTYDDRAYSSFGGGRGSRGSAGGHGSRSQKELPTEPPYTAYVGNLPFNTVQGDIDAIFKDLSIRSVRLVRDKDTDKFKGFCYVEFDEVDSLKEALTYDGALLGDRSLRVDIAEGRKQDKGGFGFRKGGPDDRGMGSSRESRGGWDSRDDFNSGFRDDFLGGRGGSRPGDRRTGPPMGSRFRDGPPLRGSNMDFREPTEEERAQRPRLQLKPRTVATPLNQVANPNSAIFGGARPREEVVQKEQE

SEQ ID NO: 823026 - protein, 281 aa, Homo sapiens
QAARRTAPAAGRGELYCGVLPRSPWFLSERRRQMADFDTYDDRAYSSFGGGRGSRGSAGGHGSRSQKELPTEPPYTAYVGNLPFNTVQGDIDAIFKDLSIRSVRLVRDKDTDKFKGFCYVEFDEVDSLKEALTYDGALLGDRSLRVDIAEGRKQDKGGFGFRKGGPDDRGMGSSRESRGGWDSRDDFNSGFRDDFLGGRGGSRPGDRRTGPPMGSRFRDGPPLRGSNMDFREPTEEERAQRPRLQLKPRTVATPLNQVANPNSAIFGGARPREEVVQKEQE

SEQ ID NO: 823027 - protein, 129 aa, Homo sapiens [sequence omitted]

SEQ ID NO: 823028 - protein, 129 aa, Homo sapiens [sequence omitted]

SEQ ID NO: 823029 - protein, 261 aa, Homo sapiens; identical to SEQ ID NO: 823017

SEQ ID NO: 823030 - protein, 235 aa, Homo sapiens
QAARRTAPAAGRGELYCGVLPRSPWFLSERRRQMADFDTYDDRAYSSFGGGRGSRGSAGGHGSRSQKELPTEPPYTAYVGNLPFNTVQGDIDAIFKDLSIRSVRLVRDKDTDKFKGFCYVEFDEVDSLKEALTYDGALLGDRSLRVDIAEGRKQDKGGFGFRKGGPDDRGFRDGPPLRGSNMDFREPTEEERAQRPRLQLKPRTVATPLNQVANPNSAIFGGARPREEVVQKEQE

SEQ ID NO: 823031 - protein, 205 aa, Homo sapiens
TTNTKEEIRLGTRLGVGDGKWRTSTPTTIGPTAASAAAEGFCYVEFDEVDSLKEALTYDGALLGDRSLRVDIAEGRKQDKGGFGFRKGGPDDRGMGSSRESRGGWDSRDDFNSGFRDDFLGGRGGSRPGDRRTGPPMGSRFRDGPPLRGSNMDFREPTEEERAQRPRLQLKPRTVATPLNQVANPNSAIFGGARPREEVVQKEQE

SEQ ID NO: 823032 - protein, 129 aa, Homo sapiens [sequence omitted]

SEQ ID NO: 823033 - protein, 261 aa, Homo sapiens; identical to SEQ ID NO: 823017

SEQ ID NO: 823034 - protein, 261 aa, Homo sapiens; identical to SEQ ID NO: 823017

SEQ ID NO: 823035 - protein, 261 aa, Homo sapiens; identical to SEQ ID NO: 823017

SEQ ID NO: 823036 - protein, 261 aa, Homo sapiens; identical to SEQ ID NO: 823017

SEQ ID NO: 823037 - protein, 261 aa, Homo sapiens; identical to SEQ ID NO: 823017

SEQ ID NO: 823038 - protein, 261 aa, Homo sapiens; identical to SEQ ID NO: 823017

SEQ ID NO: 823039 - protein, 200 aa, Homo sapiens
QAARRTAPAAGRGELYCGVLPRSPWFLSERRRQMADFDTYDDRAYSSFGGGRGSRGSAGGHGSRSQKELPTEPPYTAYVGNLPFNTVQGDIDAIFKDLSIRSVRLVRDKDTDKFKGFCYVEFDEVDSLKEALTYDGALLGQGALGVEGVVLVLHWADCGADAAFPPIPVACVLCGSVPSIGNIMRYCASHLPFSSEPKWV

SEQ ID NO: 823040 - protein, 261 aa, Homo sapiens; identical to SEQ ID NO: 823017

SEQ ID NO: 823041 - protein, 231 aa, Homo sapiens
QAARRTAPAAGRGELYCGVLPRSPWFLSERRRQMADFDTYDDRAYSSFGGGRGSRGSAGGHGSRSQKELPTEPPYTAYVGNLPFNTVQGDIDAIFKDLSIRSVRLVRDKDTDKFKGFCYVEFDEVDSLKEALTYDGALLGDRSLRVDIAEGRKQDKGGFGFRKGGPDDRGFRDDFLGGRGGSRPGDRRTGPPMGSRFRDGPPLRGSNMDFREPTEEDRTQRPRHPCWYQLD

SEQ ID NO: 823042 - protein, 158 aa, Homo sapiens
QAARRTAPAAGRGELYCGVLPRSPWFLSERRRQMADFDTYDDRAYSSFGGGRGSRGSAGGHGSRSQKELPTEPPYTAYVGNLPFNTVQGDIDAIFKDLSIRSVRLVRDKDTDKFKGFCYVEFDEVDSLKEALTYDGALLGDRSLRVVVRRVQQQLRPY

SEQ ID NO: 823043 - protein, 93 aa, Homo sapiens
RGSAGGHGSRSQKELPTEPPYTAYVGNLPFNTVQGDIDAIFKDLSIRSVRLVRDKDTDKFKGEFGGFLLYITVKCRGGWEGVLNKNRFVNQRL

SEQ ID NO: 823044 - protein, 59 aa, Homo sapiens
MSKAPIAGSNSTLAQYLELGGYGIIRLKVIAQPLTNTVAYPCLYYPMRHNYNSSIWLEK

SEQ ID NO: 823045 - protein, 31 aa, Homo sapiens
MHLPSQAKPHRYNEGSQCPTAQEILRDLSSS

SEQ ID NO: 823046 - protein, 144 aa, Homo sapiens
TVRKRGAGAGRGLAPLPFVLSHCVALPPQALLLCTLAARGEFGKGPWMPFLLVFEYVRTSPAPPRAGPCPVPRRRRGGHCPSFPLRALGGFPAAPCAAPPPGGVLTPHSGLSPPDRQPQGRRGDARPLPSEGRGLRTRRALPGI

SEQ ID NO: 823047 - protein, 302 aa, Homo sapiens
MDVLASYSIFQELQLVHDTGYFSALPSLEETWQQTCLELERYLQTEPRRISETFGEDLDCFLHASPPPCIEESFRRLDPLLLPVEAAICEKSSAVDILLSRDKLLSETCLSLQPASSSLDSYTAVNQAQLNAVTSLTPPSSPELSRHLVKTSQTLSAVDGTVTLKLVAKKAALSSVKVGGVATAAAAVTAAGAVKSGQSDSDQGGLGAEACPENKKRVHRCQFNGCRKVYTKSSHLKAHQRTHTGEKPYKCSWEGCEWRFARSDELTRHYRKHTGAKPFKCNHCDRCFSRSDHLALHMKRHI

SEQ ID NO: 823048 - protein, 230 aa, Homo sapiens
MDVLASYSIFQELQLVHDTGYFSALPSLEETWQQTCLELERYLQTEPRRISETFGEDLDCFLHASPPPCIEESFRRLDPLLLPVEAAICEKSSAVDILLSRDKLLSETCLSLQPASSSLDSYTAVNQAQLNAVTSLTPPSSPELSRHLVKTSQTLSAVDGTVTLKLVAKKAALSSVKVRSLISAHGRDVSGVLHEAMSSRGTTGNTQVQSPSNATTATGVFPGLTILPST

SEQ ID NO: 823049 - protein, 302 aa, Homo sapiens; identical to SEQ ID NO: 823047

SEQ ID NO: 823050 - protein, 256 aa, Homo sapiens
MDVLASYSIFQELQLVHDTGYFSALPSLEETWQQTCLELERYLQTEPRRISETFGEDLDCFLHASPPPCIEESFRRLDPLLLPVEAAICEKSSAVDILLSRDKLLSETCLSLQPASSSLDSYTAVNQAQLNAVTSLTPPSSPELSRHLVKTSQTLSAVDGTVTLKLVAKKAALSSVKVGGVATAAAAVTAAGAVKSGQSDSDQGGLGAEACPENKKRVHRCQFNGCRKVYTKSSHLKAHQRTHTGVFPGLTILPST

SEQ ID NO: 823051 - protein, 228 aa, Homo sapiens
MFPSWPTCLELERYLQTEPRRISETFGEDLDCFLHASPPPCIEESFRRLDPLLLPVEAAICEKSSAVDILLSRDKLLSETCLSLQPASSSLDSYTAVNQAQLNAVTSLTPPSSPELSRHLVKTSQTLSAVDGTVTLKLVAKKAALSSVKVGGVATAAAAVTAAGAVKSGQSDSDQGGLGAEACPENKKRVHRCQFNGCRKVYTKSSHLKAHQRTHTGVFPGLTILPST

SEQ ID NO: 823052 - protein, 134 aa, Homo sapiens
THRHTRTHTHTHTHTHTHTHTHTHIHTLTDPHTYTLSCTQLYLKYIRLFFMPCPSQMEEDEEGNQVNSARQTGCLLQHYWNYFPLLPMEIKENGCDVCAGGRQSEGLISLASQCNLIGESSILKLHMCSTNVSF

SEQ ID NO: 823053 - protein, 302 aa, Homo sapiens; identical to SEQ ID NO: 823047

SEQ ID NO: 823054 - protein, 302 aa, Homo sapiens; identical to SEQ ID NO: 823047

SEQ ID NO: 823055 - protein, 176 aa, Homo sapiens
  misc_feature (2)..(3): Xaa can be any naturally occurring amino acid
  misc_feature (8)..(8): Xaa can be any naturally occurring amino acid
  misc_feature (15)..(15): Xaa can be any naturally occurring amino acid
SXXSLSVXRLRGARXETQGANHTPVISAHQTRSTTTPPTPDTEHPVMDKNELVQKAKLAEQAERYDDMAACMKSVTEQGAELSNEERNLLSVAYKNVVGARRSSWRVVSSIEQKTEGAEKKQQMAREYREKIETELRDICNDVLSLLEKFLIPNASQAESKVFYLKMNRRLLPLLG

SEQ ID NO: 823056 - protein, 78 aa, Homo sapiens
VGRRRRGSPTMLIVAAGDDKKGIVDQSQQAYQEAFEISKKEMQPTHPIRLGLALNFSVFYYEILNSPRESLLSCKDSF

SEQ ID NO: 823057 - protein, 68 aa, Homo sapiens
DLEIPVYIDATKKQQMAREYREKIETELRDICNDVLSLLEKFLIPNASQAESKVFYLKMNRRLLPLLG

SEQ ID NO: 823058 - protein, 68 aa, Homo sapiens; identical to SEQ ID NO: 823057

SEQ ID NO: 823059 - protein, 68 aa, Homo sapiens; identical to SEQ ID NO: 823057

SEQ ID NO: 823060 - protein, 68 aa, Homo sapiens; identical to SEQ ID NO: 823057

SEQ ID NO: 823061 - protein, 68 aa, Homo sapiens; identical to SEQ ID NO: 823057

SEQ ID NO: 823062 - protein, 68 aa, Homo sapiens; identical to SEQ ID NO: 823057

SEQ ID NO: 823063 - protein, 68 aa, Homo sapiens; identical to SEQ ID NO: 823057

SEQ ID NO: 823064 - protein, 68 aa, Homo sapiens; identical to SEQ ID NO: 823057

SEQ ID NO: 823065 - protein, 68 aa, Homo sapiens; identical to SEQ ID NO: 823057

SEQ ID NO: 823066 - protein, 68 aa, Homo sapiens; identical to SEQ ID NO: 823057

SEQ ID NO: 823067 - protein, 68 aa, Homo sapiens; identical to SEQ ID NO: 823057

SEQ ID NO: 823068 - protein, 68 aa, Homo sapiens; identical to SEQ ID NO: 823057

SEQ ID NO: 823069 - protein, 68 aa, Homo sapiens; identical to SEQ ID NO: 823057

SEQ ID NO: 823070 - protein, 68 aa, Homo sapiens; identical to SEQ ID NO: 823057

SEQ ID NO: 823071 - protein, 68 aa, Homo sapiens; identical to SEQ ID NO: 823057

SEQ ID NO: 823072 - protein, 68 aa, Homo sapiens; identical to SEQ ID NO: 823057

SEQ ID NO: 823073 - protein, 68 aa, Homo sapiens; identical to SEQ ID NO: 823057

SEQ ID NO: 823074 - protein, 68 aa, Homo sapiens; identical to SEQ ID NO: 823057

SEQ ID NO: 823075 - protein, 68 aa, Homo sapiens; identical to SEQ ID NO: 823057

SEQ ID NO: 823076 - protein, 68 aa, Homo sapiens; identical to SEQ ID NO: 823057

SEQ ID NO: 823077 - protein, 68 aa, Homo sapiens; identical to SEQ ID NO: 823057

SEQ ID NO: 823078 - protein, 68 aa, Homo sapiens; identical to SEQ ID NO: 823057

SEQ ID NO: 823079 - protein, 68 aa, Homo sapiens; identical to SEQ ID NO: 823057

SEQ ID NO: 823080 - protein, 68 aa, Homo sapiens; identical to SEQ ID NO: 823057

SEQ ID NO: 823081 - protein, 68 aa, Homo sapiens; identical to SEQ ID NO: 823057

SEQ ID NO: 823082 - protein, 68 aa, Homo sapiens; identical to SEQ ID NO: 823057

SEQ ID NO: 823083 - protein, 68 aa, Homo sapiens; identical to SEQ ID NO: 823057

SEQ ID NO: 823084 - protein, 68 aa, Homo sapiens; identical to SEQ ID NO: 823057

SEQ ID NO: 823085 - protein, 68 aa, Homo sapiens; identical to SEQ ID NO: 823057

SEQ ID NO: 823086 - protein, 68 aa, Homo sapiens; identical to SEQ ID NO: 823057

SEQ ID NO: 823087 - protein, 68 aa, Homo sapiens; identical to SEQ ID NO: 823057

SEQ ID NO: 823088 - protein, 68 aa, Homo sapiens; identical to SEQ ID NO: 823057

SEQ ID NO: 823089 - protein, 68 aa, Homo sapiens; identical to SEQ ID NO: 823057

SEQ ID NO: 823090 - protein, 68 aa, Homo sapiens; identical to SEQ ID NO: 823057

SEQ ID NO: 823091 - protein, 68 aa, Homo sapiens; identical to SEQ ID NO: 823057

SEQ ID NO: 823092 - protein, 68 aa, Homo sapiens; identical to SEQ ID NO: 823057

SEQ ID NO: 823093 - protein, 68 aa, Homo sapiens; identical to SEQ ID NO: 823057

SEQ ID NO: 823094 - protein, 68 aa, Homo sapiens; identical to SEQ ID NO: 823057

SEQ ID NO: 823095 - protein, 68 aa, Homo sapiens; identical to SEQ ID NO: 823057

SEQ ID NO: 823096 - protein, 68 aa, Homo sapiens; identical to SEQ ID NO: 823057

SEQ ID NO: 823097 - protein, 68 aa, Homo sapiens; identical to SEQ ID NO: 823057

SEQ ID NO: 823098 - protein, 68 aa, Homo sapiens; identical to SEQ ID NO: 823057

SEQ ID NO: 823099 - protein, 568 aa, Homo sapiens
MASSCAVQVKLELGHRAQVRKKPTVEGFTHDWMVFVRGPEHSNIQHFVEKVVFHLHESFPRPKRVCKDPPYKVEESGYAGFILPIEVYFKNKEEPRKVRFDYDLFLHLEGHPPVNHLRCEKLTFNNPTEDFRRKLLKAGGDPNRSIHTSSSSSSSSSSSSSSSSSSSSSSSSSSSSSSSSSSSSSSSSSSTSFSKPHKLMKEHKEKPSKDSREHKSAFKEPSRDHNKSSKESSKKPKENKPLKEEKIVPKMAFKEPKPMSKEPKPDSNLLTITSGQDKKAPSKRPPISDSEELSAKKRKKSSSEALFKSFSSAPPLILTCSADKKQIKDKSHVKMGKVKIESETSEKKKSTLPPFDDIVDPNDSDVEENISSKSDSEQPSPASSSSSSSSSFTPSQTRQQGPLRSIMKDLHSDDNEEESDEVEDNDNDSEMERPVNRGGSRSRRVSLSDGSDSESSSASSPLHHEPPPPLLKTNNNQILEVKSPIKQSKSDKQIKNGECDKAYLDELVELHRRLMTLRERHILQQIVNLIEETGHFHITNTTFDFDLCSLDKTTVRKLQSYLETSGTS

SEQ ID NO: 823100 - protein, 220 aa, Homo sapiens
MRRTHTTNHAIQRQKHNWPDAHEGASGDAEAAEREERRDANREKVRASAHEGRGDDTSSGNRSQGREGKREPDNADNNDHTQATHRRLREEHTTQEQNMQQRRRADGERERAANEQTARRPHTRRRSKHPQAQAKRAESRGTRRSSTNEQSHRHTTEAAQRERRAAQRRHPQHTETKQTARRLAVRAARARTRERARARHQTERQVTERRDQTEASTQPP

SEQ ID NO: 823101 - protein, 568 aa, Homo sapiens; identical to SEQ ID NO: 823099

SEQ ID NO: 823102 - protein, 369 aa, Homo sapiens
MKEHKEKPSKDSREHKSAFKEPSRDHNKSSKESSKKPKENKPLKEEKIVPKMAFKEPKPMSKEPKPDSNLLTITSGQDKKAPSKRPPISDSEELSAKKRKKSSSEALFKSFSSAPPLILTCSADKKQIKDKSHVKMGKVKIESETSEKKKSTLPPFDDIVDPNDSDVEENISSKSDSEQPSPASSSSSSSSSFTPSQTRQQGPLRSIMKDLHSDDNEEESDEVEDNDNDSEMERPVNRGGSRSRRVSLSDGSDSESSSASSPLHHEPPPPLLKTNNNQILEVKSPIKQSKSDKQIKNGECDKAYLDELVELHRRLMTLRERHILQQIVNLIEETGHFHITNTTFDFDLCSLDKTTVRKLQSYLETSGTS

SEQ ID NO: 823103 - protein, 568 aa, Homo sapiens; identical to SEQ ID NO: 823099

SEQ ID NO: 823104 - protein, 329 aa, Homo sapiens
GAAYYYYCSEFKLLTMYGAMSKEPKPDSNLLTITSGQDKKAPSKRPPISDSEELSAKKRKKSSSEALFKSFSSAPPLILTCSADKKQIKDKSHVKMGKVKIESETSEKKKSTLPPFDDIVDPNDSDVEENISSKSDSEQPSPASSSSSSSSSFTPSQTRQQGPLRSIMKDLHSDDNEEESDEVEDNDNDSEMERPVNRGGSRSRRVSLSDGSDSESSSASSPLHHEPPPPLLKTNNNQILEVKSPIKQSKSDKQIKNGECDKAYLDELVELHRRLMTLRERHILQQIVNLIEETGHFHITNTTFDFDLCSLDKTTVRKLQSYLETSGTS

SEQ ID NO: 823105 - protein, 520 aa, Homo sapiens
MASSCAVQVKLELGHRAQVRKKPTVEGFTHDWMVFVRGPEHSNIQHFVEKVVFHLHESFPRPKRVCKDPPYKVEESGYAGFILPIEVYFKNKEEPRKVRFDYDLFLHLEGHPPVNHLRCEKLTFNNPTEDFRRKLLKAGGDPNRSIHTSSSSSSSSSSSSSSSSSSSSSSSSSSSSSSSSSSSSSSSSSSTSFSKPHKLMKEHKEKPSKDSREHKSAFKEPSRDHNKSSKESSKKPKENKPLKEEKIVPKMAFKEPKPMSKEPKPDSNLLTITSGQDKKAPSKRPPISDSEELSAKKRKKSSSEALFKSFSSAPPLILTCSADKKQIKDKSHVKMGKVKIESETSEKKKSTLPPFDDIVDPNDSDVEENISSKSDSEQPSPASSSSSSSSSFTPSQTRQQGPLRSIMKDLHSDDNEEESDEVEDNDNDSEMERPVNRGGSRSRRVSLSDGSDSESSSASSPLHHEPPPPLLKTNNNQIVNLIEETGHFHITNTTFDFDLCSLDKTTVRKLQSYLETSGTS

SEQ ID NO: 823106 - protein, 162 aa, Homo sapiens
MKDLHSDDNEEESDEVEDNDNDSEMERPVNRGGSRSRRVSLSDGSDSESSSASSPLHHEPPPPLLKTNNNQILEVKSPIKQSKSDKQIKNGECDKAYLDELVELHRRLMTLRERHILQQIVNLIEETGHFHITNTTFDFDLCSLDKTTVRKLQSYLETSGTS

SEQ ID NO: 823107 - protein, 162 aa, Homo sapiens; identical to SEQ ID NO: 823106

SEQ ID NO: 823108 - protein, 74 aa, Homo sapiens
GGHSTGRRHIQYTALLHNRGMTLRERHILQQIVNLIEETGHFHITNTTFDFDLCSLDKTTVRKLQSYLETSGTS

SEQ ID NO: 823109 - protein, 684 aa, Homo sapiens
QDGGGRGPGCCSGRRVRGGGGPGARGPRPPRPPSSFLCSCGWGGIPSLHNMEPSPLSPSGAALPLPLSLAPPPLPLPAAAVVHVSFPEVTSALLESLNQQRLQGQLCDVSIRVQGREFRAHRAVLAASSPYFHDQVLLKGMTSISLPSVMDPGAFETVLASAYTGRLSMAAADIVNFLTVGSVLQMWHIVDKCTELLREGRASATTTITTAAATSVTVPGAGVPSGSGGTVAPATMGSARSHASSRASENQSPSSSNYFSPRESTDFSSSSQEAFAASAVGSGERRGGGPVFPAPVVGSGGATSGKLLLEADELCDDGGDGRGAVVPGAGLRRPTYTPPSIMPQKHWVYVKRGGNCPAPTPLVPQDPDLEEEEEEEDLVLTCEDDEDEELGGSSRVPVGGGPEATLSISDVRTLSEPPDKGEEQVNFCESSNDFGPYEGGGPVAGLDDSGGPTPSSYAPSHPPRPLLPLDMQGNQILVFPSSSSSSSSQAPGQPPGNQAEHGAVTVGGTSVGSLGVPGSVGGVPGGTGSGDGNKIFLCHCGKAFSHKSMRDRHVNMHLNLRPFDCPVCNKKFKMKHHLTEHMKTHTGLKPYECGVCAKKFMWRDSFMRHRGHCERRHRLGGVGAVPGPGTPTGPSLPSKRESPGVGGGSGDEASAATPPSSRRVWSPPRVHKVEMGFGGGGGAN

SEQ ID NO: 823110 - protein, 662 aa, Homo sapiens
QDGGGRGPGCCSGRRVRGGGGPGARGPRPPRPPSSFLCSCGWGGIPSLHNMEPSPLSPSGAALPLPLSLAPPPLPLPAAAVVHVSFPEVTSALLESLNQQRLQGQLCDVSIRVQGREFRAHRAVLAASSPYFHDQVLLKGMTSISLPSVMDPGAFETVLASAYTGRLSMAAADIVNFLTVGSVLQMWHIVDKCTELLREGRASATTTITTAAATSVTVPGAGVPSGSGGTVAPATMGSARSHASSRASENQSPSSSNYFSPRESTDFSSSSQEAFAASAVGSGERRGGGPVFPAPVVGSGGATSGKLLLEADELCDDGGDGRGAVVPGAGLRRPTYTPPSIMPQKHWVYVKRGGNCPAPTPLVPQDPDLEEEEEEEDLVLTCEDDEDEELGGSSRVPVGGGPEATLSISDVRTLSEPPDKGEEQVNFCESSNDFGPYEGGGPVAGLDDSGGPTPSSYAPSHPPRPLLPLDMQGNQILVFPSSSSSSSSQAPGQPPGNQAEHGAVTVGGTSVGSLGVPGSVGGVPGGTGSGDGNKIFLCHCGKAFSHKSMRDRHVNMHLNLRPFDCPVCNKKFKMKHHLTEHMKTHTGLKPYECGVCAKKFMWRDSFMRHRGHCERRHRLGGVGAVPGPGTPTGPSLPSSRRVWSPPRVHKVEMGFGGGGGAN

SEQ ID NO: 823111 - protein, 130 aa, Homo sapiens
KARYKRWEKLQIKRKKRHYIKALIATDYLPTTQMVFIKYMWDKKKFRKGTTVSPSPAHSTTQPLPPKVFPELNPSFPSDGYTEAPAPQSRLHMEGGRGGVLNILQSQGQGSGGCSLCLKSVFVLSWRQGL

SEQ ID NO: 823112 - protein, 208 aa, Homo sapiens
MAFRQPAYKNRLCLQFKQLIQTQKAQQELEEQTRRALELEQERKRAQSEAEKLAKERQEAEEAKEALLQASRDQKKTQEQLALEMAELTARISQLEMARQKKESEAVEWQQKAQMVQEDLEKTRAELKTAMSTPHVAEPAENEQDEQDENGAEASADLRADAMAKDRSEEERTTEAEKNERVQKHLKALTSELANARDESVLLLGGPL

SEQ ID NO: 823113 - protein, 577 aa, Homo sapiens
MPKTISVRVTTMDAELEFAIQPNTTGKQLFDQVVKTIGLREVWFFGLQYQDTKGFSTWLKLNKKVTAQDVRKESPLLFKFRAKFYPEDVSEELIQDITQRLFFLQVKEGILNDDIYCPPETAVLLASYAVQSKYGDFNKEVHKSGYLAGDKLLPQRVLEQHKLNKDQWEERIQVWHEEHRGMLREDAVLEYLKIAQDLEMYGVNYFSIKNKKGSELWLGVDALGLNIYEQNDRLTPKIGFPWSEIRNISFNDKKFVIKPIDKKAPDFVFYAPRLRINKRILALCMGNHELYMRRRKPDTIEVQQMKAQAREEKHQKQMERAMLENEKKKREMAEKEKEKIEREKEELMERLKQIEEQTKKAQQELEEQTRRALELEQERKRAQSEAEKLAKERQEAEEAKEALLQASRDQKKTQEQLALEMAELTARISQLEMARQKKESEAVEWQQKAQMVQEDLEKTRAELKTAMSTPHVAEPAENEQDEQDENGAEASADLRADAMAKDRSEEERTTEAEKNERVQKHLKALTSELANARDESKKTANDMIHAENMRLGRDKYKTLRQIRQGNTKQRIDEFESM

SEQ ID NO: 823114 - protein, 559 aa, Homo sapiens
MPKTISVRVTTMDAELEFAIQPNTTGKQLFDQVVKTIGLREVWFFGLQYQDTKGFSTWLKLNKKVTAQDVRKESPLLFKFRAKFFLQVKEGILNDDIYCPPETAVLLASYAVQSKYGDFNKEVHKSGYLAGDKLLPQRVLEQHKLNKDQWEERIQVWHEEHRGMLREDAVLEYLKIAQDLEMYGVNYFSIKNKKGSELWLGVDALGLNIYEQNDRLTPKIGFPWSEIRNISFNDKKFVIKPIDKKAPDFVFYAPRLRINKRILALCMGNHELYMRRRKPDTIEVQQMKAQAREEKHQKQMERAMLENEKKKREMAEKEKEKIEREKEELMERLKQIEEQTKKAQQELEEQTRRALELEQERKRAQSEAEKLAKERQEAEEAKEALLQASRDQKKTQEQLALEMAELTARISQLEMARQKKESEAVEWQQKAQMVQEDLEKTRAELKTAMSTPHVAEPAENEQDEQDENGAEASADLRADAMAKDRSEEERTTEAEKNERVQKHLKALTSELANARDESKKTANDMIHAENMRLGRDKYKTLRQIRQGNTKQRIDEFESM

SEQ ID NO: 823115 - protein, 503 aa, Homo sapiens
KVDTYRIPVDDQHMVPVLNALDSMQQIECSVSGRRKRSTEAVDRPSTAVLLASYAVQSKYGDFNKEVHKSGYLAGDKLLPQRVLEQHKLNKDQWEERIQVWHEEHRGMLREDAVLEYLKIAQDLEMYGVNYFSIKNKKGSELWLGVDALGLNIYEQNDRLTPKIGFPWSEIRNISFNDKKFVIKPIDKKAPDFVFYAPRLRINKRILALCMGNHELYMRRRKPDTIEVQQMKAQAREEKHQKQMERAMLENEKKKREMAEKEKEKIEREKEELMERLKQIEEQTKKAQQELEEQTRRALELEQERKRAQSEAEKLAKERQEAEEAKEALLQASRDQKKTQEQLALEMAELTARISQLEMARQKKESEAVEWQQKAQMVQEDLEKTRAELKTAMSTPHVAEPAENEQDEQDENGAEASADLRADAMAKDRSEEERTTEAEKNERVQKHLKALTSELANARDESKKTANDMIHAENMRLGRDKYKTLRQIRQGNTKQRIDEFESM

SEQ ID NO: 823116 - protein, 300 aa, Homo sapiens
DPPFGVLADDKRKMPFTEKIMAAPEQADKMKAIVEKHQKQMVRAMLENEKKKREMAEKEKEKIEREKEELMERLKQIEEQTKKAQQELEEQTRRALELEQERKRAQSEAEKLAKERQEAEEAKEALLQASRDQKKTQEQLALEMAELTARISQLEMARQKKESEAVEWQQKAQMVQEDLEKTRAELKTAMSTPHVAEPAENEQDEQDENGAEASADLRADAMAKDRSEEERTTEAEKNERVQKHLKALTSELANARDESKKTANDMIHAENMRLGRDKYKTLRQIRQGNTKQRIDEFESM

SEQ ID NO: 823117 - protein, 241 aa, Homo sapiens
MAFRQPAYKNRLCLQFKQLIQTQKAQQELEEQTRRALELEQERKRAQSEAEKLAKERQEAEEAKEALLQASRDQKKTQEQLALEMAELTARISQLEMARQKKESEAVEWQQKAQMVQEDLEKTRAELKTAMSTPHVAEPAENEQDEQDENGAEASADLRADAMAKDRSEEERTTEAEKNERVQKHLKALTSELANARDESKKTANDMIHAENMRLGRDKYKTLRQIRQGNTKQRIDEFESM

SEQ ID NO: 823118 - protein, 577 aa, Homo sapiens; identical to SEQ ID NO: 823113

SEQ ID NO: 823119 - protein, 577 aa, Homo sapiens; identical to SEQ ID NO: 823113

SEQ ID NO: 823120 - protein, 577 aa, Homo sapiens; identical to SEQ ID NO: 823113

SEQ ID NO: 823121 - protein, 127 aa, Homo sapiens
MVQEDLEKTRAELKTAMSTPHVAEPAENEQDEQDENGAEASADLRADAMAKDRSEEERTTEAEKNERVQKHLKALTSELANARDESKKTANDMIHAENMRLGRDKYKTLRQIRQGNTKQRIDEFESM

SEQ ID NO: 823122 - protein, 127 aa, Homo sapiens; identical to SEQ ID NO: 823121

SEQ ID NO: 823123 - protein, 146 aa, Homo sapiens
  misc_feature (1)..(1): Xaa can be any naturally occurring amino acid
XTIAMIRSSSFPSLAESAQMVQEDLEKTRAELKTAMSTPHVAEPAENEQDEQDENGAEASADLRADAMAKDRSEEERTTEAEKNERVQKHLKALTSELANARDESKKTANDMIHAENMRLGRDKYKTLRQIRQGNTKQRIDEFESM

SEQ ID NO: 823124 - protein, 116 aa, Homo sapiens
GAEPDEFFEEDNMLSMGKEDEQDENGAEASADLRADAMAKDRSEEERTTEAEKNERVQKHLKALTSELANARDESKKTANDMIHAENMRLGRDKYKTLRQIRQGNTKQRIDEFESM

SEQ ID NO: 823125 - protein, 577 aa, Homo sapiens; identical to SEQ ID NO: 823113

SEQ ID NO: 823126 - protein, 577 aa, Homo sapiens; identical to SEQ ID NO: 823113

SEQ ID NO: 823127 - protein, 577 aa, Homo sapiens; identical to SEQ ID NO: 823113

SEQ ID NO: 823128 - protein, 577 aa, Homo sapiens; identical to SEQ ID NO: 823113

SEQ ID NO: 823129 - protein, 577 aa, Homo sapiens; identical to SEQ ID NO: 823113

SEQ ID NO: 823130 - protein, 577 aa, Homo sapiens; identical to SEQ ID NO: 823113

SEQ ID NO: 823131 - protein, 577 aa, Homo sapiens; identical to SEQ ID NO: 823113

SEQ ID NO: 823132 - protein, 577 aa, Homo sapiens; identical to SEQ ID NO: 823113

SEQ ID NO: 823133 - protein, 527 aa, Homo sapiens
MPKTISVRVTTMDAELEFAIQPNTTGKQLFDQVVKTIGLREVWFFGLQYQDTKGFSTWLKLNKKVTAQDVRKESPLLFKFRAKFYPEDVSEELIQDITQRLFFLQVKEGILNDDIYCPPETAVLLASYAVQSKYGDFNKEVHKSGYLAGDKLLPQRVLEQHKLNKDQWEERIQVWHEEHRGMLREDAVLEYLKIAQDLEMYGVNYFSIKNKKGSELWLGVDALGLNIYEQNDRLTPKIGFPWSEIRNISFNDKKFVIKPIDKKAPDFVFYAPRLRINKRILALCMGNHELYMRRRKPDTIEVQQMKAQAREEKHQKQMERAMLENEKKKREMAEKEKEKIEREKEELMERLKQIEEQTKKAQQELEEQTRRALELEQERKRAQSEAEKLAKERQEAEEAKEALLQASRDQKKTQEQLALEMAELTARISQLEMARQKKESEAVEWQQKQELQAMQMELQSPEYKLSKLRTSTIMTDYNPNYCFAGKTSSISDLKEVPRKNITLIRGLGHGAFGEVYEGQVSGMPNDP

SEQ ID NO: 823134 - protein, 557 aa, Homo sapiens
MPKTISVRVTTMDAELEFAIQPNTTGKQLFDQVVKTIGLREVWFFGLQYQDTKGFSTWLKLNKKVTAQDVRKESPLLFKFRAKFYPEDVSEELIQDITQRLFFLQVKEGILNDDIYCPPETAVLLASYAVQSKYGDFNKEVHKSGYLAGDKLLPQRVLEQHKLNKDQWEERIQVWHEEHRGMLREDAVLEYLKIAQDLEMYGVNYFSIKNKKGSELWLGVDALGLNIYEQNDRLTPKIGFPWSEIRNISFNDKKFVIKPIDKKAPDFVFYAPRLRINKRILALCMGNHELYMRRRKPDTIEVQQMKAQAREEKHQKQMERAIAGKLTNDRQRDTLADDTDDTRRHDLTPGRHGRTLTGRRLTRRLDGHTTYRKRLHEQRTWTRTTDTRYGTLDTYDARTPDTRAHETTADTQPGPQREDVNEQLEDGPKELAFDVDRALREDPRTQKNITGTTHGHYENNAQGRLTRLEVLPHAWDSIGPQEQHRQGTTVDGLVEEMGTASKGPNMGTRDRTLGRKNPSWIGRLEQDLGAMRTHPFHSWAHGLGRSTMARQGWTQRD

SEQ ID NO: 823135 - protein, 153 aa, Homo sapiens [sequence omitted]

SEQ ID NO: 823136 - protein, 326 aa, Homo sapiens
MSNGYEDHMAEDCRGDIGRTNLIVNYLPQNMTQDELRSLFSSIGEVESAKLIRDKVAGHSLGYGFVNYVTAKDAERAINTLNGLRLQSKTIKVSYARPSSEVIKDANLYISGLPRTMTQKDVEDMFSRFGRIINSRVLVDQTTGLSRGVAFIRFDKRSEAEEAITSFNGHKPPGSSEPITVKFAANPNQNKNVALLSQLYHSPARRFGGPVHHQAQRFRFSPMGVDHMSGLSGVNVPGNASSGWCIFIYNLGQDADEGILWQMFGPFGAVTNVKVIRDFNTNKCKGFGFVTMTNYEEAAMAIASLNGYRLGDKILQVSFKTNKSHK

SEQ ID NO: 823137 - protein, 326 aa, Homo sapiens; identical to SEQ ID NO: 823136

SEQ ID NO: 823138 - protein, 326 aa, Homo sapiens; identical to SEQ ID NO: 823136

SEQ ID NO: 823139 - protein, 326 aa, Homo sapiens; identical to SEQ ID NO: 823136

SEQ ID NO: 823140 - protein, 326 aa, Homo sapiens; identical to SEQ ID NO: 823136

SEQ ID NO: 823141 - protein, 210 aa, Homo sapiens
MTQKDVEDMFSRFGRIINSRVLVDQTTGLSRGVAFIRFDKRSEAEEAITSFNGHKPPGSSEPITVKFAANPNQNKNVALLSQLYHSPARRFGGPVHHQAQRFRFSPMGVDHMSGLSGVNVPGNASSGWCIFIYNLGQDADEGILWQMFGPFGAVTNVKVIRDFNTNKCKGFGFVTMTNYEEAAMAIASLNGYRLGDKILQVSFKTNKSHK

SEQ ID NO: 823142 - protein, 231 aa, Homo sapiens
MSNGYEDHMAEDCRGDIGRTNLIVNYLPQNMTQDELRSLFSSIGEVESAKLIRDKVAGHSLGYGFVNYVTAKDAERAINTLNGLRLQSKTIKVSYARPSSEVIKDANLYISGLPRTMTQKDVEDMFSRFGRIINSRVLVDQTTGLSRGVAFIRFDKRSEAEEAITSFNGHKPPGSSEPITVKFAANPNQNKNVALLSQLYHSPARRFGGPVHHQAQRFRWVGRVCAPESHT

SEQ ID NO: 823143 - protein, 153 aa, Homo sapiens
MSNGYEDHMAEDCRGDIGRTNLIVNYLPQNMTQDELRSLFSSIGEVESAKLIRDKVAGHSLGYGFVNYVTAKDAERAINTLNGLRLQSKTIKVSYARPSSEVIKDANLYISGLPRTMTQKDVEDMFSRFGRIINSRVLVDQTTVIPQTRTAPK

SEQ ID NO: 823144 - protein, 229 aa, Homo sapiens
MQIFVKTLTGKTITLEVEPSDTIENVKAKIQDKEGIPPDQQRLIFAGKQLEDGRTLSDYNIQKESTLHLVLRLRGGMQIFVKTLTGKTITLEVEPSDTIENVKAKIQDKEGIPPDQQRLIFAGKQLEDGRTLSDYNIQKESTLHLVLRLRGGMQIFVKTLTGKTITLEVEPSDTIENVKAKIQDKEGIPPDQQRLIFAGKQLEDGRTLSDYNIQKESTLHLVLRLRGGC

SEQ ID NO: 823145 - protein, 229 aa, Homo sapiens; identical to SEQ ID NO: 823144

SEQ ID NO: 823146 - protein, 95 aa, Homo sapiens
MAALFLTTNIQNGSRTLAPWVLALLKKVAMPSTLPGERSPCSQAKHQYSVLGKCWAAPMVDTTSPQDIVDMAKDPQGIRWRNLSLAKKKNSKNEQ

SEQ ID NO: 823147 - protein, 135 aa, Homo sapiens
  misc_feature (1)..(1): Xaa can be any naturally occurring amino acid
  misc_feature (12)..(12): Xaa can be any naturally occurring amino acid
XQHGGREARSRXCQGGEGAQAAGREGGTKTSKNKAKPPWPTLLSPFIPLFPALYTNGIRSLHKEKNPYIQLSLLSSSRSRPDTERQFRTPGTQQEVLNSVWHGNASLERWPHSFLDYNIQKESTLHLVLRLRGGC

SEQ ID NO: 823148 - protein, 135 aa, Homo sapiens; identical to SEQ ID NO: 823147
  misc_feature (1)..(1): Xaa can be any naturally occurring amino acid
  misc_feature (12)..(12): Xaa can be any naturally occurring amino acid

SEQ ID NO: 823149 - protein, 111 aa, Homo sapiens
MAALFLTTSIQNGSRTLAPWVLALLKKVAMPSTLPGERSPCSQAKHQYSVLGKCWAAPMVDTTSPQDIVDMAKDPQGMAERANWAAEGKGGTWKNQRGRRAAEGKKKKNKR

SEQ ID NO: 823150 - protein, 50 aa, Homo sapiens
MQIFVKTLTGKTITLEVEPSDTIEAYSWRQQLKNGDSSDTHQGATLLACV

SEQ ID NO: 823151 - protein, 229 aa, Homo sapiens; identical to SEQ ID NO: 823144

SEQ ID NO: 823152 - protein, 229 aa, Homo sapiens; identical to SEQ ID NO: 823144

SEQ ID NO: 823153 - protein, 229 aa, Homo sapiens; identical to SEQ ID NO: 823144

SEQ ID NO: 823154 - protein, 229 aa, Homo sapiens; identical to SEQ ID NO: 823144

SEQ ID NO: 823155 - protein, 229 aa, Homo sapiens; identical to SEQ ID NO: 823144

SEQ ID NO: 823156 - protein, 115 aa, Homo sapiens
MVVNKKEKNEKKKNWGGGWALGKEGFKTHIGVGGGGPKRDRSRHGPPNTVTQRENRGQRPKGPGTSHEGKKPPGGHTADGFEHTSQRRGPDGNQRETNTRGVRDARNKCRPGGGN

SEQ ID NO: 823157 - protein, 229 aa, Homo sapiens; identical to SEQ ID NO: 823144

SEQ ID NO: 823158 - protein, 170 aa, Homo sapiens
MAALFLTTSIQNGSRTLAPWVLALLKKVAMPSTLPGERSPCSQAKHQYSVLGKCWAAPMVDTTSPQDIVDMAKDPQGIHRKAVPHTRDPARGLHFFWPRAKARLGEKNWGRKLLFPWNLNKTFPRKGSSEPLEPWVPWPALGRGWAGLIPSSPIVPISGKVAPQDGTWCI

SEQ ID NO: 823159 - protein, 83 aa, Homo sapiens
AGVSRAFEVKMQIFVKTLTGKTITLEVEPSDTIENVKAKIQDKEGIPPDQQRLIFAGKQLEDGRTLSDYNIQKGVDPAPGSCV

SEQ ID NO: 823160 - protein, 84 aa, Homo sapiens
DAWVDPRVRVKMQIFVKTLTGKTITLEVEPSDTIENVKAKIQDKEGIPPDQQRLIFAGKQLEDGRTLSDYNIQKGVDPAPGSCV

SEQ ID NO: 823161 - protein, 90 aa, Homo sapiens
IVDSKRIPRFIIGGGVKMQIFVKTLTGKTITLEVEPSDTIENVKAKIQDKEGIPPDQQRLIFAGKQLEDGRTLSDYNIQKGVDPAPGSCV

SEQ ID NO: 823162 - protein, 97 aa, Homo sapiens
WGLIFAEGVRGLHLKDPGIRYQVKMQIFVKTLTGKTITLEVEPSDTIENVKAKIQDKEGIPPDQQRLIFAGKQLEDGRTLSDYNIQKGVDPAPGSCV

SEQ ID NO: 823163 - protein, 70 aa, Homo sapiens
GVQRSRVDFGHLEVEPSDTIENVKAKIQDKEGIPPDQQRLIFAGKQLEDGRTLSDYNIQKGVDPAPGSCV

SEQ ID NO: 823164 - protein, 163 aa, Homo sapiens
MAALFLTTSIQNGSRTLAPWVLALLKKVAMPSTLPGERSPCSQAKHQYSVLGKCWAAPMVDTTSPQDIVDMAKDPQGMQFAHQISRQKGFTPRRGAEPRWGKCAGTSFSWSYEHSRERSSNPGSLDPCALKGVGLFNAFRHGPSAVPRDRPYLWTIAIGRQLS

SEQ ID NO: 823165 - protein, 127 aa, Homo sapiens
MAALFLTTSIQNGSRTLAPWVLALLKKVAMPSTLPGERSPCSQAKHQYSVLGKCWAAPMVDTTSPQDIVDMAKDPQGMAKDARDHSERVPTHEQTESKTLSTAAARARRLGRDANPAAPRCKKRGDP

SEQ ID NO: 823166 - protein, 126 aa, Homo sapiens
MAALFLTTSIQNGSRTLAPWVLALLKKVAMPSTLPGERSPCSQAKHQYSVLGKCWAAPMVDTTSPQDIVDMAKDPQGIELAESLVQAGTVPGSWHHSIDQDQLSTTEAEEQPCGQGAGCFELSGAV

SEQ ID NO: 823167 - protein, 178 aa, Homo sapiens
  misc_feature (69)..(69): Xaa can be any naturally occurring amino acid
  misc_feature (110)..(110): Xaa can be any naturally occurring amino acid
MAALFLTTNIQNGSRTLAPWVLALLKKVAMPSTLPGERSPCSQAKHQYVIPVKLDAHVTIQSTNCEMAXDSTDYTDTVSPLPGSQAVSATIFGTAKLAWKEWPALHFWTXILVREAQSTRVTWSPCRRDGGGIMAGVLSVSNERLQPGDAPCHRPVYGLEPMVHSRSQNAAMAKHPMI

SEQ ID NO: 823168 - protein, 76 aa, Homo sapiens
MVTIQSKHCELAKIPGYTRRQSASPGSIELAESLVQAGTVPGSWHHSIDQDQLSTTEAEEQPCGQGAGCFELSGAV

SEQ ID NO: 823169 - protein, 33 aa, Homo sapiens
MHAAHLSHLAIRHRRGLNYWAGLQTRKGNPAYP

SEQ ID NO: 823170 - protein, 96 aa, Homo sapiens
GRYYYYIYPRSTTASLERAGEPQWWTPPVRKTLLTWPKIPKGYTEGQFRTPGNQQEVLNTVWHGNASLERWPHSFLDYNIQKESTLHLVLRLRGGC

SEQ ID NO: 823171 - protein, 173 aa, Homo sapiens
SVRGTSFDAAATSGGSASSEKASSTSPVEISEWLDQKLTKSDRPELTGAKVVVSGGRGLKSGENFKLLYDLADQLHAAVGASRAAVDAGFVPNDMQVGQTGKIVAPELYIAVGISGAIQHLAGMKDSKSYEKERQRHIGKPLLGGPFSLTTHTGERKTDKDYLGQWLLIYFGF

SEQ ID NO: 823172 - protein, 333 aa, Homo sapiens
MFRAAAPGQLRRAASLLRFQSTLVIAEHANDSLAPITLNTITAATRLGGEVSCLVAGTKCDKVAQDLCKVAGIAKVLVAQHDVYKGLLPEELTPLILATQKQFNYTHICAGASAFGKNLLPRVAAKLEVAPISDIIAIKSPDTFVRTIYAGNALCTVKCDEKVKVFSVRGTSFDAAATSGGSASSEKASSTSPVEISEWLDQKLTKSDRPELTGAKVVVSGGRGLKSGENFKLLYDLADQLHAAVGASRAAVDAGFVPNDMQVGQTGKIVAPELYIAVGISGAIQHLAGMKDSKTIVAINKDPEAPIFQVADYGIVADLFKVVPEMTEILKKK

SEQ ID NO: 823173 - protein, 333 aa, Homo sapiens; identical to SEQ ID NO: 823172

SEQ ID NO: 823174 - protein, 284 aa, Homo sapiens
MFRAAAPGQLRRAVAQDLCKVAGIAKVLVAQHDVYKGLLPEELTPLILATQKQFNYTHICAGASAFGKNLLPRVAAKLEVAPISDIIAIKSPDTFVRTIYAGNALCTVKCDEKVKVFSVRGTSFDAAATSGGSASSEKASSTSPVEISEWLDQKLTKSDRPELTGAKVVVSGGRGLKSGENFKLLYDLADQLHAAVGASRAAVDAGFVPNDMQVGQTGKIVAPELYIAVGISGAIQHLAGMKDSKTIVAINKDPEAPIFQVADYGIVADLFKVVPEMTEILKKK

SEQ ID NO: 823175 - protein, 70 aa, Homo sapiens
TRRHASLVLDRERLGDWLRRRQLAGHGAAVRPRLRRKRRPCSERRLRGSSGGRDGVSPCYPGWSRTLVLK

SEQ ID NO: 823176 - protein, 333 aa, Homo sapiens; identical to SEQ ID NO: 823172

SEQ ID NO: 823177 - protein, 111 aa, Homo sapiens
MFRAAAPGQLRRAASLLRFQSTLVIAEHANDSLAPITLNTITAATRLGGEVSCLVAGTKCDKVAQDLCKVAGIAGTDTIDFGNSEAVQLHTHLCWSICLRKEPFAQSSSQT

SEQ ID NO: 823178 - protein, 90 aa, Homo sapiens
TRRHASLVLDRERLGDWLRRRQLAGHGAAVRPRLRRKRRPCSERRLRGSSGGRGTDTIDFGNSEAVQLHTHLCWSICLRKEPFAQSSSQT

SEQ ID NO: 823179 - protein, 365 aa, Homo sapiens
MFRAAAPGQLRRAASLLRFQSTLVIAEHANDSLAPITLNTITAATRLGGEVSCLVAGTKCDKVAQDLCKVAGIAKVLVAQHDVYKGLLPEELTPLILATQKQFNYTHICAGASAFGKNLLPRVAAKLEVAPISDIIAIKSPDTFVRTIYAGNALCTVKCDEKVKVFSVRGTSFDAAATSGGSASSEKASSTSPVEISEWLDQKLTKSDRPELTGAKVVVSGVETEVLHVGQAGLEILTSGDPPTSASQSVGITGRGLKSGENFKLLYDLADQLHAAVGASRAAVDAGFVPNDMQVGQTGKIVAPELYIAVGISGAIQHLAGMKDSKTIVAINKDPEAPIFQVADYGIVADLFKVVPEMTEILKKK

SEQ ID NO: 823180 - protein, 229 aa, Homo sapiens
MFRAAAPGQLRRANLLPRVAAKLEVAPISDIIAIKSPDTFVRTIYAGNALCTVKCDEKVKVFSVRGTSFDAAATSGGSASSEKASSTSPVEISEWLDQKLTKSDRPELTGAKVVVSGGRGLKSGENFKLLYDLADQLHAAVGASRAAVDAGFVPNDMQVGQTGKIVAPELYIAVGISGAIQHLAGMKDSKTIVAINKDPEAPIFQVADYGIVADLFKVVPEMTEILKKK

SEQ ID NO: 823181 - protein, 350 aa, Homo sapiens
MFRAAAPGQLRRAASLLRFQSTLVIAEHANDSLAPITLNTITAATRLGGEVSCLVAGTKCDKVAQDLCKVAGIAKVLVAQHDVYKGLLPEELTPLILATQKQFNYTHICAGASAFGKNLLPRVAAKLEVAPISDIIAIKSPDTFVRTIYAGNALCTVKCDEKVKVFSVRGTSFDAAATSGGSASSEKASSTSPVEISEWLDQKLTKSDRPELTGAKVVVSGGRGLKSGENFKLLYDLADQLHAAVGASRAAVDAGFVPNDMQVGQTGKIVAPELYIAVGISGAIQHLAGMKDSKTIVAINKDPEAPIFQVADYGIVADLFKPPWTALLCPSSHKAALHWKLQLQPLHCHD

SEQ ID NO: 823182 - protein, 310 aa, Homo sapiens
MFRAAAPGQLRRAASLLRFQSTLVIAEHANDSLAPITLNTITAATRLGGEVSCLVAGTKCDKVAQDLCKVAGIAKVLVAQHDVYKGLLPEELTPLILATQKQFNYTHICAGASAFGKNLLPRVAAKLEVAPISDIIAIKSPDTFVRTIYAGNALCTVKCDEKVKVFSVRGTSFDAAATSGGSASSEKASSTSPVEISEWLDQKLTKSDRPELTGAKVVVSGVGASRAAVDAGFVPNDMQVGQTGKIVAPELYIAVGISGAIQHLAGMKDSKTIVAINKDPEAPIFQVADYGIVADLFKVVPEMTEILKKK

SEQ ID NO: 823183 - protein, 311 aa, Homo sapiens
MFRAAAPGQLRRAASLLRFQSTLVIAEHANDSLAPITLNTITAATRLGGEVSCLVAGTKCDKVAQDLCKVAGIAKVLVAQHDVYKGLLPEELTPLILATQKQFNYTHICAGASAFGKNLLPRVAAKLEVAPISDIIAIKSPDTFVRTIYAGNALCTVKCDEKVKVFSVRGTSFDAAATSGGSASSEKASSTSPVEISEWLDQKLTKSDRPELTGAKVVVSGGRGLKSGENFKLLYDLADQLHAAVGASRAAVDAGFVPNDMQVGQTGKIVAPELYIAVGISGAIQHLAGMKDSKTIPCSNLRHSGIFCTSL

SEQ ID NO: 823184 - protein, 313 aa, Homo sapiens
MFRAAAPGQLRRAASLLRFQSTLVIAEHANDSLAPITLNTITAATRLGGEVSCLVAGTKCDKVAQDLCKVAGIAKVLVAQHDVYKGLLPEELTPLILATQKQFNYTHICAGASAFGKNLLPRVAAKLEVAPISDIIAIKSPDTFVRTIYAGNALCTVKCDEKVKVFSVRGTSFDAAATSGGSASSEKASSTSPVEISEWLDQKLTKSDRPELTGAKVVVSGVETEVLHVGQAGLEILTSGDPPTSASQSVGITGRGLKSGENFKLLYDLADQLHAAVGASRAAVDAGFVPNDMQVGQTGKIVAPVSIAIKYAV

SEQ ID NO: 823185 - protein, 267 aa, Homo sapiens
MFRAAAPGQLRRAASLLRFQSTLVIAEHANDSLAPITLNTITAATRLGGEVSCLVAGTKCDKVAQDLCKVAGIAKVLVAQHDVYKGLLPEELTPLILATQKQFNYTHICAGASAFGKNLLPRVAAKLEVAPISDIIAIKSPDTFVRTIYAGNALCTVKCDEKVKVFSVRGTSFDAAATSGGSASSEKASSTSPVEISEWLDQKLTKSDRPELTGAKVVVSGGTLYCCWNIWSHPTFSWDERQQGHCGHIRPSSIPVGIGIVRFFTES

SEQ ID NO: 823186 - protein, 266 aa, Homo sapiens
MFRAAAPGQLRRAASLLRFQSTLVIAEHANDSLAPITLNTITAATRLGGEVSCLVAGTKCDKVAQDLCKVAGIAKVLVAQHDVYKGLLPEELTPLILATQKQFNYTHICAGASAFGKNLLPRVAAKLEVAPISDIIAIKSPDTFVRTIYAGNALCTVKCDEKVKVFSVRGTSFDAAATSGGSASSEKASSTSPVEISEWLDQKLTKSDRPELTGAKVVVSGVGASRAAVDAGFVPNDMQVGQTGKIVAPRTFIIATELLKLRGTGL

SEQ ID NO: 823187 - protein, 77 aa, Homo sapiens
  misc_feature (13)..(14): Xaa can be any naturally occurring amino acid
VGPARAGALCISXXLRELYIAVGISGAIQHLAGMKDSKTIVAINKDPEAPIFQVADYGIVADLFKVVPEMTEILKKK

SEQ ID NO: 823188 - protein, 90 aa, Homo sapiens; identical to SEQ ID NO: 823178

SEQ ID NO: 823189 - protein, 180 aa, Homo sapiens
KKVVNPLFEKRPKNFGIGQDIQPKRDLTCFVKWPRYIRLQWQRSILYKQLKVPPAINQFTQALEGQTATQLLKLAHKYRPETKQEKKLEAVGPGRVVGKGDLPMKRLPVFRAGVNTVTTFVDNKKAPLVVTTHDMDPIELTVFLPVLCHKMGATCCIIKGKARLGCLVHRKTYTTVDFTQ

SEQ ID NO: 823190 - protein, 73 aa, Homo sapiens
WAEAARLVLENYSDAPMTPKQILQVIEAEGLKEMRSGTSPLACLNAMLHSNSRGGEGLFYKLPGRISLFTLKV

SEQ ID NO: 823191 - protein, 1374 aa, Homo sapiens
MLPRVVLTPLKVNGAHVESASGFSGCHADGESGSPSSSSSGSLALGSAAIRGQAEVTQDPAPLLRGFRKPATGQMKRNRGEEIDFETPGSILVNTNLRALINSRTFHALPSHFQQQLLFLLPEVDRQVGTDGLLRLSSSALNNEFFTHAAQSWRERLADGEFTHEMQVRIRQEMEKEKKVEQWKEKFFEDYYGQKLGLTKEESLQQNVGQEEAEIKSGLCVPGESVRIQRGPATRQRDGHFKKRSRPDLRTRARRNLYKKQESEQAGVAKDAKSVASDVPLYKDGEAKTDPAGLSSPHLPGTSSAAPDLEGPEFPVESVASRIQAEPDNLARASASPDRIPSLPQETVDQEPKDQKRKSFEQAASASFPEKKPRLEDRQSFRNTIESVHTEKPQPTKEEPKVPPIRIQLSRIKPPWVVKGQPTYQICPRIIPTTESSCRGWTGARTLADIKARALQVRGARGHHCHREAATTAIGGGGGPGGGGGGATDEGGGRGSSSGDGGEACGHPEPRGGPSTPGKCTSDLQRTQLLPPYPLNGEHTQAGTAMSRARREDLPSLRKEESCLLQRATVGLTDGLGDASQLPVAPTGDQPCQALPLLSSQTSVAERLVEQPQLHPDVRTECESGTTSWESDDEEQGPTVPADNGPIPSLVGDDTLEKGTGQALDSHPTMKDPVNVTPSSTPESSPTDCLQNRAFDDELGLGGSCPPMRESDTRQENLKTKALVSNSSLHWIPIPSNDEVVKQPKPESREHIPSVEPQVGEEWEKAAPTPPALPGDLTAEEGLDPLDSLTSLWTVPSRGGSDSNGSYCQQVDIEKLKINGDSEALSPHGESTDTASDFEGHLTEDSSEADTREAAVTKGSSVDKDEKPNWNQSAPLSKVNGDMRLVTRTDGMVAPQSWVSRVCAVRQKIPDSLLLASTEYQPRAVCLSMPGSSVEATNPLVMQLLQGSLPLEKVLPPAHDDSMSESPQVPLTKDQSHGSLRMGSLHGLGKNSGMVDGSSPSSLRALKEPLLPDSCETGTGLARIEATQAPGAPQKNCKAVPSFDSLHPVTNPITSSRKLEEMDSKEQFSSFSCEDQKEVRAMSQDSNSNAAPGKSPGDLTTSRTPRFSSPNVISFGPEQTGRALGDQSNVTGQGKKLFGSGNVAATLQRPRPADPMPLPAEIPPVFPSGKLGPSTNSMSGGVQTPREDWAPKPHAFVGSVKNEKTFVGGPLKANAENRKATGHSPLELVGHLEGMPFVMDLPFWKLPREPGKGLSEPLEPSSLPSQLSIKQAFYGKLSKLQLSSTSFNYSSSSPTFPKGLAGSVVQLSHKANFGASHSASLSLQMFTDSSTVESISLQCACSLKAMIMCQGCGAFCHDDCIGPSKLCVLCLVVR

SEQ ID NO: 823192 - protein, 1537 aa, Homo sapiens
MGVVNFVFRASEDLQVLENYSDAPMTPKQILQVIEAEGLKEMRSGTSPLACLNAMLHSNSRGGEGLFYKLPGRISLFTLKKDALQWSRHPATVEGEEPEDTADVESCGSNEASTVSGENDVSLDETSSNASCSTESQSRPLSNPRDSYRASSQANKQKKKTGVMLPRVVLTPLKVNGAHVESASGFSGCHADGESGSPSSSSSGSLALGSAAIRGQAEVTQDPAPLLRGFRKPATGQMKRNRGEEIDFETPGSILVNTNLRALINSRTFHALPSHFQQQLLFLLPEVDRQVGTDGLLRLSSSALNNEFFTHAAQSWRERLADGEFTHEMQVRIRQEMEKEKKVEQWKEKFFEDYYGQKLGLTKEESLQQNVGQEEAEIKSGLCVPGESVRIQRGPATRQRDGHFKKRSRPDLRTRARRNLYKKQESEQAGVAKDAKSVASDVPLYKDGEAKTDPAGLSSPHLPGTSSAAPDLEGPEFPVESVASRIQAEPDNLARASASPDRIPSLPQETVDQEPKDQKRKSFEQAASASFPEKKPRLEDRQSFRNTIESVHTEKPQPTKEEPKVPPIRIQLSRIKPPWVVKGQPTYQICPRIIPTTESSCRGWTGARTLADIKARALQVRGARGHHCHREAATTAIGGGGGPGGGGGGATDEGGGRGSSSGDGGEACGHPEPRGGPSTPGKCTSDLQRTQLLPPYPLNGEHTQAGTAMSRARREDLPSLRKEESCLLQRATVGLTDGLGDASQLPVAPTGDQPCQALPLLSSQTSVAERLVEQPQLHPDVRTECESGTTSWESDDEEQGPTVPADNGPIPSLVGDDTLEKGTGQALDSHPTMKDPVNVTPSSTPESSPTDCLQNRAFDDELGLGGSCPPMRESDTRQENLKTKALVSNSSLHWIPIPSNDEVVKQPKPESREHIPSVEPQVGEEWEKAAPTPPALPGDLTAEEGLDPLDSLTSLWTVPSRGGSDSNGSYCQQVDIEKLKINGDSEALSPHGESTDTASDFEGHLTEDSSEADTREAAVTKGSSVDKDEKPNWNQSAPLSKVNGDMRLVTRTDGMVAPQSWVSRVCAVRQKIPDSLLLASTEYQPRAVCLSMPGSSVEATNPLVMQLLQGSLPLEKVLPPAHDDSMSESPQVPLTKDQSHGSLRMGSLHGLGKNSGMVDGSSPSSLRALKEPLLPDSCETGTGLARIEATQAPGAPQKNCKAVPSFDSLHPVTNPITSSRKLEEMDSKEQFSSFSCEDQKEVRAMSQDSNSNAAPGKSPGDLTTSRTPRFSSPNVISFGPEQTGRALGDQSNVTGQGKKLFGSGNVAATLQRPRPADPMPLPAEIPPVFPSGKLGPSTNSMSGGVQTPREDWAPKPHAFVGSVKNEKTFVGGPLKANAENRKATGHSPLELVGHLEGMPFVMDLPFWKLPREPGKGLSEPLEPSSLPSQLSIKQAFYGKLSKLQLSSTSFNYSSSSPTFPKGLAGSVVQLSHKANFGASHSASLSLQMFTDSSTVESISLQCACSLKAMIMCQGCGAFCHDDCIGPSKLCVLCLVVR

SEQ ID NO: 823193 - protein, 1369 aa, Homo sapiens
MARLGDTFDQWNAVPSGFSGCHADGESGSPSSSSSGSLALGSAAIRGQAEVTQDPAPLLRGFRKPATGQMKRNRGEEIDFETPGSILVNTNLRALINSRTFHALPSHFQQQLLFLLPEVDRQVGTDGLLRLSSSALNNEFFTHAAQSWRERLADGEFTHEMQVRIRQEMEKEKKVEQWKEKFFEDYYGQKLGLTKEESLQQNVGQEEAEIKSGLCVPGESVRIQRGPATRQRDGHFKKRSRPDLRTRARRNLYKKQESEQAGVAKDAKSVASDVPLYKDGEAKTDPAGLSSPHLPGTSSAAPDLEGPEFPVESVASRIQAEPDNLARASASPDRIPSLPQETVDQEPKDQKRKSFEQAASASFPEKKPRLEDRQSFRNTIESVHTEKPQPTKEEPKVPPIRIQLSRIKPPWVVKGQPTYQICPRIIPTTESSCRGWTGARTLADIKARALQVRGARGHHCHREAATTAIGGGGGPGGGGGGATDEGGGRGSSSGDGGEACGHPEPRGGPSTPGKCTSDLQRTQLLPPYPLNGEHTQAGTAMSRARREDLPSLRKEESCLLQRATVGLTDGLGDASQLPVAPTGDQPCQALPLLSSQTSVAERLVEQPQLHPDVRTECESGTTSWESDDEEQGPTVPADNGPIPSLVGDDTLEKGTGQALDSHPTMKDPVNVTPSSTPESSPTDCLQNRAFDDELGLGGSCPPMRESDTRQENLKTKALVSNSSLHWIPIPSNDEVVKQPKPESREHIPSVEPQVGEEWEKAAPTPPALPGDLTAEEGLDPLDSLTSLWTVPSRGGSDSNGSYCQQVDIEKLKINGDSEALSPHGESTDTASDFEGHLTEDSSEADTREAAVTKGSSVDKDEKPNWNQSAPLSKVNGDMRLVTRTDGMVAPQSWVSRVCAVRQKIPDSLLLASTEYQPRAVCLSMPGSSVEATNPLVMQLLQGSLPLEKVLPPAHDDSMSESPQVPLTKDQSHGSLRMGSLHGLGKNSGMVDGSSPSSLRALKEPLLPDSCETGTGLARIEATQAPGAPQKNCKAVPSFDSLHPVTNPITSSRKLEEMDSKEQFSSFSCEDQKEVRAMSQDSNSNAAPGKSPGDLTTSRTPRFSSPNVISFGPEQTGRALGDQSNVTGQGKKLFGSGNVAATLQRPRPADPMPLPAEIPPVFPSGKLGPSTNSMSGGVQTPREDWAPKPHAFVGSVKNEKTFVGGPLKANAENRKATGHSPLELVGHLEGMPFVMDLPFWKLPREPGKGLSEPLEPSSLPSQLSIKQAFYGKLSKLQLSSTSFNYSSSSPTFPKGLAGSVVQLSHKANFGASHSASLSLQMFTDSSTVESISLQCACSLKAMIMCQGCGAFCHDDCIGPSKLCVLCLVVR

SEQ ID NO: 823194 - protein, 1290 aa, Homo sapiens
MLPRVVLTPLKVNGAHVESASGFSGCHADGESGSPSSSSSGSLALGSAAIRGQAEVTQDPAPLLRGFRKPATGQMKRNRGEEIDFETPGSILVNTNLRALINSRTFHALPSHFQQQLLFLLPEVDRQVGTDGLLRLSSSALNNEFFTHAAQSWRERLADGEFTHEMQVRIRQEMEKEKKVEQWKEKFFEDYYGQKLGLTKEESLQQNVGQEEAEIKSGLCVPGESVRIQRGPATRQRDGHFKKRSRPDLRTRARRNLYKKQESEQAGVAKDAKSVASDVPLYKDGEAKTDPAGLSSPHLPGTSSAAPDLEGPEFPVESVASRIQAEPDNLARASASPDRIPSLPQETVDQEPKDQKRKSFEQAASASFPEKKPRLEDRQSFRNTIESVHTEKPQPTKEEPKVPPIRIQLSRIKPPWVVRPVATLSPGEARAPLESVRQIYSEHNYCRLYPLNGEHTQAGTAMSRARREDLPSLRKEESCLLQRATVGLTDGLGDASQLPVAPTGDQPCQALPLLSSQTSVAERLVEQPQLHPDVRTECESGTTSWESDDEEQGPTVPADNGPIPSLVGDDTLEKGTGQALDSHPTMKDPVNVTPSSTPESSPTDCLQNRAFDDELGLGGSCPPMRESDTRQENLKTKALVSNSSLHWIPIPSNDEVVKQPKPESREHIPSVEPQVGEEWEKAAPTPPALPGDLTAEEGLDPLDSLTSLWTVPSRGGSDSNGSYCQQVDIEKLKINGDSEALSPHGESTDTASDFEGHLTEDSSEADTREAAVTKGSSVDKDEKPNWNQSAPLSKVNGDMRLVTRTDGMVAPQSWVSRVCAVRQKIPDSLLLASTEYQPRAVCLSMPGSSVEATNPLVMQLLQGSLPLEKVLPPAHDDSMSESPQVPLTKDQSHGSLRMGSLHGLGKNSGMVDGSSPSSLRALKEPLLPDSCETGTGLARIEATQAPGAPQKNCKAVPSFDSLHPVTNPITSSRKLEEMDSKEQFSSFSCEDQKEVRAMSQDSNSNAAPGKSPGDLTTSRTPRFSSPNVISFGPEQTGRALGDQSNVTGQGKKLFGSGNVAATLQRPRPADPMPLPAEIPPVFPSGKLGPSTNSMSGGVQTPREDWAPKPHAFVGSVKNEKTFVGGPLKANAENRKATGHSPLELVGHLEGMPFVMDLPFWKLPREPGKGLSEPLEPSSLPSQLSIKQAFYGKLSKLQLSSTSFNYSSSSPTFPKGLAGSVVQLSHKANFGASHSASLSLQMFTDSSTVESISLQCACSLKAMIMCQGCGAFCHDDCIGPSKLCVLCLVVR

SEQ ID NO: 823195 - protein, 1374 aa, Homo sapiens; identical to SEQ ID NO: 823191

SEQ ID NO: 823196 - protein, 1374 aa, Homo sapiens; identical to SEQ ID NO: 823191

SEQ ID NO: 823197 - protein, 1374 aa, Homo sapiens; identical to SEQ ID NO: 823191

SEQ ID NO: 823198 - protein, 1111 aa, Homo sapiens
MLPRVVLTPLKVNGAHVESASGFSGCHADGESGSPSSSSSGSLALGSAAIRGQAEVTQDPAPLLRGFRKPATGQMKRNRGEEIDFETPGSILVNTNLRALINSRTFHALPSHFQQQLLFLLPEVDRQVGTDGLLRLSSSALNNEFFTHAAQSWRERLADGEFTHEMQVRIRQEMEKEKKVEQWKEKFFEDYYGQKLGLTKEESLQQNVGQEEAEIKSGLCVPGESVRIQRGPATRQRDGHFKKRSRPDLRTRARRNLYKKQESEQAGVAKDAKSVASDVPLYKDGEAKTDPAGLSSPHLPGTSSAAPDLEGPEFPVESVASRIQAEPDNLARASASPDRIPSLPQETVDQEPKDQKRKSFEQAASASFPEKKPRLEDRQSFRNTIESVHTEKPQPTKEEPKVPPIRIQLSRIKPPWVVKGQPTYQICPRIIPTTESSCRGWTGARTLADIKARALQVRGARGHHCHREAATTAIGGGGGPGGGGGGATDEGGGRGSSSGDGGEACGHPEPRGGPSTPGKCTSDLQRTQLLPPYPLNGEHTQAGTAMSRARREDLPSLRKEESCLLQRATVGLTDGLGDASQLPVAPTGDQPCQALPLLSSQTSVAERLVEQPQLHPDVRTECESGTTSWESDDEEQGPTVPADNGPIPSLVGDDTLEKGTGQALDSHPTMKDPVNVTPSSTPESSPTDCLQNRAFDDELGLGGSCPPMRESDTRQENLKTKALVSNSSLHWIPIPSNDEVVKQPKPESREHIPSVEPQVGEEWEKAAPTPPALPGDLTAEEGLDPLDSLTSLWTVPSRGGSDSNGSYCQQVDIEKLKINGDSEALSPHGESTDTASDFEGHLTEDSSEADTREAAVTKGSSVDKDEKPNWNQSAPLSKVNGDMRLVTRTDGMVAPQSWVSRVCAVRQKIPDSLLLASTEYQPRAVCLSMPGSSVEATNPLVMQLLQGSLPLEKVLPPAHDDSMSESPQVPLTKDQSHGSLRMGSLHGLGKNSGMVDGSSPSSLRALKEPLLPDSCETGTGLARIEATQAPGAPQKNCKAVPSFDSLHPVTNPITSSRKLEEMDSKEQFSSFSCEDQKEVRAMSQDRIQMLLQERAQEILLPREHLVSHLQM

SEQ ID NO: 823199 - protein, 1374 aa, Homo sapiens; identical to SEQ ID NO: 823191

SEQ ID NO: 823200 - protein, 1374 aa, Homo sapiens; identical to SEQ ID NO: 823191

SEQ ID NO: 823201 - protein, 1374 aa, Homo sapiens; identical to SEQ ID NO: 823191

SEQ ID NO: 823202 - protein, 282 aa, Homo sapiens
MLPRVVLTPLKVNGAHVESASGFSGCHADGESGSPSSSSSGSLALGSAAIRGQAEVTQDPAPLLRGFRKPATGQMKRNRGEEIDFETPGSILVNTNLRALINSRTFHALPSHFQQQLLFLLPEVDRQVGTDGLLRLSSSALNNEFFTHAAQSWRERLADGEFTHEMQVRIRQEMEKEKKVEQWKEKFFEDYYGQKLGLTKEESLQQNVGQEEAEIKSGLCVPGESVRIQRGPATRQRDGHFKKRSRPDLRTRARRNLYKKQESEQSKLWCEPQCITFLANVH

SEQ ID NO: 823203 - protein, 352 aa, Homo sapiens
MESGGRPSLCQFILLGTTSVVTAALYSVYRQKARVSQELKGAKKVHLGEDLKSILSEAPGKCVPYAVIEGAVRSVKETLNSQFVENCKGVIQRLTLQEHKMVWNRTTHLWNDCSKIIHQRTNTVPFDLVPHEDGVDVAVRVLKPLDSVDLGLETVYEKFHPSIQSFTDVIGHYISGERPKGIQETEEMLKVGATLTGVGELVLDNNSVRLQPPKQGMQYYLSSQDFDSLLQRQESSVRLWKVLALVFGFATCATLFFILRKQYLQRQERLRLKQMQEEFQEHEAQLLSRAKPEDRESLKSACVVCLSSFKSCVFLECGHVCSCTECYRALPEPKKCPICRQAITRVIPLYNS

SEQ ID NO: 823204 - protein, 352 aa, Homo sapiens; identical to SEQ ID NO: 823203

SEQ ID NO: 823205 - protein, 352 aa, Homo sapiens; identical to SEQ ID NO: 823203

SEQ ID NO: 823206 - protein, 352 aa, Homo sapiens; identical to SEQ ID NO: 823203

SEQ ID NO: 823207 - protein, 352 aa, Homo sapiens; identical to SEQ ID NO: 823203

SEQ ID NO: 823208 - protein, 175 aa, Homo sapiens
MESGGRPSLCQFILLGTTSVVTAALYSVYRQKARVSQELKGAKKVHLGEDLKSILSEAPGKCVPYAVIEGAVRSVKETLNSQFVENCKGVIQRLTLQEHKMVWNRTTHLWNDCSKIIHQRTNTVPFDLVPHEDGVDVAVRVLKPLDSVDLGLETVYEKFHPSIQSFTDVIGQGRH

SEQ ID NO: 823209 - protein, 821 aa, Homo sapiens
MVSWGRFICLVVVTMATLSLARPSFSLVEDTTLEPEEPPTKYQISQPEVYVAAPGESLEVRCLLKDAAVISWTKDGVHLGPNNRTVLIGEYLQIKGATPRDSGLYACTASRTVDSETWYFMVNVTDAISSGDDEDDTDGAEDFVSENSNNKRAPYWTNTEKMEKRLHAVPAANTVKFRCPAGGNPMPTMRWLKNGKEFKQEHRIGGYKVRNQHWSLIMESVVPSDKGNYTCVVENEYGSINHTYHLDVVERSPHRPILQAGLPANASTVVGGDVEFVCKVYSDAQPHIQWIKHVEKNGSKYGPDGLPYLKVLKAAGVNTTDKEIEVLYIRNVTFEDAGEYTCLAGNSIGISFHSAWLTVLPAPGREKEITASPDYLEIAIYCIGVFLIACMVVTVILCRMKNTTKKPDFSSQPAVHKLTKRIPLRRQVTVSAESSSSMNSNTPLVRITTRLSSTADTPMLAGVSEYELPEDPKWEFPRDKLTLGKPLGEGCFGQVVMAEAVGIDKDKPKEAVTVAVKMLKDDATEKDLSDLVSEMEMMKMIGKHKNIINLLGACTQDGPLYVIVEYASKGNLREYLRARRPPGMEYSYDINRVPEEQMTFKDLVSCTYQLARGMEYLASQKCIHRDLAARNVLVTENNVMKIADFGLARDINNIDYYKKTTNGRLPVKWMAPEALFDRVYTHQSDVWSFGVLMWEIFTLGGSPYPGIPVEELFKLLKEGHRMDKPANCTNELYMMMRDCWHAVPSQRPTFKQLVEDLDRILTLTTNEEYLDLSQPLEQYSPSYPDTRSSCSSGDDSVFSPDPMPYEPCLPQYPHINGSVKT

SEQ ID NO: 823210 - protein, 822 aa, Homo sapiens
MVSWGRFICLVVVTMATLSLARPSFSLVEDTTLEPEEPPTKYQISQPEVYVAAPGESLEVRCLLKDAAVISWTKDGVHLGPNNRTVLIGEYLQIKGATPRDSGLYACTASRTVDSETWYFMVNVTDAISSGDDEDDTDGAEDFVSENSNNKRAPYWTNTEKMEKRLHAVPAANTVKFRCPAGGNPMPTMRWLKNGKEFKQEHRIGGYKVRNQHWSLIMESVVPSDKGNYTCVVENEYGSINHTYHLDVVERSPHRPILQAGLPANASTVVGGDVEFVCKVYSDAQPHIQWIKHVEKNGSKYGPDGLPYLKVLKHSGINSSNAEVLALFNVTEADAGEYICKVSNYIGQANQSAWLTVLPKQQAPGREKEITASPDYLEIAIYCIGVFLIACMVVTVILCRMKNTTKKPDFSSQPAVHKLTKRIPLRRQVTVSAESSSSMNSNTPLVRITTRLSSTADTPMLAGVSEYELPEDPKWEFPRDKLTLGKPLGEGCFGQVVMAEAVGIDKDKPKEAVTVAVKMLKDDATEKDLSDLVSEMEMMKMIGKHKNIINLLGACTQDGPLYVIVEYASKGNLREYLRARRPPGMEYSYDINRVPEEQMTFKDLVSCTYQLARGMEYLASQKCIHRDLAARNVLVTENNVMKIADFGLARDINNIDYYKKTTNGRLPVKWMAPEALFDRVYTHQSDVWSFGVLMWEIFTLGGSPYPGIPVEELFKLLKEGHRMDKPANCTNELYMMMRDCWHAVPSQRPTFKQLVEDLDRILTLTTNEEYLDLSQPLEQYSPSYPDTRSSCSSGDDSVFSPDPMPYEPCLPQYPHINGSVKT

SEQ ID NO: 823211 - protein, 707 aa, Homo sapiens
MVSWGRFICLVVVTMATLSLARPSFSLVEDTTLEPEGAPYWTNTEKMEKRLHAVPAANTVKFRCPAGGNPMPTMRWLKNGKEFKQEHRIGGYKVRNQHWSLIMESVVPSDKGNYTCVVENEYGSINHTYHLDVVERSPHRPILQAGLPANASTVVGGDVEFVCKVYSDAQPHIQWIKHVEKNGSKYGPDGLPYLKVLKHSGINSSNAEVLALFNVTEADAGEYICKVSNYIGQANQSAWLTVLPKQQAPGREKEITASPDYLEIAIYCIGVFLIACMVVTVILCRMKNTTKKPDFSSQPAVHKLTKRIPLRRQVTVSAESSSSMNSNTPLVRITTRLSSTADTPMLAGVSEYELPEDPKWEFPRDKLTLGKPLGEGCFGQVVMAEAVGIDKDKPKEAVTVAVKMLKDDATEKDLSDLVSEMEMMKMIGKHKNIINLLGACTQDGPLYVIVEYASKGNLREYLRARRPPGMEYSYDINRVPEEQMTFKDLVSCTYQLARGMEYLASQKCIHRDLAARNVLVTENNVMKIADFGLARDINNIDYYKKTTNGRLPVKWMAPEALFDRVYTHQSDVWSFGVLMWEIFTLGGSPYPGIPVEELFKLLKEGHRMDKPANCTNELYMMMRDCWHAVPSQRPTFKQLVEDLDRILTLTTNEEYLDLSQPLEQYSPSYPDTRSSCSSGDDSVFSPDPMPYEPCLPQYPHINGSVKT

SEQ ID NO: 823212 - protein, 705 aa, Homo sapiens
MVSWGRFICLVVVTMATLSLARPSFSLVEDTTLEPEEPPTKYQISQPEVYVAAPGESLEVRCLLKDAAVISWTKDGVHLGPNNRTVLIGEYLQIKGATPRDSGLYACTASRTVDSETWYFMVNVTDAISSGDDEDDTDGAEDFVSENSNNKRAPYWTNTEKMEKRLHAVPAANTVKFRCPAGGNPMPTMRWLKNGKEFKQEHRIGGYKVRNQHWSLIMESVVPSDKGNYTCVVENEYGSINHTYHLDVVERSPHRPILQAGLPANASTVVGGDVEFVCKVYSDAQPHIQWIKHVEKNGSKYGPDGLPYLKVLKVSAESSSSMNSNTPLVRITTRLSSTADTPMLAGVSEYELPEDPKWEFPRDKLTLGKPLGEGCFGQVVMAEAVGIDKDKPKEAVTVAVKMLKDDATEKDLSDLVSEMEMMKMIGKHKNIINLLGACTQDGPLYVIVEYASKGNLREYLRARRPPGMEYSYDINRVPEEQMTFKDLVSCTYQLARGMEYLASQKCIHRDLAARNVLVTENNVMKIADFGLARDINNIDYYKKTTNGRLPVKWMAPEALFDRVYTHQSDVWSFGVLMWEIFTLGGSPYPGIPVEELFKLLKEGHRMDKPANCTNELYMMMRDCWHAVPSQRPTFKQLVEDLDRILTLTTNEEYLDLSQPLEQYSPSYPDTRSSCSSGDDSVFSPDPMPYEPCLPQYPHINGSVKT

SEQ ID NO: 823213 - protein, 751 aa, Homo sapiens
MGLTSTWRYGRGPGIGTVTMVSWGRFICLVVVTMATLSLARPSFSLVEDTTLEPEDAISSGDDEDDTDGAEDFVSENSNNKRAPYWTNTEKMEKRLHAVPAANTVKFRCPAGGNPMPTMRWLKNGKEFKQEHRIGGYKVRNQHWSLIMESVVPSDKGNYTCVVENEYGSINHTYHLDVVERSPHRPILQAGLPANASTVVGGDVEFVCKVYSDAQPHIQWIKHVEKNGSKYGPDGLPYLKVLKAAGVNTTDKEIEVLYIRNVTFEDAGEYTCLAGNSIGISFHSAWLTVLPAPGREKEITASPDYLEIAIYCIGVFLIACMVVTVILCRMKNTTKKPDFSSQPAVHKLTKRIPLRRQVTVSAESSSSMNSNTPLVRITTRLSSTADTPMLAGVSEYELPEDPKWEFPRDKLTLGKPLGEGCFGQVVMAEAVGIDKDKPKEAVTVAVKMLKDDATEKDLSDLVSEMEMMKMIGKHKNIINLLGACTQDGPLYVIVEYASKGNLREYLRARRPPGMEYSYDINRVPEEQMTFKDLVSCTYQLARGMEYLASQKCIHRDLAARNVLVTENNVMKIADFGLARDINNIDYYKKTTNGRLPVKWMAPEALFDRVYTHQSDVWSFGVLMWEIFTLGGSPYPGIPVEELFKLLKEGHRMDKPANCTNELYMMMRDCWHAVPSQRPTFKQLVEDLDRILTLTTNEEYLDLSQPLEQYSPSYPDTRSSCSSGDDSVFSPDPMPYEPCLPQYPHINGSVKT

SEQ ID NO: 823214 - protein, 787 aa, Homo sapiens
MVSWGRFICLVVVTMATLSLARPSFSLVEDTTLEPEEPPTKYQISQPEVYVAAPGESLEVRCLLKDAAVISWTKDGVHLGPNNRTVLIGEYLQIKGATPRDSGLYACTASRTVDSETWYFMVNVTDAISSGDDEDDTDGAEDFVSENSNNKRAPYWTNTEKMEKRLHAVPAANTVKFRCPAGGNPMPTMRWLKNGKEFKQEHRIGGYKVRNQHWSLIMESVVPSDKGNYTCVVENEYGSINHTYHLDVVERSPHRPILQAGLPANASTVVGGDVEFVCKVYSDAQPHIQWIKHVEKNGSKYGPDGLPYLKVLKAAGVNTTDKEIEVLYIRNVTFEDAGEYTCLAGNSIGISFHSAWLTVLPAPGREKEITASPDYLEIAIYCIGVFLIACMVVTVILCRMKNTTKKPDFSSQPAVHKLTKRIPLRRQVTVSAESSSSMNSNTPLVRITTRLSSTADTPMLAGVSEYELPEDPKWEFPRDKLTLGKPLGEGCFGQVVMAEAVGIDKDKPKEAVTVAVKMLKDDATEKDLSDLVSEMEMMKMIGKHKNIINLLGACTQDGPLYVIVEYASKGNLREYLRARRPPGMEYSYDINRVPEEQMTFKDLVSCTYQLARGMEYLASQKCIHRDLAARNVLVTENNVMKIADFGLARDINNIDYYKKTTNGRLPVKWMAPEALFDRVYTHQSDVWSFGVLMWEIFTLGGSPYPGIPVEELFKLLKEGHRMDKPANCTNELYMMMRDCWHAVPSQRPTFKQLVEDLDRILTLTTNEEYLDLSQPLEPYSPCYPDPR

SEQ ID NO: 823215 - protein, 684 aa, Homo sapiens
MVSWGRFICLVVVTMATLSLARPSFSLVEDTTLEPEDAISSGDDEDDTDGAEDFVSENSNNKRAPYWTNTEKMEKRLHAVPAANTVKFRCPAGGNPMPTMRWLKNGKEFKQEHRIGGYKVRNQHWSLIMESVVPSDKGNYTCVVENEYGSINHTYHLDVVERSPHRPILQAGLPANASTVVGGDVEFVCKVYSDAQPHIQWIKHVEKNGSKYGPDGLPYLKVLKHSGINSSNAEVLALFNVTEADAGEYICKVSNYIGQANQSAWLTVLPKQQAPGREKEITASPDYLEIAIYCIGVFLIACMVVTVILCRMKNTTKKPDFSSQPAVHKLTKRIPLRRQVTVSAESSSSMNSNTPLVRITTRLSSTADTPMLAGVSEYELPEDPKWEFPRDKLTLGKPLGEGCFGQVVMAEAVGIDKDKPKEAVTVAVKMLKDDATEKDLSDLVSEMEMMKMIGKHKNIINLLGACTQDGPLYVIVEYASKGNLREYLRARRPPGMEYSYDINRVPEEQMTFKDLVSCTYQLARGMEYLASQKCIHRDLAARNVLVTENNVMKIADFGLARDINNIDYYKKTTNGRLPVKWMAPEALFDRVYTHQSDVWSFGVLMWEIFTLGGSPYPGIPVEELFKLLKEGHRMDKPANCTNELYMMMRDCWHAVPSQRPTFKQLVEDLDRIPPNPSLMSIFRK

SEQ ID NO: 823216 - protein, 769 aa, Homo sapiens
MVSWGRFICLVVVTMATLSLARPSFSLVEDTTLEPEEPPTKYQISQPEVYVAAPGESLEVRCLLKDAAVISWTKDGVHLGPNNRTVLIGEYLQIKGATPRDSGLYACTASRTVDSETWYFMVNVTDAISSGDDEDDTDGAEDFVSENSNNKRAPYWTNTEKMEKRLHAVPAANTVKFRCPAGGNPMPTMRWLKNGKEFKQEHRIGGYKVRNQHWSLIMESVVPSDKGNYTCVVENEYGSINHTYHLDVVERSPHRPILQAGLPANASTVVGGDVEFVCKVYSDAQPHIQWIKHVEKNGSKYGPDGLPYLKVLKHSGINSSNAEVLALFNVTEADAGEYICKVSNYIGQANQSAWLTVLPKQQAPGREKEITASPDYLEIAIYCIGVFLIACMVVTVILCRMKNTTKKPDFSSQPAVHKLTKRIPLRRQVTVSAESSSSMNSNTPLVRITTRLSSTADTPMLAGVSEYELPEDPKWEFPRDKLTLGKPLGEGCFGQVVMAEAVGIDKDKPKEAVTVAVKMLKDDATEKDLSDLVSEMEMMKMIGKHKNIINLLGACTQDGPLYVIVEYASKGNLREYLRARRPPGMEYSYDINRVPEEQMTFKDLVSCTYQLARGMEYLASQKCIHRDLAARNVLVTENNVMKIADFGLARDINNIDYYKKTTNGRLPVKWMAPEALFDRVYTHQSDVWSFGVLMWEIFTLGGSPYPGIPVEELFKLLKEGHRMDKPANCTNELYMMMRDCWHAVPSQRPTFKQLVEDLDRILTLTTNEI

SEQ ID NO: 823217 - protein, 795 aa, Homo sapiens
MVSWGRFICLVVVTMATLSLARPSFSLVEDTTLEPEEPPTKYQISQPEVYVAAPGESLEVRCLLKDAAVISWTKDGVHLGPNNRTVLIGEYLQIKGATPRDSGLYACTASRTVDSETWYFMVNVTDAISSGDDEDDTDGAEDFVSENSNNKRAPYWTNTEKMEKRLHAVPAANTVKFRCPAGGNPMPTMRWLKNGKEFKQEHRIGGYKVRNQHWSLIMESVVPSDKGNYTCVVENEYGSINHTYHLDVVERSPHRPILQAGLPANASTVVGGDVEFVCKVYSDAQPHIQWIKHVEKNGSKYGPDGLPYLKVLKHSGINSSNAEVLALFNVTEADAGEYICKVSNYIGQANQSAWLTVLPKQQAPGREKEITASPDYLEIAIYCIGVFLIACMVVTVILCRMKNTTKKPDFSSQPAVHKLTKRIPLRRQVTVSAESSSSMNSNTPLVRITTRLSSTADTPMLAGVSEYELPEDPKWEFPRDKLTLGKPLGEGCFGQVVMAEAVGIDKDKPKEAVTVAVKMLKDDATEKDLSDLVSEMEMMKMIGKHKNIINLLGACTQDGPLYVIVEYASKGNLREYLRARRPPGMEYSYDINRVPEEQMTFKDLVSCTYQLARGMEYLASQKCIHRDLAARNVLVTENNVMKIADFGLARDINNIDYYKKTTNGRLPVKWMAPEALFDRVYTHQSDVWSFGVLMWEIFTLGGSPYPGIPVEELFKLLKEGHRMDKPANCTNELYMMMRDCWHAVPSQRPTFKQLVEDLDRILTLTTNEAASLGITRERELPDLPFCNIPCNSELH

SEQ ID NO: 823218 - protein, 768 aa, Homo sapiens
MVSWGRFICLVVVTMATLSLARPSFSLVEDTTLEPEEPPTKYQISQPEVYVAAPGESLEVRCLLKDAAVISWTKDGVHLGPNNRTVLIGEYLQIKGATPRDSGLYACTASRTVDSETWYFMVNVTDAISSGDDEDDTDGAEDFVSENSNNKRAPYWTNTEKMEKRLHAVPAANTVKFRCPAGGNPMPTMRWLKNGKEFKQEHRIGGYKVRNQHWSLIMESVVPSDKGNYTCVVENEYGSINHTYHLDVVERSPHRPILQAGLPANASTVVGGDVEFVCKVYSDAQPHIQWIKHVEKNGSKYGPDGLPYLKVLKAAGVNTTDKEIEVLYIRNVTFEDAGEYTCLAGNSIGISFHSAWLTVLPAPGREKEITASPDYLEIAIYCIGVFLIACMVVTVILCRMKNTTKKPDFSSQPAVHKLTKRIPLRRQVTVSAESSSSMNSNTPLVRITTRLSSTADTPMLAGVSEYELPEDPKWEFPRDKLTLGKPLGEGCFGQVVMAEAVGIDKDKPKEAVTVAVKMLKDDATEKDLSDLVSEMEMMKMIGKHKNIINLLGACTQDGPLYVIVEYASKGNLREYLRARRPPGMEYSYDINRVPEEQMTFKDLVSCTYQLARGMEYLASQKCIHRDLAARNVLVTENNVMKIADFGLARDINNIDYYKKTTNGRLPVKWMAPEALFDRVYTHQSDVWSFGVLMWEIFTLGGSPYPGIPVEELFKLLKEGHRMDKPANCTNELYMMMRDCWHAVPSQRPTFKQLVEDLDRILTLTTNEI

SEQ ID NO: 823219 - protein, 820 aa, Homo sapiens
MVSWGRFICLVVVTMATLSLARPSFSLVEDTTLEPEEPPTKYQISQPEVYVAAPGESLEVRCLLKDAAVISWTKDGVHLGPNNRTVLIGEYLQIKGATPRDSGLYACTASRTVDSETWYFMVNVTDAISSGDDEDDTDGAEDFVSENSNNKRAPYWTNTEKMEKRLHAVPAANTVKFRCPAGGNPMPTMRWLKNGKEFKQEHRIGGYKVRNQHWSLIMESVVPSDKGNYTCVVENEYGSINHTYHLDVVERSPHRPILQAGLPANASTVVGGDVEFVCKVYSDAQPHIQWIKHVEKNGSKYGPDGLPYLKVLKHSGINSSNAEVLALFNVTEADAGEYICKVSNYIGQANQSAWLTVLPKQQAPGREKEITASPDYLEIAIYCIGVFLIACMVVTVILCRMKNTTKKPDFSSQPAVHKLTKRIPLRRQVTVSAESSSSMNSNTPLVRITTRLSSTADTPMLAGVSEYELPEDPKWEFPRDKLTLGKPLGEGCFGQVVMAEAVGIDKDKPKEAVTVAVKMLKDDATEKDLSDLVSEMEMMKMIGKHKNIINLLGACTQDGPLYVIVEYASKGNLREYLRARRPPGMEYSYDINRVPEEQMTFKDLVSCTYQLARGMEYLASQKCIHRDLAARNVLVTENNVMKIADFGLARDINNIDYYKKTTNGRLPVKWMAPEALFDRVYTHQSDVWSFGVLMWEIFTLGGSPYPGIPVEELFKLLKEGHRMDKPANCTNELYMMMRDCWHAVPSQRPTFKQLVEDLDRILTLTTNEVRTSFSEAPENFQSTSGREGTETHALQCLRSEVTPAISCESPLADTGSKVPN

SEQ ID NO: 823220 - protein, 835 aa, Homo sapiens
MVSWGRFICLVVVTMATLSLARPSFSLVEDTTLEPEEPPTKYQISQPEVYVAAPGESLEVRCLLKDAAVISWTKDGVHLGPNNRTVLIGEYLQIKGATPRDSGLYACTASRTVDSETWYFMVNVTDAISSGDDEDDTDGAEDFVSENSNNKRAPYWTNTEKMEKRLHAVPAANTVKFRCPAGGNPMPTMRWLKNGKEFKQEHRIGGYKVRNQHWSLIMESVVPSDKGNYTCVVENEYGSINHTYHLDVVERSPHRPILQAGLPANASTVVGGDVEFVCKVYSDAQPHIQWIKHVEKNGSKYGPDGLPYLKVLKHSGINSSNAEVLALFNVTEADAGEYICKVSNYIGQANQSAWLTVLPKQQAPGREKEITASPDYLEIAIYCIGVFLIACMVVTVILCRMKNTTKKPDFSSQPAVHKLTKRIPLRRQVTVSAESSSSMNSNTPLVRITTRLSSTADTPMLAGVSEYELPEDPKWEFPRDKLTLGKPLGEGCFGQVVMAEAVGIDKDKPKEAVTVAVKMLKDDATEKDLSDLVSEMEMMKMIGKHKNIINLLGACTQDGPLYVIVEYASKGNLREYLRARRPPGMEYSYDINRVPEEQMTFKDLVSCTYQLARGMEYLASQKCIHRDLAARNVLVTENNVMKIADFGLARDINNIDYYKKTTNGRLPVKWMAPEALFDRVYTHQSDVWSFGVLMWEIFTLGGSPYPGIPVEELFKLLKEGHRMDKPANCTNELYMMMRDCWHAVPSQRPTFKQLVEDLDRILTLTTNERYKLLPCPDKHNKRCKPEERGDLTEAGAAGSSRCVDSRKRVRQEKISTGKTSEIKGQQLESLGGEAV

SEQ ID NO: 823221 - protein, 819 aa, Homo sapiens
MVSWGRFICLVVVTMATLSLARPSFSLVEDTTLEPEEPPTKYQISQPEVYVAAPGESLEVRCLLKDAAVISWTKDGVHLGPNNRTVLIGEYLQIKGATPRDSGLYACTASRTVDSETWYFMVNVTDAISSGDDEDDTDGAEDFVSENSNNKRAPYWTNTEKMEKRLHAVPAANTVKFRCPAGGNPMPTMRWLKNGKEFKQEHRIGGYKVRNQHWSLIMESVVPSDKGNYTCVVENEYGSINHTYHLDVVERSPHRPILQAGLPANASTVVGGDVEFVCKVYSDAQPHIQWIKHVEKNGSKYGPDGLPYLKVLKHSGINSSNAEVLALFNVTEADAGEYICKVSNYIGQANQSAWLTVLPKQQAPGREKEITASPDYLEIAIYCIGVFLIACMVVTVILCRMKNTTKKPDFSSQPAVHKLTKRIPLRRQVTVSAESSSSMNSNTPLVRITTRLSSTADTPMLAGVSEYELPEDPKWEFPRDKLTLGKPLGEGCFGQVVMAEAVGIDKDKPKEAVTVAVKMLKDDATEKDLSDLVSEMEMMKMIGKHKNIINLLGACTQDGPLYVIVEYASKGNLREYLRARRPPGMEYSYDINRVPEEQMTFKDLVSCTYQLARGMEYLASQKCIHRDLAARNVLVTENNVMKIADFGLARDINNIDYYKKTTNGRLPVKWMAPEALFDRVYTHQSDVWSFGVLMWEIFTLGGSPYPGIPVEELFKLLKEGHRMDKPANCTNELYMMMRDCWHAVPSQRPTFKQLVEDLDRILTLTTNESFQSSLKSSSTGIPGWPPGSEVFSEVAFRGILNYDIERPILCAGSKKIYDI

SEQ ID NO: 823222 - protein, 771 aa, Homo sapiens
MVSWGRFICLVVVTMATLSLARPSFSLVEDTTLEPEEPPTKYQISQPEVYVAAPGESLEVRCLLKDAAVISWTKDGVHLGPNNRTVLIGEYLQIKGATPRDSGLYACTASRTVDSETWYFMVNVTDAISSGDDEDDTDGAEDFVSENSNNKRAPYWTNTEKMEKRLHAVPAANTVKFRCPAGGNPMPTMRWLKNGKEFKQEHRIGGYKVRNQHWSLIMESVVPSDKGNYTCVVENEYGSINHTYHLDVVERSPHRPILQAGLPANASTVVGGDVEFVCKVYSDAQPHIQWIKHVEKNGSKYGPDGLPYLKVLKHSGINSSNAEVLALFNVTEADAGEYICKVSNYIGQANQSAWLTVLPKQQAPGREKEITASPDYLEIAIYCIGVFLIACMVVTVILCRMKNTTKKPDFSSQPAVHKLTKRIPLRRQVTVSAESSSSMNSNTPLVRITTRLSSTADTPMLAGVSEYELPEDPKWEFPRDKLTLGKPLGEGCFGQVVMAEAVGIDKDKPKEAVTVAVKMLKDDATEKDLSDLVSEMEMMKMIGKHKNIINLLGACTQDGPLYVIVEYASKGNLREYLRARRPPGMEYSYDINRVPEEQMTFKDLVSCTYQLARGMEYLASQKCIHRDLAARNVLVTENNVMKIADFGLARDINNIDYYKKTTNGRLPVKWMAPEALFDRVYTHQSDVWSFGVLMWEIFTLGGSPYPGIPVEELFKLLKEGHRMDKPANCTNELYMMMRDCWHAVPSQRPTFKQLVEDLDRILTLTTNEPLS

SEQ ID NO: 823223 - protein, 768 aa, Homo sapiens
MVSWGRFICLVVVTMATLSLARPSFSLVEDTTLEPEEPPTKYQISQPEVYVAAPGESLEVRCLLKDAAVISWTKDGVHLGPNNRTVLIGEYLQIKGATPRDSGLYACTASRTVDSETWYFMVNVTDAISSGDDEDDTDGAEDFVSENSNNKRAPYWTNTEKMEKRLHAVPAANTVKFRCPAGGNPMPTMRWLKNGKEFKQEHRIGGYKVRNQHWSLIMESVVPSDKGNYTCVVENEYGSINHTYHLDVVERSPHRPILQAGLPANASTVVGGDVEFVCKVYSDAQPHIQWIKHVEKNGSKYGPDGLPYLKVLKHSGINSSNAEVLALFNVTEADAGEYICKVSNYIGQANQSAWLTVLPKQQAPGREKEITASPDYLEIAIYCIGVFLIACMVVTVILCRMKNTTKKPDFSSQPAVHKLTKRIPLRRQVTVSAESSSSMNSNTPLVRITTRLSSTADTPMLAGVSEYELPEDPKWEFPRDKLTLGKPLGEGCFGQVVMAEAVGIDKDKPKEAVTVAVKMLKDDATEKDLSDLVSEMEMMKMIGKHKNIINLLGACTQDGPLYVIVEYASKGNLREYLRARRPPGMEYSYDINRVPEEQMTFKDLVSCTYQLARGMEYLASQKCIHRDLAARNVLVTENNVMKIADFGLARDINNIDYYKKTTNGRLPVKWMAPEALFDRVYTHQSDVWSFGVLMWEIFTLGGSPYPGIPVEELFKLLKEGHRMDKPANCTNELYMMMRDCWHAVPSQRPTFKQLVEDLDRILTLTTNE

SEQ ID NO: 823224 - protein, 680 aa, Homo sapiens
MVSWGRFICLVVVTMATLSLARPSFSLVEDTTLEPEDAISSGDDEDDTDGAEDFVSENSNNKRAPYWTNTEKMEKRLHAVPAANTVKFRCPAGGNPMPTMRWLKNGKEFKQEHRIGGYKVRNQHWSLIMESVVPSDKGNYTCVVENEYGSINHTYHLDVVERSPHRPILQAGLPANASTVVGGDVEFVCKVYSDAQPHIQWIKHVEKNGSKYGPDGLPYLKVLKHSGINSSNAEVLALFNVTEADAGEYICKVSNYIGQANQSAWLTVLPKQQAPGREKEITASPDYLEIAIYCIGVFLIACMVVTVILCRMKNTTKKPDFSSQPAVHKLTKRIPLRRQVTVSAESSSSMNSNTPLVRITTRLSSTADTPMLAGVSEYELPEDPKWEFPRDKLTLGKPLGEGCFGQVVMAEAVGIDKDKPKEAVTVAVKMLKDDATEKDLSDLVSEMEMMKMIGKHKNIINLLGACTQDGPLYVIVEYASKGNLREYLRARRPPGMEYSYDINRVPEEQMTFKDLVSCTYQLARGMEYLASQKCIHRDLAARNVLVTENNVMKIADFGLARDINNIDYYKKTTNGRLPVKWMAPEALFDRVYTHQSDVWSFGVLMWEIFTLGGSPYPGIPVEELFKLLKEGHRMDKPANCTNELYMMMRDCWHAVPSQRPTFKQLVEDLDRILTLTTNEI

SEQ ID NO: 823225 - protein, 254 aa, Homo sapiens
MVSWGRFICLVVVTMATLSLARPSFSLVEDTTLEPEEPPTKYQISQPEVYVAAPGESLEVRCLLKDAAVISWTKDGVHLGPNNRTVLIGEYLQIKGATPRDSGLYACTASRTVDSETWYFMVNVTDAISSGDDEDDTDGAEDFVSENSNNKRAPYWTNTEKMEKRLHAVPAANTVKFRCPAGGNPMPTMRWLKNGKEFKQEHRIGGYKVRNQHWSLIMESVVPSDKGNYTCVVENEYGSINHTYHLDVVGSQGL

SEQ ID NO: 823226 - protein, 70 aa, Homo sapiens
MVSWGRFICLVVVTMATLSLARPSFSLVEDTTLEPEEPPTKYQISQPEVRLGAEEERKLEFEHVVRVSEY

SEQ ID NO: 823227 - protein, 366 aa, Homo sapiens
MVSWGRFICLVVVTMATLSLARPSFSLVEDTTLEPEEPPTKYQISQPEVYVAAPGESLEVRCLLKDAAVISWTKDGVHLGPNNRTVLIGEYLQIKGATPRDSGLYACTASRTVDSETWYFMVNVTDAISSGDDEDDTDGAEDFVSENSNNKRAPYWTNTEKMEKRLHAVPAANTVKFRCPAGGNPMPTMRWLKNGKEFKQEHRIGGYKVRNQHWSLIMESVVPSDKGNYTCVVENEYGSINHTYHLDVVERSPHRPILQAGLPANASTVVGGDVEFVCKVYSDAQPHIQWIKHVEKNGSKYGPDGLPYLKVLKHSGINSSNAEVLALFNVTEADAGEYICKVSNYIGQANQSAWLTVLPKQQGRRC

SEQ ID NO: 823228 - protein, 821 aa, Homo sapiens; identical to SEQ ID NO: 823209

SEQ ID NO: 823229 - protein, 366 aa, Homo sapiens; identical to SEQ ID NO: 823227

SEQ ID NO: 823230 - protein, 366 aa, Homo sapiens; identical to SEQ ID NO: 823227

SEQ ID NO: 823231 - protein, 324 aa, Homo sapiens
MVSWGRFICLVVVTMATLSLARPSFSLVEDTTLEPEEPPTKYQISQPEVYVAAPGESLEVRCLLKDAAVISWTKDGVHLGPNNRTVLIGEYLQIKGATPRDSGLYACTASRTVDSETWYFMVNVTDAISSGDDEDDTDGAEDFVSENSNNKRAPYWTNTEKMEKRLHAVPAANTVKFRCPAGGNPMPTMRWLKNGKEFKQEHRIGGYKVRNQHWSLIMESVVPSDKGNYTCVVENEYGSINHTYHLDVVERSPHRPILQAGLPANASTVVGGDVEFVCKVYSDAQPHIQWIKHVEKNGSKYADTGQAPGRRLLWASGHGGSSGN

SEQ ID NO: 823232 - protein, 795 aa, Homo sapiens
TRSSPSGVWEPPTKYQISQPEVYVAAPGESLEVRCLLKDAAVISWTKDGVHLGPNNRTVLIGEYLQIKGATPRDSGLYACTASRTVDSETWYFMVNVTDAISSGDDEDDTDGAEDFVSENSNNKRAPYWTNTEKMEKRLHAVPAANTVKFRCPAGGNPMPTMRWLKNGKEFKQEHRIGGYKVRNQHWSLIMESVVPSDKGNYTCVVENEYGSINHTYHLDVVERSPHRPILQAGLPANASTVVGGDVEFVCKVYSDAQPHIQWIKHVEKNGSKYGPDGLPYLKVLKHSGINSSNAEVLALFNVTEADAGEYICKVSNYIGQANQSAWLTVLPKQQAPGREKEITASPDYLEIAIYCIGVFLIACMVVTVILCRMKNTTKKPDFSSQPAVHKLTKRIPLRRQVTVSAESSSSMNSNTPLVRITTRLSSTADTPMLAGVSEYELPEDPKWEFPRDKLTLGKPLGEGCFGQVVMAEAVGIDKDKPKEAVTVAVKMLKDDATEKDLSDLVSEMEMMKMIGKHKNIINLLGACTQDGPLYVIVEYASKGNLREYLRARRPPGMEYSYDINRVPEEQMTFKDLVSCTYQLARGMEYLASQKCIHRDLAARNVLVTENNVMKIADFGLARDINNIDYYKKTTNGRLPVKWMAPEALFDRVYTHQSDVWSFGVLMWEIFTLGGSPYPGIPVEELFKLLKEGHRMDKPANCTNELYMMMRDCWHAVPSQRPTFKQLVEDLDRILTLTTNEEYLDLSQPLEQYSPSYPDTRSSCSSGDDSVFSPDPMPYEPCLPQYPHINGSVKT

SEQ ID NO: 823233 - protein, 653 aa, Homo sapiens
IPTAASRPSPRLPGRCLRLLEGVRSRAELGAARARGADWQRGRRRPGNGSGFSGGVTHREKAGAAAAARAAAGGERGGEPSGRAAGAERARERARPPQSSGAAGLHAAYLARRGDCSPGWRGPAASPGGPEAAACLRALSLRNSRAKFGGGNAKLLALFNVTEADAGEYICKVSNYIGQANQSAWLTVLPKQQAPGREKEITASPDYLEIAIYCIGVFLIACMVVTVILCRMKNTTKKPDFSSQPAVHKLTKRIPLRRQVTVSAESSSSMNSNTPLVRITTRLSSTADTPMLAGVSEYELPEDPKWEFPRDKLTLGKPLGEGCFGQVVMAEAVGIDKDKPKEAVTVAVKMLKDDATEKDLSDLVSEMEMMKMIGKHKNIINLLGACTQDGPLYVIVEYASKGNLREYLRARRPPGMEYSYDINRVPEEQMTFKDLVSCTYQLARGMEYLASQKCIHRDLAARNVLVTENNVMKIADFGLARDINNIDYYKKTTNGRLPVKWMAPEALFDRVYTHQSDVWSFGVLMWEIFTLGGSPYPGIPVEELFKLLKEGHRMDKPANCTNELYMMMRDCWHAVPSQRPTFKQLVEDLDRILTLTTNEEYLDLSQPLEQYSPSYPDTRSSCSSGDDSVFSPDPMPYEPCLPQYPHINGSVKT

SEQ ID NO: 823234 - protein, 366 aa, Homo sapiens; identical to SEQ ID NO: 823227

SEQ ID NO: 823235 - protein, 366 aa, Homo sapiens; identical to SEQ ID NO: 823227

SEQ ID NO: 823236 - protein, 153 aa, Homo sapiens
MVSWGRFICLVVVTMATLSLARPSFSLVEDTTLEPEEPPTKYQISQPEVYVAAPGESLEVRCLLKDAAVISWTKDGVHLGPNNRTVLIGEYLQIKGATPRDSGLYACTASRTVDSETWYFMVNVTDAISSGDDEDDTDGAEDFVSENSNNKSK

SEQ ID NO: 823237 - protein, 254 aa, Homo sapiens; identical to SEQ ID NO: 823225

SEQ ID NO: 823238 - protein, 183 aa, Homo sapiens
IPTAASRPSPRLPGRCLRLLEGVRSRAELGAARARGADWQRGRRRPGNGSGFSGGVTHREKAGAAAAARAAAGGERGGEPSGRAAGAERARERARPPQSSGAAGLHAAYLARRGDCSPGWRGPAASPGGPEAAACLRALSLRNSRAKFGGGNAKPESFLPLVPQIRGQPAGVMPALLRSLGYA

SEQ ID NO: 823239 - protein, 297 aa, Homo sapiens
PCPPPGARHFLPGPVKALPGGGGGDSVRAMVALENPECGPEAAEGTPGGRRLLPLPSCLPALASSQVKRLSASRRKQHFINQAVRNSDLVPKAKGRKSLQRLENTQYLLTLLETDGGLPGLEDGDLAPPASPGIFAEACNNATYVEVWNDFMNRSGEEQERVLRYLEDEGRSKARRRGPGRGEDRRREDPAYTPRECFQRISRRLRAVLKRSRIPMETLETWEERLLRFFSVSPQAVYTAMLDNSFERLLLHAVCQYMDLISASADLEGKRQMKVSNRHLDFLPPGLLLSAYLEQHS

SEQ ID NO: 823240 - protein, 297 aa, Homo sapiens; identical to SEQ ID NO: 823239

SEQ ID NO: 823241 - protein, 297 aa, Homo sapiens; identical to SEQ ID NO: 823239

SEQ ID NO: 823242 - protein, 297 aa, Homo sapiens; identical to SEQ ID NO: 823239

SEQ ID NO: 823243 - protein, 269 aa, Homo sapiens
MAVVGPFSEILAGLDPEDHPCPGPQPLPSCLPALASSQVKRLSASRRKQHFINQAVRNSDLVPKAKGRKSLQRLENTQYLLTLLETDGGLPGLEDGDLAPPASPGIFAEACNNATYVEVWNDFMNRSGEEQERVLRYLEDEGRSKARRRGPGRGEDRRREDPAYTPRECFQRISRRLRAVLKRSRIPMETLETWEERLLRFFSVSPQAVYTAMLDNSFERLLLHAVCQYMDLISASADLEGKRQMKVSNRHLDFLPPGLLLSAYLEQHS

SEQ ID NO: 823244 - protein, 146 aa, Homo sapiens
MNRSGEEQERVLRYLEDEGRSKARRRGPGRGEDRRREDPAYTPRECFQRISRRLRAVLKRSRIPMETLETWEERLLRFFSVSPQAVYTAMLDNSFERLLLHAVCQYMDLISASADLEGKRQMKVSNRHLDFLPPGLLLSAYLEQHS

SEQ ID NO: 823245 - protein, 362 aa, Homo sapiens
PLPASGRPSLPARPGEGPAGRRRRRQRASHGRAGEPRVRPGGGGGHPGRAAAASCYVAQAGLEPLSSSDPPASASHNAGITGMSHHTQPVFTIVSASCDVRMKQNRILRAQDFTHREGPLPSCLPALASSQVKRLSASRRKQHFINQAVRNSDLVPKAKGRKSLQRLENTQYLLTLLETDGGLPGLEDGDLAPPASPGIFAEACNNATYVEVWNDFMNRSGEEQERVLRYLEDEGRSKARRRGPGRGEDRRREDPAYTPRECFQRISRRLRAVLKRSRIPMETLETWEERLLRFFSVSPQAVYTAMLDNSFERLLLHAVCQYMDLISASADLEGKRQMKVSNRHLDFLPPGLLLSAYLEQHS

SEQ ID NO: 823246 - protein, 276 aa, Homo sapiens
PCPPPGARHFLPGPVKALPGGGGGDSVRAMVALENPECGPEAAEGTPGGRRLLRKQHFINQAVRNSDLVPKAKGRKSLQRLENTQYLLTLLETDGGLPGLEDGDLAPPASPGIFAEACNNATYVEVWNDFMNRSGEEQERVLRYLEDEGRSKARRRGPGRGEDRRREDPAYTPRECFQRISRRLRAVLKRSRIPMETLETWEERLLRFFSVSPQAVYTAMLDNSFERLLLHAVCQYMDLISASADLEGKRQMKVSNRHLDFLPPGLLLSAYLEQHS

SEQ ID NO: 823247 - protein, 146 aa, Homo sapiens; identical to SEQ ID NO: 823244

SEQ ID NO: 823248 - protein, 297 aa, Homo sapiens; identical to SEQ ID NO: 823239

SEQ ID NO: 823249 - protein, 297 aa, Homo sapiens; identical to SEQ ID NO: 823239

SEQ ID NO: 823250 - protein, 66 aa, Homo sapiens
TDHLSWEVLNLTIKKDCEGLMPSQRRAVAELTDGRRTGRMCMKVSNRHLDFLPPGLLLSAYLEQHS

SEQ ID NO: 823251 - protein, 147 aa, Homo sapiens
PCPPPGARHFLPGPVKALPGGGGGDSVRAMVALENPECGPEAAEGTPGGRRLLPLPSCLPALASSQVKRLSASRRKQHFINQAVRNSDLVPKAKGRKSLQRLENTQYLLTLLETDGGLPGLEDFQPEASALALPCLSPHPVSPRPPA

SEQ ID NO: 823252 - protein, 85 aa, Homo sapiens
DDKKGGRLVLGSPWCLGVPKCHPGPESICFHLAQYLLTLLETDGGLPGLEDGDLAPPASPGIFAEACNNATYVEVWPPTPSLPPH

SEQ ID NO: 823253 - protein, 116 aa, Homo sapiens
GTICDSTTGSWYRRSVHLMPLAALAALVNDDILARAFSRFPSFLKAKVIRDKRTGKTKGYGFVSFKDPSDYVRAMREMNGKYVGSRPIKLRKSMWKDRNLDVVRKKQKEKKKLGLR

SEQ ID NO: 823254 - protein, 116 aa, Homo sapiens; identical to SEQ ID NO: 823253

SEQ ID NO: 823255 - protein, 391 aa, Homo sapiens
MQWDSSGDLHYIGVEDARVGHHDYSIVRQHTHVTCEHDSGLAKLESLNYGKPIDGHTSWDERHRKQRQVQAEKSLNARKEGDHGRRQERDNIAKRAELERCASAQSDRRDGDNKGSNSATKMRNDTKEKVATNDVQKEEGENTGTDKRDDKGRHMEKRRPSLRTNTAKKLERQQPHTRRETNNNNEENNIQVGTKAHGTQRKKIPRWDVSPNTRDHKQIPESTRRRPTLAKEPLGEDAQQRDKRTNENQRNRGELPKNKRIKIQSQKQQNNIEEKTGNNKHQWMYNINNWSPNRRIQGHKTLPKTTPKTIITRHLTSTNDRQADTLSNARSEQHEHTTQRQKNSETEAEDSTDTREEHTRKRTTRIKKTKDKREITAKKKKHTTHRTEKQN

SEQ ID NO: 823256 - protein, 298 aa, Homo sapiens
MALRPPHQALVGPPLPGPPGPPMMLPPMARAPGPPLGSMAALRPPLEEPAAPRELGLGLGLGLKEKEEAVVAAAAGLEEASAAVAVGAGGAPAGPAVIGPSLPLALAMPLPEPEPLPLPLEVVRGLLPPLRIPELLSLRPRPRPPRPEPPPGLMALEVPEPLGEDKKKGKPEKLKRCIRTAAGSSWEDPSLLEWDADDFRIFCGDLGNEVNDDILARAFSRFPSFLKAKVIRDKRTGKTKGYGFVSFKDPSDYVRAMREMNGKYVGSRPIKLRKSMWKDRNLDVVRKKQKEKKKLGLR

SEQ ID NO: 823257 - protein, 298 aa, Homo sapiens; identical to SEQ ID NO: 823256

SEQ ID NO: 823258 - protein, 298 aa, Homo sapiens; identical to SEQ ID NO: 823256

SEQ ID NO: 823259 - protein, 298 aa, Homo sapiens; identical to SEQ ID NO: 823256

SEQ ID NO: 823260 - protein, 298 aa, Homo sapiens; identical to SEQ ID NO: 823256

SEQ ID NO: 823261 - protein, 298 aa, Homo sapiens; identical to SEQ ID NO: 823256

SEQ ID NO: 823262 - protein, 298 aa, Homo sapiens; identical to SEQ ID NO: 823256

SEQ ID NO: 823263 - protein, 262 aa, Homo sapiens
MAGAGPAPGLPGAGGPVVPGPGAGIPGKSGEERLKEMEAEMALFEQEVLGAPVPGIPTAVPAVPTVPTVPTVEAMQVPAAPVIRPIIATNTYQQVQQTLEARAAAAATVVPPMVGGPPFVGPVGFGPGDRSHLDSPEAREAMFLRRAAVAPQRAPILRPAFVPHVLQRADSALSSAAGRAPPYGPTAPSPGPRGPPSAWAPWTTHDAATNGSGSRAPAGLHGCTEAPSGRASSTPRAGPRPGVGPEREGRGSGGGGGWAGGG

SEQ ID NO: 823264 - protein, 364 aa, Homo sapiens
AGRHPREPTRTKGESRQQNQRRRLSRDCSSGDSDDGSDGWGGASPGTPGCRRTRGPGSWRWHPGQKRRGTLEGNGGGDGPLPGPPGPPMMLPPMARAPGPPLGSMAALRPPLEEPAAPRELGLGLGLGLKEKEEAVVAAAAGLEEASAAVAVGAGGAPAGPAVIGPSLPLALAMPLPEPEPLPLPLEVVRGLLPPLRIPELLSLRPRPRPPRPEPPPGLMALEVPEPLGEDKKKGKPEKLKRCIRTAAGSSWEDPSLLEWDADDFRIFCGDLGNEVNDDILARAFSRFPSFLKAKVIRDKRTGKTKGYGFVSFKDPSDYVRAMREMNGKYVGSRPIKLRKSMWKDRNLDVVRKKQKEKKKLGLR

SEQ ID NO: 823265 - protein, 145 aa, Homo sapiens
MSSIMMMMAARRRQKGKPEKLKRCIRTAAGSSWEDPSLLEWDADDFRIFCGDLGNEVNDDILARAFSRFPSFLKAKVIRDKRTGKTKGYGFVSFKDPSDYVRAMREMNGKYVGSRPIKLRKSMWKDRNLDVVRKKQKEKKKLGLR

SEQ ID NO: 823266 - protein, 1528 aa, Homo sapiens
ELAQNHSRPAPASAPGGGGGGDPNMATARTFGPEREAEPAKEARVVGSELVDTYTVYIIQVTDGSHEWTVKHRYSDFHDLHEKLVAERKIDKNLLPPKKIIGKNSRSLVEKREKDLEVYLQKLLAAFPGVTPRVLAHFLHFHFYEINGITAALAEELFEKGEQLLGAGEVFAIGPLQLYAVTEQLQQGKPTCASGDAKTDLGHILDFTCRLKYLKVSGTEGPFGTSNIQEQLLPFDLSIFKSLHQVEISHCDAKHIRGLVASKPTLATLSVRFSATSMKEVLVPEASEFDEWEPEGTTLEGPVTAVIPTWQALTTLDLSHNSISEIDESVKLIPKIEFLDLSHNGLLVVDNLQHLYNLVHLDLSYNKLSSLEGLHTKLGNIKTLNLAGNLLESLSGLHKLYSLVNLDLRDNRIEQMEEVRSIGSLPCLEHVSLLNNPLSIIPDYRTKVLAQFGERASEVCLDDTVTTEKELDTVEVLKAIQKAKEVKSKLSNPEKKGGEDSRLSAAPCIRPSSSPPTVAPASASLPQPILSNQGIMFVQEEALASSLSSTDSLTPEHQPIAQGCSDSLESIPAGQAASDDLRDVPGAVGGASPEHAEPEVQVVPGSGQIIFLPFTCIGYTATNQDFIQRLSTLIRQAIERQLPAWIEAANQREEGQGEQGEEEDEEEEEEEDVAENRYFEMGPPDVEEEEGGGQGEEEEEEEEDEEAEEERLALEWALGADEDFLLEHIRILKVLWCFLIHVQGSIRQFAACLVLTDFGIAVFEIPHQESRGSSQHILSSLRFVFCFPHGDLTEFGFLMPELCLVLKVRHSENTLFIISDAANLHEFHADLRSCFAPQHMAMLCSPILYGSHTSLQEFLRQLLTFYKVAGGCQERSQGCFPVYLVYSDKRMVQTAAGDYSGNIEWASCTLCSAVRRSCCAPSEAVKSAAIPYWLLLTPQHLNVIKADFNPMPNRGTHNCRNRNSFKLSRVPLSTVLLDPTRSCTQPRGAFADGHVLELLVGYRFVTAIFVLPHEKFHFLRVYNQLRASLQDLKTVVIAKTPGTGGSPQGSFADGQPAERRASNDQRPQEVPAEALAPAPVEVPAPAPAAASASGPAKTPAPAEASTSALVPEETPVEAPAPPPAEAPAQYPSEHLIQATSEENQIPSHLPACPSLRHVASLRGSAIIELFHSSIAEVENEELRHLMWSSVVFYQTPGLEVTACVLLSTKAVYFVLHDGLRRYFSEPLQDFWHQKNTDYNNSPFHISQCFVLKLSDLQSVNVGLFDQHFRLTGSTPMQVVTCLTRDSYLTHCFLQHLMVVLSSLERTPSPEPVDKDFYSEFGNKTTGKMENYELIHSSRVKFTYPSEEEIGDLTFTVAQKMAEPEKAPALSILLYVQAFQVGMPPPGCCRGPLRPKTLLLTSSEIFLLDEDCVHYPLPEFAKEPPQRDRYRLDDGRRVRDLDRVLMGYQTYPQALTLVFDDVQGHDLMGSVTLDHFGEVPGGPARASQGREVQWQVFVPSAESREKLISLLARQWEALCGRELPVELTG

SEQ ID NO: 823267 - protein, 993 aa, Homo sapiens
MFVQEEALASSLSSTDSLTPEHQPIAQGCSDSLESIPAGQAASDDLRDVPGAVGGASPEHAEPEVQVVPGSGQIIFLPFTCIGYTATNQDFIQRLSTLIRQAIERQLPAWIEAANQREEGQGEQGEEEDEEEEEEEDVAENRYFEMGPPDVEEEEGGGQGEEEEEEEEDEEAEEERLALEWALGADEDFLLEHIRILKVLWCFLIHVQGSIRQFAACLVLTDFGIAVFEIPHQESRGSSQHILSSLRFVFCFPHGDLTEFGFLMPELCLVLKVRHSENTLFIISDAANLHEFHADLRSCFAPQHMAMLCSPILYGSHTSLQEFLRQLLTFYKVAGGCQERSQGCFPVYLVYSDKRMVQTAAGDYSGNIEWASCTLCSAVRRSCCAPSEAVKSAAIPYWLLLTPQHLNVIKADFNPMPNRGTHNCRNRNSFKLSRVPLSTVLLDPTRSCTQPRGAFADGHVLELLVGYRFVTAIFVLPHEKFHFLRVYNQLRASLQDLKTVVIAKTPGTGGSPQGSFADGQPAERRASNDQRPQEVPAEALAPAPVEVPAPAPAAASASGPAKTPAPAEASTSALVPEETPVEAPAPPPAEAPAQYPSEHLIQATSEENQIPSHLPACPSLRHVASLRGSAIIELFHSSIAEVENEELRHLMWSSVVFYQTPGLEVTACVLLSTKAVYFVLHDGLRRYFSEPLQDFWHQKNTDYNNSPFHISQCFVLKLSDLQSVNVGLFDQHFRLTGSTPMQVVTCLTRDSYLTHCFLQHLMVVLSSLERTPSPEPVDKDFYSEFGNKTTGKMENYELIHSSRVKFTYPSEEEIGDLTFTVAQKMAEPEKAPALSILLYVQAFQVGMPPPGCCRGPLRPKTLLLTSSEIFLLDEDCVHYPLPEFAKEPPQRDRYRLDDGRRVRDLDRVLMGYQTYPQALTLVFDDVQGHDLMGSVTLDHFGEVPGGPARASQGREVQWQVFVPSAESREKLISLLARQWEALCGRELPVELTG

SEQ ID NO: 823268 - protein, 68 aa, Homo sapiens
MQVVTCLTRDSYLTHCFLQHLMVVLSSLERTPSPEPVDKDFYSEFGNKTTGKMENYELIHPDLNYKIL

SEQ ID NO: 823269 - protein, 1504 aa, Homo sapiens
MATARTFGPEREAEPAKEARVVGSELVDTYTVYIIQVTDGSHEWTVKHRYSDFHDLHEKLVAERKIDKNLLPPKKIIGKNSRSLVEKREKDLEVYLQKLLAAFPGVTPRVLAHFLHFHFYEINGITAALAEELFEKGEQLLGAGEVFAIGPLQLYAVTEQLQQGKPTCASGDAKTDLGHILDFTCRLKYLKVSGTEGPFGTSNIQEQLLPFDLSIFKSLHQVEISHCDAKHIRGLVASKPTLATLSVRFSATSMKEVLVPEASEFDEWEPEGTTLEGPVTAVIPTWQALTTLDLSHNSISEIDESVKLIPKIEFLDLSHNGLLVVDNLQHLYNLVHLDLSYNKLSSLEGLHTKLGNIKTLNLAGNLLESLSGLHKLYSLVNLDLRDNRIEQMEEVRSIGSLPCLEHVSLLNNPLSIIPDYRTKVLAQFGERASEVCLDDTVTTEKELDTVEVLKAIQKAKEVKSKLSNPEKKGGEDSRLSAAPCIRPSSSPPTVAPASASLPQPILSNQGIMFVQEEALASSLSSTDSLTPEHQPIAQGCSDSLESIPAGQAASDDLRDVPGAVGGASPEHAEPEVQVVPGSGQIIFLPFTCIGYTATNQDFIQRLSTLIRQAIERQLPAWIEAANQREEGQGEQGEEEDEEEEEEEDVAENRYFEMGPPDVEEEEGGGQGEEEEEEEEDEEAEEERLALEWALGADEDFLLEHIRILKVLWCFLIHVQGSIRQFAACLVLTDFGIAVFEIPHQESRGSSQHILSSLRFVFCFPHGDLTEFGFLMPELCLVLKVRHSENTLFIISDAANLHEFHADLRSCFAPQHMAMLCSPILYGSHTSLQEFLRQLLTFYKVAGGCQERSQGCFPVYLVYSDKRMVQTAAGDYSGNIEWASCTLCSAVRRSCCAPSEAVKSAAIPYWLLLTPQHLNVIKADFNPMPNRGTHNCRNRNSFKLSRVPLSTVLLDPTRSCTQPRGAFADGHVLELLVGYRFVTAIFVLPHEKFHFLRVYNQLRASLQDLKTVVIAKTPGTGGSPQGSFADGQPAERRASNDQRPQEVPAEALAPAPVEVPAPAPAAASASGPAKTPAPAEASTSALVPEETPVEAPAPPPAEAPAQYPSEHLIQATSEENQIPSHLPACPSLRHVASLRGSAIIELFHSSIAEVENEELRHLMWSSVVFYQTPGLEVTACVLLSTKAVYFVLHDGLRRYFSEPLQDFWHQKNTDYNNSPFHISQCFVLKLSDLQSVNVGLFDQHFRLTGSTPMQVVTCLTRDSYLTHCFLQHLMVVLSSLERTPSPEPVDKDFYSEFGNKTTGKMENYELIHSSRVKFTYPSEEEIGDLTFTVAQKMAEPEKAPALSILLYVQAFQVGMPPPGCCRGPLRPKTLLLTSSEIFLLDEDCVHYPLPEFAKEPPQRDRYRLDDGRRVRDLDRVLMGYQTYPQALTLVFDDVQGHDLMGSVTLDHFGEVPGGPARASQGREVQWQVFVPSAESREKLISLLARQWEALCGRELPVELTG

SEQ ID NO: 823270 - protein, 663 aa, Homo sapiens [sequence omitted]

SEQ ID NO: 823271 - protein, 1553 aa, Homo sapiens
ELAQNHSRPAPASAPGGGGGGDPNMATARTFGPEREAEPAKEARVVGSELVDTYTVYIIQVTDGSHEWTVKHRYSDFHDLHEKLVAERKIDKNLLPPKKIIGKNSRSLVEKREKDLEVYLQKLLAAFPGVTPRVLAHFLHFHFYEINGITAALAEELFEKGEQLLGAGEVFAIGPLQLYAVTEQLQQGKPTCASGDAKTDLGHILDFTCRLKYLKVSGTEGPFGTSNIQEQLLPFDLSIFKSLHQVEISHCDAKHIRGLVASKPTLATLSVRFSATSMKEVLVPEASEFDEWEPEGTTLEGPVTAVIPTWQALTTLDLSHNSISEIDESVKLIPKIEFLDLSHNGLLVVDNLQHLYNLVHLDLSYNKLSSLEGLHTKLGNIKTLNLAGNLLESLSGLHKLYSLVNLDLRDNRIEQDHETCWRVAEVLREGTKGDGTHTLQMEEVRSIGSLPCLEHVSLLNNPLSIIPDYRTKVLAQFGERASEVCLDDTVTTEKELDTVEVLKAIQKAKEVKSKLSNPEKKGGEDSRLSAAPCIRPSSSPPTVAPASASLPQPILSNQGIMFVQEEALASSLSSTDSLTPEHQPIAQGCSDSLESIPAGQAASDDLRDVPGAVGGASPEHAEPEVQVVPGSGQIIFLPFTCIGYTATNQDFIQRLSTLIRQAIERQLPAWIEAANQREEGQGEQGEEEDEEEEEEEDVAENRYFEMGPPDVEEEEGGGQGEEEEEEEEDEEAEEERLALEWALGADEDFLLEHIRILKVLWCFLIHVQGSIRQFAACLVLTDFGIAVFEIPHQESRGSSQHILSSLRFVFCFPHGDLTEFGFLMPELCLVLKVRHSENTLFIISDAANLHEFHADLRSCFAPQHMAMLCSPILYGSHTSLQEFLRQLLTFYKVAGGCQERSQGCFPVYLVYSDKRMVQTAAGDYSGNIEWASCTLCSAVRRSCCAPSEAVKSAAIPYWLLLTPQHLNVIKADFNPMPNRGTHNCRNRNSFKLSRVPLSTVLLDPTRSCTQPRGAFADGHVLELLVGYRFVTAIFVLPHEKFHFLRVYNQLRASLQDLKTVVIAKTPGTGGSPQGSFADGQPAERRASNDQRPQEVPAEALAPAPVEVPAPAPAAASASGPAKTPAPAEASTSALVPEETPVEAPAPPPAEAPAQYPSEHLIQATSEENQIPSHLPACPSLRHVASLRGSAIIELFHSSIAEVENEELRHLMWSSVVFYQTPGLEVTACVLLSTKAVYFVLHDGLRRYFSEPLQDFWHQKNTDYNNSPFHISQCFVLKLSDLQSVNVGLFDQHFRLTGSTPMQVVTCLTRDSYLTHCFLQHLMVVLSSLERTPSPEPVDKDFYSEFGNKTTGKMENYELIHSSRVKFTYPSEEEIGDLTFTVAQKMAEPEKAPALSILLYVQAFQVGMPPPGCCRGPLRPKTLLLTSSEIFLLDEDCVHYPLPEFAKEPPQRDRYRLDDGRRVRDLDRVLMGYQTYPQALTLVFDDVQGHDLMGSVTLDHFGEVPGGPARASQGREVQWQVFVPSAESREKLISLLARQWEALCGRELPVELTG

SEQ ID NO: 823272 - protein, 1265 aa, Homo sapiens
MALWLTSVVPALWEAEEVLVPEASEFDEWEPEGTTLEGPVTAVIPTWQALTTLDLSHNSISEIDESVKLIPKIEFLDLSHNGLLVVDNLQHLYNLVHLDLSYNKLSSLEGLHTKLGNIKTLNLAGNLLESLSGLHKLYSLVNLDLRDNRIEQMEEVRSIGSLPCLEHVSLLNNPLSIIPDYRTKVLAQFGERASEVCLDDTVTTEKELDTVEVLKAIQKAKEVKSKLSNPEKKGGEDSRLSAAPCIRPSSSPPTVAPASASLPQPILSNQGIMFVQEEALASSLSSTDSLTPEHQPIAQGCSDSLESIPAGQAASDDLRDVPGAVGGASPEHAEPEVQVVPGSGQIIFLPFTCIGYTATNQDFIQRLSTLIRQAIERQLPAWIEAANQREEGQGEQGEEEDEEEEEEEDVAENRYFEMGPPDVEEEEGGGQGEEEEEEEEDEEAEEERLALEWALGADEDFLLEHIRILKVLWCFLIHVQGSIRQFAACLVLTDFGIAVFEIPHQESRGSSQHILSSLRFVFCFPHGDLTEFGFLMPELCLVLKVRHSENTLFIISDAANLHEFHADLRSCFAPQHMAMLCSPILYGSHTSLQEFLRQLLTFYKVAGGCQERSQGCFPVYLVYSDKRMVQTAAGDYSGNIEWASCTLCSAVRRSCCAPSEAVKSAAIPYWLLLTPQHLNVIKADFNPMPNRGTHNCRNRNSFKLSRVPLSTVLLDPTRSCTQPRGAFADGHVLELLVGYRFVTAIFVLPHEKFHFLRVYNQLRASLQDLKTVVIAKTPGTGGSPQGSFADGQPAERRASNDQRPQEVPAEALAPAPVEVPAPAPAAASASGPAKTPAPAEASTSALVPEETPVEAPAPPPAEAPAQYPSEHLIQATSEENQIPSHLPACPSLRHVASLRGSAIIELFHSSIAEVENEELRHLMWSSVVFYQTPGLEVTACVLLSTKAVYFVLHDGLRRYFSEPLQDFWHQKNTDYNNSPFHISQCFVLKLSDLQSVNVGLFDQHFRLTGSTPMQVVTCLTRDSYLTHCFLQHLMVVLSSLERTPSPEPVDKDFYSEFGNKTTGKMENYELIHSSRVKFTYPSEEEIGDLTFTVAQKMAEPEKAPALSILLYVQAFQVGMPPPGCCRGPLRPKTLLLTSSEIFLLDEDCVHYPLPEFAKEPPQRDRYRLDDGRRVRDLDRVLMGYQTYPQALTLVFDDVQGHDLMGSVTLDHFGEVPGGPARASQGREVQWQVFVPSAESREKLISLLARQWEALCGRELPVELTG

SEQ ID NO: 823273 - protein, 1270 aa, Homo sapiens
MIVLATNLATLSVRFSATSMKEVLVPEASEFDEWEPEGTTLEGPVTAVIPTWQALTTLDLSHNSISEIDESVKLIPKIEFLDLSHNGLLVVDNLQHLYNLVHLDLSYNKLSSLEGLHTKLGNIKTLNLAGNLLESLSGLHKLYSLVNLDLRDNRIEQMEEVRSIGSLPCLEHVSLLNNPLSIIPDYRTKVLAQFGERASEVCLDDTVTTEKELDTVEVLKAIQKAKEVKSKLSNPEKKGGEDSRLSAAPCIRPSSSPPTVAPASASLPQPILSNQGIMFVQEEALASSLSSTDSLTPEHQPIAQGCSDSLESIPAGQAASDDLRDVPGAVGGASPEHAEPEVQVVPGSGQIIFLPFTCIGYTATNQDFIQRLSTLIRQAIERQLPAWIEAANQREEGQGEQGEEEDEEEEEEEDVAENRYFEMGPPDVEEEEGGGQGEEEEEEEEDEEAEEERLALEWALGADEDFLLEHIRILKVLWCFLIHVQGSIRQFAACLVLTDFGIAVFEIPHQESRGSSQHILSSLRFVFCFPHGDLTEFGFLMPELCLVLKVRHSENTLFIISDAANLHEFHADLRSCFAPQHMAMLCSPILYGSHTSLQEFLRQLLTFYKVAGGCQERSQGCFPVYLVYSDKRMVQTAAGDYSGNIEWASCTLCSAVRRSCCAPSEAVKSAAIPYWLLLTPQHLNVIKADFNPMPNRGTHNCRNRNSFKLSRVPLSTVLLDPTRSCTQPRGAFADGHVLELLVGYRFVTAIFVLPHEKFHFLRVYNQLRASLQDLKTVVIAKTPGTGGSPQGSFADGQPAERRASNDQRPQEVPAEALAPAPVEVPAPAPAAASASGPAKTPAPAEASTSALVPEETPVEAPAPPPAEAPAQYPSEHLIQATSEENQIPSHLPACPSLRHVASLRGSAIIELFHSSIAEVENEELRHLMWSSVVFYQTPGLEVTACVLLSTKAVYFVLHDGLRRYFSEPLQDFWHQKNTDYNNSPFHISQCFVLKLSDLQSVNVGLFDQHFRLTGSTPMQVVTCLTRDSYLTHCFLQHLMVVLSSLERTPSPEPVDKDFYSEFGNKTTGKMENYELIHSSRVKFTYPSEEEIGDLTFTVAQKMAEPEKAPALSILLYVQAFQVGMPPPGCCRGPLRPKTLLLTSSEIFLLDEDCVHYPLPEFAKEPPQRDRYRLDDGRRVRDLDRVLMGYQTYPQALTLVFDDVQGHDLMGSVTLDHFGEVPGGPARASQGREVQWQVFVPSAESREKLISLLARQWEALCGRELPVELTG

SEQ ID NO: 823274 - protein, 1470 aa, Homo sapiens
ELAQNHSRPAPASAPGGGGGGDPNMATARTFGPEREAEPAKEARVVGSELVDTYTVYIIQVTDGSHEWTVKHRYSDFHDLHEKLVAERKIDKNLLPPKKIIGKNSRSLVEKREKDLEVYLQKLLAAFPGVTPRVLAHFLHFHFYEINGITAALAEELFEKGEQLLGAGEVFAIGPLQLYAVTEQLQQGKPTCASGDAKTDLGHILDFTCRLKYLKVSGTEGPFGTSNIQEQLLPFDLSIFKSLHQVEISHCDAKHIRGLVASKPTLATLSVRFSATSMKEVLVPEASEFDEWEPEGTTLEGPVTAVIPTWQALTTLDLSHNSISEIDESVKLIPKIEFLDLSHNGLLVVDNLQHLYNLVHLDLSYNKLSSLEGLHTKLGNIKTLNLAGNLLESLSGLHKLYSLVNLDLRDNRIEQMEEVRSIGSLPCLEHVSLLNNPLSIIPDYRTKVLAQFGERASEVCLDDTVTTEKELDTVEVLKAIQKAKEVKSKLSNPEKKGGEDSRLSAAPCIRPSSSPPTVAPASASLPQPILSNQGIMFVQEEALASSLSSTDSLTPEHQPIAQGCSDSLESIPAGQAASDDLRDVPGAVGGASPEHAEPEVQVVPGSGQIIFLPFTCIGYTATNQDFIQRLSTLIRQAIERQLPAWIEAANQREEGQGEQGEEEDEEEEEEEDVAENRYFEMGPPDVEEEEGGGQGEEEEEEEEDEEAEEERLALEWALGADEDFLLEHIRILKVLWCFLIHVQGSIRQFAACLVLTDFGIAVFEIPHQESRGSSQHILSSLRFVFCFPHGDLTEFGFLMPELCLVLKVRHSENTLFIISDAANLHEFHADLRSCFAPQHMAMLCSPILYGSHTSLQEFLRQLLTFYKVAGGCQERSQGCFPVYLVYSDKRMVQTAAGDYSGNIEWASCTLCSAVRRSCCAPSEAVKSAAIPYWLLLTPQHLNVIKADFNPMPNRGTHNCRNRNSFKLSRVPLSTVLLDPTRSCTQPRGAFADGHVLELLVGYRFVTAIFVLPHEKFHFLRVYNQLRASLQDLKTVVIAKTPGTGGSPQGSFADGQPAERRASNDQRPQEVPAEALAPAPVEVPAPAPAAASASGPAKTPAPAEASTSALVPEETPVEAPAPPPAEAPAQYPSEHLIQATSEENQIPSHLPACPSLRHVASLRGSAIIELFHSSIAEVENEELRHLMWSSVVFYQTPGLEVTACVLLSTKAVYFVLHDGLRRYFSEPLQDFWHQKNTDYNNSPFHISQCFVLKLSDLQSVNVGLFDQHFRLTGSTPMQVVTCLTRDSYLTHCFLQHLMVVLSSLERTPSPEPVDKDFYSEFGNKTTGKMENYELIHSSRVKFTYPSEEEIGDLTFTVAQKMAEPEKAPALSILLYVQAFQVGMPPPGCCRGPLRPKTLLLTSSEIFLLDEDCVHYPLPEFAKEPPQRDRYRLDDGRRVRDLDRVLMGYQTYPQALTLVFDDVQGHDLMGSC

SEQ ID NO: 823275 - protein, 1195 aa, Homo sapiens
NLRLGTRPGCDGLLVVDNLQHLYNLVHLDLSYNKLSSLEGLHTKLGNIKTLNLAGNLLESLSGLHKLYSLVNLDLRDNRIEQMEEVRSIGSLPCLEHVSLLNNPLSIIPDYRTKVLAQFGERASEVCLDDTVTTEKELDTVEVLKAIQKAKEVKSKLSNPEKKGGEDSRLSAAPCIRPSSSPPTVAPASASLPQPILSNQGIMFVQEEALASSLSSTDSLTPEHQPIAQGCSDSLESIPAGQAASDDLRDVPGAVGGASPEHAEPEVQVVPGSGQIIFLPFTCIGYTATNQDFIQRLSTLIRQAIERQLPAWIEAANQREEGQGEQGEEEDEEEEEEEDVAENRYFEMGPPDVEEEEGGGQGEEEEEEEEDEEAEEERLALEWALGADEDFLLEHIRILKVLWCFLIHVQGSIRQFAACLVLTDFGIAVFEIPHQESRGSSQHILSSLRFVFCFPHGDLTEFGFLMPELCLVLKVRHSENTLFIISDAANLHEFHADLRSCFAPQHMAMLCSPILYGSHTSLQEFLRQLLTFYKVAGGCQERSQGCFPVYLVYSDKRMVQTAAGDYSGNIEWASCTLCSAVRRSCCAPSEAVKSAAIPYWLLLTPQHLNVIKADFNPMPNRGTHNCRNRNSFKLSRVPLSTVLLDPTRSCTQPRGAFADGHVLELLVGYRFVTAIFVLPHEKFHFLRVYNQLRASLQDLKTVVIAKTPGTGGSPQGSFADGQPAERRASNDQRPQEVPAEALAPAPVEVPAPAPAAASASGPAKTPAPAEASTSALVPEETPVEAPAPPPAEAPAQYPSEHLIQATSEENQIPSHLPACPSLRHVASLRGSAIIELFHSSIAEVENEELRHLMWSSVVFYQTPGLEVTACVLLSTKAVYFVLHDGLRRYFSEPLQDFWHQKNTDYNNSPFHISQCFVLKLSDLQSVNVGLFDQHFRLTGSTPMQVVTCLTRDSYLTHCFLQHLMVVLSSLERTPSPEPVDKDFYSEFGNKTTGKMENYELIHSSRVKFTYPSEEEIGDLTFTVAQKMAEPEKAPALSILLYVQAFQVGMPPPGCCRGPLRPKTLLLTSSEIFLLDEDCVHYPLPEFAKEPPQRDRYRLDDGRRVRDLDRVLMGYQTYPQALTLVFDDVQGHDLMGSVTLDHFGEVPGGPARASQGREVQWQVFVPSAESREKLISLLARQWEALCGRELPVELTG

SEQ ID NO: 823276 - protein, 1234 aa, Homo sapiens
ELAQNHSRPAPASAPGGGGGGDPNMATARTFGPEREAEPAKEARVVGSELVDTYTVYIIQVTDGSHEWTVKHRYSDFHDLHEKLVAERKIDKNLLPPKKIIGKNSRSLVEKREKDLEVYLQKLLAAFPGVTPRVLAHFLHFHFYEINGITAALAEELFEKGEQLLGAGEVFAIGPLQLYAVTEQLQQGKPTCASGDAKTDLGHILDFTCRLKYLKVSGTEGPFGTSNIQEQLLPFDLSIFKSLHQVEISHCDAKHIRGLVASKPTLATLSVRFSATSMKEVLVPEASEFDEWEPEGTTLEGPVTAVIPTWQALTTLDLSHNSISEIDESVKLIPKIEFLDLSHNGLLVVDNLQHLYNLVHLDLSYNKLSSLEGLHTKLGNIKTLNLAGNLLESLSGLHKLYSLVNLDLRDNRIEQMEEVRSIGSLPCLEHVSLLNNPLSIIPDYRTKVLAQFGERASEVCLDDTVTTEKELDTVEVLKAIQKAKEVKSKLSNPEKKGGEDSRLSAAPCIRPSSSPPTVAPASASLPQPILSNQGIMFVQEEALASSLSSTDSLTPEHQPIAQGCSDSLESIPAGQAASDDLRDVPGAVGGASPEHAEPEVQVVPGSGQIIFLPFTCIGYTATNQDFIQRLSTLIRQAIERQLPAWIEAANQREEGQGEQGEEEDEEEEEEEDVAENRYFEMGPPDVEEEEGGGQGEEEEEEEEDEEAEEERLALEWALGADEDFLLEHIRILKVLWCFLIHVQGSIRQFAACLVLTDFGIAVFEIPHQESRGSSQHILSSLRFVFCFPHGDLTEFGFLMPELCLVLKVRHSENTLFIISDAANLHEFHADLRSCFAPQHMAMLCSPILYGSHTSLQEFLRQLLTFYKVAGGCQERSQGCFPVYLVYSDKRMVQTAAGDYSGNIEWASCTLCSAVRRSCCAPSEAVKSAAIPYWLLLTPQHLNVIKADFNPMPNRGTHNCRNRNSFKLSRVPLSTVLLDPTRSCTQPRGAFADGHVLELLVGYRFVTAIFVLPHEKFHFLRVYNQLRASLQDLKTVVIAKTPGTGGSPQGSFADGQPAERRASNDQRPQEVPAEALAPAPVEVPAPAPAAASASGPAKTPAPAEASTSALVPEETPVEAPAPPPAEAPAQYPSEHLIQATSEENQIPSHLPACPSLRHVASLRGSAIIELFHSSIAEVENEELRHLMWSSVVFYQTPGLEVTACVLLSTKAVYFVLHDGLRRYFSEPLQVLRAKA

SEQ ID NO: 823277 - protein, 993 aa, Homo sapiens; identical to SEQ ID NO: 823267

SEQ ID NO: 823278 - protein, 993 aa, Homo sapiens; identical to SEQ ID NO: 823267

SEQ ID NO: 823279 - protein, 1001 aa, Homo sapiens
MTLNAAMVHINRALKLIIRLFLVEDLVDSLKLAVFIGIDKHRCLSMPPAASDDLRDVPGAVGGASPEHAEPEVQVVPGSGQIIFLPFTCIGYTATNQDFIQRLSTLIRQAIERQLPAWIEAANQREEGQGEQGEEEDEEEEEEEDVAENRYFEMGPPDVEEEEGGGQGEEEEEEEEDEEAEEERLALEWALGADEDFLLEHIRILKVLWCFLIHVQGSIRQFAACLVLTDFGIAVFEIPHQESRGSSQHILSSLRFVFCFPHGDLTEFGFLMPELCLVLKVRHSENTLFIISDAANLHEFHADLRSCFAPQHMAMLCSPILYGSHTSLQEFLRQLLTFYKVAGGCQERSQGCFPVYLVYSDKRMVQTAAGDYSGNIEWASCTLCSAVRRSCCAPSEAVKSAAIPYWLLLTPQHLNVIKADFNPMPNRGTHNCRNRNSFKLSRVPLSTVLLDPTRSCTQPRGAFADGHVLELLVGYRFVTAIFVLPHEKFHFLRVYNQLRASLQDLKTVVIAKTPGTGGSPQGSFADGQPAERRASNDQRPQEVPAEALAPAPVEVPAPAPAAASASGPAKTPAPAEASTSALVPEETPVEAPAPPPAEAPAQYPSEHLIQATSEENQIPSHLPACPSLRHVASLRGSAIIELFHSSIAEVENEELRHLMWSSVVFYQTPGLEVTACVLLSTKAVYFVLHDGLRRYFSEPLQDFWHQKNTDYNNSPFHISQCFVLKLSDLQSVNVGLFDQHFRLTGSTPMQVVTCLTRDSYLTHCFLQHLMVVLSSLERTPSPEPVDKDFYSEFGNKTTGKMENYELIHSSRVKFTYPSEEEIGDLTFTVAQKMAEPEKAPALSILLYVQAFQVGMPPPGCCRGPLRPKTLLLTSSEIFLLDEDCVHYPLPEFAKEPPQRDRYRLDDGRRVRDLDRVLMGYQTYPQALTLVFDDVQGHDLMGSVTLDHFGEVPGGPARASQGREVQWQVFVPSAESREKLISLLARQWEALCGRELPVELTG

SEQ ID NO: 823280 - protein, 993 aa, Homo sapiens; identical to SEQ ID NO: 823267

SEQ ID NO: 823281 - protein, 697 aa, Homo sapiens
RPLQHRMAMCWGAKHELQVRVELLQEFLRQLLTFYKVAGGCQERSQGCFPVYLVYSDKRMVQTAAGDYSGNIEWASCTLCSAVRRSCCAPSEAVKSAAIPYWLLLTPQHLNVIKADFNPMPNRGTHNCRNRNSFKLSRVPLSTVLLDPTRSCTQPRGAFADGHVLELLVGYRFVTAIFVLPHEKFHFLRVYNQLRASLQDLKTVVIAKTPGTGGSPQGSFADGQPAERRASNDQRPQEVPAEALAPAPVEVPAPAPAAASASGPAKTPAPAEASTSALVPEETPVEAPAPPPAEAPAQYPSEHLIQATSEENQIPSHLPACPSLRHVASLRGSAIIELFHSSIAEVENEELRHLMWSSVVFYQTPGLEVTACVLLSTKAVYFVLHDGLRRYFSEPLQDFWHQKNTDYNNSPFHISQCFVLKLSDLQSVNVGLFDQHFRLTGSTPMQVVTCLTRDSYLTHCFLQHLMVVLSSLERTPSPEPVDKDFYSEFGNKTTGKMENYELIHSSRVKFTYPSEEEIGDLTFTVAQKMAEPEKAPALSILLYVQAFQVGMPPPGCCRGPLRPKTLLLTSSEIFLLDEDCVHYPLPEFAKEPPQRDRYRLDDGRRVRDLDRVLMGYQTYPQALTLVFDDVQGHDLMGSVTLDHFGEVPGGPARASQGREVQWQVFVPSAESREKLISLLARQWEALCGRELPVELTG

SEQ ID NO: 823282 - protein, 1528 aa, Homo sapiens; identical to SEQ ID NO: 823266

SEQ ID NO: 823283 - protein, 343 aa, Homo sapiens [sequence omitted]

SEQ ID NO: 823284 - protein, 326 aa, Homo sapiens
TVRRPGALAVYWVLHEAPPGFSEPLQDFWHQKNTDYNNSPFHISQCFVLKLSDLQSVNVGLFDQHFRLTGSTPMQVVTCLTRDSYLTHCFLQHLMVVLSSLERTPSPEPVDKDFYSEFGNKTTGKMENYELIHSSRVKFTYPSEEEIGDLTFTVAQKMAEPEKAPALSILLYVQAFQVGMPPPGCCRGPLRPKTLLLTSSEIFLLDEDCVHYPLPEFAKEPPQRDRYRLDDGRRVRDLDRVLMGYQTYPQALTLVFDDVQGHDLMGSVTLDHFGEVPGGPARASQGREVQWQVFVPSAESREKLISLLARQWEALCGRELPVELTG

SEQ ID NO: 823285 - protein, 253 aa, Homo sapiens [sequence omitted]

SEQ ID NO: 823286 - protein, 81 aa, Homo sapiens
QLELVTPNCFFDDVQGHDLMGSVTLDHFGEVPGGPARASQGREVQWQVFVPSAESREKLISLLARQWEALCGRELPVELTG

SEQ ID NO: 823287 - protein, 83 aa, Homo sapiens
LDYVSELGRPAANTKIGPRLSSTQSVCGECNKKYRALTPTGAGQQAFVFSKNVLSSLWYLNLTVLAENVNMCVCCVNSFSCWE

SEQ ID NO: 823288 - protein, 1208 aa, Homo sapiens
ELAQNHSRPAPASAPGGGGGGDPNMATARTFGPEREAEPAKEARVVGSELVDTYTVYIIQVTDGSHEWTVKHRYSDFHDLHEKLVAERKIDKNLLPPKKIIGKNSRSLVEKREKDLEVYLQKLLAAFPGVTPRVLAHFLHFHFYEINGITAALAEELFEKGEQLLGAGEVFAIGPLQLYAVTEQLQQGKPTCASGDAKTDLGHILDFTCRLKYLKVSGTEGPFGTSNIQEQLLPFDLSIFKSLHQVEISHCDAKHIRGLVASKPTLATLSVRFSATSMKEVLVPEASEFDEWEPEGTTLEGPVTAVIPTWQALTTLDLSHNSISEIDESVKLIPKIEFLDLSHNGLLVVDNLQHLYNLVHLDLSYNKLSSLEGLHTKLGNIKTLNLAGNLLESLSGLHKLYSLVNLDLRDNRIEQMEEVRSIGSLPCLEHVSLLNNPLSIIPDYRTKVLAQFGERASEVCLDDTVTTEKELDTVEVLKAIQKAKEVKSKLSNPEKKGGEDSRLSAAPCIRPSSSPPTVAPASASLPQPILSNQGIMFVQEEALASSLSSTDSLTPEHQPIAQGCSDSLESIPAGQAASDDLRDVPGAVGGASPEHAEPEVQVVPGSGQIIFLPFTCIGYTATNQDFIQRLSTLIRQAIERQLPAWIEAANQREEGQGEQGEEEDEEEEEEEDVAENRYFEMGPPDVEEEEGGGQGEEEEEEEEDEEAEEERLALEWALGADEDFLLEHIRILKVLWCFLIHVQGSIRQFAACLVLTDFGIAVFEIPHQESRGSSQHILSSLRFVFCFPHGDLTEFGFLMPELCLVLKVRHSENTLFIISDAANLHEFHADLRSCFAPQHMAMLCSPILYGSHTSLQEFLRQLLTFYKVAGGCQERSQGCFPVYLVYSDKRMVQTAAGDYSGNIEWASCTLCSAVRRSCCAPSEAVKSAAIPYWLLLTPQHLNVIKADFNPMPNRGTHNCRNRNSFKLSRVPLSTVLLDPTRSCTQPRGAFADGHVLELLVGYRFVTAIFVLPHEKFHFLRVYNQLRASLQDLKTVVIAKTPGTGGSPQGSFADGQPAERRASNDQRPQEVPAEALAPAPVEVPAPAPAAASASGPAKTPAPAEASTSALVPEETPVEAPAPPPAEAPAQYPSEHLIQATSEENQIPSHLPACPSLRHVASLRGSAIIELFHSSIAEVAARVWVPAMARPVLRARPSLASGQPQVPGLP

SEQ ID NO: 823289 - protein, 515 aa, Homo sapiens
MATARTFGPEREAEPAKEARVVGSELVDTYTVYIIQVTDGSHEWTVKHRYSDFHDLHEKLVAERKIDKNLLPPKKIIGKNSRSLVEKREKDLEVYLQKLLAAFPGVTPRVLAHFLHFHFYEINGITAALAEELFEKGEQLLGAGEVFAIGPLQLYAVTEQLQQGKPTCASGDAKTDLGHILDFTCRLKYLKVSGTEGPFGTSNIQEQLLPFDLSIFKSLHQVEISHCDAKHIRGLVASKPTLATLSVRFSATSMKEVLVPEASEFDEWEPEGTTLEGPVTAVIPTWQALTTLDLSHNSISEIDESVKLIPKIEFLDLSHNGLLVVDNLQHLYNLVHLDLSYNKLSSLEGLHTKLGNIKTLNLAGNLLESLSGLHKLYSLVNLDLRDNRIEQMEEVRSIGSLPCLEHVSLLNNPLSIIPDYRTKVLAQFGERASEVCLDDTVTTEKELDTVEVLKAIQKAKEVKSKLSNPEKKGGEDSRLSAAPCIRPSSSPPTVAPASASLPQPILSNQGILGDE

SEQ ID NO: 823290 - protein, 515 aa, Homo sapiens; identical to SEQ ID NO: 823289

SEQ ID NO: 823291 - protein, 206 aa, Homo sapiens
NLRLGTRPGCDGLLVVDNLQHLYNLVHLDLSYNKLSSLEGLHTKLGNIKTLNLAGNLLESLSGLHKLYSLVNLDLRDNRIEQMEEVRSIGSLPCLEHVSLLNNPLSIIPDYRTKVLAQFGERASEVCLDDTVTTEKELDTVEVLKAIQKAKEVKSKLSNPEKKGGEDSRLSAAPCIRPSSSPPTVAPASASLPQPILSNQGILGDE

SEQ ID NO: 823292 - protein, 606 aa, Homo sapiens
ELAQNHSRPAPASAPGGGGGGDPNMATARTFGPEREAEPAKEARVVGSELVDTYTVYIIQVTDGSHEWTVKHRYSDFHDLHEKLVAERKIDKNLLPPKKIIGKNSRSLVEKREKDLEVYLQKLLAAFPGVTPRVLAHFLHFHFYEINGITAALAEELFEKGEQLLGAGEVFAIGPLQLYAVTEQLQQGKPTCASGDAKTDLGHILDFTCRLKYLKVSGTEGPFGTSNIQEQLLPFDLSIFKSLHQVEISHCDAKHIRGLVASKPTLATLSVRFSATSMKEVLVPEASEFDEWEPEGTTLEGPVTAVIPTWQALTTLDLSHNSISEIDESVKLIPKIEFLDLSHNGLLVVDNLQHLYNLVHLDLSYNKLSSLEGLHTKLGNIKTLNLAGNLLESLSGLHKLYSLVNLDLRDNRIEQMEEVRSIGSLPCLEHVSLLNNPLSIIPDYRTKVLAQFGERASEVCLDDTVTTEKELDTVEVLKAIQKAKEVKSKLSNPEKKGGEDSRLSAAPCIRPSSSPPTVAPASASLPQPILSNQGNRVCILLLVEPHSPAWAPWLGWGWGRGASTCFQQGQTQGGQCLLQAGPRGGTHGRGAWPDASCCLLGEDSQL

SEQ ID NO: 823293 - protein, 327 aa, Homo sapiens [sequence omitted]

SEQ ID NO: 823294 - protein, 263 aa, Homo sapiens
MSLVAEAFVSQIAAAEPWPENATLYQQLKGEQILLSDNAASLAVQAFLQMCNLPIKVVCRANAEYMSPSGKVPFIHVGNQVVSELGPIVQFVKAKGHSLSDGLEEVQKAEMKAYMELVNNMLLTAELYLQWCDEATVGEITHARYGSPYPWPLNHILAYQKQWEVKRKMKAIGWGKKTLDQVLEDVDQCCQALSQRLGTQPYFFNKQPTELDALVFGHLYTILTTQLTNDELSEKVKNYSNLLAFCRRIEQHYFEDRGKGRLS

SEQ ID NO: 823295 - protein, 263 aa, Homo sapiens; identical to SEQ ID NO: 823294

SEQ ID NO: 823296 - protein, 263 aa, Homo sapiens; identical to SEQ ID NO: 823294

SEQ ID NO: 823297 - protein, 253 aa, Homo sapiens
MYIAAEPWPENATLYQQLKGEQILLSDNAASLAVQAFLQMCNLPIKVVCRANAEYMSPSGKVPFIHVGNQVVSELGPIVQFVKAKGHSLSDGLEEVQKAEMKAYMELVNNMLLTAELYLQWCDEATVGEITHARYGSPYPWPLNHILAYQKQWEVKRKMKAIGWGKKTLDQVLEDVDQCCQALSQRLGTQPYFFNKQPTELDALVFGHLYTILTTQLTNDELSEKVKNYSNLLAFCRRIEQHYFEDRGKGRLS

SEQ ID NO: 823298 - protein, 214 aa, Homo sapiens
MCNLPIKVVCRANAEYMSPSGKVPFIHVGNQVVSELGPIVQFVKAKGHSLSDGLEEVQKAEMKAYMELVNNMLLTAELYLQWCDEATVGEITHARYGSPYPWPLNHILAYQKQWEVKRKMKAIGWGKKTLDQVLEDVDQCCQALSQRLGTQPYFFNKQPTELDALVFGHLYTILTTQLTNDELSEKVKNYSNLLAFCRRIEQHYFEDRGKGRLS

SEQ ID NO: 823299 - protein, 253 aa, Homo sapiens
MSLVAEAFVSQIAAAEPWPENATLYQQLKGEQILLSDNAASLAVQAFLQMCNLPIKVVCRANAEYMSPSGKVPFIHVGNQVVSELGPIVQFVKAKGHSLSDGLEEVQKAEMKAYMELVNNMLLTAELYLQWCDEATVGEITHARYGSPYPWPLNHILAYQKQWEVKRKMKAIGWGKKTLDQVLEDVDQCCQALSQRLGTQPYFFNKQPTELDALVFGHLYTILTTQLTNDELSEKVKNYSNIVVKAGCHRVMC

SEQ ID NO: 823300 - protein, 153 aa, Homo sapiens
MKAYMELVNNMLLTAELYLQWCDEATVGEITHARYGSPYPWPLNHILAYQKQWEVKRKMKAIGWGKKTLDQVLEDVDQCCQALSQRLGTQPYFFNKQPTELDALVFGHLYTILTTQLTNDELSEKVKNYSNLLAFCRRIEQHYFEDRGKGRLS

SEQ ID NO: 823301 - protein, 148 aa, Homo sapiens
GGAGGSVECRCRLRRKSLARPGGNLGGLTAAAAAVGVGFASLNVGGARLVNCREPPGLRWRTLRPVGGRHPGAGPPSRHVSSGGSLRLPDCRLECSGTTWAHCNLRFPGSSDSPALASRVVGITGARHHARADSWKIFKSACTLKKYF

SEQ ID NO: 823302 - protein, 287 aa, Homo sapiens
MHRPPGAGEARPRVGDGNAWVPGTWGAGSGARGHGRSGKPARQRSLSGMDAAPHADLPPRLHPALLPVTHMTRTSGTGLLPRKGLPKSFRRLQCPTGGRASPATTPARAAAEAGKGPLARARHHPARAPGDTTLGGPSKGRRWCRPRPPIGRGGGGVASGAWFRAPERASRIASRTRELAPWGGVVAGRGRRDGGGFGLRSGRRQGLGLGLGLRLRLRLPWERVPADAEVALTLAPRLPFQVLLHVLFEHAVGYALLALKEVEEISLLQPQRWVRSVGSFGGPADPH

SEQ ID NO: 823303 - protein, 312 aa, Homo sapiens
RSGTGLGGAAAGAMVLLHVLFEHAVGYALLALKEVEEISLLQPQVEESVLNLGKFHSIVRLVAFCPFASSQVALENANAVSEGVVHEDLRLLLETHLPSKKKKVLLGVGDPKIGAAIQEELGYNCQTGGVIAEILRGVRLHFHNLVKGLTDLSACKAQLGLGHSYSRAKVKFNVNRVDNMIIQSISLLDQLDKDINTFSMRVREWYGYHFPELVKIINDNATYCRLAQFIGNRRELNEDKLEKLEELTMDGAKAKAILDASRSSMAWTYLALTVNIESFPTVGPNGTPTSSYWRQITIADVLWERRDQTRAQ

SEQ ID NO: 823304 - protein, 607 aa, Homo sapiens
GSGNEGTMAGRGAMVLLHVLFEHAVGYALLALKEVEEISLLQPQVEESVLNLGKFHSIVRLVAFCPFASSQVALENANAVSEGVVHEDLRLLLETHLPSKKKKVLLGVGDPKIGAAIQEELGYNCQTGGVIAEILRGVRLHFHNLVKGLTDLSACKAQLGLGHSYSRAKVKFNVNRVDNMIIQSISLLDQLDKDINTFSMRVREWYGYHFPELVKIINDNATYCRLAQFIGNRRELNEDKLEKLEELTMDGAKAKAILDASRSSMGMDISAIDLINIESFSSRVVSLSEYRQSLHTYLRSKMSQVAPSLSALIGEAVGARLIAHAGSLTNLAKYPASTVQILGAEKALFRALKTRGNTPKYGLIFHSTFIGRAAAKNKGRISRYLANKCSIASRIDCFSEVPTSVFGEKLREQVEERLSFYETGEIPRKNLDVMKEAMVQAEEAAAEITRKLEKQEKKRLKKEKKRLAALALASSENSSSTPEECEEMSEKPKKKKKQKPQEVPQENGMEDPSISFSKPKKKKSFSKEELMSSDLEETAGSTSIPKRKKSTPKEETVNDPEEAGHRSGSKKKRKFSKEEPVSSGPEEAVGKSSSKKKKKFHKASQED

SEQ ID NO: 823305 - protein, 351 aa, Homo sapiens
AGRESDEAGAGAMVLLHVLFEHAVGYALLALKEVEEISLLQPQVEESVLNLGKFHSIVRLVAFCPFASSQVALENANAVSEGVVHEDLRLLLETHLPSKKKKVLLGVGDPKIGAAIQEELGYNCQTGGVIAEILRGVRLHFHNLVKGLTDLSACKAQLGLGHSYSRAKVKFNVNRVDNMIIQSISLLDQLDKDINTFSMRVREWYGYHFPELVKIINDNATYCRLAQFIGNRRELNEDKLEKLEELTMDGAKAKAILDASRSSMGMDISAIDLINIESFSSRVVSLSEYRQSLHTYLRSKMSQVAPSLSALIGEAVGARLIAHAGSLTNLAKYPASTVQILGAEKALFRYQ

SEQ ID NO: 823306 - protein, 606 aa, Homo sapiens
AGRESDEAGAGAMVLLHVLFEHAVGYALLALKEVEEISLLQPQVEESVLNLGKFHSIVRLVAFCPFASSQVALENANAVSEGVVHEDLRLLLETHLPSKKKKVLLGVGDPKIGAAIQEELGYNCQTGGVIAEILRGVRLHFHNLVKGLTDLSACKAQLGLGHSYSRAKVKFNVNRVDNMIIQSISLLDQLDKDINTFSMRVREWYGYHFPELVKIINDNATYCRLAQFIGNRRELNEDKLEKLEELTMDGAKAKAILDASRSSMGMDISAIDLINIESFSSRVVSLSEYRQSLHTYLRSKMSQVAPSLSALIGEAVGARLIAHAGSLTNLAKYPASTVQILGAEKALFRALKTRGNTPKYGLIFHSTFIGRAAAKNKGRISRYLANKCSIASRIDCFSEVPTSVFGEKLREQVEERLSFYETGEIPRKNLDVMKEAMVQAEEAAAEITRKLEKQEKKRLKKEKKRLAALALASSENSSSTPEECEEMSEKPKKKKKQKPQEVPQENGMEDPSISFSKPKKKKSFSKEELMSSDLEETAGSTSIPKRKKSTPKEETVNDPEEAGHRSGSKKKRKFSKEEPVSSGPEEAVGKSSSKKKKKFHKASQED

SEQ ID NO: 823307 - protein, 352 aa, Homo sapiens
MYEAGFKFGRGWAMVLLHVLFEHAVGYALLALKEVEEISLLQPQVEESVLNLGKFHSIVRLVAFCPFASSQVALENANAVSEGVVHEDLRLLLETHLPSKKKKVLLGVGDPKIGAAIQEELGYNCQTGGVIAEILRGVRLHFHNLVKGLTDLSACKAQLGLGHSYSRAKVKFNVNRVDNMIIQSISLLDQLDKDINTFSMRVREWYGYHFPELVKIINDNATYCRLAQFIGNRRELNEDKLEKLEELTMDGAKAKAILDASRSSMGMDISAIDLINIESFSSRVVSLSEYRQSLHTYLRSKMSQVAPSLSALIGEAVGARLIAHAGSLTNLAKYPASTVQILGAEKALFRYQ

SEQ ID NO: 823308 - protein, 728 aa, Homo sapiens
AGRESDEAGAGAMVLLHVLFEHAVGYALLALKEVEEISLLQPQVEESVLNLGKFHSIVRLVAFCPFASSQVALENANAVSEGVVHEDLRLLLETHLPSKKKKVLLGVGDPKIGAAIQEELGYNCQTGGVIAEILRGVRLHFHNLVKGLTDLSACKAQLGLGHSYSRAKVKFNVNRVDNMIIQSISLLDQLDKDINTFSMRVREWYGYHFPELVKIINDNATYCRLAQFIGNRRELNEDKLEKLEELTMDGAKAKAILDASRSSMGMDISAIDLINIESFSSRVVSLSEYRQSLHTYLRSKMSQVAPSLSALIGEAVGARLIAHAGSLTNLAKYPASTVQILGAEKALFRYQLRAPAHNQVPLLVPTACWGITVMADQGSLTYTGLCYGGDGQSWCLSDSQGPAKGPSFQVSDIGCLPSASGSYGLACIGVEIQSGLRLTQDFGVRGGEELSCLANGVEISDLKLSTEYSLRALKTRGNTPKYGLIFHSTFIGRAAAKNKGRISRYLANKCSIASRIDCFSEVPTSVFGEKLREQVEERLSFYETGEIPRKNLDVMKEAMVQAEEAAAEITRKLEKQEKKRLKKEKKRLAALALASSENSSSTPEECEEMSEKPKKKKKQKPQEVPQENGMEDPSISFSKPKKKKSFSKEELMSSDLEETAGSTSIPKRKKSTPKEETVNDPEEAGHRSGSKKKRKFSKEEPVSSGPEEAVGKSSSKKKKKFHKASQED

SEQ ID NO: 823309 - protein, 498 aa, Homo sapiens
AGRESDEAGAGAMVLLHVLFEHAVGYALLALKEVEEISLLQPQVEESVLNLGKFHSIVRLVAFCPFASSQVALENANAVSEGVVHEDLRLLLETHLPSKKKKVLLGVGDPKIGAAIQEELGYNCQTGGVIAEILRGVRLHFHNLVKGLTDLSACKAQLGLGHSYSRAKVKFNVNRVDNMIIQSISLLDQLDKDINTFSMRVREWYGYHFPELVKIINDNATYCRLAQFIGNRRELNEDKLEKLEELTMDGAKAKAILDASRSSMGMDISAIDLINIESFSSRVVSLSEYRQSLHTYLRSKMSQVAPSLSALIGEAVGARLIAHAGSLTNLAKYPASTVQILGAEKALFRALKTRGNTPKYGLIFHSTFIGRAAAKNKGRISRYLANKCSIASRIDCFSEVPTSVFGEKLREQVEERLSFYETGEIPRKNLDVMKEAMVQAEEAAAEITRKLEKQEKKRLKKEKKRLAALALASSENSSSTPEECEVSRQHGPGRDPRL

SEQ ID NO: 823310 - protein, 490 aa, Homo sapiens
AGRESDEAGAGAMVLLHVLFEHAVGYALLALKEVEEISLLQPQVEESVLNLGKFHSIVRLVAFCPFASSQVALENANAVSEGVVHEDLRLLLETHLPSKKKKVLLGVGDPKIGAAIQEELGYNCQTGGVIAEILRGVRLHFHNLVKGLTDLSACKAQLGLGHSYSRAKVKFNVNRVDNMIIQSISLLDQLDKDINTFSMRVREWYGYHFPELVKIINDNATYCRLAQFIGNRRELNEDKLEKLEELTMDGAKAKAILDASRSSMGMDISAIDLINIESFSSRVVSLSEYRQSLHTYLRSKMSQVAPSLSALIGEAVGARLIAHAGSLTNLAKYPASTVQILGAEKALFRALKTRGNTPKYGLIFHSTFIGRAAAKNKGRISRYLANKCSIASRIDCFSEVPTSVFGEKLREQVEERLSFYETGEIPRKNLDVMKEAMVQAEEAAAEITRKLEKQEKKRLKKEKKRLAALALASSENSSSTPEECEEGDRC

SEQ ID NO: 823311 - protein, 668 aa, Homo sapiens
AGRESDEAGAGAMVLLHVLFEHAVGYALLALKEVEEISLLQPQVEESVLNLGKFHSIVRLVAFCPFASSQVALENANAVSEGVVHEDLRLLLETHLPSKKKKVLLGVGDPKIGAAIQEELGYNCQTGGVIAEILRGVRLHFHNLVKGLTDLSACKAQLGLGHSYSRAKVKFNVNRVDNMIIQSISLLDQLDKDINTFSMRVREWYGYHFPELVKIINDNATYCRLAQFIGNRRELNEDKLEKLEELTMDGAKAKAILDASRSSMGMDISAIDLINIESFSSRVVSLSEYRQSLHTYLRSKMSQVAPSLSALIGEAVGARLIAHAGSLTNLAKYPASTVQILGAEKALFRALKTRGNTPKYGLIFHSTFIGRAAAKNKGRISRYLANKCSIASRIDCFSEVPTSVFGEKLREQVEERLSFYETGEIPRKNLDVMKEAMVQVSWALLGVEWHELAVGGDELSEPDLVEWRQKNWFNEPDPIKPERSPQSTRSLQALLALFFDQAEEAAAEITRKLEKQEKKRLKKEKKRLAALALASSENSSSTPEECEEMSEKPKKKKKQKPQEVPQENGMEDPSISFSKPKKKKSFSKEELMSSDLEETAGSTSIPKRKKSTPKEETVNDPEEAGHRSGSKKKRKFSKEEPVSSGPEEAVGKSSSKKKKKFHKASQED

SEQ ID NO: 823312 - protein, 451 aa, Homo sapiens
AGRESDEAGAGAMVLLHVLFEHAVGYALLALKEVEEISLLQPQVEESVLNLGKFHSIVRLVAFCPFASSQVALENANAVSEGVVHEDLRLLLETHLPSKKKKVLLGVGDPKIGAAIQEELGYNCQTGGVIAEILRGVRLHFHNLVKGLTDLSACKAQLGLGHSYSRAKVKFNVNRVDNMIIQSISLLDQLDKDINTFSMRVREWYGYHFPELVKIINDNATYCRLAQFIGNRRELNEDKLEKLEELTMDGAKAKAILDASRSSMGMDISAIDLINIESFSSRVVSLSEYRQSLHTYLRSKMSQVAPSLSALIGEAVGARLIAHAGSLTNLAKYPASTVQILGAEKALFRALKTRGNTPKYGLIFHSTFIGRAAAKNKGRISRYLANKCSIASRIDCFSEVPTSVFGEKLREQVEERLSFYETGEIPRKNLDVMKEAMVQVSWALLGVEWHS

SEQ ID NO: 823313 - protein, 606 aa, Homo sapiens; identical to SEQ ID NO: 823306

SEQ ID NO: 823314 - protein, 568 aa, Homo sapiens
AGRESDEAGAGAMVLLHVLFEHAVGYALLALKEVEEISLLQPQVEESVLNLGKFHSIVRLVAFCPFASSQVALENANAVSEGVVHEDLRLLLETHLPSKKKKVLLGVGDPKIGAAIQEELGYNCQTGGVIAEILRGVRLHFHNLVKGLTDLSACKAQLGLGHSYSRAKVKFNVNRVDNMIIQSISLLDQLDKDINTFSMRVREWYGYHFPELVKIINDNATYCRLAQFIGNRRELNEDKLEKLEELTMDGAKAKAILDASRSSMGMDISAIDLINIESFSSRVVSLSEYRQSLHTYLRSKMSQVAPSLSALIGEAVGARLIAHAGSLTNLAKYPAAKNKGRISRYLANKCSIASRIDCFSEVPTSVFGEKLREQVEERLSFYETGEIPRKNLDVMKEAMVQAEEAAAEITRKLEKQEKKRLKKEKKRLAALALASSENSSSTPEECEEMSEKPKKKKKQKPQEVPQENGMEDPSISFSKPKKKKSFSKEELMSSDLEETAGSTSIPKRKKSTPKEETVNDPEEAGHRSGSKKKRKFSKEEPVSSGPEEAVGKSSSKKKKKFHKASQED

SEQ ID NO: 823315 - protein, 351 aa, Homo sapiens; identical to SEQ ID NO: 823305

SEQ ID NO: 823316 - protein, 618 aa, Homo sapiens
  misc_feature (545)..(545): Xaa can be any naturally occurring amino acid
AGRESDEAGAGAMVLLHVLFEHAVGYALLALKEVEEISLLQPQVEESVLNLGKFHSIVRLVAFCPFASSQVALENANAVSEGVVHEDLRLLLETHLPSKKKKVLLGVGDPKIGAAIQEELGYNCQTGGVIAEILRGVRLHFHNLVKGLTDLSACKAQLGLGHSYSRAKVKFNVNRVDNMIIQSISLLDQLDKDINTFSMRVREWYGYHFPELVKIINDNATYCRLAQFIGNRRELNEDKLEKLEELTMDGAKAKAILDASRSSMGMDISAIDLINIESFSSRVVSLSEYRQSLHTYLRSKMSQVAPSLSALIGEAVGARLIAHAGSLTNLAKYPASTVQILGAEKALFRALKTRGNTPKYGLIFHSTFIGRAAAKNKGRISRYLANKCSIASRIDCFSEVPTSVFGEKLREQVEERLSFYETGEIPRKNLDVMKEAMVQAEEAAAEITRKLEKQEKKRLKKEKKRLAALALASSENSSSTPEECEEMSEKPKKKKKQKPQEVPQENGMEDPSISFSKPKKKKSFSKEELMSSDLEETAGGPFGGXPKGPQTSTSIPKRKKSTPKEETVNDPEEAGHRSGSKKKRKFSKEEPVSSGPEEAVGKSSSKKKKKFHKASQED

SEQ ID NO: 823317 - protein, 490 aa, Homo sapiens; identical to SEQ ID NO: 823310

SEQ ID NO: 823318 - protein, 173 aa, Homo sapiens
MIIQSISLLDQLDKDINTFSMRVREWYGYHFPELVKIINDNATYCRLAQFIGNRRELNEDKLEKLEELTMDGAKAKAILDASRSSMGMDISAIDLINIESFSSRVVSLSEYRQSLHTYLRSKMSQVAPSLSALIGEAVGARLIAHAGSLTNLAKYPASTVQILGAEKALFRYQ

SEQ ID NO: 823319 - protein, 397 aa, Homo sapiens
MYEAGFKFGRGWAMVLLHVLFEHAVGYALLALKEVEEISLLQPQVEESVLNLGKFHSIVRLVAFCPFASSQVALENANAVSEDLNAVVPMAGPGFAVMTCDIKSVNPLSAITDVSMSLSNAMMGRDLGVVHEDLRLLLETHLPSKKKKVLLGVGDPKIGAAIQEELGYNCQTGGVIAEILRGVRLHFHNLVKGLTDLSACKAQLGLGHSYSRAKVKFNVNRVDNMIIQSISLLDQLDKDINTFSMRVREWYGYHFPELVKIINDNATYCRLAQFIGNRRELNEDKLEKLEELTMDGAKAKAILDASRSSMGMDISAIDLINIESFSSRVVSLSEYRQSLHTYLRSKMSQVAPSLSALIGEAVGARLIAHAGSLTNLAKYPASTVQILGAEKALFRYQ

SEQ ID NO: 823320 - protein, 351 aa, Homo sapiens; identical to SEQ ID NO: 823305

SEQ ID NO: 823321 - protein, 306 aa, Homo sapiens
MYEAGFKFGRGWAMVLLHVLFEHAVGYALLALKEVEEISLLQPQLLLETHLPSKKKKVLLGVGDPKIGAAIQEELGYNCQTGGVIAEILRGVRLHFHNLVKGLTDLSACKAQLGLGHSYSRAKVKFNVNRVDNMIIQSISLLDQLDKDINTFSMRVREWYGYHFPELVKIINDNATYCRLAQFIGNRRELNEDKLEKLEELTMDGAKAKAILDASRSSMGMDISAIDLINIESFSSRVVSLSEYRQSLHTYLRSKMSQVAPSLSALIGEAVGARLIAHAGSLTNLAKYPASTVQILGAEKALFRYQ

SEQ ID NO: 823322 - protein, 351 aa, Homo sapiens; identical to SEQ ID NO: 823305

SEQ ID NO: 823323 - protein, 498 aa, Homo sapiens; identical to SEQ ID NO: 823309

SEQ ID NO: 823324 - protein, 498 aa, Homo sapiens; identical to SEQ ID NO: 823309

SEQ ID NO: 823325 - protein, 251 aa, Homo sapiens
MYEAGFKFGRGWPWELCSFPCGVVHEDLRLLLETHLPSKKKKVLLGVGDPKIGAAIQEELGYNCQTGGVIAEILRGVRLHFHNLVKGLTDLSACKAQLGLGHSYSRAKVKFNVNRVDNMIIQSISLLDQLDKDINTFSMRVREWYGYHFPELVKIINDNATYCRLAQFIGNRRELNEDKLEKLEELTMDGAKAKAILDASRSSMGVSAEPGNLHKVGARLIAHAGSLTNLAKYPASTVQILGAEKALFRYQ

SEQ ID NO: 823326 - protein, 351 aa, Homo sapiens; identical to SEQ ID NO: 823305

SEQ ID NO: 823327 - protein, 380 aa, Homo sapiens
AGRESDEAGAGAMVLLHVLFEHAVGYALLALKEVEEISLLQPQVEESVLNLGKFHSIVRLVAFCPFASSQVALENANAVSEGVVHEDLRLLLETHLPSKKKKVLLGVGDPKIGAAIQEELGYNCQTGGVIAEILRGVRLHFHNLVKGLTDLSACKAQLGLGHSYSRAKVKFNVNRVDNMIIQSISLLDQLDKDINTFSMRVREWYGYHFPELVKIINDNATYCRLAQFIGNRRELNEDKLEKLEELTMDGAKAKAILDASRSSMGMDISAIDLINIESFSSRVVSLSEYRQSLHTYLRSKMSQVAPSLSALIGEAVGARLIAHAGSLTNLAKYPASTVQILGAEKALFRAEDRVHSKIGLLFIHFMASVPKQGVPIRESG

SEQ ID NO: 823328 - protein, 333 aa, Homo sapiens
AGRESDEAGAGAMVLLHVLFEHAVGYALLALKEVEEISLLQPQVEESVLNLGKFHSIVRLVAFCPFASSQVALENANAVSEGVVHEDLRLLLETHLPSKKKKVLLGVGDPKIGAAIQEELGYNCQTGGVIAEILRGVRLHFHNLVKGLTDLSACKAQLGLGHSYSRAKVKFNVNRVDNMIIQSISLLDQLDKDINTFSMRVREWYGYHFPELVKIINDNATYCRLAQFIGNRRELNEDKLEKLEELTMDGAKAKAILDASRSSMVEFCLVGNSELSAGGYRNRNYDYAPERQEPTRHGEGAVIDGRTRQYTQVGELRKEHMTPARDTSMRRHY

SEQ ID NO: 823329 - protein, 273 aa, Homo sapiens
AGRESDEAGAGAMVLLHVLFEHAVGYALLALKEVEEISLLQPQVEESVLNLGKFHSIVRLVAFCPFASSQVALENANAVSEGVVHEDLRLLLETHLPSKKKKVLLGVGDPKIGAAIQEELGYNCQTGGVIAEILRGVRLHFHNLVKGLTDLSACKAQLGLGHSYSRAKVKFNVNRVDNMIIQSISLLDQLDKDINTFSMRVREWYGYHFPELVKIINDNATYCRLAQFIGNRRELNEDKLEKLEELTMDGAKAKAILDASRSSMAWTYLALTG

SEQ ID NO: 823330 - protein, 335 aa, Homo sapiens
AGRESDEAGAGAMVLLHVLFEHAVGYALLALKEVEEISLLQPQVEESVLNLGKFHSIVRLVAFCPFASSQVALENANAVSEGVVHEDLRLLLETHLPSKKKKVLLGVGDPKIGAAIQEELGYNCQTGGVIAEILRGVRLHFHNLVKGLTDLSACKAQLGLGHSYSRAKVKFNVNRVDNMIIQSISLLDQLDKDINTFSMRVREWYGYHFPELVKIINDNATYCRLAQFIGNRRELNEDKLEKLEELTMDGAKAKAILDASRSSMVPSPWAGFLPAVHRSFPRWGYLIRRAHPSGPLYCPLAIGGGALPCAPRFPGSLAAQGQFSLWRTPAFSFAT

SEQ ID NO: 823331 - protein, 75 aa, Homo sapiens
GYHFPELVKIINDNATYCRLAQFIGNRRELNEDKLEKLEELTMDGAKAKAILDASRSSMGVSAEPGNLHKVWGSK

SEQ ID NO: 823332 - protein, 103 aa, Homo sapiens
PKKKKKQKPQEVPQENGMEDPSISFSKPKKKKSFSKEELMSSDLEETAGSTSIPKRKKSTPKEETVNDPEEAGHRSGSKKKRKFSKEEPVSSGPEEAVGKSSS

SEQ ID NO: 823333 - protein, 1018 aa, Homo sapiens
RGREGSSQREPPALPADPRRAHGALRAGTACGPRGQFPAVVRSRARTPAGPRAAGRMTMAGGRRGLVAPQNTFLENIVRRSNDTNFVLGNAQIVDWPIVYSNDGFCKLSGYHRAEVMQKSSTCSFMYGELTDKDTIEKVRQTFENYEMNSFEILMYKKNRTPVWFFVKIAPIRNEQDKVVLFLCTFSDITAFKQPIEDDSCKGWGKFARLTRALTSSRGVLQQLAPSVQKGENVHKHSRLAEVLQLGSDILPQYKQEAPKTPPHIILHYCVFKTTWDWIILILTFYTAILVPYNVSFKTRQNNVAWLVVDSIVDVIFLVDIVLNFHTTFVGPAGEVISDPKLIRMNYLKTWFVIDLLSCLPYDVINAFENVDEGISSLFSSLKVVRLLRLGRVARKLDHYIEYGAAVLVLLVCVFGLAAHWMACIWYSIGDYEIFDEDTKTIRNNSWLYQLAMDIGTPYQFNGSGSGKWEGGPSKNSVYISSLYFTMTSLTSVGFGNIAPSTDIEKIFAVAIMMIGSLLYATIFGNVTTIFQQMYANTNRYHEMLNSVRDFLKLYQVPKGLSERVMDYIVSTWSMSRGIDTEKVLQICPKDMRADICVHLNRKVFKEHPAFRLASDGCLRALAMEFQTVHCAPGDLIYHAGESVDSLCFVVSGSLEVIQDDEVVAILGKGDVFGDVFWKEATLAQSCANVRALTYCDLHVIKRDALQKVLEFYTAFSHSFSRNLILTYNLRKRIVFRKISDVKREEEERMKRKNEAPLILPPDHPVRRLFQRFRQQKEARLAAERGGRDLDDLDVEKGNVLTEHASANHSLVKASVVTVRESPATPVSFQAASTSGVPDHAKLQAPGSECLGPKGGGGDCAKRKSWARFKDACGKSEDWNKVSKAESMETLPERTKASGEATLKKTDSCDSGITKSDLRLDNVGEARSPQDRSPILAEVKHSFYPIPEQTLQATVLEVRHELKEDIKALNAKMTNIEKQLSEILRILTSRRSSQSPQELFEISRPQSPESERDIFGAS

SEQ ID NO: 823334 - protein, 1045 aa, Homo sapiens
RGREGSSQREPPALPADPRRAHGALRAGTACGPRGQFPAVVRSRARTPAGPRAAGRMTMAGGRRGLVAPQNTFLENIVRRSNDTNFVLGNAQIVDWPIVYSNDGFCKLSGYHRAEVMQKSSTCSFMYGELTDKDTIEKVRQTFENYEMNSFEILMYKKNRTPVWFFVKIAPIRNEQDKVVLFLCTFSDITAFKQPIEDDSCKGWGKFARLTRALTSSRGVLQQLAPSVQKGENVHKHSRLAEVLQLGSDILPQYKQEAPKTPPHIILHYCVFKTTWDWIILILTFYTAILVPYNVSFKTRQNNVAWLVVDSIVDVIFLVDIVLNFHTTFVGPAGEVISDPKLIRMNYLKTWFVIDLLSCLPYDVINAFENVDEVSAFMGDPGKIGFADQIPPPLEGRESQGISSLFSSLKVVRLLRLGRVARKLDHYIEYGAAVLVLLVCVFGLAAHWMACIWYSIGDYEIFDEDTKTIRNNSWLYQLAMDIGTPYQFNGSGSGKWEGGPSKNSVYISSLYFTMTSLTSVGFGNIAPSTDIEKIFAVAIMMIGSLLYATIFGNVTTIFQQMYANTNRYHEMLNSVRDFLKLYQVPKGLSERVMDYIVSTWSMSRGIDTEKVLQICPKDMRADICVHLNRKVFKEHPAFRLASDGCLRALAMEFQTVHCAPGDLIYHAGESVDSLCFVVSGSLEVIQDDEVVAILGKGDVFGDVFWKEATLAQSCANVRALTYCDLHVIKRDALQKVLEFYTAFSHSFSRNLILTYNLRKRIVFRKISDVKREEEERMKRKNEAPLILPPDHPVRRLFQRFRQQKEARLAAERGGRDLDDLDVEKGNVLTEHASANHSLVKASVVTVRESPATPVSFQAASTSGVPDHAKLQAPGSECLGPKGGGGDCAKRKSWARFKDACGKSEDWNKVSKAESMETLPERTKASGEATLKKTDSCDSGITKSDLRLDNVGEARSPQDRSPILAEVKHSFYPIPEQTLQATVLEVRHELKEDIKALNAKMTNIEKQLSEILRILTSRRSSQSPQELFEISRPQSPESERDIFGAS

SEQ ID NO: 823335 - protein, 444 aa, Homo sapiens
VAGSQVPPVRAQRRSKAFRLLAERGAAAAMLWSGCRRFGARLGCLPGGLRVLVQTGHRSLTSCIDPSMGLNEEQKEFQKVAFDFAAREMAPNMAEWDQKELFPVDVMRKAAQLGFGGVYIQTDVGGSGLSRLDTSVIFEALATGCTSTTAYISIHNMCAWMIDSFGNEEQRHKFCPPLCTMEKFASYCLTEPGSGSDAASLLTSAKKQGDHYILNGSKAFISGAGESDIYVVMCRTGGPGPKGISCIVVEKGTPGLSFGKKEKKVGWNSQPTRAVIFEDCAVPVANRIGSEGQGFLIAVRGLNGGRINIASCSLGAAHASVILTRDHLNVRKQFGEPLASNQYLQFTLADMATRLVAARLMVRNAAVALQEERKDAVALCSMAKLFATDECFAICNQALQMHGGYGYLKDYAVQQYVRDSRVHQILEGSNEVMRILISRSLLQE

SEQ ID NO: 823336 - protein, 444 aa, Homo sapiens; identical to SEQ ID NO: 823335

SEQ ID NO: 823337 - protein, 444 aa, Homo sapiens; identical to SEQ ID NO: 823335

SEQ ID NO: 823338 - protein, 278 aa, Homo sapiens
VAGSQVPPVRAQRRSKAFRLLAERGAAAAMLWSGCRRFGARLGCLPGGLRVLVQTGHRSLTSCIDPSMGLNEEQKEFQKVAFDFAAREMAPNMAEWDQKELFPVDVMRKAAQLGFGGVYIQTDVGGSGLSRLDTSVIFEALATGCTSTTAYISIHNMCAWMIDSFGNEEQRHKFCPPLCTMEKFASYCLTEPGSGSDAASLLTSAKKQGDHYILNGSKAFISGAGESDIYVVMCRTGGPGPKGISCIVVEKGTPGLSFGKKEKKLLTLVHFVAPGRDA

SEQ ID NO: 823339 - protein, 463 aa, Homo sapiens
VAGSQVPPVRAQRRSKAFRLLAERGAAAAMLWSGCRRFGARLGCLPGGLRVLVQTGHRSLTSCIDPSMGLNEEQKEFQKVAFDFAAREMAPNMAEWDQKELFPVDVMRKAAQLGFGGVYIQTDVGGSGLSRLDTSVIFEALATGCTSTTAYISIHNMCAWMIDSFGNEEQRHKFCPPLCTMEKFASYCLTEPGSGSDAASLLTSAKKQGDHYILNGSKAFISGAGESDIYVVMCRTGGPGPKGISCIVVEKGTPGLSFGKKEKKVGWNSQPTRAVIFEDCAVPVANRIGSEGQGFLIAVRGLNGGRINIASCSLGAAHASVILTRDHLNVRKQFGEPLASNQYLQFTLADMATRLVAARLMVRNAAVALQEERKDAVALCSMAKLFATDECFAICNQALQMHGGYGYLKDYAVQQYVRDSRVHQILEELFWQGPGVQSRSFVPFGGPQIALLLPFSSGDLREG

SEQ ID NO: 823340 - protein, 288 aa, Homo sapiens [sequence omitted]

SEQ ID NO: 823341 - protein, 317 aa, Homo sapiens
VAGSQVPPVRAQRRSKAFRLLAERGAAAAMLWSGCRRFGARLGCLPGGLRVLVQTGHRSLTSCIDRSGSDAASLLTSAKKQGDHYILNGSKAFISGAGESDIYVVMCRTGGPGPKGISCIVVEKGTPGLSFGKKEKKVGWNSQPTRAVIFEDCAVPVANRIGSEGQGFLIAVRGLNGGRINIASCSLGAAHASVILTRDHLNVRKQFGEPLASNQYLQFTLADMATRLVAARLMVRNAAVALQEERKDAVALCSMAKLFATDECFAICNQALQMHGGYGYLKDYAVQQYVRDSRVHQILEGSNEVMRILISRSLLQE

SEQ ID NO: 823342 - protein, 212 aa, Homo sapiens
MCRTGGPGPKGISCIVVEKGTPGLSFGKKEKKVGWNSQPTRAVIFEDCAVPVANRIGSEGQGFLIAVRGLNGGRINIASCSLGAAHASVILTRDHLNVRKQFGEPLASNQYLQFTLADMATRLVAARLMVRNAAVALQEERKDAVALCSMAKLFATDECFAICNQALQMHGGYGYLKDYAVQQYVRDSRVHQILEGSNEVMRILISRSLLQE

SEQ ID NO: 823343 - protein, 463 aa, Homo sapiens; identical to SEQ ID NO: 823339

SEQ ID NO: 823344 - protein, 100 aa, Homo sapiens
FTLSGCIATRGNHSFLSSQPGWLWAASAWQICNQALQMHGGYGYLKDYAVQQYVRDSRVHQILEELFWQGPGVQSRSFVPFGGPQIALLLPFSSGDLREG

SEQ ID NO: 823345 - protein, 54 aa, Homo sapiens
EDFLEDRIVLGSLDLTDFLTFSLLPFDPSSGSGSDAASLLTSAKKQGDHYILNG

SEQ ID NO: 823346 - protein, 106 aa, Homo sapiens
MHGGYGYLKDYAVQQYVRDSRVHQILEGKNCQRLFSSLQNGDGIAAFPTLCPHASWASGCSQALSVSRLPPPSRSTELFWQGPGVQSRSFVPFGGPQIALLLPFSS

SEQ ID NO: 823347 - protein, 688 aa, Homo sapiens
MATASGASDLSGSGAPPPGVGAQAAAAAEEEEREVVRVRVKKCESFLPPEFRSFAVDPQITSLDVLQHILIRAFDLSGKKNFGISYLGRDRLGQEVYLSLLSDWDLSTAFATASKPYLQLRVDIRPSEDSPLLEDWDIISPKDVIGSDVLLAEKRSSLTTAALPFTQSILTQVGRTLSKVQQVLSWSYGEDVKPFKPPLSDAEFHTYLNHEGQLSRPEELRLRIYHGGVEPSLRKVVWRYLLNVYPDGLTGRERMDYMKRKSREYEQLKSEWAQRANPEDLEFIRSTVLKDVLRTDRAHPYYAGPEDGPHLRALHDLLTTYAVTHPQVSYCQGMSDLASPILAVMDHEGHAFVCFCGIMKRLAANFHPDGRAMATKFAHLKLLLRHADPDFYQYLQEAGADDLFFCYRWLLLELKREFAFDDALRMLEVTWSSLPPDPPEHEVELVGPPSQVADAGFGGHRGWPVRQRHMLRPAGGGGSTFEDAVDHLATASQGPGGGGRLLRQASLDGLQQLRDNMGSRRDPLVQLPHPAALISSKSLSEPLLNSPDPLLSSFSHPDSPSSSSPPSTQEASPTGDMAVGSPLMQEVGSPKDPGKSLPPVPPMGLPPPQEFGRGNPFMLFLCLAILLEHRDHIMRNGLDYNELAMHFDRLVRKHHLGRVLRRARALFADYLQSEVWDSEEGAEATAAS

SEQ ID NO: 823348 - protein, 655 aa, Homo sapiens
EFREEALTKCESFLPPEFRSFAVDPQITSLDVLQHILIRAFDLSGKKNFGISYLGRDRLGQEVYLSLLSDWDLSTAFATASKPYLQLRVDIRPSEDSPLLEDWDIISPKDVIGSDVLLAEKRSSLTTAALPFTQSILTQVGRTLSKVQQVLSWSYGEDVKPFKPPLSDAEFHTYLNHEGQLSRPEELRLRIYHGGVEPSLRKVVWRYLLNVYPDGLTGRERMDYMKRKSREYEQLKSEWAQRANPEDLEFIRSTVLKDVLRTDRAHPYYAGPEDGPHLRALHDLLTTYAVTHPQVSYCQGMSDLASPILAVMDHEGHAFVCFCGIMKRLAANFHPDGRAMATKFAHLKLLLRHADPDFYQYLQEAGADDLFFCYRWLLLELKREFAFDDALRMLEVTWSSLPPDPPEHEVELVGPPSQVADAGFGGHRGWPVRQRHMLRPAGGGGSTFEDAVDHLATASQGPGGGGRLLRQASLDGLQQLRDNMGSRRDPLVQLPHPAALISSKSLSEPLLNSPDPLLSSFSHPDSPSSSSPPSTQEASPTGDMAVGSPLMQEVGSPKDPGKSLPPVPPMGLPPPQEFGRGNPFMLFLCLAILLEHRDHIMRNGLDYNELAMHFDRLVRKHHLGRVLRRARALFADYLQSEVWDSEEGAEATAAS

SEQ ID NO: 823349 - protein, 688 aa, Homo sapiens; identical to SEQ ID NO: 823347

SEQ ID NO: 823350 - protein, 728 aa, Homo sapiens
RGSRSTRRGGGQRSAVTLRRAAAGWQQPPGPRTCLAPERPRPVWELRRRRPLRRRSERWCGSESSMVMGPLVAYPMSSLPRKCESFLPPEFRSFAVDPQITSLDVLQHILIRAFDLSGKKNFGISYLGRDRLGQEVYLSLLSDWDLSTAFATASKPYLQLRVDIRPSEDSPLLEDWDIISPKDVIGSDVLLAEKRSSLTTAALPFTQSILTQVGRTLSKVQQVLSWSYGEDVKPFKPPLSDAEFHTYLNHEGQLSRPEELRLRIYHGGVEPSLRKVVWRYLLNVYPDGLTGRERMDYMKRKSREYEQLKSEWAQRANPEDLEFIRSTVLKDVLRTDRAHPYYAGPEDGPHLRALHDLLTTYAVTHPQVSYCQGMSDLASPILAVMDHEGHAFVCFCGIMKRLAANFHPDGRAMATKFAHLKLLLRHADPDFYQYLQEAGADDLFFCYRWLLLELKREFAFDDALRMLEVTWSSLPPDPPEHEVELVGPPSQVADAGFGGHRGWPVRQRHMLRPAGGGGSTFEDAVDHLATASQGPGGGGRLLRQASLDGLQQLRDNMGSRRDPLVQLPHPAALISSKSLSEPLLNSPDPLLSSFSHPDSPSSSSPPSTQEASPTGDMAVGSPLMQEVGSPKDPGKSLPPVPPMGLPPPQEFGRGNPFMLFLCLAILLEHRDHIMRNGLDYNELAMHFDRLVRKHHLGRVLRRARALFADYLQSEVWDSEEGAEATAAS

SEQ ID NO: 823351 - protein, 434 aa, Homo sapiens
MDYMKRKSREYEQLKSEWAQRANPEDLEFIRSTVLKDVLRTDRAHPYYAGPEDGPHLRALHDLLTTYAVTHPQVSYCQGMSDLASPILAVMDHEGHAFVCFCGIMKRLAANFHPDGRAMATKFAHLKLLLRHADPDFYQYLQEAGADDLFFCYRWLLLELKREFAFDDALRMLEVTWSSLPPDPPEHEVELVGPPSQVADAGFGGHRGWPVRQRHMLRPAGGGGSTFEDAVDHLATASQGPGGGGRLLRQASLDGLQQLRDNMGSRRDPLVQLPHPAALISSKSLSEPLLNSPDPLLSSFSHPDSPSSSSPPSTQEASPTGDMAVGSPLMQEVGSPKDPGKSLPPVPPMGLPPPQEFGRGNPFMLFLCLAILLEHRDHIMRNGLDYNELAMHFDRLVRKHHLGRVLRRARALFADYLQSEVWDSEEGAEATAAS

SEQ ID NO: 823352 - protein, 434 aa, Homo sapiens; identical to SEQ ID NO: 823351

SEQ ID NO: 823353 - protein, 517 aa, Homo sapiens
MVGRTLSKVQQVLSWSYGEDVKPFKPPLSDAEFHTYLNHEGQLSRPEELRLRIYHGGVEPSLRKVVWRYLLNVYPDGLTGRERMDYMKRKSREYEQLKSEWAQRANPEDLEFIRSTVLKDVLRTDRAHPYYAGPEDGPHLRALHDLLTTYAVTHPQVSYCQGMSDLASPILAVMDHEGHAFVCFCGIMKRLAANFHPDGRAMATKFAHLKLLLRHADPDFYQYLQEAGADDLFFCYRWLLLELKREFAFDDALRMLEVTWSSLPPDPPEHEVELVGPPSQVADAGFGGHRGWPVRQRHMLRPAGGGGSTFEDAVDHLATASQGPGGGGRLLRQASLDGLQQLRDNMGSRRDPLVQLPHPAALISSKSLSEPLLNSPDPLLSSFSHPDSPSSSSPPSTQEASPTGDMAVGSPLMQEVGSPKDPGKSLPPVPPMGLPPPQEFGRGNPFMLFLCLAILLEHRDHIMRNGLDYNELAMHFDRLVRKHHLGRVLRRARALFADYLQSEVWDSEEGAEATAAS

SEQ ID NO: 823354 - protein, 236 aa, Homo sapiens
MIPLHPTGWGATVSRHPETGGGGMATASGASDLSGSGAPPPGVGAQAAAAAEEEEREVVRVRVKKCESFLPPEFRSFAVDPQITSLDVLQHILIRAFDLSGKKNFGISYLGRDRLGQEVYLSLLSDWDLSTAFATASKPYLQLRVDIRPSEDSPLLEDWDIISPKDVIGSDVLLAEKRSSLTTAALPFTQSILTQVGRTLSKVQQVLSWSYGEDVKPFKPPRRVERYELDRTSGGF

SEQ ID NO: 823355 - protein, 102 aa, Homo sapiens
MRIPLHPTGWGATVSRHPETGGGGMATASGASDLSGSGAPPPGVGAQAAAAAEEEEREVVRVRVKKCESFLPPEFRSFAVDPQITSLDVLQHILIRAFDLSG

SEQ ID NO: 823356 - protein, 38 aa, Homo sapiens
MVMGPLVAYPMSSLPRKCESFLPPEFRSFAVDPQITSL

SEQ ID NO: 823357 - protein, 74 aa, Homo sapiens
HEALHEFLNPILKHKRNKSIIGRTAPATAPQPGSKRRRLGPVPHADLLVCLTGVHSRIIGVQLGIQLLCRKLLL

SEQ ID NO: 823358 - protein, 84 aa, Homo sapiens
TVGLSTRLVGTEDGGCCRTVAPSVGCPTCECHSLGHFCHCSPQACCMWKNELDKFIVFWFQSSKIIQHQFLMPCTCCHPACTLF

SEQ ID NO: 823359 - protein, 86 aa, Homo sapiens
SGVSARPVAPECTEDGGCCRTVAPSVGCPTCECHSLGHFCHCSPQACCMWKNELDKFIVFWFQSSKIIQHQFLMPCTCCHPACTLF

SEQ ID NO: 823360 - protein, 86 aa, Homo sapiens; identical to SEQ ID NO: 823359

SEQ ID NO: 823361 - protein, 86 aa, Homo sapiens; identical to SEQ ID NO: 823359

SEQ ID NO: 823362 - protein, 85 aa, Homo sapiens
  misc_feature (85)..(85): Xaa can be any naturally occurring amino acid
MLKNTMVGGRSGGQGRNPGHRDSPPGILPYDISQRGPRDFEGTGIPVCLSGKHRRFFQVGGPVNQVGRTQAHSGSFFLPHNLSFX

SEQ ID NO: 823363 - protein, 84 aa, Homo sapiens; identical to SEQ ID NO: 823358

SEQ ID NO: 823364 - protein, 74 aa, Homo sapiens; identical to SEQ ID NO: 823357

SEQ ID NO: 823365 - protein, 74 aa, Homo sapiens; identical to SEQ ID NO: 823357

SEQ ID NO: 823366 - protein, 74 aa, Homo sapiens; identical to SEQ ID NO: 823357

SEQ ID NO: 823367 - protein, 74 aa, Homo sapiens; identical to SEQ ID NO: 823357

SEQ ID NO: 823368 - protein, 74 aa, Homo sapiens; identical to SEQ ID NO: 823357

SEQ ID NO: 823369 - protein, 74 aa, Homo sapiens; identical to SEQ ID NO: 823357

SEQ ID NO: 823370 - protein, 74 aa, Homo sapiens; identical to SEQ ID NO: 823357

SEQ ID NO: 823371 - protein, 74 aa, Homo sapiens; identical to SEQ ID NO: 823357

SEQ ID NO: 823372 - protein, 74 aa, Homo sapiens; identical to SEQ ID NO: 823357

SEQ ID NO: 823373 - protein, 84 aa, Homo sapiens; identical to SEQ ID NO: 823358

SEQ ID NO: 823374 - protein, 84 aa, Homo sapiens; identical to SEQ ID NO: 823358

SEQ ID NO: 823375 - protein, 84 aa, Homo sapiens; identical to SEQ ID NO: 823358

SEQ ID NO: 823376 - protein, 74 aa, Homo sapiens; identical to SEQ ID NO: 823357

SEQ ID NO: 823377 - protein, 74 aa, Homo sapiens; identical to SEQ ID NO: 823357

SEQ ID NO: 823378 - protein, 74 aa, Homo sapiens; identical to SEQ ID NO: 823357

SEQ ID NO: 823379 - protein, 84 aa, Homo sapiens; identical to SEQ ID NO: 823358

SEQ ID NO: 823380 - protein, 84 aa, Homo sapiens; identical to SEQ ID NO: 823358

SEQ ID NO: 823381 - protein, 84 aa, Homo sapiens; identical to SEQ ID NO: 823358

SEQ ID NO: 823382 - protein, 74 aa, Homo sapiens; identical to SEQ ID NO: 823357

SEQ ID NO: 823383 - protein, 74 aa, Homo sapiens; identical to SEQ ID NO: 823357

SEQ ID NO: 823384 - protein, 74 aa, Homo sapiens; identical to SEQ ID NO: 823357

SEQ ID NO: 823385 - protein, 74 aa, Homo sapiens; identical to SEQ ID NO: 823357

SEQ ID NO: 823386 - protein, 74 aa, Homo sapiens; identical to SEQ ID NO: 823357

SEQ ID NO: 823387 - protein, 74 aa, Homo sapiens; identical to SEQ ID NO: 823357

SEQ ID NO: 823388 - protein, 74 aa, Homo sapiens; identical to SEQ ID NO: 823357

SEQ ID NO: 823389 - protein, 74 aa, Homo sapiens; identical to SEQ ID NO: 823357

SEQ ID NO: 823390 - protein, 84 aa, Homo sapiens; identical to SEQ ID NO: 823358

SEQ ID NO: 823391 - protein, 74 aa, Homo sapiens; identical to SEQ ID NO: 823357

SEQ ID NO: 823392 - protein, 74 aa, Homo sapiens; identical to SEQ ID NO: 823357

SEQ ID NO: 823393 - protein, 74 aa, Homo sapiens; identical to SEQ ID NO: 823357

SEQ ID NO: 823394 - protein, 74 aa, Homo sapiens; identical to SEQ ID NO: 823357

SEQ ID NO: 823395 - protein, 74 aa, Homo sapiens; identical to SEQ ID NO: 823357

SEQ ID NO: 823396 - protein, 74 aa, Homo sapiens; identical to SEQ ID NO: 823357

SEQ ID NO: 823397 - protein, 74 aa, Homo sapiens; identical to SEQ ID NO: 823357

SEQ ID NO: 823398 - protein, 192 aa, Homo sapiens
MAAAVGRLLRASVARHVSAIPWGISATAALRPAACGRTSLTNLLCSGSSQAKLFSTIIHAQFLMPCTCCHPSCTLYSGFTSLFRGSFRSFRPFAASGVLYPRDAPAPLLIWWWCFRVGFVVCLSFSSMMGCPVVLSNKDGIFLLFLFFSPSSSHTSLSSTPPPALLPLFSPRSFVLLLIFIHILPLLHSPSL

SEQ ID NO: 823399 - protein, 214 aa, Homo sapiens
AASGMQRPEAWPRPHPGEGAAAAQAGGPAPPARAGEPSGLRLQEPSLYTIKAVFILDNDGRRLLAKYYDDTFPSMKEQMVFEKNVFNKTSRTESEIAFFGGMTIVYKNSIDLFLYVVGSSYENELMLMSVLTCLFESLNHMLRKNVEKRWLLENMDGAFLVLDEIVDGGVILESDPQQVIQKVNFRADDGGLTEQSVAQVLQSAKEQIKWSLLK

SEQ ID NO: 823400 - protein, 71 aa, Homo sapiens
AASGMQRPEAWPRPHPGEGAAAAQAGGPAPPARAGEPSGLRLQEPSLYTIKAVFILDNDGRRLLAKCDSGE

SEQ ID NO: 823401 - protein, 136 aa, Homo sapiens
MVFEKNVFNKTSRTESEIAFFGGMTIVYKNSIDLFLYVVGSSYENELMLMSVLTCLFESLNHMLRKNVEKRWLLENMDGAFLVLDEIVDGGVILESDPQQVIQKVNFRADDGGLTEQSVAQVLQSAKEQIKWSLLK

SEQ ID NO: 823402 - protein, 151 aa, Homo sapiens
AFAAGDVSGLGRWVKYPGWRFQRFLWRGNEGLGQGIGRCIAARVRNTLALRVPTVTCKSLVRPENAEAGHEACGSCGCDARAAILGAGGGNRYPNFPSVRTWRSHPSCEGRLRLMAQARVPSLEQYRDGYHEGGGTLAERWRNVGGVRGVG

SEQ ID NO: 823403 - protein, 138 aa, Homo sapiens
MVFEKNVFNKTSRTESEIAFFGGMTIVYKNSIDLFLYVVGSSYENELMLMSVLTCLFESLNHMLRKNVEKRWLLENMDGAFLVLDEIVDGGVILESDPQQVIQKVNFRADDGGLTEQSVAQVSLLRLILLVWNFPPWR

SEQ ID NO: 823404 - protein, 94 aa, Homo sapiens
AASGMQRPEAWPRPHPGEGAAAAQAGGPAPPARAGEPSGLRLQEPSLYTIKAVFILDNDGRRLLAKYYDDTFPSMKEQMVFEKNVFNKTSRTEM

SEQ ID NO: 823405 - protein, 104 aa, Homo sapiens
AASGMQRPEAWPRPHPGEGAAAAQAGGPAPPARAGEPSGLRLQEPSLYTIKAVFILDNDGRRLLAKYYDDTFPSMKEQMVFEKNVFNKTSRTETDAHVCSHLPV

SEQ ID NO: 823406 - protein, 169 aa, Homo sapiens
AASGMQRPEAWPRPHPGEGAAAAQAGGPAPPARAGEPSGLRLQEPSLYTIKAVFILDNDGRRLLAKYYDDTFPSMKEQMVFEKNVFNKTSRTESEIAFFGGMTIVYKNSIDLFLYVVGSSYENELMLMSVLTCLFESLNHMLRKNVEKRWLLENMDGAFLVLDEIVDGG

SEQ ID NO: 823407 - protein, 103 aa, Homo sapiens
MALSTIVSQRKQIKRKAPRGFLKRVFKRKKPQLRLEKSGDLLVRFHPFSGWEWGTGEVHLNCLLFVHRLAEESRTNACASKCRVINKEHVLAAAKVILKKSRG

SEQ ID NO: 823408 - protein, 264 aa, Homo sapiens
RLGHRSSGSEARGDVGSATLEPTGTPAEMEASDGQGGEGDKPLEQVTNVSCLETSSSASPARDSLMRHAKGLDQDTFKTCKEYLRPLKKFLRKLHLPRDLPQKKKLKYMKQSLVVLGDHINTFLQHYCQAWEIKHWRKMLWRFISLFSELEAKQLRRLYKYTKSSQPAKFLVTFCASDAPERSLLADREDSLPKLCHAWGLHSNISGMKERLSNMQTPGQGSPLPGQPRSQDHVKKDSLRELSQKPKLKRKRIKEAPETPETEP

SEQ ID NO: 823409 - protein, 235 aa, Homo sapiens
AHRVSALGLGSLEGSRVTNVSCLETSSSASPARDSLMRHAKGLDQDTFKTCKEYLRPLKKFLRKLHLPRDLPQKKKLKYMKQSLVVLGDHINTFLQHYCQAWEIKHWRKMLWRFISLFSELEAKQLRRLYKYTKSSQPAKFLVTFCASDAPERSLLADREDSLPKLCHAWGLHSNISGMKERLSNMQTPGQGSPLPGQPRSQDHVKKDSLRELSQKPKLKRKRIKEAPETPETEP

SEQ ID NO: 823410 - protein, 397 aa, Homo sapiens
MNCEREQLRGNQEAAAAPDTMAQPYASAQFAPPQNGIPAEYTAPHPHPAPEYTGQTTVPEHTLNLYPPAQTHSEQSPADTSAQTVSGTATQTDDAAPTDGQPQTQPSENTENKSQPKRLHVSNIPFRFRDPDLRQMFGQFGKILDVEIIFNERGSKGFGFVTFENSADADRAREKLHGTVVEGRKIEVNNATARVMTNKKTVNPYTNGWKLNPVVGAVYSPEFYAGTVLLCQANQEGSSMYSAPSSLVYTSAMPGFPYPAATAAAAYRGAHLRGRGRTVYNTFRAAAPPPPIPAYGGVVYQDGFYGADIYGGYAAYRYAQPTPATAAAYSDSYGRVYAADPYHHALAPAPTYGVGAMNAFAPLTDAKTRSHADDVGLVLSSLQASIYRGGYNRFAPY

SEQ ID NO: 823411 - protein, 397 aa, Homo sapiens; identical to SEQ ID NO: 823410

SEQ ID NO: 823412 - protein, 370 aa, Homo sapiens
MNCEREQLRGNQEAAAAPDTMAQPYASAQFAPPQNGIPAEYTAPHPHPAPEYTGQTTVPEHTLNLYPPAQTHSEQSPADTSAQTVSGTATQTDDAAPTDGQPQTQPSENTENKSQPKRLHVSNIPFRFRDPDLRQMFGQFGKILDVEIIFNERGSKGFGFVTFENSADADRAREKLHGTVVEGRKIEVNNATARVMTNKKTVNPYTNGWKLNPVVGAVYSPEFYAVPGFPYPAATAAAAYRGAHLRGRGRTVYNTFRAAAPPPPIPAYGGVVYQDGFYGADIYGGYAAYRYAQPTPATAAAYSDSYGRVYAADPYHHALAPAPTYGVGAMNAFAPLTDAKTRSHADDVGLVLSSLQASIYRGGYNRFAPY

SEQ ID NO: 823413 - protein, 679 aa, Homo sapiens
RAQTPQLRREAARAGSFLFPKCRQSPRSHGQPFRQLRSHWQAPRQDGRPRREEDDVPPEEKRLRLGLEGGSAQPEDCEDGKDAPRPGREETGTQTGGDGRGDLLCLPYSLVEGQDYKSENSTLLPGAKNSLQDSVSASQATGKAEETGQRTHASGTYSFLDRTQHSDIKADCNTCVEIEDRKVEPANGDSERKEQACEQMREPQSVSEWKSMCLMKISYVESHLQSFHDSSLWLVHGCEVLSFQALLWVTGEWGNQGICVHRHIDSKSDHSHKFLSQVSRQQMNCEREQLRGNQEAAAAPDTMAQPYASAQFAPPQNGIPAEYTAPHPHPAPEYTGQTTVPEHTLNLYPPAQTHSEQSPADTSAQTVSGTATQTDDAAPTDGQPQTQPSENTENKSQPKRLHVSNIPFRFRDPDLRQMFGQFGKILDVEIIFNERGSKGFGFVTFENSADADRAREKLHGTVVEGRKIEVNNATARVMTNKKTVNPYTNGWKLNPVVGAVYSPEFYAGTVLLCQANQEGSSMYSAPSSLVYTSAMPGFPYPAATAAAAYRGAHLRGRGRTVYNTFRAAAPPPPIPAYGGVVYQDGFYGADIYGGYAAYRYAQPTPATAAAYSDSYGRVYAADPYHHALAPAPTYGVGAMNAFAPLTDAKTRSHADDVGLVLSSLQASIYRGGYNRFAPY

SEQ ID NO: 823414 - protein, 343 aa, Homo sapiens
MNCEREQLRGNQEAAAAPDTMAQPYASAQFAPPQNGIPAEYTAPHPHPAPEYTGQTTVPEHTLNLYPPAQTHSEQSPADTSAQTVSGTATQTDDAAPTDGQPQTQPSENTENKSQPKRLHVSNIPFRFRDPDLRQMFGQFGKILDVEIIFNERGSKGFGFVTFENSADADRAREKLHGTVVEGRKIEVNNATARVMTNKKTVNPYTNGWKLNPVVGAVYSPEFYAGTVLLCQANQEGSSMYSAPSSLVYTSAMPGFPYPAATAAAAYRGAHLRGRGRTVYNTFRAAAPPPPIPAYGGVVMLHTATPSLPLPLPLPTVTVTDEFMLPTPTTTHLLQPPPTALVP

SEQ ID NO: 823415 - protein, 417 aa, Homo sapiens
MLASQGVLLHPYGVPMIVPAAPYLPGLIQGNQEAAAAPDTMAQPYASAQFAPPQNGIPAEYTAPHPHPAPEYTGQTTVPEHTLNLYPPAQTHSEQSPADTSAQTVSGTATQTDDAAPTDGQPQTQPSENTENKSQPKRLHVSNIPFRFRDPDLRQMFGQFGKILDVEIIFNERGSKGFGFVTFENSADADRAREKLHGTVVEGRKIEVNNATARVMTNKKTVNPYTNGWKLNPVVGAVYSPEFYAGTVLLCQANQEGSSMYSAPSSLVYTSAMPGFPYPAATAAAAYRGAHLRGRGRTVYNTFRAAAPPPPIPAYGGVVYQDGFYGADIYGGYAAYRYAQPTPATAAAYSDSYGRVYAADPYHHALAPAPTYGVGAMNAFAPLTDAKTRSHADDVGLVLSSLQASIYRGGYNRFAPY

SEQ ID NO: 823416 - protein, 436 aa, Homo sapiens
LSKRTQEEEDAVTGISYQGEAPLLALRIHNDEGIFLPGLYLLMFLDVLGNQEAAAAPDTMAQPYASAQFAPPQNGIPAEYTAPHPHPAPEYTGQTTVPEHTLNLYPPAQTHSEQSPADTSAQTVSGTATQTDDAAPTDGQPQTQPSENTENKSQPKRLHVSNIPFRFRDPDLRQMFGQFGKILDVEIIFNERGSKGFGFVTFENSADADRAREKLHGTVVEGRKIEVNNATARVMTNKKTVNPYTNGWKLNPVVGAVYSPEFYAGTVLLCQANQEGSSMYSAPSSLVYTSAMPGFPYPAATAAAAYRGAHLRGRGRTVYNTFRAAAPPPPIPAYGGVVYQDGFYGADIYGGYAAYRYAQPTPATAAAYSDSYGRVYAADPYHHALAPAPTYGVGAMNAFAPLTDAKTRSHADDVGLVLSSLQASIYRGGYNRFAPY

SEQ ID NO: 823417 - protein, 374 aa, Homo sapiens
MNCEREQLRGNQEAAAAPDTMAQPYASAQFAPPQNGIPAEYTAPHPHPAPEYTGQTTVPEHTLNLYPPAQTHSEQSPADTSAQTVSGTATQTDDAAPTDGQPQTQPSENTENKSQPKRLHVSNIPFRFRDPDLRQMFGQFGKILDVEIIFNERGSKGFGFVTFENSADADRAREKLHGTVVEGRKIEVNNATARVMTNKKTVNPYTNGWKLNPVVGAVYSPEFYAGTVLLCQANQEGSSMYSAPSSLVYTSAMPGFPYPAATAAAAYRGAHLRGRGRTVYNTFRAAAPPPPIPAYGGVVYQDGFYGADIYGGYAAYRYAQPTPATAAAYSDRNQFVFVAADEISCNTSAVTDEFMLPTPTTTHLLQPPPTALVP

SEQ ID NO: 823418 - protein, 102 aa, Homo sapiens
RVVYQEPVYGNKLLQGGYAAYRYAQPTPATAAAYSDSYGRVYAADPYHHALAPAPTYGVGAMNAFAPLTDAKTRSHADDVGLVLSSLQASIYRGGYNRFAPY

SEQ ID NO: 823419 - protein, 463 aa, Homo sapiens
LARGCRLLLPRTSPVLCFPGEETGGTLQPTMKSWQLIAVVGDALQDIKADCNTCVEIEDRKVSRQQMNCEREQLRGNQEAAAAPDTMAQPYASAQFAPPQNGIPAEYTAPHPHPAPEYTGQTTVPEHTLNLYPPAQTHSEQSPADTSAQTVSGTATQTDDAAPTDGQPQTQPSENTENKSQPKRLHVSNIPFRFRDPDLRQMFGQFGKILDVEIIFNERGSKGFGFVTFENSADADRAREKLHGTVVEGRKIEVNNATARVMTNKKTVNPYTNGWKLNPVVGAVYSPEFYAGTVLLCQANQEGSSMYSAPSSLVYTSAMPGFPYPAATAAAAYRGAHLRGRGRTVYNTFRAAAPPPPIPAYGGVVYQDGFYGADIYGGYAAYRYAQPTPATAAAYSDSYGRVYAADPYHHALAPAPTYGVGAMNAFAPLTDAKTRSHADDVGLVLSSLQASIYRGGYNRFAPY

SEQ ID NO: 823420 - protein, 202 aa, Homo sapiens [sequence omitted]

SEQ ID NO: 823421 - protein, 283 aa, Homo sapiens
RSGDAAGVPRWRRRRLPEGRGGVPAAKAGPTRLAADRPDLRPEDGRQPPLRGPGLGRAAAAAPGDALAGPGLSLLNLGRRRARAPGSRAMALRELKVCLLGDTGVGKSSIVWRFVEDSFDPNINPTIGASFMTKTVQYQNELHKFLIWDTAGQERFRALAPMYYRGSAAAIIVYDITKEETFSTLKNWVKELRQHGPPNIVVAIAGNKCDLIDVREVMERDAKDYADSIHAIFVETSAKNAININELFIEISRRIPSTDANLPSGGKGFKLRRQPSEPKRSCC

SEQ ID NO: 823422 - protein, 283 aa, Homo sapiens; identical to SEQ ID NO: 823421

SEQ ID NO: 823423 - protein, 73 aa, Homo sapiens
GQVTRPASQDGGGGGSRKAAAASRLLRRAPRGWQRTGRTYGACTSQEPALQRLVAISGVRNVVANEHRRDMLL

SEQ ID NO: 823424 - protein, 122 aa, Homo sapiens [sequence omitted]

SEQ ID NO: 823425 - protein, 283 aa, Homo sapiens; identical to SEQ ID NO: 823421

SEQ ID NO: 823426 - protein, 220 aa, Homo sapiens
MPFSNSHNALKLRFPAEDEFPDLSAHNNHMAKVLTPELYAELRAKSTPSGFTLDDVIQTGVDNPGHPYIMTVGCVAGDEESYEVFKDLFDPIIEDRHGGYKPSDEHKTDLNPDNLQGGDDLDPNYVLSSRVRTGRSIRGFCLPPHCSRGERRAIEKLAVEALSSLDGDLAGRYYALKSMTEAEQQQLIDDHFLFDKARVAPAAGLGHGPRLARRPRYLAQ

SEQ ID NO: 823427 - protein, 141 aa, Homo sapiens
TRTPTRPGVHPRSAPASPRLKLSSSLRTMSSCGTLTWATSSPAHPTWAPGCGQVCISSCPTWASMRSSRRCLSGCDFRSEAQAVWTRLRWAGSSTSPNADRLGFSEVELVQMVVDGVKLLIEMEQRLEQGQAIDDLMPAQK

SEQ ID NO: 823428 - protein, 239 aa, Homo sapiens
  misc_feature (233)..(233): Xaa can be any naturally occurring amino acid
GSCSPASLRELPTDGAPPPPPGRPPAAAMPFSNSHNALKLRFPAEDEFPDLSAHNNHMAKVLTPELYAELRAKSTPSGFTLDDVIQTGVDNPGHPYIMTVGCVAGDEESYEVFKDLFDPIIEDRHGGYKPSDEHKTDLNPDNLQGGDDLDPNYVLSSRVRTGRSIRGFCLPPHCSRGERRAIEKLAVEALSSLDGDLAGRYYALKSMTEAEQQQLIDDHFLFDKARVPPPHAXSTATTH

SEQ ID NO: 823429 - protein, 71 aa, Homo sapiens
IRLLEDDRREAQAVWTRLRWAGSSTSPNADRLGFSEVELVQMVVDGVKLLIEMEQRLEQGQAIDDLMPAQK

SEQ ID NO: 823430 - protein, 150 aa, Homo sapiens
LTAVGYSVFWLSLASGGARVDEYYCRPHNERVVAVARVLQSASLPDTPCARAKSPELACTGGHTGDTLDQRTIHARQLAPRTRMGCDKDARIFQWPSAGAAQGASAGAVTPIASRVIGTTHAPLMFAVWRALSLAVETSVTLGRVYFFDG

SEQ ID NO: 823431 - protein, 220 aa, Homo sapiens; identical to SEQ ID NO: 823426

SEQ ID NO: 823432 - protein, 220 aa, Homo sapiens; identical to SEQ ID NO: 823426

SEQ ID NO: 823433 - protein, 220 aa, Homo sapiens; identical to SEQ ID NO: 823426

SEQ ID NO: 823434 - protein, 220 aa, Homo sapiens; identical to SEQ ID NO: 823426

SEQ ID NO: 823435 - protein, 220 aa, Homo sapiens; identical to SEQ ID NO: 823426

SEQ ID NO: 823436 - protein, 263 aa, Homo sapiens
  misc_feature (20)..(20): Xaa can be any naturally occurring amino acid
  misc_feature (23)..(23): Xaa can be any naturally occurring amino acid
KNQNRGYVYPEVLVRAFFKXCCXEGELRRNGAPPPPPAPPAAAMPFSNSHNALKLRFPAEDEFPDLSAHNNHMAKVLTPELYAELRAKSTPSGFTLDDVIQTGVDNPGHPYIMTVGCVAGDEESYEVFKDLFDPIIEDRHGGYKPSDEHKTDLNPDNLQGGDDLDPNYVLSSRVRTGRSIRGFCLPPHCSRGERRAIEKLAVEALSSLDGDLAGRYYALKSMTEAEQQQLIDDHFLFDKARVAPAAGLGHGPRLARRPRYLAQ

SEQ ID NO: 823437 - protein, 220 aa, Homo sapiens; identical to SEQ ID NO: 823426

SEQ ID NO: 823438 - protein, 563 aa, Homo sapiens
MPFSNSHNALKLRFPAEDEFPDLSAHNNHMAKVLTPELYAELRAKSTPSGFTLDDVIQTGVDNPGHPYIMTVGCVAGDEESYEVFKDLFDPIIEDRHGGYKPSDEHKTDLNPDNLQGGDDLDPNYVLSSRVRTGRSIRGFCLPPHCSRGERRAIEKLAVEALSSLDGDLAGRYYALKSMTEAEQQQLIDDHFLFDKARVAPAAGLGHGPRLARRPRYLVRVPLRPLAASSLPATSAFPLAPLAGVGPLAARRRRRRREGPAALRVWVPCRASSCAGDLGRAGALRDWAPARGGSGLSNTSPPRDVRWGRGSLAPLPDGPGSWSSLFSFLTPPPLGFYQGLVTPKLLQGQGSYPHCGGRVGLSWRSLAPPHLRPQRMMAAGVLLLGGVPVPPPAPCWRVESWQQPPLLGMAGSSTSGTWEVPLVWGRPGAFFWVCPETSPPSRHNDNKTFLVWVNEEDHLRVISMQKGGNMKEVFTRFCTGLTQIETLFKSKDYEFMWNPHLGYILTCPSNLGTGLRAGVHIKLPNLGKHEKFSEVLKRLRLQKRGTGGVDTAAVGGVFDVSKR

SEQ ID NO: 823439 - protein, 220 aa, Homo sapiens; identical to SEQ ID NO: 823426

SEQ ID NO: 823440 - protein, 220 aa, Homo sapiens; identical to SEQ ID NO: 823426

SEQ ID NO: 823441 - protein, 151 aa, Homo sapiens
MTVGCVAGDEESYEVFKDLFDPIIEDRHGGYKPSDEHKTDLNPDNLQGGDDLDPNYVLSSRVRTGRSIRGFCLPPHCSRGERRAIEKLAVEALSSLDGDLAGRYYALKSMTEAEQQQLIDDHFLFDKARVAPAAGLGHGPRLARRPRYLAQ

SEQ ID NO: 823442 - protein, 272 aa, Homo sapiens
GSCSPASLRELPTDGAPPPPPGRPPAAAMPFSNSHNALKLRFPAEDEFPDLSAHNNHMAKVLTPELYAELRAKSTPSGFTLDDVIQTGVDNPGHPYIMTVGCVAGDEESYEVFKDLFDPIIEDRHGGYKPSDEHKTDLNPDNLQVRGCGRAGRAGPGSSGAHSRLASQGGDDLDPNYVLSSRVRTGRSIRGFCLPPHCSRGERRAIEKLAVEALSSLDGDLAGRYYALKSMTEAEQQQLIDDHFLFDKARVAPAAGLGHGPRLARRPRYLAQ

SEQ ID NO: 823443 - protein, 298 aa, Homo sapiens
MPFSNSHNALKLRFPAEDEFPDLSAHNNHMAKVLTPELYAELRAKSTPSGFTLDDVIQTGVDNPGHPYIMTVGCVAGDEESYEVFKDLFDPIIEDRHGGYKPSDEHKTDLNPDNLQGGDDLDPNYVLSSRVRTGRSIRGFCLPPHCSRGERRAIEKLAVEALSSLDGDLAGRYYALKSMTEAEQQQLIDDHFLFDKARVAPAAGLGHGPRLARRPRYLIETLFKSKDYEFMWNPHLGYILTCPSNLGTGLRAGVHIKLPNLGKHEKFSEVLKRLRLQKRGTGGVDTAAVGGVFDVSKR

SEQ ID NO: 823444 - protein, 400 aa, Homo sapiens
GSCSPASLRELPTDGAPPPPPGRPPAAAMPFSNSHNALKLRFPAEDEFPDLSAHNNHMAKVLTPELYAELRAKSTPSGFTLDDVIQTGVDNPGHPYIMTVGCVAGDEESYEVFKDLFDPIIEDRHGGYKPSDEHKTDLNPDNLQVRGCGRAGRAGPGSSGAHSRLASQGGDDLDPNYVLSSRVRTGRSIRGFCLPPHCSRGERRAIEKLAVEGRGRAGRGAAAAASPSRRGPRPLLFTSPGSGSRRRALICARPGSVSRRDRGTEAQPRAHSGLGPREGGSWRGVTAWDRRPGREDWTPADPGGWGPLTSPEVGHGGRAGPRCGLEGRAREPSVLSAPLAALSSLDGDLAGRYYALKSMTEAEQQQLIDDHFLFDKARVAPAAGLGHGPRLARRPRYLAQ

SEQ ID NO: 823445 - protein, 436 aa, Homo sapiens
GSCSPASLRELPTDGAPPPPPGRPPAAAMPFSNSHNALKLRFPAEDEFPDLSAHNNHMAKVLTPELYAELRAKSTPSGFTLDDVIQTGVDNPGHPYIMTVGCVAGDEESYEVFKDLFDPIIEDRHGGYKPSDEHKTDLNPDNLQVRGCGRAGRAGPGSSGAHSRLASQGGDDLDPNYVLSSRVRTGRSIRGFCLPPHCSRGERRAIEKLAVEALSSLDGDLAGRYYALKSMTEAEQQQLIDDHFLFDKARVAPAAGLGHGPRLARRPRYLVRVPLRPLAASSLPATSAFPLAPLAGVGPLAARRRRRRREGPAALRVWVPCRASSCAGDLGRAGALRDWAPARGGSGLSNTSPPRDVRWGRGSLAPLPDGPGSWSSLFSFLTPPPLGFYQGLVTPKLLQGQGSYPHCGGRVGLSWRSLAPPHLRPQRMMAAGVLLL

SEQ ID NO: 823446 - protein, 113 aa, Homo sapiens
MSSCGTLTWATSSPAHPTWAPGCGQVCISSCPTWASMRSSRRCLSGCDFRSEAQAVWTRLRWAGSSTSPNADRLGFSEVELVQMVVDGVKLLIEMEQRLEQGQAIDDLMPAQK

SEQ ID NO: 823447 - protein, 141 aa, Homo sapiens
PTNHYHGKYPSAAEGEEQLLKLSSSLRTMSSCGTLTWATSSPAHPTWAPGCGQVCISSCPTWASMRSSRRCLSGCDFRSEAQAVWTRLRWAGSSTSPNADRLGFSEVELVQMVVDGVKLLIEMEQRLEQGQAIDDLMPAQK

SEQ ID NO: 823448 - protein, 57 aa, Homo sapiens
MIETLFKSKDYEFMWNPHLGYILTCPSNLGTGLRAGVHIKLPNLGKHEKFSEVLKRL

SEQ ID NO: 823449 - protein, 220 aa, Homo sapiens; identical to SEQ ID NO: 823426

SEQ ID NO: 823450 - protein, 220 aa, Homo sapiens; identical to SEQ ID NO: 823426

SEQ ID NO: 823451 - protein, 220 aa, Homo sapiens; identical to SEQ ID NO: 823426

SEQ ID NO: 823452 - protein, 220 aa, Homo sapiens; identical to SEQ ID NO: 823426

SEQ ID NO: 823453 - protein, 220 aa, Homo sapiens; identical to SEQ ID NO: 823426

SEQ ID NO: 823454 - protein, 238 aa, Homo sapiens
LRCLGTRQRSAKCQPAATALELGAGDARAGPYIASAHSLRRRGLRSRGAGVLTPELYAELRAKSTPSGFTLDDVIQTGVDNPGHPYIMTVGCVAGDEESYEVFKDLFDPIIEDRHGGYKPSDEHKTDLNPDNLQGGDDLDPNYVLSSRVRTGRSIRGFCLPPHCSRGERRAIEKLAVEALSSLDGDLAGRYYALKSMTEAEQQQLIDDHFLFDKARVAPAAGLGHGPRLARRPRYLAQ

SEQ ID NO: 823455 - protein, 181 aa, Homo sapiens
MPFSNSHNALKLRFPAEDEFPDLSAHNNHMANVGCVAGDEESYEVFKDLFDPIIEDRHGGYKPSDEHKTDLNPDNLQGGDDLDPNYVLSSRVRTGRSIRGFCLPPHCSRGERRAIEKLAVEALSSLDGDLAGRYYALKSMTEAEQQQLIDDHFLFDKARVAPAAGLGHGPRLARRPRYLAQ

SEQ ID NO: 823456 - protein, 376 aa, Homo sapiens
GSCSPASLRELPTDGAPPPPPGRPPAAAMPFSNSHNALKLRFPAEDEFPDLSAHNNHMAKVLTPELYAELRAKSTPSGFTLDDVIQTGVDNPGHPYIMTVGCVAGDEESYEVFKDLFDPIIEDRHGGYKPSDEHKTDLNPDNLQGGDDLDPNYVLSSRVRTGRSIRGFCLPPHCSRGERRAIEKLAVEGRGRAGRGAAAAASPSRRGPRPLLFTSPGSGSRRRALICARPGSVSRRDRGTEAQPRAHSGLGPREGGSWRGVTAWDRRPGREDWTPADPGGWGPLTSPEVGHGGRAGPRCGLEGRAREPSVLSAPLAALSSLDGDLAGRYYALKSMTEAEQQQLIDDHFLFDKARVAPAAGLGHGPRLARRPRYLAQ

SEQ ID NO: 823457 - protein, 452 aa, Homo sapiens
MPFSNSHNALKLRFPAEDEFPDLSAHNNHMAKVLTPELYAELRAKSTPSGFTLDDVIQTGVDNPGHPYIMTVGCVAGDEESYEVFKDLFDPIIEDRHGGYKPSDEHKTDLNPDNLQGGDDLDPNYVLSSRVRTGRSIRGFCLPPHCSRGERRAIEKLAVEALSSLDGDLAGRYYALKSMTEAEQQQLIDDHFLFDKARVAPAAGLGHGPRLARRPRYLVRVPLRPLAASSLPATSAFPLAPLAGVGPLAARRRRRRREGPAALRVWVPCRASSCAGDLGRAGALRDWAPARGGSGLSNTSPPRDVRWGRGSLAPLPDGPGSWSSLFSFLTPQQGCGCPSISPPGGFPALGSLRACRGFRQAFSLTTLFSVCMIETLFKSKDYEFMWNPHLGYILTCPSNLGTGLRAGVHIKLPNLGKHEKFSEVLKRLRLQKRGTGGVDTAAVGGVFDVSKR

SEQ ID NO: 823458 - protein, 220 aa, Homo sapiens; identical to SEQ ID NO: 823426

SEQ ID NO: 823459 - protein, 220 aa, Homo sapiens; identical to SEQ ID NO: 823426

SEQ ID NO: 823460 - protein, 133 aa, Homo sapiens
MARDWPDARGIWHNDNKTFLVWVNEEDHLRVISMQKGGNMKEVFTRFCTGLTQIETLFKSKDYEFMWNPHLGYILTCPSNLGTGLRAGVHIKLPNLGKHEKFSEVLKRLRLQKRGTGGVDTAAVGGVFDVSKR

SEQ ID NO: 823461 - protein, 133 aa, Homo sapiens; identical to SEQ ID NO: 823460

SEQ ID NO: 823462 - protein, 162 aa, Homo sapiens
MARGQQQGDTGLSKRKWSSMSWPLLLASGMARDWPDARGIWHNDNKTFLVWVNEEDHLRVISMQKGGNMKEVFTRFCTGLTQIETLFKSKDYEFMWNPHLGYILTCPSNLGTGLRAGVHIKLPNLGKHEKFSEVLKRLRLQKRGTGGVDTAAVGGVFDVSKR

SEQ ID NO: 823463 - protein, 195 aa, Homo sapiens
GSCSPASLRELPTDGAPPPPPGRPPAAAMPFSNSHNALKLRFPAEDEFPDLSAHNNHMAKVLTPELYAELRAKSTPSGFTLDDVIQTGVDNPGHPYIMTVGCVAGDEESYEVFKDLFDPIIEDLLRGGAGADGGGRSEAAHRDGTAAGAGPGHRRPHACPEMKPGPHPTPALLLPNLLPGQCPPCTPDVRRLASP

SEQ ID NO: 823464 - protein, 92 aa, Homo sapiens
MKLCVTVLSLLMLVAAFCSPALSAPMGSDPPTACCFSYTARKLPRNFVVDYYETSSLCSQPAVVFQTKRSKQVCADPSESWVQEYVYDLELN

SEQ ID NO: 823465 - protein, 112 aa, Homo sapiens
MTSSLPWKFHSLSCAPTFVLGLRVPIKRDSQLSISTGHSWVLKLLSSAASPLRKPLFHQYHEALRDCPVSPHASSCLLLSSALSTNGLRPSHRLLLFLHREEASSQLCGRLL

SEQ ID NO: 823466 - protein, 112 aa, Homo sapiens; identical to SEQ ID NO: 823465

SEQ ID NO: 823467 - protein, 112 aa, Homo sapiens; identical to SEQ ID NO: 823465

SEQ ID NO: 823468 - protein, 112 aa, Homo sapiens; identical to SEQ ID NO: 823465

SEQ ID NO: 823469 - protein, 112 aa, Homo sapiens; identical to SEQ ID NO: 823465

SEQ ID NO: 823470 - protein, 112 aa, Homo sapiens; identical to SEQ ID NO: 823465

SEQ ID NO: 823471 - protein, 112 aa, Homo sapiens; identical to SEQ ID NO: 823465

SEQ ID NO: 823472 - protein, 109 aa, Homo sapiens
MTSSLPWKFHSLSCAPTFVLGLRVPIKRDSQLSISTGHSWVLKLLSSAASPLRKPLFHQYHEALRDCPVSPHASSCLLLSSALSTKFQTKRSKQVCADPSEILGPGVRV

SEQ ID NO: 823473 - protein, 109 aa, Homo sapiens; identical to SEQ ID NO: 823472

SEQ ID NO: 823474 - protein, 362 aa, Homo sapiens
GFLARGLGRVRSACRDSLDKGSLMAQLGAVVAVASSFFCASLFSAVHKIEEGHIGVYYRGGALLTSTSGPGFHLMLPFITSYKSVQTTLQTDEVKNVPCGTSGGVMIYFDRIEVVNFLVPNAVYDIVKNYTADYDKALIFNKIHHELNQFCSVHTLQEVYIELFDQIDENLKLALQQDLTSMAPGLVIQAVRVTKPNIPEAIRRNYELMESEKTKLLIAAQKQKVVEKEAETERKKALIEAEKVAQVAEITYGQKVMEKETEKKISEIEDAAFLAREKAKADAECYTAMKIAEANKLKLTPEYLQLMKYKAIASNSKIYFGKDIPNMFMDSAGSVSKQFEGLADKLSFGLEDEPLETATKEN

SEQ ID NO: 823475 - protein, 175 aa, Homo sapiens
GFLARGLGRVRSACRDSLDKGSLMAQLGAVVAVASSFFCASLFSAVHKIEEGHIGVYYRGGALLTSTSGPGFHLMLPFITSYKSVQTTLQTDEVKNVPCGTSGGVMIYFDRIEVVNFLVPNAVYDIVKNYTADYDKALIFNKIHHELNQFCSVHTLQEVYIELFGLENDFSQESS

SEQ ID NO: 823476 - protein, 88 aa, Homo sapiens
GPAEGKGPLSVPPAHPQAPGDELKLTPEYLQLMKYKAIASNSKIYFGKDIPNMFMDSAGSVSKQFEGLADKLSFGLEDEPLETATKEN

SEQ ID NO: 823477 - protein, 135 aa, Homo sapiens
MLPFITSYKSVQTTLQTDEVKNVPCGTSGGVMIYFDRIEVVNFLVPNAVYDIVKNYTADYDKALIFNKIHHELNQFCSVHTLQEVYIELFDQIDENLKLALQQDLTSMAPGLVIQAVRVTKPNIPEAIRRNYELM

SEQ ID NO: 823478 - protein, 339 aa, Homo sapiens
MAQLGAVVAVASSFFCASLFSAVHKIEEGHIGVYYRGGALLTSTSGPGFHLMLPFITSYKSVQTTLQTDEVKNVPCGTSGGVMIYFDRIEVVNFLVPNAVYDIVKNYTADYDKALIFNKIHHELNQFCSVHTLQEVYIELFDQIDENLKLALQQDLTSMAPGLVIQAVRVTKPNIPEAIRRNYELMESEKTKLLIAAQKQKVVEKEAETERKKALIEAEKVAQVAEITYGQKVMEKETEKKISEIEDAAFLAREKAKADAECYTAMKIAEANKLKLTPEYLQLMKYKAIASNSKIYFGKDIPNMFMDSAGSVSKQFEGLADKLSFGLEDEPLETATKEN

SEQ ID NO: 823479 - protein, 229 aa, Homo sapiens
GFLARGLGRVRSACRDSLDKGSLMAQLGAVVAVASSFFCASLFSAVHKIEEGHIGVYYRGGALLTSTSGPGFHLMLPFITSYKSVQTTLQTDEVKNVPCGTSGGVMIYFDRIEVVNFLVPNAVYDIVKNYTADYDKALIFNKIHHELNQFCSVHTLQEVYIELFGKKVSPEHAVLKQGSWNPASLHCLKPGCLQGVMVTYGQEMLKNLVLRSWSQRSSWRMLIAMQQDP

SEQ ID NO: 823480 - protein, 206 aa, Homo sapiens
MAQLGAVVAVASSFFCASLFSAVHKIEEGHIGVYYRGGALLTSTSGPGFHLMLPFITSYKSVQTTLQTDEVKNVPCGTSGGVMIYFDRIEVVNFLVPNAVYDIVKNYTADYDKALIFNKIHHELNQFCSVHTLQEVYIELFGKKVSPEHAVLKQGSWNPASLHCLKPGCLQGVMVTYGQEMLKNLVLRSWSQRSSWRMLIAMQQDP

SEQ ID NO: 823481 - protein, 124 aa, Homo sapiens [sequence omitted]

SEQ ID NO: 823482 - protein, 114 aa, Homo sapiens
MAQLGAVVAVASSFFCASLFSAVHKIEEGHIGVYYRGGALLTSTSGPGFHLMLPFITSYKSVQVCVIGFGTLPGFKHPLGAFEHKAVPNKIEEVEASTSLKMPNPVSSSLNHYY

SEQ ID NO: 823483 - protein, 206 aa, Homo sapiens; identical to SEQ ID NO: 823480

SEQ ID NO: 823484 - protein, 431 aa, Homo sapiens
MAEITNIRPSFDVSPVVAGLIGASVLVVCVSVTVFVWSCCHQQAEKKHKNPPYKFIHMLKGISIYPETLSNKKKIIKVRRDKDGPGREGGRRNLLVDAAEAGLLSRDKDPRGPSSGSCIDQLPIKMDYGEELRSPITSLTPGESKTTSPSSPEEDVMLGSLTFSVDYNFPKKALVVTIQEAHGLPVMDDQTQGSDPYIKMTILPDKRHRVKTRVLRKTLDPVFDETFTFYGIPYSQLQDLVLHFLVLSFDRFSRDDVIGEVMVPLAGVDPSTGKVQLTRDIIKRNIQKCISRGELQVSLSYQPVAQRMTVVVLKARHLPKMDITGLSGNPYVKVNVYYGRKRIAKKKTHVKKCTLNPIFNESFIYDIPTDLLPDISIEFLVIDFDRTTKNEVVGRLILGAHSVTASGAEHWREVCESPRKPVAKWHSLSEY

SEQ ID NO: 823485 - protein, 431 aa, Homo sapiens; identical to SEQ ID NO: 823484

SEQ ID NO: 823486 - protein, 431 aa, Homo sapiens; identical to SEQ ID NO: 823484

SEQ ID NO: 823487 - protein, 431 aa, Homo sapiens; identical to SEQ ID NO: 823484

SEQ ID NO: 823488 - protein, 431 aa, Homo sapiens; identical to SEQ ID NO: 823484

SEQ ID NO: 823489 - protein, 431 aa, Homo sapiens; identical to SEQ ID NO: 823484

SEQ ID NO: 823490 - protein, 431 aa, Homo sapiens; identical to SEQ ID NO: 823484

SEQ ID NO: 823491 - protein, 172 aa, Homo sapiens
SGCRVRTQRQLPGEKGDVTRHIIKRNIQKCISRGELQVSLSYQPVAQRMTVVVLKARHLPKMDITGLSGNPYVKVNVYYGRKRIAKKKTHVKKCTLNPIFNESFIYDIPTDLLPDISIEFLVIDFDRTTKNEVVGRLILGAHSVTASGAEHWREVCESPRKPVAKWHSLSEY

SEQ ID NO: 823492 - protein, 431 aa, Homo sapiens; identical to SEQ ID NO: 823484

SEQ ID NO: 823493 - protein, 431 aa, Homo sapiens; identical to SEQ ID NO: 823484

SEQ ID NO: 823494 - protein, 94 aa, Homo sapiens
RDSSQRNREAETNPETSNSQTEARTLASSMKVSAALLCLLLIAATFIPQGLAQPDAINAPVTCCYNFTNRKISVQRLASYRRITSSKCPKEAVM

SEQ ID NO: 823495 - protein, 128 aa, Homo sapiens
RDSSQRNREAETNPETSNSQTEARTLASSMKVSAALLCLLLIAATFIPQGLAQPDAINAPVTCCYNFTNRKISVQRLASYRRITSSKCPKEAVIFKTIVAKEICADPKQKWVQDSMDHLDKQTQTPKT

SEQ ID NO: 823496 - protein, 103 aa, Homo sapiens
  misc_feature (41)..(41): Xaa can be any naturally occurring amino acid
SILPLAVIILLRKVSISIAYLNLGNGFGLSCLGSKVEWLVXIRHEKISVQRLASYRRITSSKCPKEAVIFKTIVAKEICADPKQKWVQDSMDHLDKQTQTPKT

SEQ ID NO: 823497 - protein, 128 aa, Homo sapiens; identical to SEQ ID NO: 823495

SEQ ID NO: 823498 - protein, 128 aa, Homo sapiens; identical to SEQ ID NO: 823495

SEQ ID NO: 823499 - protein, 128 aa, Homo sapiens; identical to SEQ ID NO: 823495

SEQ ID NO: 823500 - protein, 128 aa, Homo sapiens; identical to SEQ ID NO: 823495

SEQ ID NO: 823501 - protein, 128 aa, Homo sapiens; identical to SEQ ID NO: 823495

SEQ ID NO: 823502 - protein, 457 aa, Homo sapiens
AQQLVSERPAENRSWKCLLAARGEERGASIMAEQDVENDLLDYDEEEEPQAPQESTPAPPKKDIKGSYVSIHSSGFRDFLLKPELLRAIVDCGFEHPSEVQHECIPQAILGMDVLCQAKSGMGKTAVFVLATLQQIEPVNGQVTVLVMCHTRELAFQISKEYERFSKYMPSVKVSVFFGGLSIKKDEEVLKKNCPHVVVGTPGRILALVRNRSFSLKNVKHFVLDECDKMLEQLDMRRDVQEIFRLTPHEKQCMMFSATLSKDIRPVCRKFMQDPMEVFVDDETKLTLHGLQQYYVKLKDSEKNRKLFDLLDVLEFNQVIIFVKSVQRCMALAQLLVEQNFPAIAIHRGMAQEERLSRYQQFKDFQRRILVATNLFGRGMDIERVNIVFNYDMPEDSDTYLHRVARAGRFGTKGLAITFVSDENDAKILNDVQDRFEVNVAELPEEIDISTYIEQSR

SEQ ID NO: 823503 - protein, 427 aa, Homo sapiens
MAEQDVENDLLDYDEEEEPQAPQESTPAPPKKDIKGSYVSIHSSGFRDFLLKPELLRAIVDCGFEHPSEVQHECIPQAILGMDVLCQAKSGMGKTAVFVLATLQQIEPVNGQVTVLVMCHTRELAFQISKEYERFSKYMPSVKVSVFFGGLSIKKDEEVLKKNCPHVVVGTPGRILALVRNRSFSLKNVKHFVLDECDKMLEQLDMRRDVQEIFRLTPHEKQCMMFSATLSKDIRPVCRKFMQDPMEVFVDDETKLTLHGLQQYYVKLKDSEKNRKLFDLLDVLEFNQVIIFVKSVQRCMALAQLLVEQNFPAIAIHRGMAQEERLSRYQQFKDFQRRILVATNLFGRGMDIERVNIVFNYDMPEDSDTYLHRVARAGRFGTKGLAITFVSDENDAKILNDVQDRFEVNVAELPEEIDISTYIEQSR

SEQ ID NO: 823504 - protein, 273 aa, Homo sapiens
AQQLVSERPAENRSWKCLLAARGEERGASIMAEQDVENDLLDYDEEEEPQAPQESTPAPPKKDIKGSYVSIHSSGFRDFLLKPELLRAIVDCGFEHPSEVQHECIPQAILGMDVLCQAKSGMGKTAVFVLATLQQIEPVNGQVTVLVMCHTRELAFQISKEYERFSKYMPSVKVSVFFGGLSIKKDEEVLKKNCPHVVVGTPGRILALVRNRSFSLKNVHAVHDVQAGHLSKDIRAVCKESHCGSMDGLWPDETSSSLTACRFYSNHNVKERS

SEQ ID NO: 823505 - protein, 457 aa, Homo sapiens; identical to SEQ ID NO: 823502

SEQ ID NO: 823506 - protein, 467 aa, Homo sapiens
AHTHDNTTAKKKTRGLTRPRSGTRWKCLLAARGEERGASIMAEQDVENDLLDYDEEEEPQAPQESTPAPPKKDIKGSYVSIHSSGFRDFLLKPELLRAIVDCGFEHPSEVQHECIPQAILGMDVLCQAKSGMGKTAVFVLATLQQIEPVNGQVTVLVMCHTRELAFQISKEYERFSKYMPSVKVSVFFGGLSIKKDEEVLKKNCPHVVVGTPGRILALVRNRSFSLKNVKHFVLDECDKMLEQLDMRRDVQEIFRLTPHEKQCMMFSATLSKDIRPVCRKFMQDPMEVFVDDETKLTLHGLQQYYVKLKDSEKNRKLFDLLDVLEFNQVIIFVKSVQRCMALAQLLVEQNFPAIAIHRGMAQEERLSRYQQFKDFQRRILVATNLFGRGMDIERVNIVFNYDMPEDSDTYLHRVARAGRFGTKGLAITFVSDENDAKILNDVQDRFEVNVAELPEEIDISTYIEQSR

SEQ ID NO: 823507 - protein, 355 aa, Homo sapiens
AQQLVSERPAENRSWKCLLAARGEERGASIMAEQDVENDLLDYDEEEEPQAPQESTPAPPKKDIKGSYVSIHSSGFRDFLLKPELLRAIVDCGFEHPSEVQHECIPQAILGMDVLCQAKSGMGKTAVFVLATLQQIEPVNGQVTVLVMCHTRELAFQISKEYERFSKYMPSVKVSVFFGGLSIKKDEEVLKKNCPHVVVGTPGRILALVRNRSFSLKNVKHFVLDECDKMLEQLDMRRDVQEIFRLTPHEKQCMMFSATLSKDIRPVCRKFMQDPMEVFVDDETKLTLHGLQQYYVKLKDSEKNRKLFDLLDVLEFNQVIIFVKSVQRCMALAQLLVEQNFPAIAIHRGMAQEER

SEQ ID NO: 823508 - protein, 571 aa, Homo sapiens
AQQLVSERPAENRSWKCLLAARGEERGASIMAEQDVENDLLDYDEEEEPQAPQESTPAPPKKDIKGSYVSIHSSGFRDFLLKPELLRAIVDCGFEHPSEVQHECIPQAILGMDVLCQAKSGMGKTAVFVLATLQQIEPVNGQVTVLVMCHTRELAFQISKEYERFSKYMPSVKVSVFFGGLSIKKDEEVLKKNCPHVVVGTPGRILALVRNRSFSLKNVKHFVLDECDKMLEQLDMRRDVQEIFRLTPHEKQCMMFSATLSKDIRPVCRKFMQDCEYGESGSFGLPQGPGAWGPRTPARPTWHGGCWDAGSRRSLLSSPRSCQTGSQAWSTPESGQSLHPAFERCLLRSGAAGPLGSVAQRSRPLEGSGQARCPEVIPPAPPTSLPTQPMEVFVDDETKLTLHGLQQYYVKLKDSEKNRKLFDLLDVLEFNQVIIFVKSVQRCMALAQLLVEQNFPAIAIHRGMAQEERLSRYQQFKDFQRRILVATNLFGRGMDIERVNIVFNYDMPEDSDTYLHRVARAGRFGTKGLAITFVSDENDAKILNDVQDRFEVNVAELPEEIDISTYIEQSR

SEQ ID NO: 823509 - protein, 222 aa, Homo sapiens
MRRDVQEIFRLTPHEKQCMMFSATLSKDIRPVCRKFMQDPMEVFVDDETKLTLHGLQQYYVKLKDSEKNRKLFDLLDVLEFNQVIIFVKSVQRCMALAQLLVEQNFPAIAIHRGMAQEERLSRYQQFKDFQRRILVATNLFGRGMDIERVNIVFNYDMPEDSDTYLHRVARAGRFGTKGLAITFVSDENDAKILNDVQDRFEVNVAELPEEIDISTYIEQSR

SEQ ID NO: 823510 - protein, 466 aa, Homo sapiens
LAMAARGVIAPVGESCATLSTCSPRPNGQTPTSTSRDSIMAEQDVENDLLDYDEEEEPQAPQESTPAPPKKDIKGSYVSIHSSGFRDFLLKPELLRAIVDCGFEHPSEVQHECIPQAILGMDVLCQAKSGMGKTAVFVLATLQQIEPVNGQVTVLVMCHTRELAFQISKEYERFSKYMPSVKVSVFFGGLSIKKDEEVLKKNCPHVVVGTPGRILALVRNRSFSLKNVKHFVLDECDKMLEQLDMRRDVQEIFRLTPHEKQCMMFSATLSKDIRPVCRKFMQDPMEVFVDDETKLTLHGLQQYYVKLKDSEKNRKLFDLLDVLEFNQVIIFVKSVQRCMALAQLLVEQNFPAIAIHRGMAQEERLSRYQQFKDFQRRILVATNLFGRGMDIERVNIVFNYDMPEDSDTYLHRVARAGRFGTKGLAITFVSDENDAKILNDVQDRFEVNVAELPEEIDISTYIEQSR

SEQ ID NO: 823511 - protein, 182 aa, Homo sapiens [sequence omitted]

SEQ ID NO: 823512 - protein, 568 aa, Homo sapiens
AQQLVSERPAENRSWKCLLAARGEERGASIMAEQDVENDLLDYDEEEEPQAPQESTPAPPKKDIKGSYVSIHSSGFRDFLLKPELLRAIVDCGFEHPSEGTPSGCYPLAQVLTKTRPALPAQSGAASSLPWVREGPVCPADQLCPAGPVAALGSGAFCFDQADTPALQVSVALSGLGSSDCPHCGPPVNWGGSCTGVHPGSRPSRSASPAVQHECIPQAILGMDVLCQAKSGMGKTAVFVLATLQQIEPVNGQVTVLVMCHTRELAFQISKEYERFSKYMPSVKVSVFFGGLSIKKDEEVLKKNCPHVVVGTPGRILALVRNRSFSLKNVKHFVLDECDKMLEQLDMRRDVQEIFRLTPHEKQCMMFSATLSKDIRPVCRKFMQDPMEVFVDDETKLTLHGLQQYYVKLKDSEKNRKLFDLLDVLEFNQVIIFVKSVQRCMALAQLLVEQNFPAIAIHRGMAQEERLSRYQQFKDFQRRILVATNLFGRGMDIERVNIVFNYDMPEDSDTYLHRVARAGRFGTKGLAITFVSDENDAKILNDVQDRFEVNVAELPEEIDISTYIEQSR

SEQ ID NO: 823513 - protein, 392 aa, Homo sapiens
MERWEGVCGRWRVQVKGVCLWQASARVLEGRSGGVQHECIPQAILGMDVLCQAKSGMGKTAVFVLATLQQIEPVNGQVTVLVMCHTRELAFQISKEYERFSKYMPSVKVSVFFGGLSIKKDEEVLKKNCPHVVVGTPGRILALVRNRSFSLKNVKHFVLDECDKMLEQLDMRRDVQEIFRLTPHEKQCMMFSATLSKDIRPVCRKFMQDPMEVFVDDETKLTLHGLQQYYVKLKDSEKNRKLFDLLDVLEFNQVIIFVKSVQRCMALAQLLVEQNFPAIAIHRGMAQEERLSRYQQFKDFQRRILVATNLFGRGMDIERVNIVFNYDMPEDSDTYLHRVARAGRFGTKGLAITFVSDENDAKILNDVQDRFEVNVAELPEEIDISTYIEQSR

SEQ ID NO: 823514 - protein, 445 aa, Homo sapiens
AQQLVSERPAENRSWKCLLAARGEERGASIMAEQDVENDLLDYDEEEEPQAPQESTPAPPKKDIKGSYVSIHSSGFRDFLLKPELLRAIVDCGFEHPSEVQHECIPQAILGMDVLCQAKSGMGKTAVFVLATLQQIEPVNGQVTVLVMCHTRELAFQISKEYERFSKYMPSVKDEEVLKKNCPHVVVGTPGRILALVRNRSFSLKNVKHFVLDECDKMLEQLDMRRDVQEIFRLTPHEKQCMMFSATLSKDIRPVCRKFMQDPMEVFVDDETKLTLHGLQQYYVKLKDSEKNRKLFDLLDVLEFNQVIIFVKSVQRCMALAQLLVEQNFPAIAIHRGMAQEERLSRYQQFKDFQRRILVATNLFGRGMDIERVNIVFNYDMPEDSDTYLHRVARAGRFGTKGLAITFVSDENDAKILNDVQDRFEVNVAELPEEIDISTYIEQSR

SEQ ID NO: 823515 - protein, 222 aa, Homo sapiens; identical to SEQ ID NO: 823509

SEQ ID NO: 823516 - protein, 582 aa, Homo sapiens
AQQLVSERPAENRSWKCLLAARGEERGASIMAEQDVENDLLDYDEEEEPQAPQESTPAPPKKDIKGSYVSIHSSGFRDFLLKPELLRAIVDCGFEHPSEGSRPSRSASPAVQHECIPQAILGMDVLCQAKSGMGKTAVFVLATLQQIEPVNGQVTVLVMCHTRELAFQISKEYERFSKYMPSVKVSVFFGGLSIKKDEEVLKKNCPHVVVGTPGRILALVRNRSFSLKNVKHFVLDECDKMLEQLDMRRDVQEIFRLTPHEKQCMMFSATLSKDIRPVCRKFMQDCEYGESGSFGLPQGPGAWGPRTPARPTWHGGCWDAGSRRSLLSSPRSCQTGSQAWSTPESGQSLHPAFERCLLRSGAAGPLGSVAQRSRPLEGSGQARCPEVIPPAPPTSLPTQPMEVFVDDETKLTLHGLQQYYVKLKDSEKNRKLFDLLDVLEFNQVIIFVKSVQRCMALAQLLVEQNFPAIAIHRGMAQEERLSRYQQFKDFQRRILVATNLFGRGMDIERVNIVFNYDMPEDSDTYLHRVARAGRFGTKGLAITFVSDENDAKILNDVQDRFEVNVAELPEEIDISTYIEQSR

SEQ ID NO: 823517 - protein, 182 aa, Homo sapiens [sequence omitted]

SEQ ID NO: 823518 - protein, 144 aa, Homo sapiens
AQQLVSERPAENRSWKCLLAARGEERGASIMAEQDVENDLLDYDEEEEPQAPQESTPAPPKKDIKGSYVSIHSSGFRDFLLKPELLRAIVDCGFEHPSEVQHECIPQAILGMDVLCQAKSGMGKTAVLYSWHGPNPLTRQRNFE

SEQ ID NO: 823519 - protein, 104 aa, Homo sapiens
MVEDEVGIEIDQEVGATNGVLTEYLIVIYQCELAYFCLIMYIIHQKLVIIVEVRVRPVAGHVAITFVSDENDAKILNDVQDRFEVNVAELPEEIDISTYIEQSR

SEQ ID NO: 823520 - protein, 211 aa, Homo sapiens
MEVFVDDETKLTLHGLQQYYVKLKDSEKNRKLFDLLDVLEFNQVIIFVKSVQRCMALAQLLVEQNFPAIAIHRGMAQEERECEPPAKAAGSTTRSPVSDGLHLFLLHPSLSRYQQFKDFQRRILVATNLFGRGMDIERVNIVFNYDMPEDSDTYLHRVARAGRFGTKGLAITFVSDENDAKILNDVQDRFEVNVAELPEEIDISTYIEQSR

SEQ ID NO: 823521 - protein, 485 aa, Homo sapiens
AQQLVSERPAENRSWKCLLAARGEERGASIMAEQDVENDLLDYDEEEEPQAPQESTPAPPKKDIKGSYVSIHSSGFRDFLLKPELLRAIVDCGFEHPSEVQHECIPQAILGMDVLCQAKSGMGKTAVFVLATLQQIEPVNGQVTVLVMCHTRELAFQISKEYERFSKYMPSVKVSVFFGGLSIKKDEEVLKKNCPHVVVGTPGRILALVRNRSFSLKNVKHFVLDECDKMLEQLDMRRDVQEIFRLTPHEKQCMMFSATLSKDIRPVCRKFMQDPMEVFVDDETKLTLHGLQQYYVKLKDSEKNRKLFDLLDVLEFNQVIIFVKSVQRCMALAQLLVEQNFPAIAIHRGMAQEERLSRYQQFKDFQRRILVATNLFGRGMDIERVNIVFNYDMPEDSDTYLHRVARAGRFGTKGLAITFVSDENDAKILNDVQDRFEVNVAELPEEIDISTYSKCLGQGQGSGAEGSSPGPSVHCISCLTVEQSR

SEQ ID NO: 823522 - protein, 442 aa, Homo sapiens
TRAPSSYGEERGASIMAEQDVENDLLDYDEEEEPQAPQESTPAPPKKDIKGSYVSIHSSGFRDFLLKPELLRAIVDCGFEHPSEVQHECIPQAILGMDVLCQAKSGMGKTAVFVLATLQQIEPVNGQVTVLVMCHTRELAFQISKEYERFSKYMPSVKVSVFFGGLSIKKDEEVLKKNCPHVVVGTPGRILALVRNRSFSLKNVKHFVLDECDKMLEQLDMRRDVQEIFRLTPHEKQCMMFSATLSKDIRPVCRKFMQDPMEVFVDDETKLTLHGLQQYYVKLKDSEKNRKLFDLLDVLEFNQVIIFVKSVQRCMALAQLLVEQNFPAIAIHRGMAQEERLSRYQQFKDFQRRILVATNLFGRGMDIERVNIVFNYDMPEDSDTYLHRVARAGRFGTKGLAITFVSDENDAKILNDVQDRFEVNVAELPEEIDISTYIEQSR

SEQ ID NO: 823523 - protein, 276 aa, Homo sapiens
AQQLVSERPAENRSWKCLLAARGEERGASIMAEQDVENDLLDYDEEEEPQAPQESTPAPPKKDIKGSYVSIHSSGFRDFLLKPELLRAIVDCGFEHPSEVQHECIPQAILGMDVLCQAKSGMGKTAVFVLATLQQIEPVNGQVTVLVMCHTRELAFQISKEYERFSKYMPSVKVSVFFGGLSIKKDEEVLKKNCPHVVVGTPGRILALVRNRSFSLKNVKHFVLDECDKMLEQLDMRRDVQEIFRLTPHEKQCMMFSATLSKDIRPVCRKFMQDCE

SEQ ID NO: 823524 - protein, 446 aa, Homo sapiens
MSVRDLSSALDMRVSCIIATMHVKVSLMCRSIPMMSRINFERARVNSPPKKDIKGSYVSIHSSGFRDFLLKPELLRAIVDCGFEHPSEVQHECIPQAILGMDVLCQAKSGMGKTAVFVLATLQQIEPVNGQVTVLVMCHTRELAFQISKEYERFSKYMPSVKVSVFFGGLSIKKDEEVLKKNCPHVVVGTPGRILALVRNRSFSLKNVKHFVLDECDKMLEQLDMRRDVQEIFRLTPHEKQCMMFSATLSKDIRPVCRKFMQDPMEVFVDDETKLTLHGLQQYYVKLKDSEKNRKLFDLLDVLEFNQVIIFVKSVQRCMALAQLLVEQNFPAIAIHRGMAQEERLSRYQQFKDFQRRILVATNLFGRGMDIERVNIVFNYDMPEDSDTYLHRVARAGRFGTKGLAITFVSDENDAKILNDVQDRFEVNVAELPEEIDISTYIEQSR

SEQ ID NO: 823525 - protein, 567 aa, Homo sapiens
AQQLVSERPAENRSWKCLLAARGEERGASIMAEQDVENDLLDYDEEEEPQAPQESTPAPPKKDIKGSYVSIHSSGFRDFLLKPELLRAIVDCGFEHPSEVQHECIPQAILGMDVLCQAKSGMGKTAVFVLATLQQIEPVNGQVTVLVMCHTRELAFQISKEYERFSKYMPSVKVSPSGQTGPGATWFLQLFSLGSGPASIYQAWQGQLPLRFAVVLLLKSLMNYAWLPGACAGPSLGLPLSGAPGGSQACLGPLRPPVRRCWAVQVGALGRVSAWSGFLLIPIVSVFFGGLSIKKDEEVLKKNCPHVVVGTPGRILALVRNRSFSLKNVKHFVLDECDKMLEQLDMRRDVQEIFRLTPHEKQCMMFSATLSKDIRPVCRKFMQDPMEVFVDDETKLTLHGLQQYYVKLKDSEKNRKLFDLLDVLEFNQVIIFVKSVQRCMALAQLLVEQNFPAIAIHRGMAQEERLSRYQQFKDFQRRILVATNLFGRGMDIERVNIVFNYDMPEDSDTYLHRVARAGRFGTKGLAITFVSDENDAKILNDVQDRFEVNVAELPEEIDISTYIEQSR

SEQ ID NO: 823526 - protein, 222 aa, Homo sapiens; identical to SEQ ID NO: 823509

SEQ ID NO: 823527 - protein, 222 aa, Homo sapiens; identical to SEQ ID NO: 823509

SEQ ID NO: 823528 - protein, 392 aa, Homo sapiens
GGRLLSGLHGRPAGGAPVVILGKALLLAEGCAVSEPEPNGTTGPKQAPVPPGRKGMHTYLWEYEASATCWVGSRPRLPSVSPDRAGGRWACVLGGSCSSHPSGCLCLRLPSLKRGSRRTGTAAPRQRVSGLQLLPRLRSLATPQPLRHQDWPLPRLTLPSSRCHWLPGTDMRRDVQEIFRLTPHEKQCMMFSATLSKDIRPVCRKFMQDPMEVFVDDETKLTLHGLQQYYVKLKDSEKNRKLFDLLDVLEFNQVIIFVKSVQRCMALAQLLVEQNFPAIAIHRGMAQEERLSRYQQFKDFQRRILVATNLFGRGMDIERVNIVFNYDMPEDSDTYLHRVARAGRFGTKGLAITFVSDENDAKILNDVQDRFEVNVAELPEEIDISTYIEQSR

SEQ ID NO: 823529 - protein, 182 aa, Homo sapiens [sequence omitted]

SEQ ID NO: 823530 - protein, 305 aa, Homo sapiens
AQQLVSERPAENRSWKCLLAARGEERGASIMAEQDVENDLLDYDEEEEPQAPQESTPAPPKKDIKGSYVSIHSSGFRDFLLKPELLRAIVDCGFEHPSEVQHECIPQAILGMDVLCQAKSGMGKTAVFVLATLQQIEPVNGQVTVLVMCHTRELAFQISKEYERFSKYMPSVKDEEVLKKNCPHVVVGTPGRILALVRNRSFSLKNVKHFVLDECDKMLEQLDMRRDVQEIFRLTPHEKQCMMFSACHAISSSRISSGGSWWPPICLAGGWTSSESTSSLTTTCLRTRTPTCTGWPGRVALAPKA

SEQ ID NO: 823531 - protein, 108 aa, Homo sapiens
AQQLVSERPAENRSWKCLLAARGEERGASIMAEQDVENDLLDYDEEDLILSACQVARAGRFGTKGLAITFVSDENDAKILNDVQDRFEVNVAELPEEIDISTYIEQSR

SEQ ID NO: 823532 - protein, 554 aa, Homo sapiens
LERPAQRCCRSRWKKRKKMALTSFLPAPTQLSQDQLEAEEKARSQRSRQTSLVSSRREPPPYGYRKGWIPRLLEDFGDGGAFPEIHVAQYPLDMGRKKKMSNALAIQVDSEGKIKYDAIARQGQSKDKVIYSKYTDLVPKEVMNADDPDLQRPDEEAIKEITEKTRVALEKSVSQKVAAAMPVRAADKLAPAQYIRYTPSQQGVAFNSGAKQRVIRMVEMQKDPMEPPRFKINKKIPRGPPSPPAPVMHSPSRKMTVKEQQEWKIPPCISNWKNAKGYTIPLDKRLAADGRGLQTVHINENFAKLAEALYIADRKAREAVEMRAQVERKMAQKEKEKHEEKLREMAQKARERRAGIKTHVEKEDGEARERDEIRHDRRKERQHDRNLSRAAPDKRSKLQRNENRDISEVIALGVPNPRTSNEVQYDQRLFNQSKGMDSGFAGGEDEIYNVYDQAWRGGKDMAQSIYRPSKNLDKDMYGDDLEARIKTNRFVPDKEFSGSDRRQRGREGPVQFEEDPFGLDKFLEEAKQHGGSKRPSDSSRPKEHEHEGKKRRKE

SEQ ID NO: 823533 - protein, 247 aa, Homo sapiens
GKTRPAVLSLALEEAEEDGAHQLSQDQLEAEEKARSQRSRQTSLVSSRREPPPYGYRKGWIPRLLEDFGDGGAFPEIHVAQYPLDMGRKKKMSNALAIQVDSEGKIKYDAIARQGQSKDKVIYSKYTDLVPKEVMNADDPDLQRPDEEAIKEITEKTRVALEKSVSQKVAAAMPVRAADKLAPAQYIRYTPSQQGVAFNSGAKQRVIRMVEMQKDPMEPPRFKIYKKIPPGTNIFLQRRLKSFLSGR

SEQ ID NO: 823534 - protein, 412 aa, Homo sapiens
MNADDPDLQRPDEEAIKEITEKTRVALEKSVSQKVAAAMPVRAADKLAPAQYIRYTPSQQGVAFNSGAKQRVIRMVEMQKDPMEPPRFKINKKIPRGPPSPPAPVMHSPSRKMTVKEQQEWKIPPCISNWKNAKGYTIPLDKRLAADGRGLQTVHINENFAKLAEALYIADRKAREAVEMRAQVERKMAQKEKEKHEEKLREMAQKARERRAGIKTHVEKEDGEARERDEIRHDRRKERQHDRNLSRAAPDKRSKLQRNENRDISEVIALGVPNPRTSNEVQYDQRLFNQSKGMDSGFAGGEDEIYNVYDQAWRGGKDMAQSIYRPSKNLDKDMYGDDLEARIKTNRFVPDKEFSGSDRRQRGREGPVQFEEDPFGLDKFLEEAKQHGGSKRPSDSSRPKEHEHEGKKRRKE

SEQ ID NO: 823535 - protein, 461 aa, Homo sapiens
MRNGPESQGKKSWDQNSCGKIKYDAIARQGQSKDKVIYSKYTDLVPKEVMNADDPDLQRPDEEAIKEITEKTRVALEKSVSQKVAAAMPVRAADKLAPAQYIRYTPSQQGVAFNSGAKQRVIRMVEMQKDPMEPPRFKINKKIPRGPPSPPAPVMHSPSRKMTVKEQQEWKIPPCISNWKNAKGYTIPLDKRLAADGRGLQTVHINENFAKLAEALYIADRKAREAVEMRAQVERKMAQKEKEKHEEKLREMAQKARERRAGIKTHVEKEDGEARERDEIRHDRRKERQHDRNLSRAAPDKRSKLQRNENRDISEVIALGVPNPRTSNEVQYDQRLFNQSKGMDSGFAGGEDEIYNVYDQAWRGGKDMAQSIYRPSKNLDKDMYGDDLEARIKTNRFVPDKEFSGSDRRQRGREGPVQFEEDPFGLDKFLEEAKQHGGSKRPSDSSRPKEHEHEGKKRRKE

SEQ ID NO: 823536 - protein, 410 aa, Homo sapiens
  misc_feature (7)..(7): Xaa can be any naturally occurring amino acid
  misc_feature (11)..(11): Xaa can be any naturally occurring amino acid
  misc_feature (13)..(13): Xaa can be any naturally occurring amino acid
MKKKQKXKKRXRXIKEITEKTRVALEKSVSQKVAAAMPVRAADKLAPAQYIRYTPSQQGVAFNSGAKQRVIRMVEMQKDPMEPPRFKINKKIPRGPPSPPAPVMHSPSRKMTVKEQQEWKIPPCISNWKNAKGYTIPLDKRLAADGRGLQTVHINENFAKLAEALYIADRKAREAVEMRAQVERKMAQKEKEKHEEKLREMAQKARERRAGIKTHVEKEDGEARERDEIRHDRRKERQHDRNLSRAAPDKRSKLQRNENRDISEVIALGVPNPRTSNEVQYDQRLFNQSKGMDSGFAGGEDEIYNVYDQAWRGGKDMAQSIYRPSKNLDKDMYGDDLEARIKTNRFVPDKEFSGSDRRQRGREGPVQFEEDPFGLDKFLEEAKQHGGSKRPSDSSRPKEHEHEGKKRRKE

SEQ ID NO: 823537 - protein, 447 aa, Homo sapiens
LERPAQRCCRSRWKKRKKMALTSFLPAPTQLSQDQLEAEEKARSQRSRQTSLVSSRREPPPYGYRKGWIPRLLEDFGDGGAFPEIHVAQYPLDMGRKKKMSNALAIQVDSEGKIKYDAIARQGQSKDKVIYSKYTDLVPKEVMNADDPDLQRPDEEAIKEITEKTRVALEKSVSQKVAAAMPVRAADKLAPAQYIRYTPSQQGVAFNSGAKQRVIRMVEMQKDPMEPPRFKINKKIPRGPPSPPAPVMHSPSRKMTVKEQQEWKIPPCISNWKNAKGYTIPLDKRLAADGRGLQTVHINENFAKLAEALYIADRKAREAVEMRAQVERKMAQKEKEKHEEKLREMAQKARERRAGIKTHVEKEDGEARERDEIRHDRRKERQHDRNLSRAAPDKRSKLQRNENRDISEVIALGVPNPRTSNEVQYDQRLFNQSKGMPVDLRWRKMKF

SEQ ID NO: 823538 - protein, 47 aa, Homo sapiens
ITEKTRVALEKSVSQKVAAAMPVRAADKLAPAQYIRYESCLEDLVSF

SEQ ID NO: 823539 - protein, 448 aa, Homo sapiens
LERPAQRCCRSRWKKRKKMALTSFLPAPTQLSQDQLEAEEKARSQRSRQTSLVSSRREPPPYGYRKGWIPRLLEDFGDGGAFPEIHVAQYPLDMGRKKKMSNALAIQVDSEGKIKYDAIARQGQSKDKVIYSKYTDLVPKEVMNADDPDLQRPDEEAIKEITEKTRVALEKSVSQKVAAAMPVRAADKLAPAQYIRYTPSQQGVAFNSGAKQRVIRMVEMQKDPMEPPRFKINKKIPRGPPSPPAPVMHSPSRKMTVKEQQEWKIPPCISNWKNAKGYTIPLDKRLAADGRGLQTVHINENFAKLAEALYIADRKAREAVEMRAQVERKMAQKEKEKHEEKLREMAQKARERRAGIKTHVEKGRNFREMKIGISVKLLLSVFLILGLPMKFSMTKGSSTNPRVWTVDLQVEKMKFIMFMIKPGEVVKIWPRVFIGPVKIWTRTCMVMT

SEQ ID NO: 823540 - protein, 541 aa, Homo sapiens
LERPAQRCCRSRWKKRKKMALTSFLPAPTQLSQDQLEAEEKARSQRSRQTSLVSSRREPPPYGYRKGWIPRLLEDFGDGGAFPEIHVAQYPLDMGRKKKMSNALAIQVDSEGKIKYDAIARQGQSKDKVMNADDPDLQRPDEEAIKEITEKTRVALEKSVSQKVAAAMPVRAADKLAPAQYIRYTPSQQGVAFNSGAKQRVIRMVEMQKDPMEPPRFKINKKIPRGPPSPPAPVMHSPSRKMTVKEQQEWKIPPCISNWKNAKGYTIPLDKRLAADGRGLQTVHINENFAKLAEALYIADRKAREAVEMRAQVERKMAQKEKEKHEEKLREMAQKARERRAGIKTHVEKEDGEARERDEIRHDRRKERQHDRNLSRAAPDKRSKLQRNENRDISEVIALGVPNPRTSNEVQYDQRLFNQSKGMDSGFAGGEDEIYNVYDQAWRGGKDMAQSIYRPSKNLDKDMYGDDLEARIKTNRFVPDKEFSGSDRRQRGREGPVQFEEDPFGLDKFLEEAKQHGGSKRPSDSSRPKEHEHEGKKRRKE

SEQ ID NO: 823541 - protein, 554 aa, Homo sapiens; identical to SEQ ID NO: 823532

SEQ ID NO: 823542 - protein, 255 aa, Homo sapiens
LERPAQRCCRSRWKKRKKMALTSFLPAPTQLSQDQLEAEEKARSQRSRQTSLVSSRREPPPYGYRKGWIPRLLEDFGDGGAFPEIHVAQYPLDMGRKKKMSNALAIQVDSEGKIKYDAIARQGQSKDKVIYSKYTDLVPKEVMNADDPDLQRPDEEAIKEITEKTRVALEKSVSQKVAAAMPVRAADKLAPAQYIRYTPSQQGVAFNSGAKQRVIRMVEMQKDPMEPPRFKIYKKIPPGTNIFLQRRLKSFLSGR

SEQ ID NO: 823543 - protein, 414 aa, Homo sapiens
MHYCVLSAFLILHLVTVALSLSTCSTLDMDQFMRKRIEAIRGQILSKLKLTSPPEDYPEPEEVPPEVISIYNSTRDLLQEKASRRAAACERERSDEEYYAKEVYKIDMPPFFPSENAIPPTFYRPYFRIVRFDVSAMEKNASNLVKAEFRVFRLQNPKARVPEQRIELYQILKSKDLTSPTQRYIDSKVVKTRAEGEWLSFDVTDAVHEWLHHKDRNLGFKISLHCPCCTFVPSNNYIIPNKSEELEARFAGIDGTSTYTSGDQKTIKSTRKKNSGKTPHLLLMLLPSYRLESQQTNRRKKRALDAAYCFRNVQDNCCLRPLYIDFKRDLGWKWIHEPKGYNANFCAGACPYLWSSDTQHSRVLSLYNTINPEASASPCCVSQDLEPLTILYYIGKTPKIEQLSNMIVKSCKCS

SEQ ID NO: 823544 - protein, 414 aa, Homo sapiens; identical to SEQ ID NO: 823543

SEQ ID NO: 823545 - protein, 262 aa, Homo sapiens
  misc_feature (10)..(10): Xaa can be any naturally occurring amino acid
LNNKTEAKTXFKTKSKSLILKSKDLTSPTQRYIDSKVVKTRAEGEWLSFDVTDAVHEWLHHKDRNLGFKISLHCPCCTFVPSNNYIIPNKSEELEARFAGIDGTSTYTSGDQKTIKSTRKKNSGKTPHLLLMLLPSYRLESQQTNRRKKRALDAAYCFRNVQDNCCLRPLYIDFKRDLGWKWIHEPKGYNANFCAGACPYLWSSDTQHSRVLSLYNTINPEASASPCCVSQDLEPLTILYYIGKTPKIEQLSNMIVKSCKCS

SEQ ID NO: 823546 - protein, 264 aa, Homo sapiens
  misc_feature (20)..(20): Xaa can be any naturally occurring amino acid
SYTELFLDNSDLTRRHPAFXILKSKDLTSPTQRYIDSKVVKTRAEGEWLSFDVTDAVHEWLHHKDRNLGFKISLHCPCCTFVPSNNYIIPNKSEELEARFAGIDGTSTYTSGDQKTIKSTRKKNSGKTPHLLLMLLPSYRLESQQTNRRKKRALDAAYCFRNVQDNCCLRPLYIDFKRDLGWKWIHEPKGYNANFCAGACPYLWSSDTQHSRVLSLYNTINPEASASPCCVSQDLEPLTILYYIGKTPKIEQLSNMIVKSCKCS

SEQ ID NO: 823547 - protein, 247 aa, Homo sapiens
MYLILKSKDLTSPTQRYIDSKVVKTRAEGEWLSFDVTDAVHEWLHHKDRNLGFKISLHCPCCTFVPSNNYIIPNKSEELEARFAGIDGTSTYTSGDQKTIKSTRKKNSGKTPHLLLMLLPSYRLESQQTNRRKKRALDAAYCFRNVQDNCCLRPLYIDFKRDLGWKWIHEPKGYNANFCAGACPYLWSSDTQHSRVLSLYNTINPEASASPCCVSQDLEPLTILYYIGKTPKIEQLSNMIVKSCKCS

SEQ ID NO: 823548 - protein, 442 aa, Homo sapiens
MHYCVLSAFLILHLVTVALSLSTCSTLDMDQFMRKRIEAIRGQILSKLKLTSPPEDYPEPEEVPPEVISIYNSTRDLLQEKASRRAAACERERSDEEYYAKEVYKIDMPPFFPSETVCPVVTTPSGSVGSLCSRQSQVLCGYLDAIPPTFYRPYFRIVRFDVSAMEKNASNLVKAEFRVFRLQNPKARVPEQRIELYQILKSKDLTSPTQRYIDSKVVKTRAEGEWLSFDVTDAVHEWLHHKDRNLGFKISLHCPCCTFVPSNNYIIPNKSEELEARFAGIDGTSTYTSGDQKTIKSTRKKNSGKTPHLLLMLLPSYRLESQQTNRRKKRALDAAYCFRNVQDNCCLRPLYIDFKRDLGWKWIHEPKGYNANFCAGACPYLWSSDTQHSRVLSLYNTINPEASASPCCVSQDLEPLTILYYIGKTPKIEQLSNMIVKSCKCS

SEQ ID NO: 823549 - protein, 414 aa, Homo sapiens; identical to SEQ ID NO: 823543

SEQ ID NO: 823550 - protein, 165 aa, Homo sapiens
MHYCVLSAFLILHLVTVALSLSTCSTLDMDQFMRKRIEAIRGQILSKLKLTSPPEDYPEPEEVPPEVISIYNSTRDLLQEKASRRAAACERERSDEEYYAKEVYKIDMPPFFPSETVCPVVTTPSGSVGSLCSRQSQVLCGYLDAIPPTFYRPYFRIVLFVKTGI

SEQ ID NO: 823551 - protein, 261 aa, Homo sapiens
  misc_feature (14)..(15): Xaa can be any naturally occurring amino acid
  misc_feature (17)..(17): Xaa can be any naturally occurring amino acid
SILQYFAKMMRTKXXLXILKSKDLTSPTQRYIDSKVVKTRAEGEWLSFDVTDAVHEWLHHKDRNLGFKISLHCPCCTFVPSNNYIIPNKSEELEARFAGIDGTSTYTSGDQKTIKSTRKKNSGKTPHLLLMLLPSYRLESQQTNRRKKRALDAAYCFRNVQDNCCLRPLYIDFKRDLGWKWIHEPKGYNANFCAGACPYLWSSDTQHSRVLSLYNTINPEASASPCCVSQDLEPLTILYYIGKTPKIEQLSNMIVKSCKCS

SEQ ID NO: 823552 - protein, 241 aa, Homo sapiens
MHYCVLSAFLILHLVTVALSLSTCSTLDMDQFMRKRIEAIRGQILSKLKLTSPPEDYPEPEEVPPEVISIYNSTRDLLQEKASRRAAACERERSDEEYYAKEVYKIDMPPFFPSENAIPPTFYRPYFRIVRFDVSAMEKNASNLVKAEFRVFRLQNPKARVPEQRIELYQILKSKDLTSPTQRYIDSKVVKTRAEGEWLSFDVTDAVHEWLHHKGYKPLSLFLPRCSVSLSYFKLIADLRV

SEQ ID NO: 823553 - protein, 88 aa, Homo sapiens
ASPARACALGDLSELAADLWCVLSRLSCAKMLQSIIKNIWIPMKPYYTKVYQEIWIGMGLMGFIVYKIRAADKRSKALKASAPAPGHH

SEQ ID NO: 823554 - protein, 58 aa, Homo sapiens
MLQSIIKNIWIPMKPYYTKVYQEIWIGMGLMGFIVYKIRAADKRSKALKASAPAPGHH

SEQ ID NO: 823555 - protein, 58 aa, Homo sapiens; identical to SEQ ID NO: 823554

SEQ ID NO: 823556 - protein, 129 aa, Homo sapiens
ASPARACALGDLSELAADLWCVLSRLSCAKMLQSIIKNIWIPMKPYYTKVYQEIWIGMGLMGFIVYKIRAAEMGFCHVTQAGLEFLGSSSPPILASQSAGINKREPQHLAQLGNFEQDFNIRIIKEVRL

SEQ ID NO: 823557 - protein, 107 aa, Homo sapiens
ASPARACALGDLSELAADLWCVLSRLSCAKMLQSIIKNIWIPMKPYYTKVYQEIWIGMGLMGFIVYKIRAADKRSKALKGKIFASENGWEWKTASCLFRTRYIVVLN

SEQ ID NO: 823558 - protein, 88 aa, Homo sapiens; identical to SEQ ID NO: 823553

SEQ ID NO: 823559 - protein, 88 aa, Homo sapiens; identical to SEQ ID NO: 823553

SEQ ID NO: 823560 - protein, 116 aa, Homo sapiens
MKLYGTRGSDISHFQCQMLQSIIKNIWIPMKPYYTKVYQEIWIGMGLMGFIVYKIRAAEMGFCHVTQAGLEFLGSSSPPILASQSAGINKREPQHLAQLGNFEQDFNIRIIKEVRL

SEQ ID NO: 823561 - protein, 88 aa, Homo sapiens; identical to SEQ ID NO: 823553

SEQ ID NO: 823562 - protein, 129 aa, Homo sapiens; identical to SEQ ID NO: 823556

SEQ ID NO: 823563 - protein, 107 aa, Homo sapiens; identical to SEQ ID NO: 823557

SEQ ID NO: 823564 - protein, 147 aa, Homo sapiens; identical to SEQ ID NO: 754319

SEQ ID NO: 823565 - protein, 69 aa, Homo sapiens
LGIAVPALLCPVTGLFALCSRVPQAATQWAHSQAALRPRAPSLCLSFPAVNILEALKLRKEEKSTENSL

SEQ ID NO: 823566 - protein, 147 aa, Homo sapiens; identical to SEQ ID NO: 754319

SEQ ID NO: 823567 - protein, 154 aa, Homo sapiens [sequence omitted]

SEQ ID NO: 823568 - protein, 69 aa, Homo sapiens; identical to SEQ ID NO: 823565

SEQ ID NO: 823569 - protein, 374 aa, Homo sapiens
MESLLQHLDRFSELLAVSSTTYVSTWDPATVRRALQWARYLRHIHRRFGRHGPIRTALERRLHNQWRQEGGFGRGPVPGLANFQALGHCDVLLSLRLLENRALGDAARYHLVQQLFPGPGVRDADEETLQESLARLARRRSAVHMLRFNGYRENPNLQEDSLMKTQAELLLERLQEVGKAEAERPARFLSSLWERLPQNNFLKVIAVALLQPPLSRRPQEELEPGIHKSPGEGSQVLVHWLLGNSEVFAAFCRALPAGLLTLVTSRHPALSPVYLGLLTDWGQRLHYDLQKGIWVGTESQDVPWEELHNRFQSLCQAPPPLKDKVLTALETCKAQDGDFEVPGLSIWTDLLLALRSGAFRKRQVLGLSAGLSSV

SEQ ID NO: 823570 - protein, 374 aa, Homo sapiens; identical to SEQ ID NO: 823569

SEQ ID NO: 823571 - protein, 374 aa, Homo sapiens; identical to SEQ ID NO: 823569

SEQ ID NO: 823572 - protein, 374 aa, Homo sapiens; identical to SEQ ID NO: 823569

SEQ ID NO: 823573 - protein, 374 aa, Homo sapiens; identical to SEQ ID NO: 823569

SEQ ID NO: 823574 - protein, 377 aa, Homo sapiens
AKQQLNLRTHMADENKNEYAAQLQNFNGEQHKHFYVVIPQIYKQLQEMDERRTIKLSECYRGFADSERKVIPIISKCLEGMILAAKSVDERRDSQMVVDSFKSGFEPPGDFPFEDYSQHIYRTISDGTISASKQESGKMDAKTTVGKAKGKLWLFGKKPKGPALEDFSHLPPEQRRKKLQQRIDELNRELQKESDQKDALNKMKDVYEKNPQMGDPGSLQPKLAETMNNIDRLRMEIHKNEAWLSEVEGKTGGRGDRRHSSDINHLVTQGRESPEGSYTDDANQEVRGPPQQHGHHNEFDDEFEDDDPLPAIGHCKAIYPFDGHNEGTLAMKEGEVLYIIEEDKGDGWTRARRQNGEEGYVPTSYIDVTLEKNSKGS

SEQ ID NO: 823575 - protein, 439 aa, Homo sapiens
AKQQLNLRTHMADENKNEYAAQLQNFNGEQHKHFYVVIPQIYKQLQEMDERRTIKLSECYRGFADSERKVIPIISKCLEGMILAAKSVDERRDSQMVVDSFKSGFEPPGDFPFEDYSQHIYRTISDGTISASKQESGKMDAKTTVGKAKGKLWLFGKKPKPQSPPLTPTSLFTSSTPNGSQFLTFSIEPVHYCMNEIKTGKPRIPSFRSLKRGVSLKWGPALEDFSHLPPEQRRKKLQQRIDELNRELQKESDQKDALNKMKDVYEKNPQMGDPGSLQPKLAETMNNIDRLRMEIHKNEAWLSEVEGKTGGRGDRRHSSDINHLVTQGRESPEGSYTDDANQEVRGPPQQHGHHNEFDDEFEDDDPLPAIGHCKAIYPFDGHNEGTLAMKEGEVLYIIEEDKGDGWTRARRQNGEEGYVPTSYIDVTLEKNSKGAVTYI

SEQ ID NO: 823576 - protein, 377 aa, Homo sapiens; identical to SEQ ID NO: 823574

SEQ ID NO: 823577 - protein, 221 aa, Homo sapiens
AKQQLNLRTHMADENKNEYAAQLQNFNGEQHKHFYVVIPQIYKQLQEMDERRTIKLSECYRGFADSERKVIPIISKCLEGMILAAKSVDERRDSQMVVDSFKSGFEPPGDFPFEDYSQHIYRTISDGTISASKQESGKMDAKTTVGKAKGKLWLFGKKPKLGAQQLVDIYSYANSTETVKVDHRRYFDERNRRSRQGSTPADAIYACIQVELKRNHKQANL

SEQ ID NO: 823578 - protein, 381 aa, Homo sapiens
AKQQLNLRTHMADENKNEYAAQLQNFNGEQHKHFYVVIPQIYKQLQEMDERRTIKLSECYRGFADSERKVIPIISKCLEGMILAAKSVDERRDSQMVVDSFKSGFEPPGDFPFEDYSQHIYRTISDGTISASKQESGKMDAKTTVGKAKGKLWLFGKKPKGPALEDFSHLPPEQRRKKLQQRIDELNRELQKESDQKDALNKMKDVYEKNPQMGDPGSLQPKLAETMNNIDRLRMEIHKNEAWLSEVEGKTGGRGDRRHSSDINHLVTQGRESPEGSYTDDANQEVRGPPQQHGHHNEFDDEFEDDDPLPAIGHCKAIYPFDGHNEGTLAMKEGEVLYIIEEDKGDGWTRARRQNGEEGYVPTSYIDVTLEKNSKGAVTYI

SEQ ID NO: 823579 - protein, 377 aa, Homo sapiens; identical to SEQ ID NO: 823574

SEQ ID NO: 823580 - protein, 273 aa, Homo sapiens
AKQQLNLRTHMADENKNEYAAQLQNFNGEQHKHFYVVIPQIYKQLQEMDERRTIKLSECYRGFADSERKVIPIISKCLEGMILAAKSVDERRDSQMVVDSFKSGFEPPGDFPFEDYSQHIYRTISDGTISASKQESGKMDAKTTVGKAKGKLWLFGKKPKGPALEDFSHLPPEQRRKKLQQRIDELNRELQKESDQKDALNKMKDVYEKNPQMGDPGSLQPKLAETMNNIDRLRMEIHKNEAWLSEVEGKTGGRGDRRHSSDINHLVTQGRER

SEQ ID NO: 823581 - protein, 425 aa, Homo sapiens
LQRDGFLELRRLSVPLCSGPCPLTSLSRQGERSGGHLVAAARAAVTAETHPLPLLAPLAVCQSVKSPAACQVRPRPRAVALPAALGGPGRSLPGLTAATMSSFSESALEKKLSELSNSQQSVQTLSLWLIHHRKHAGPIVSVWHRELRKAKSNRKLTFLYLANDVIQNSKRKGPEFTREFESVLVDAFSHVAREADEGCKKPLERLLNIWQERSVYGGEFIQQLKLSMEDSKSPPPKATEEKKSLKRTFQQIQEEEDDDYPGSYSPQDPSAGPLLTEELIKALQDLENAASGDATVRQKIASLPQEVQDVSLLEKITDKEAAERLSKTVDEACLLLAEYNGRLAAELEDRRQLARMLVEYTQNQKDVLSEKEKKLEEYKQKLARVTQVRKELKSHIQSLPDLSLLPNVTGGLAPLPSAGDLFSTD

SEQ ID NO: 823582 - protein, 384 aa, Homo sapiens
LQRDGFLELRRLSVPLCSGPCPLTSLSRQGERSGGHLVAAARAAVTAETHPLPLLAPLAVCQSVKSPAACQVRPRPRAVALPAALGGPGRSLPGLTAATMSSFSESALEKKLSELSNSQQSVQTLSLWLIHHRKHAGPIVSVWHRELRKAKSNRKLTFLYLANDVIQNSKRKGPEFTREFESVLVDAFSHVAREADEGCKKPLERLLNIWQERSVYGGEFIQQLKLSMEDSKSPPPKATEEKKSLKRTFQQIQEEEDDDYPGSYSPQDPSAGPLLTEELIKALQDLENAASGDATVRQKIASLPQEVQDVSLLEKITDKEAAERLSKTVDEACLLLAEYNGRLAAELEDRRQLARMLVEYTQNQKDVLSEKEKKLEGVMIDFGL

SEQ ID NO: 823583 - protein, 425 aa, Homo sapiens; identical to SEQ ID NO: 823581

SEQ ID NO: 823584 - protein, 425 aa, Homo sapiens; identical to SEQ ID NO: 823581

SEQ ID NO: 823585 - protein, 425 aa, Homo sapiens; identical to SEQ ID NO: 823581

SEQ ID NO: 823586 - protein, 382 aa, Homo sapiens
MWSGPPQPDQGLPPPLAAVPVPWKSTDPCQGHRESPGALVETSAGEEAQGQEGPAAAQLDVLRLRSSSMEIREKGSEFLKEELHRAQKELKLKDEECERLSKVREQLEQELEELTASLFEEAHKMVREANMKQAASEKQLKEARGKIDMLQAEVTALKTLVITSTPASPNRELHPQLLSPTKAGPRKGHSRHKSTSSTLCPAVCPAAGHTLTPDREGKEVDTILFAEFQAWRESPTLDKTCPFLERVYREDVGPCLDFTMQELSVLVRAAVEDNTLTIEPVASQTLPTVKVAEVDCSSTNTCALSGLTRTCRHRIRLGDSKSHYYISPSSRARITAVCNFFTYIRYIQQGLVRQDAEPMFWEIMRLRKEMSLAKLGFFPQEA

SEQ ID NO: 823587 - protein, 388 aa, Homo sapiens
MDSARLQSASPPQPDQGLPPPLAAVPVPWKSTDPCQGHRESPGALVETSAGEEAQGQEGPAAAQLDVLRLRSSSMEIREKGSEFLKEELHRAQKELKLKDEECERLSKVREQLEQELEELTASLFEEAHKMVREANMKQAASEKQLKEARGKIDMLQAEVTALKTLVITSTPASPNRELHPQLLSPTKAGPRKGHSRHKSTSSTLCPAVCPAAGHTLTPDREGKEVDTILFAEFQAWRESPTLDKTCPFLERVYREDVGPCLDFTMQELSVLVRAAVEDNTLTIEPVASQTLPTVKVAEVDCSSTNTCALSGLTRTCRHRIRLGDSKSHYYISPSSRARITAVCNFFTYIRYIQQGLVRQDAEPMFWEIMRLRKEMSLAKLGFFPQEA

SEQ ID NO: 823588 - protein, 382 aa, Homo sapiens; identical to SEQ ID NO: 823586

SEQ ID NO: 823589 - protein, 382 aa, Homo sapiens
PGGGKKAPATSLPGTLQRDPQSGLASMDSSEEHAGCPARGTCPVFLAMSAGTVRYAPSGLCPVLEGNLREEPWGTDSPPQPDQGLPPPLAAVPVPWKSTDPCQGHRESPGALVETSAGEEAQGQEGPAAAQLDVLRLRSSSMEIREKGSEFLKEELHRAQKELKLKDEECERLSKVREQLEQELEELTASLFEEAHKMVREANMKQAASEKQLKEARGKVDTILFAEFQAWRESPTLDKTCPFLERVYREDVGPCLDFTMQELSVLVRAAVEDNTLTIEPVASQTLPTVKVAEVDCSSTNTCALSGLTRTCRHRIRLGDSKSHYYISPSSRARITAVCNFFTYIRYIQQGLVRQDAEPMFWEIMRLRKEMSLAKLGFFPQEA

SEQ ID NO: 823590 - protein, 134 aa, Homo sapiens
PAPYHPACLPGLPQLSVLVRAAVEDNTLTIEPVASQTLPTVKVAEVDCSSTNTCALSGLTRTCRHRIRLGDSKSHYYISPSSRARITAVCNFFTYIRYIQQGLVRQDAEPMFWEIMRLRKEMSLAKLGFFPQEA

SEQ ID NO: 823591 - protein, 455 aa, Homo sapiens
PGGGKKAPATSLPGTLQRDPQSGLASMDSSEEHAGCPARGTCPVFLAMSAGTVRYAPSGLCPVLEGNLREEPWGTDSPPQPDQGLPPPLAAVPVPWKSTDPCQGHRESPGALVETSAGEEAQGQEGPAAAQLDVLRLRSSSMEIREKGSEFLKEELHRAQKELKLKDEECERLSKVREQLEQELEELTASLFEEAHKMVREANMKQAASEKQLKEARGKIDMLQAEVTALKTLVITSTPASPNRELHPQLLSPTKAGPRKGHSRHKSTSSTLCPAVCPAAGHTLTPDREGKEVDTILFAEFQAWRESPTLDKTCPFLERVYREDVGPCLDFTMQELSVLVRAAVEDNTLTIEPVASQTLPTVKVAEVDCSSTNTCALSGLTRTCRHRIRLGDSKSHYYISPSSRARITAVCNFFTYIRYIQQGLVRQDAEPMFWEIMRLRKEMSLAKLGFFPQEA

SEQ ID NO: 823592 - protein, 392 aa, Homo sapiens
MWSGPPQPDQGLPPPLAAVPVPWKSTDPCQGHRESPGALVETSAGEEAQGQEGPAAAQLDVLRLRSSSMEIREKGSEFLKEELHRAQKELKLKDEECERLSKVREQLEQELEELTASLFEEAHKMVREANMKQAASEKQLKEARGKIDMLQAEVTALKTLVITSTPASPNRELHPQLLSPTKAGPRKGHSRHKSTSSTLCPAVCPAAGHTLTPDREGKEVDTILFAEFQAWRESPTLDKTCPFLERVYREDVGPCLDFTMQELSVLVRAAVEDNTLTIEPVASQTLPTVKVAEVDCSSTNTCALSGLTRTCRHRIRLGDSKSHYYISPSSRARITAVCNFFTYIRYIQQGLVRQDGGLGRGPGLKGSSETEQTPTPLWPSCALFPVASLLDY

SEQ ID NO: 823593 - protein, 127 aa, Homo sapiens
MEAALSQHHTSILGQTGLDFTARPPSLPHWVLPPPGGFQESTKDQGARIHTRGASALGRGHLRQPAPPPQSPELPAGALLLACLQKGTVLGGWISRVPSTPAAKPWASSTPLWPSCALFPVASLLDY

SEQ ID NO: 823594 - protein, 427 aa, Homo sapiens
MWSGPPQPDQGLPPPLAAVPVPWKSTDPCQGHRESPGALVETSAGEEAQGQEGPAAAQLDVLRLRSSSMEIREKGSEFLKEELHRAQKELKLKDEECERLSKVREQLEQELEELTASLFEEAHKMVREANMKQAASEKQLKEARGKIDMLQAEVTALKTLVITSTPASPNRELHPQLLSPTKAGPRKGHSRHKSTSSTLCPAVCPAAGHTLTPDREGKEVDTILFAEFQAWRESPTLDKTCPFLERVYREDVGPCLDFTMQELSVLVRAAVEDNTLTIEPVASQTLPTVKVAEVDCSSTNTCALSGLTRTCRHRIRLGDSKSHYYISPSSRARSRSVANFSPTFVNSARLVPEDAKPCPRQLNVRQEMSGTTGLSPGVGAAGPEGNLYNGANRPQKATPDDAPDPPYLSECVPTIDSFRRTLRSADT

SEQ ID NO: 823595 - protein, 963 aa, Homo sapiens
MADLAECNIKVMCRFRPLNESEVNRGDKYIAKFQGEDTVVIASKPYAFDRVFQSSTSQEQVYNDCAKKIVKDVLEGYNGTIFAYGQTSSGKTHTMEGKLHDPEGMGIIPRIVQDIFNYIYSMDENLEFHIKVSYFEIYLDKIRDLLDVSKTNLSVHEDKNRVPYVKGCTERFVCSPDEVMDTIDEGKSNRHVAVTNMNEHSSRSHSIFLINVKQENTQTEQKLSGKLYLVDLAGSEKVSKTGAEGAVLDEAKNINKSLSALGNVISALAEGSTYVPYRDSKMTRILQDSLGGNCRTTIVICCSPSSYNESETKSTLLFGQRAKTIKNTVCVNVELTAEQWKKKYEKEKEKNKILRNTIQWLENELNRWRNGETVPIDEQFDKEKANLEAFTVDKDITLTNDKPATAIGVIGNFTDAERRKCEEEIAKLYKQLDDKDEEINQQSQLVEKLKTQMLDQEELLASTRRDQDNMQAELNRLQAENDASKEEVKEVLQALEELAVNYDQKSQEVEDKTKEYELLSDELNQKSATLASIDAELQKLKEMTNHQKKRAAEMMASLLKDLAEIGIAVGNNDVKQPEGTGMIDEEFTVARLYISKMKSEVKTMVKRCKQLESTQTESNKKMEENEKELAACQLRISQHEAKIKSLTEYLQNVEQKKRQLEESVDALSEELVQLRAQEKVHEMEKEHLNKVQTANEVKQAVEQQIQSHRETHQKQISSLRDEVEAKAKLITDLQDQNQKMMLEQERLRVEHEKLKATDQEKSRKLHELTVMQDRREQARQDLKGLEETVAKELQTLHNLRKLFVQDLATRVKKSAEIDSDDTGGSAAQKQKISFLENNLEQLTKVHKQLVRDNADLRCELPKLEKRLRATAERVKALESALKEAKENASRDRKRYQQEVDRIKEAVRSKNMARRGHSAQIAKPIRPGQHPAASPTHPSAIRGGGAFVQNSQPVAVRGGGGKQV

SEQ ID NO: 823596 - protein, 963 aa, Homo sapiens; identical to SEQ ID NO: 823595

SEQ ID NO: 823597 - protein, 963 aa, Homo sapiens; identical to SEQ ID NO: 823595

SEQ ID NO: 823598 - protein, 939 aa, Homo sapiens
MADLAECNIKVMCRFRPLNESEVNRGDKYIAKFQGEDTVVIASKPYAFDRVFQSSTSQEQVYNDCAKKIVKDVLEGYNGTIFAYGQTSSGKTHTMEGKLHDPEGMGIIPRIVQDIFNYIYSMDENLEFHIKVSYFEIYLDKIRDLLDVSKTNLSVHEDKNRVPYVKGCTERFVCSPDEVMDTIDEGKSNRHVAVTNMNEHSSRSHSIFLINVKQENTQTEQKLSGKLYLVDLAGSEKVSKTGAEGAVLDEAKNINKSLSALGNVISALAEGSTYVPYRDSKMTRILQDSLGGNCRTTIVICCSPSSYNESETKSTLLFGQRAKTIKNTVCVNVELTAEQWKKKYEKEKEKNKILRNTIQWLENELNRWRNGETVPIDEQFDKEKANLEAFTVDKDITLTNDKPATAIGVIGNFTDAERRKCEEEIAKLYKQLDDKDEEINQQSQLVEKLKTQMLDQEELLASTRRDQDNMQAELNRLQAENDASKEEVKEVLQALEELAVNYDQKSQEVEDKTKEYELLSDELNQKSATLASIDAELQKLKEMTNHQKKRAAEMMASLLKDLAEIGIAVGNNDVKQPEGTGMIDEEFTVARLYISKMKSEVKTMVKRCKQLESTQTESNKKMEENEKELAACQLRISQHEAKIKSLTEYLQNVEQKKRQLEESVDALSEELVQLRAQEKVHEMEKEHLNKVQTANEVKQAVEQQIQSHRETHQKQISSLRDEVEAKAKLITDLQDQNQKMMLEQERLRVEHEKLKATDQEKSRKLHELTVMQDRREQARQDLKGLEETVSAEIDSDDTGGSAAQKQKISFLENNLEQLTKVHKQLVRDNADLRCELPKLEKRLRATAERVKALESALKEAKENASRDRKRYQQEVDRIKEAVRSKNMARRGHSAQIAKPIRPGQHPAASPTHPSAIRGGGAFVQNSQPVAVRGGGGKQV

SEQ ID NO: 823599 - protein, 963 aa, Homo sapiens; identical to SEQ ID NO: 823595

SEQ ID NO: 823600 - protein, 963 aa, Homo sapiens; identical to SEQ ID NO: 823595

SEQ ID NO: 823601 - protein, 682 aa, Homo sapiens
MTRILQDSLGGNCRTTIVICCSPSSYNESETKSTLLFGQRAKTIKNTVCVNVELTAEQWKKKYEKEKEKNKILRNTIQWLENELNRWRNGETVPIDEQFDKEKANLEAFTVDKDITLTNDKPATAIGVIGNFTDAERRKCEEEIAKLYKQLDDKDEEINQQSQLVEKLKTQMLDQEELLASTRRDQDNMQAELNRLQAENDASKEEVKEVLQALEELAVNYDQKSQEVEDKTKEYELLSDELNQKSATLASIDAELQKLKEMTNHQKKRAAEMMASLLKDLAEIGIAVGNNDVKQPEGTGMIDEEFTVARLYISKMKSEVKTMVKRCKQLESTQTESNKKMEENEKELAACQLRISQHEAKIKSLTEYLQNVEQKKRQLEESVDALSEELVQLRAQEKVHEMEKEHLNKVQTANEVKQAVEQQIQSHRETHQKQISSLRDEVEAKAKLITDLQDQNQKMMLEQERLRVEHEKLKATDQEKSRKLHELTVMQDRREQARQDLKGLEETVAKELQTLHNLRKLFVQDLATRVKKSAEIDSDDTGGSAAQKQKISFLENNLEQLTKVHKQLVRDNADLRCELPKLEKRLRATAERVKALESALKEAKENASRDRKRYQQEVDRIKEAVRSKNMARRGHSAQIAKPIRPGQHPAASPTHPSAIRGGGAFVQNSQPVAVRGGGGKQV

SEQ ID NO: 823602 - protein, 548 aa, Homo sapiens
  misc_feature (7)..(7): Xaa can be any naturally occurring amino acid
  misc_feature (9)..(9): Xaa can be any naturally occurring amino acid
FFLCVNXKXLKLFQTSLMTKDEEINQQSQLVEKLKTQMLDQEELLASTRRDQDNMQAELNRLQAENDASKEEVKEVLQALEELAVNYDQKSQEVEDKTKEYELLSDELNQKSATLASIDAELQKLKEMTNHQKKRAAEMMASLLKDLAEIGIAVGNNDVKQPEGTGMIDEEFTVARLYISKMKSEVKTMVKRCKQLESTQTESNKKMEENEKELAACQLRISQHEAKIKSLTEYLQNVEQKKRQLEESVDALSEELVQLRAQEKVHEMEKEHLNKVQTANEVKQAVEQQIQSHRETHQKQISSLRDEVEAKAKLITDLQDQNQKMMLEQERLRVEHEKLKATDQEKSRKLHELTVMQDRREQARQDLKGLEETVAKELQTLHNLRKLFVQDLATRVKKSAEIDSDDTGGSAAQKQKISFLENNLEQLTKVHKQLVRDNADLRCELPKLEKRLRATAERVKALESALKEAKENASRDRKRYQQEVDRIKEAVRSKNMARRGHSAQIAKPIRPGQHPAASPTHPSAIRGGGAFVQNSQPVAVRGGGGKQV

SEQ ID NO: 823603 - protein, 259 aa, Homo sapiens
SEMINLRENISLSIHHRAKYKALSSTLYTSSHQKQISSLRDEVEAKAKLITDLQDQNQKMMLEQERLRVEHEKLKATDQEKSRKLHELTVMQDRREQARQDLKGLEETVSAEIDSDDTGGSAAQKQKISFLENNLEQLTKVHKQLVRDNADLRCELPKLEKRLRATAERVKALESALKEAKENASRDRKRYQQEVDRIKEAVRSKNMARRGHSAQIAKPIRPGQHPAASPTHPSAIRGGGAFVQNSQPVAVRGGGGKQV

SEQ ID NO: 823604 - protein, 183 aa, Homo sapiens
SLVVTRTSDSRLLESDVLVSLDRGCELGRRSRESAEIDSDDTGGSAAQKQKISFLENNLEQLTKVHKQLVRDNADLRCELPKLEKRLRATAERVKALESALKEAKENASRDRKRYQQEVDRIKEAVRSKNMARRGHSAQIAKPIRPGQHPAASPTHPSAIRGGGAFVQNSQPVAVRGGGGKQV

SEQ ID NO: 823605 - protein, 461 aa, Homo sapiens
MADLAECNIKVMCRFRPLNESEVNRGDKYIAKFQGEDTVVIASKPYAFDRVFQSSTSQEQVYNDCAKKIVKDVLEGYNGTIFAYGQTSSGKTHTMEGKLHDPEGMGIIPRIVQDIFNYIYSMDENLEFHIKVSYFEIYLDKIRDLLDVSKTNLSVHEDKNRVPYVKGCTERFVCSPDEVMDTIDEGKSNRHVAVTNMNEHSSRSHSIFLINVKQENTQTEQKLSGKLYLVDLAGSEKVSKTGAEGAVLDEAKNINKSLSALGNVISALAEGSTYVPYRDSKMTRILQDSLGGNCRTTIVICCSPSSYNESETKSTLLFGQRAKTIKNTVCVNVELTAEQWKKKYEKEKEKNKILRNTIQWLENELNRWRNGETVPIDEQFDKEKANLEAFTVDKDITLTNDKPATAIGVIGNFTDAERRKCEEEIAKLYKQLDDKDEEINQPSQHNFSRIFCPLHHFTPNS

SEQ ID NO: 823606 - protein, 973 aa, Homo sapiens
MADLAECNIKVMCRFRPLNESEVNRGDKYIAKFQGEDTVVIASKPYAFDRVFQSSTSQEQVYNDCAKKIVKDVLEGYNGTIFAYGQTSSGKTHTMEGKLHDPEGMGIIPRIVQDIFNYIYSMDENLEFHIKVSYFEIYLDKIRDLLDVSKTNLSVHEDKNRVPYVKGCTERFVCSPDEVMDTIDEGKSNRHVAVTNMNEHSSRSHSIFLINVKQENTQTEQKLSGKLYLVDLAGSEKVSKTGAEGAVLDEAKNINKSLSALGNVISALAEGSTYVPYRDSKMTRILQDSLGGNCRTTIVICCSPSSYNESETKSTLLFGQRAKTIKNTVCVNVELTAEQWKKKYEKEKEKNSSFFFFFFFYSNGFYFPIMTFLTKRQVDGVKKNPPHEKVNKADPQKLPGKDVPLPRLAQFHQQLVSAQPYAFPLTPPPLHILVIQTRNFSADCVRVSEGGARWNLGTYWAPLMQMRKIENVKVDQSPLPPEGAETRDINQQHAGVKELRPLSSPLPRAGARPRTSSQAPHPRKATGSSPRLPHDATMTAYTSMSAEGEGECLEFSEVGNAKPTLEKPGKGQHSPQYKMKSDPEEIFKNKQTNKTKNTTPKPPFSQSRRRAKGSRPSPLRQHLWAQVSAEGARAPGSDSSVPSLHTEGDGSPGTESLSGPLSSPGGGFSPRFFAGASPRMEGGGLASGLRPRADGSTRALGSGSAARGPQKATTARTSTLSMLSAGRQAGFASHAGGAVGGAAGLQFRRPEKRLCRTRARLGKAPSACAGGGCRRSATSDDAPSSSSFSSRRAFLLGTSPASPPSLRLLLRRLRLTLAGRGAQQAEVSSAVGASCVSIGSGNGCSPSGVAVSAVDSASRGGCRRGSEGRAAGNDTSGSRASTLAEEVELPGAAHDQRQLQTPVQPQATALHAGVIHLPHRQGHDALCLFLHFHGDSTATAAGAPGRDRTGSRCTPDNGLAHASLHKPTHAVTL

SEQ ID NO: 823607 - protein, 944 aa, Homo sapiens
MADLAECNIKVMCRFRPLNESEVNRGDKYIAKFQGEDTVVIASKPYAFDRVFQSSTSQEQVYNDCAKKIVKDVLEGYNGTIFAYGQTSSGKTHTMEGKLHDPEGMGIIPRIVQDIFNYIYSMDENLEFHIKVSYFEIYLDKIRDLLDVSKTNLSVHEDKNRVPYVKGCTERFVCSPDEVMDTIDEGKSNRHVAVTNMNEHSSRSHSIFLINVKQENTQTEQKLSGKLYLVDLAGSEKVSKTGAEGAVLDEAKNINKSLSALGNVISALAEGSTYVPYRDSKMTRILQDSLGGNCRTTIVICCSPSSYNESETKSTLLFGQRAKTIKNTVCVNVELTAEQWKKKYEKEKEKNKILRNTIQWLENELNRWRNGETVPIDEQFDKEKANLEAFTVDKDITLTNDKPATAIGVIGNFTDAERRKCEEEIAKLYKQLDDKDEEINQQSQLVEKLKTQMLDQEELLASTRRDQDNMQAELNRLQAENDASKEEVKEVLQALEELAVNYDQKSQEVEDKTKEYELLSDELNQKSATLASIDAELQKLKEMTNHQKKRAAEMMASLRELAMIDEEFTVARLYISKMKSEVKTMVKRCKQLESTQTESNKKMEENEKELAACQLRISQHEAKIKSLTEYLQNVEQKKRQLEESVDALSEELVQLRAQEKVHEMEKEHLNKVQTANEVKQAVEQQIQSHRETHQKQISSLRDEVEAKAKLITDLQDQNQKMMLEQERLRVEHEKLKATDQEKSRKLHELTVMQDRREQARQDLKGLEETVAKELQTLHNLRKLFVQDLATRVKKSAEIDSDDTGGSAAQKQKISFLENNLEQLTKVHKQLVRDNADLRCELPKLEKRLRATAERVKALESALKEAKENASRDRKRYQQEVDRIKEAVRSKNMARRGHSAQIAKPIRPGQHPAASPTHPSAIRGGGAFVQNSQPVAVRGGGGKQV

SEQ ID NO: 823608 - protein, 963 aa, Homo sapiens; identical to SEQ ID NO: 823595

SEQ ID NO: 823609 - protein, 888 aa, Homo sapiens
SGRPGRYAGGQTSSGKTHTMEGKLHDPEGMGIIPRIVQDIFNYIYSMDENLEFHIKVSYFEIYLDKIRDLLDVSKTNLSVHEDKNRVPYVKGCTERFVCSPDEVMDTIDEGKSNRHVAVTNMNEHSSRSHSIFLINVKQENTQTEQKLSGKLYLVDLAGSEKVSKTGAEGAVLDEAKNINKSLSALGNVISALAEGSTYVPYRDSKMTRILQDSLGGNCRTTIVICCSPSSYNESETKSTLLFGQRAKTIKNTVCVNVELTAEQWKKKYEKEKEKNKILRNTIQWLENELNRWRNGETVPIDEQFDKEKANLEAFTVDKDITLTNDKPATAIGVIGNFTDAERRKCEEEIAKLYKQLDDKDEEINQQSQLVEKLKTQMLDQEELLASTRRDQDNMQAELNRLQAENDASKEEVKEVLQALEELAVNYDQKSQEVEDKTKEYELLSDELNQKSATLASIDAELQKLKEMTNHQKKRAAEMMASLLKDLAEIGIAVGNNDVKQPEGTGMIDEEFTVARLYISKMKSEVKTMVKRCKQLESTQTESNKKMEENEKELAACQLRISQHEAKIKSLTEYLQNVEQKKRQLEESVDALSEELVQLRAQEKVHEMEKEHLNKVQTANEVKQAVEQQIQSHRETHQKQISSLRDEVEAKAKLITDLQDQNQKMMLEQERLRVEHEKLKATDQEKSRKLHELTVMQDRREQARQDLKGLEETVAKELQTLHNLRKLFVQDLATRVKKSAEIDSDDTGGSAAQKQKISFLENNLEQLTKVHKQLVRDNADLRCELPKLEKRLRATAERVKALESALKEAKENASRDRKRYQQEVDRIKEAVRSKNMARRGHSAQIAKPIRPGQHPAASPTHPSAIRGGGAFVQNSQPVAVRGGGGKQV

SEQ ID NO: 823610 - protein, 643 aa, Homo sapiens
MAKTIKNTVCVNVELTAEQWKKKYEKEKEKNKILRNTIQWLENELNRWRNGETVPIDEQFDKEKANLEAFTVDKDITLTNDKPATAIGVIGNFTDAERRKCEEEIAKLYKQLDDKDEEINQQSQLVEKLKTQMLDQEELLASTRRDQDNMQAELNRLQAENDASKEEVKEVLQALEELAVNYDQKSQEVEDKTKEYELLSDELNQKSATLASIDAELQKLKEMTNHQKKRAAEMMASLLKDLAEIGIAVGNNDVKQPEGTGMIDEEFTVARLYISKMKSEVKTMVKRCKQLESTQTESNKKMEENEKELAACQLRISQHEAKIKSLTEYLQNVEQKKRQLEESVDALSEELVQLRAQEKVHEMEKEHLNKVQTANEVKQAVEQQIQSHRETHQKQISSLRDEVEAKAKLITDLQDQNQKMMLEQERLRVEHEKLKATDQEKSRKLHELTVMQDRREQARQDLKGLEETVAKELQTLHNLRKLFVQDLATRVKKSAEIDSDDTGGSAAQKQKISFLENNLEQLTKVHKQLVRDNADLRCELPKLEKRLRATAERVKALESALKEAKENASRDRKRYQQEVDRIKEAVRSKNMARRGHSAQIAKPIRPGQHPAASPTHPSAIRGGGAFVQNSQPVAVRGGGGKQV

SEQ ID NO: 823611 - protein, 494 aa, Homo sapiens [sequence omitted]

SEQ ID NO: 823612 - protein, 214 aa, Homo sapiens
  misc_feature (2)..(3): Xaa can be any naturally occurring amino acid
  misc_feature (11)..(11): Xaa can be any naturally occurring amino acid
SXXSCRIRQRXKSRKLHELTVMQDRREQARQDLKGLEETVAKELQTLHNLRKLFVQDLATRVKKSAEIDSDDTGGSAAQKQKISFLENNLEQLTKVHKQLVRDNADLRCELPKLEKRLRATAERVKALESALKEAKENASRDRKRYQQEVDRIKEAVRSKNMARRGHSAQIAKPIRPGQHPAASPTHPSAIRGGGAFVQNSQPVAVRGGGGKQV

SEQ ID NO: 823613 - protein, 963 aa, Homo sapiens; identical to SEQ ID NO: 823595

SEQ ID NO: 823614 - protein, 963 aa, Homo sapiens; identical to SEQ ID NO: 823595

SEQ ID NO: 823615 - protein, 468 aa, Homo sapiens
MGRGWGFLFGLLGAVWLLSSGHGEEQPPETAAQRCFCQVSGYLDDCTCDVETIDRFNNYRLFPRLQKLLESDYFRYYKVNLKRPCPFWNDISQCGRRDCAVKPCQSDEVPDGIKSASYKYSEEANNLIEECEQAERLGAVDESLSEETQKAVLQWTKHDDSSDNFCEADDIQSPEAEYVDLLLNPERYTGYKGPDAWKIWNVIYEENCFKPQTIKRPLNPLASGQGTSEENTFYSWLEGLCVEKRAFYRLISGLHASINVHLSARYLLQETWLEKKWGHNITEFQQRFDGILTEGEGPRRLKNLYFLYLIELRALSKVLPFFERPDFQLFTGNKIQDEENKMLLLEILHEIKSFPLHFDENSFFAGDKKEAHKLKEDFRLHFRNISRIMDCVGCFKCRLWGKLQTQGLGTALKILFSEKLIANMPESGPSYEFHLTRQEIVSLFNAFGRISTSVKELENFRNLLQNIH

SEQ ID NO: 823616 - protein, 468 aa, Homo sapiens; identical to SEQ ID NO: 823615

SEQ ID NO: 823617 - protein, 468 aa, Homo sapiens; identical to SEQ ID NO: 823615

SEQ ID NO: 823618 - protein, 468 aa, Homo sapiens; identical to SEQ ID NO: 823615

SEQ ID NO: 823619 - protein, 263 aa, Homo sapiens
SRSPDLMIHPPRPPKVLGFQVLSQENTFYSWLEGLCVEKRAFYRLISGLHASINVHLSARYLLQETWLEKKWGHNITEFQQRFDGILTEGEGPRRLKNLYFLYLIELRALSKVLPFFERPDFQLFTGNKIQDEENKMLLLEILHEIKSFPLHFDENSFFAGDKKEAHKLKEDFRLHFRNISRIMDCVGCFKCRLWGKLQTQGLGTALKILFSEKLIANMPESGPSYEFHLTRQEIVSLFNAFGRISTSVKELENFRNLLQNIH

SEQ ID NO: 823620 - protein, 468 aa, Homo sapiens; identical to SEQ ID NO: 823615

SEQ ID NO: 823621 - protein, 307 aa, Homo sapiens
MGRGWGFLFGLLGAVWLLSSGHGEEQPPETAAQRCFCQVSGYLDDCTCDVETIDRFNNYRLFPRLQKLLESDYFRYYKVNLKRPCPFWNDISQCGRRDCAVKPCQSDEVPDGIKSASYKYSEEANNLIEECEQAERLGAVDESLSEETQKAVLQWTKHDDSSDNFCEADDIQSPEAEYVDLLLNPERYTGYKGPDAWKIWNVIYEENCFKPQTIKRPLNPLASGQGTSEENTFYSWLEGLCVEKRAFYRLISGLHASINVHLSARYLLQETWLEKKWGHNITEFQQRFDGMSSTKKTVLSHRQLKDL

SEQ ID NO: 823622 - protein, 228 aa, Homo sapiens
MGRGWGFLFGLLGAVWLLSSGHGEEQPPETAAQRCFCQVSGYLDDCTCDVETIDRFNNYRLFPRLQKLLESDYFRYYKVNLKRPCPFWNDISQCGRRDCAVKPCQSDEVPDGIKSASYKYSEEANNLIEECEQAERLGAVDESLSEETQKAVLQWTKHDDSSDNFCEADDIQSPEAEYVDLLLNPERYTGYKGPDAWKIWNVIYEENCFKDLVRKEMGTQHYRISTAI

SEQ ID NO: 823623 - protein, 468 aa, Homo sapiens; identical to SEQ ID NO: 823615

SEQ ID NO: 823624 - protein, 468 aa, Homo sapiens; identical to SEQ ID NO: 823615

SEQ ID NO: 823625 - protein, 468 aa, Homo sapiens; identical to SEQ ID NO: 823615

SEQ ID NO: 823626 - protein, 468 aa, Homo sapiens; identical to SEQ ID NO: 823615

SEQ ID NO: 823627 - protein, 271 aa, Homo sapiens [sequence omitted]

SEQ ID NO: 823628 - protein, 125 aa, Homo sapiens
MGRGWGFLFGLLGAVWLLSSGHGEEQPPETAAQRCFCQVSGYLDDCTCDVETIDRFNNYRLFPRLQKLLESDYFRYYKVNLKRPCPFWNDISQCGRRDCAVKPCQSDEVPDGIKSASYKVCTYTY

SEQ ID NO: 823629 - protein, 837 aa, Homo sapiens
MSQTGSHPGRGLAGRWLWGAQPCLLLPIVPLSWLVWLLLLLLASLLPSARLASPLPREEEIVFPEKLNGSVLPGSGAPARLLCRLQAFGETLLLELEQDSGVQVEGLTVQYLGQAPELLGGAEPGTYLTGTINGDPESVASLHWDGGALLGVLQYRGAELHLQPLEGGTPNSAGGPGAHILRRKSPASGQGPMCNVKAPLGSPSPRPRRAKRFASLSRFVETLVVADDKMAAFHGAGLKRYLLTVMAAAAKAFKHPSIRNPVSLVVTRLVILGSGEEGPQVGPSAAQTLRSFCAWQRGLNTPEDSDPDHFDTAILFTRQDLCGVSTCDTLGMADVGTVCDPARSCAIVEDDGLQSAFTAAHELGHVFNMLHDNSKPCISLNGPLSTSRHVMAPVMAHVDPEEPWSPCSARFITDFLDNGYGHCLLDKPEAPLHLPVTFPGKDYDADRQCQLTFGPDSRHCPQLPPPCAALWCSGHLNGHAMCQTKHSPWADGTPCGPAQACMGGRCLHMDQLQDFNIPQAGGWGPWGPWGDCSRTCGGGVQFSSRDCTRPVPRNGGKYCEGRRTRFRSCNTEDCPTGSALTFREEQCAAYNHRTDLFKSFPGPMDWVPRYTGVAPQDQCKLTCQARALGYYYVLEPRVVDGTPCSPDSSSVCVQGRCIHAGCDRIIGSKKKFDKCMVCGGDGSGCSKQSGSFRKFRYGYNNVVTIPAGATHILVRQQGNPGHRSIYLALKLPDGSYALNGEYTLMPSPTDVVLPGAVSLRYSGATAASETLSGHGPLAQPLTLQVLVAGNPQDTRLRYSFFVPRPTPSTPRPTPQDWLHRRAQILEILRRRPWAGRK

SEQ ID NO: 823630 - protein, 88 aa, Homo sapiens
CSECTPPPSCDPQGRGGSLDGGLSVSPFHPLTHHCLLVAGNPQDTRLRYSFFVPRPTPSTPRPTPQDWLHRRAQILEILRRRPWAGRK

SEQ ID NO: 823631 - protein, 489 aa, Homo sapiens
MGKGPSDPIRAFAPTGHVFNMLHDNSKPCISLNGPLSTSRHVMAPVMAHVDPEEPWSPCSARFITDFLDNGYGHCLLDKPEAPLHLPVTFPGKDYDADRQCQLTFGPDSRHCPQLPPPCAALWCSGHLNGHAMCQTKHSPWADGTPCGPAQACMGGRCLHMDQLQDFNIPQAGGWGPWGPWGDCSRTCGGGVQFSSRDCTRPVPRNGGKYCEGRRTRFRSCNTEDCPTGSALTFREEQCAAYNHRTDLFKSFPGPMDWVPRYTGVAPQDQCKLTCQARALGYYYVLEPRVVDGTPCSPDSSSVCVQGRCIHAGCDRIIGSKKKFDKCMVCGGDGSGCSKQSGSFRKFRYGYNNVVTIPAGATHILVRQQGNPGHRSIYLALKLPDGSYALNGEYTLMPSPTDVVLPGAVSLRYSGATAASETLSGHGPLAQPLTLQVLVAGNPQDTRLRYSFFVPRPTPSTPRPTPQDWLHRRAQILEILRRRPWAGRK

SEQ ID NO: 823632 - protein, 451 aa, Homo sapiens
MSQTGSHPGRGLAGRWLWGAQPCLLLPIVPLSWLVWLLLLLLASLLPSARLASPLPREEEIVFPEKLNGSVLPGSGAPARLLCRLQAFGETLLLELEQDSGVQVEGLTVQYLGQAPELLGGAEPGTYLTGTINGDPESVASLHWDGGALLGVLQYRGAELHLQPLEGGTPNSAGGPGAHILRRKSPASGQGPMCNVKAPLGSPSPRPRRAKRFASLSRFVETLVVADDKMAAFHGAGLKRYLLTVMAAAAKAFKHPSIRNPVSLVVTRLVILGSGEEGPQVGPSAAQTLRSFCAWQRGLNTPEDSDPDHFDTAILFTRQDLCGVSTCDTLGMADVGTVCDPARSCAIVEDDGLQSAFTAAHELGHVFNMLHDNSKPCISLNGPLSTSRHVMAPVMAHVDPEEPWSPCSARFITDFLDNGYGHCLLDKPEAPLHLPVTFPERCKLGSSKSAN

SEQ ID NO: 823633 - protein, 270 aa, Homo sapiens
MPPVPSPSQPPSGKPVSAVKPTVAPPLAEPGAGKGLRSEHREKMNRMRQRIAQRLKEAQNTCAMLTTFNEIDMSNIQEMRARHKEAFLKKHNLKLGFMSAFVKASAFALQEQPVVNAVIDDTTKEVVYRDYIDISVAVATPRGLVVPVIRNVEAMNFADIERTITELGEKARKNELAIEDMDGGTFTISNGGVFGSLFGTPIINPPQSAILGMHGIFDRPVAIGGKVEVRPMMYVALTYDHRLIDGREAVTFLRKIKAAVEDPRVLLLDL

SEQ ID NO: 823634 - protein, 469 aa, Homo sapiens
VRPYIRCPPALGSSAVMLSRSRCVSRAFSRSLSAFQKGNCPLGRRSLPGVSLCQGPGYPNSRKVVINNSVFSVRFFRTTAVCKDDLVTVKTPAFAESVTEGDVRWEKAVGDTVAEDEVVCEIETDKTSVQVPSPANGVIEALLVPDGGKVEGGTPLFTLRKTGAAPAKAKPAEAPAAAAPKAEPTAAAVPPPAAPIPTQMPPVPSPSQPPSGKPVSAVKPTVAPPLAEPGAGKGLRSEHREKMNRMRQRIAQRLKEAQNTCAMLTTFNEIDMSNIQEMRARHKEAFLKKHNLKLGFMSAFVKASAFALQEQPVVNAVIDDTTKEVVYRDYIDISVAVATPRGLVVPVIRNVEAMNFADIERTITELGEKARKNELAIEDMDGGTFTISNGGVFGSLFGTPIINPPQSAILGMHGIFDRPVAIGGKVEVRPMMYVALTYDHRLIDGREAVTFLRKIKAAVEDPRVLLLDL

SEQ ID NO: 823635 - protein, 469 aa, Homo sapiens; identical to SEQ ID NO: 823634

SEQ ID NO: 823636 - protein, 453 aa, Homo sapiens
CPALYPVSARPRLLRRDAVPIPLCVSGVQPLALRLPEGELPSRETFPACINNSVFSVRFFRTTAVCKDDLVTVKTPAFAESVTEGDVRWEKAVGDTVAEDEVVCEIETDKTSVQVPSPANGVIEALLVPDGGKVEGGTPLFTLRKTGAAPAKAKPAEAPAAAAPKAEPTAAAVPPPAAPIPTQMPPVPSPSQPPSGKPVSAVKPTVAPPLAEPGAGKGLRSEHREKMNRMRQRIAQRLKEAQNTCAMLTTFNEIDMSNIQEMRARHKEAFLKKHNLKLGFMSAFVKASAFALQEQPVVNAVIDDTTKEVVYRDYIDISVAVATPRGLVVPVIRNVEAMNFADIERTITELGEKARKNELAIEDMDGGTFTISNGGVFGSLFGTPIINPPQSAILGMHGIFDRPVAIGGKVEVRPMMYVALTYDHRLIDGREAVTFLRKIKAAVEDPRVLLLDL

SEQ ID NO: 823637 - protein, 270 aa, Homo sapiens; identical to SEQ ID NO: 823633

SEQ ID NO: 823638 - protein, 398 aa, Homo sapiens
VRPYIRCPPALGSSAVMLSRSRCVSRAFSRSLSAFQKGNCPLGRRSLPGVSLCQGPGYPNSRKVVINNSVFSVRFFRTTAVCKDDLVTVKTPAFAESVTEGDVRWEKAVGDTVAEDEVVCEIETDKTSVQVPSPANGVIEALLVPDGGKVEGGTPLFTLRKTGAAPAKAKPAEAPAAAAPKAEPTAAAVPPPAAPIPTQMPPVPSPSQPPSGKPVSAVKPTVAPPLAEPGAGKGLRSEHREKMNRMRQRIAQRLKEAQNTCAMLTTFNEIDMSNIQEMRARHKEAFLKKHNLKLGFMSAFVKASAFALQEQPVVNAVIDDTTKEVVYRDYIDISVAVATPRGLVVPVIRNVEAMNFADIERTITELGEKARKNETCLEIWVGDLHITRGRLGALWKPF

SEQ ID NO: 823639 - protein, 238 aa, Homo sapiens
ASNYVAVRYLAVISVRGAVCIFNVMLSRSRCVSRAFSRSLSAFQKGNCPLGRRSLPGVSLCQGPGYPNSRKVVINNSVFSVRFFRTTAVCKDDLVTVKTPAFAESVTEGDVRWEKAVGDTVAEDEVVCEIETDKTSVQVPSPANGVIEALLVPDGGKVEGGTPLFTLRKTGAAPAKAKPAEAPAAAAPKAEPTAAAVPPPAAPIPTQMPPVPSPSQPPSGKPVLTFDTRASRECPFVS

SEQ ID NO: 823640 - protein, 367 aa, Homo sapiens
MTWLQSKPQRLQNLSQREMSGGRKTSVQVPSPANGVIEALLVPDGGKVEGGTPLFTLRKTGAAPAKAKPAEAPAAAAPKAEPTAAAVPPPAAPIPTQMPPVPSPSQPPSGKPVSAVKPTVAPPLAEPGAGKGLRSEHREKMNRMRQRIAQRLKEAQNTCAMLTTFNEIDMSNIQEMRARHKEAFLKKHNLKLGFMSAFVKASAFALQEQPVVNAVIDDTTKEVVYRDYIDISVAVATPRGLVVPVIRNVEAMNFADIERTITELGEKARKNELAIEDMDGGTFTISNGGVFGSLFGTPIINPPQSAILGMHGIFDRPVAIGGKVEVRPMMYVALTYDHRLIDGREAVTFLRKIKAAVEDPRVLLLDL

SEQ ID NO: 823641 - protein, 469 aa, Homo sapiens; identical to SEQ ID NO: 823634

SEQ ID NO: 823642 - protein, 469 aa, Homo sapiens; identical to SEQ ID NO: 823634

SEQ ID NO: 823643 - protein, 270 aa, Homo sapiens; identical to SEQ ID NO: 823633

SEQ ID NO: 823644 - protein, 434 aa, Homo sapiens
VRPYIRCPPALGSSAVMLSRSRCVSRAFSRSLSAFQKGNCPLGRRSLPALTTVSSVFAFSELQLYARMTWLQSKPQRLQNLSQREMSGGRKTSVQVPSPANGVIEALLVPDGGKVEGGTPLFTLRKTGAAPAKAKPAEAPAAAAPKAEPTAAAVPPPAAPIPTQMPPVPSPSQPPSGKPVSAVKPTVAPPLAEPGAGKGLRSEHREKMNRMRQRIAQRLKEAQNTCAMLTTFNEIDMSNIQEMRARHKEAFLKKHNLKLGFMSAFVKASAFALQEQPVVNAVIDDTTKEVVYRDYIDISVAVATPRGLVVPVIRNVEAMNFADIERTITELGEKARKNELAIEDMDGGTFTISNGGVFGSLFGTPIINPPQSAILGMHGIFDRPVAIGGKVEVRPMMYVALTYDHRLIDGREAVTFLRKIKAAVEDPRVLLLDL

SEQ ID NO: 823645 - protein, 475 aa, Homo sapiens
VRPYIRCPPALGSSAVMLSRSRCVSRAFSRSLSAFQKGNCPLGRRSLPGVSLCQGPGYPNSRKVVINNSVFSVRFFRTTAVCKDDLVTVKTPAFAESVTEGDVRWEKAFDVFSAVGDTVAEDEVVCEIETDKTSVQVPSPANGVIEALLVPDGGKVEGGTPLFTLRKTGAAPAKAKPAEAPAAAAPKAEPTAAAVPPPAAPIPTQMPPVPSPSQPPSGKPVSAVKPTVAPPLAEPGAGKGLRSEHREKMNRMRQRIAQRLKEAQNTCAMLTTFNEIDMSNIQEMRARHKEAFLKKHNLKLGFMSAFVKASAFALQEQPVVNAVIDDTTKEVVYRDYIDISVAVATPRGLVVPVIRNVEAMNFADIERTITELGEKARKNELAIEDMDGGTFTISNGGVFGSLFGTPIINPPQSAILGMHGIFDRPVAIGGKVEVRPMMYVALTYDHRLIDGREAVTFLRKIKAAVEDPRVLLLDL

SEQ ID NO: 823646 - protein, 145 aa, Homo sapiens
  misc_feature (1)..(1): Xaa can be any naturally occurring amino acid
  misc_feature (9)..(9): Xaa can be any naturally occurring amino acid
XLQALSIDXSVAVATPRGLVVPVIRNVEAMNFADIERTITELGEKARKNELAIEDMDGGTFTISNGGVFGSLFGTPIINPPQSAILGMHGIFDRPVAIGGKVEVRPMMYVALTYDHRLIDGREAVTFLRKIKAAVEDPRVLLLDL

SEQ ID NO: 823647 - protein, 444 aa, Homo sapiens
VRPYIRCPPALGSSAVMLSRSRCVSRAFSRSLSAFQKGNCPLGRRSLPGVSLCQGPGYPNSRKVVINNSVFSVRFFRTTAVCKDDLVTVKTPAFAESVTEGDVRWEKAVGDTVAEDEVVCEIETDKTSVQVPSPANGVIEALLVPDGGKVEGGTPLFTLRKTGAAPAKAKPAEAPAAAAPKAEPTAAAVPPPAAPIPTQMPPVPSPSQPPSGKPVSAVKPTVAPPLAEPGAGKGLRSEHREKMNRMRQRIAQRLKEAQNTCAMLTTFNEIDMSNIQEMRARHKEAFLKKHNLKLGFMSAFVKASAFALQEQPVVNAVIDDKQRGGVIGIYRSGAGQTQGVAGPPPENTRQPHETTGTTLDRNNTASAPTQGRPNSNCHRTMEEGHHHNTRPRSGAQETTSLNNTTAQGDANSTQHQTARTQQPTHKANQPTKGTPTTRATNYTT

SEQ ID NO: 823648 - protein, 230 aa, Homo sapiens
VRPYIRCPPALGSSAVMLSRSRCVSRAFSRSLSAFQKGNCPLGRRSLPGVSLCQGPGYPNSRKVVINNSVFSVRFFRTTAVCKDDLVTVKTPAFAESVTEGDVRWEKAVGDTVAEDEVVCEIETDKTSVQVPSPANGVIEALLVPDGGKVEGGTPLFTLRKTGAAPAKAKPAEAPAAAAPKAEPTAAAVPPPAAPIPTQMPPVPSPSQPPSGKPVLTFDTRASRECPFVS

SEQ ID NO: 823649 - protein, 440 aa, Homo sapiens
MGQSQSGGHGPGGGKKDDKDKKKKYEPPVPTRVGKKKKKTKGPDAASKLPLVTPHTQCRLKLLKLERIKDYLLMEEEFIRNQEQMKPLEEKQEEERSKVDDLRGTPMSVGTLEEIIDDNHAIVSTSVGSEHYVSILSFVDKDLLEPGCSVLLNHKVHAVIGVLMDDTDPLVTVMKVEKAPQETYADIGGLDNQIQEIKESVELPLTHPEYYEEMGIKPPKGVILYGPPGTGKTLLAKAVANQTSATFLRVVGSELIQKYLGDGPKLVRELFRVAEEHAPSIVFIDEIDAIGTKRYDSNSGGEREIQRTMLELLNQLDGFDSRGDVKVIMATNRIETLDPALIRPGRIDRKIEFPLPDEKTKKRIFQIHTSRMTLADDVTLDDLIMAKDDLSGADIKAICTEAGLMALRERRMKVTNEDFKKSKENVLYKKQEGTPEGLYL

SEQ ID NO: 823650 - protein, 138 aa, Homo sapiens
MALKVSFFFLSFSSKIGKTLLAKAVANQTSATFLRVVGSELIQKYLGDGPKLVRELFRVAEEHAPSIVFIDEIDAIGTKRGRLSHTYFALFSREHRIALLLRMGNLRGLSLWPQFLLCVAFHACFRLCSPRSQLTTAQ

SEQ ID NO: 823651 - protein, 345 aa, Homo sapiens
MGQSQSGGHGPGGGKKDDKDKKKKYEPPVPTRVGKKKKKTKGPDAASKLPLVTPHTQCRLKLLKLERIKDYLLMEEEFIRNQEQMKPLEEKQEEERSKVDDLRGTPMSVGTLEEIIDDNHAIVSTSVGSEHYVSILSFVDKDLLEPGCSVLLNHKVHAVIGVLMDDTDPLVTVMKVEKAPQETYADIGGLDNQIQEIKESVELPLTHPEYYEEMGIKPPKGVILYGPPGTGKTLLAKAVANQTSATFLRVVGSELIQKYLGDGPKLVRELFRVAEEHAPSIVFIDEIDAIGTKRYDSNSGGEREIQRTMLELLNQLDGFDSRGDVKVIMATNRIETLDPALIRPG

SEQ ID NO: 823652 - protein, 301 aa, Homo sapiens
MGQSQSGGHGPGGGKKDDKDKKKKYEPPVPTRVGKKKKKTKGPDAASKLPLVTPHTQCRLKLLKLERIKDYLLMEEEFIRNQEQMKPLEEKQEEERSKVDDLRGTPMSVGTLEEIIDDNHAIVSTSVGSEHYVSILSFVDKDLLEPGCSVLLNHKVHAVIGVLMDDTDPLVTVMKVEKAPQETYADIGGLDNQIQEIKESVELPLTHPEYYEEMGIKPPKGVILYGPPGTGKTLLAKAVANQTSATFLRVVGSELIQKYLGDGPKLVRELFRVAEEHAPSIVFIDEIDAIGTKSAEPVGWI

SEQ ID NO: 823653 - protein, 422 aa, Homo sapiens
MGQSQSGGHGPGGGKKDDKDKKKKYEPPVPTRVGKKKKKTKGPDAASKLPLVTPHTQCRLKLLKLERIKDYLLMEEEFIRNQEQMKPLEEKQEEERSKVDDLRGTPMSVGTLEEIIDDNHAIVSTSVGSEHYVSILSFVDKDLLEPGCSVLLNHKVHAVIGVLMDDTDPLVTVMKVEKAPQETYADIGGLDNQIQEIKESVELPLTHPEYYEEMGIKPPKGVILYGPPGTGKTLLAKAVANQTSATFLRVVGSELIQKYLGDGPKLVRELFRVAEEHAPSIVFIDEIDAIGTKRYDSNSGGEREIQRTMLELLNQLDGFDSRGDVKVIMATNRIETLDPALIRPGRIDRKIEFPLPDDDVTLDDLIMAKDDLSGADIKAICTEAGLMALRERRMKVTNEDFKKSKENVLYKKQEGTPEGLYL

SEQ ID NO: 823654 - protein, 440 aa, Homo sapiens; identical to SEQ ID NO: 823649

SEQ ID NO: 823655 - protein, 440 aa, Homo sapiens; identical to SEQ ID NO: 823649

SEQ ID NO: 823656 - protein, 452 aa, Homo sapiens
NNVIGRVLGVITMGQSQSGGHGPGGGKKDDKDKKKKYEPPVPTRVGKKKKKTKGPDAASKLPLVTPHTQCRLKLLKLERIKDYLLMEEEFIRNQEQMKPLEEKQEEERSKVDDLRGTPMSVGTLEEIIDDNHAIVSTSVGSEHYVSILSFVDKDLLEPGCSVLLNHKVHAVIGVLMDDTDPLVTVMKVEKAPQETYADIGGLDNQIQEIKESVELPLTHPEYYEEMGIKPPKGVILYGPPGTGKTLLAKAVANQTSATFLRVVGSELIQKYLGDGPKLVRELFRVAEEHAPSIVFIDEIDAIGTKRYDSNSGGEREIQRTMLELLNQLDGFDSRGDVKVIMATNRIETLDPALIRPGRIDRKIEFPLPDEKTKKRIFQIHTSRMTLADDVTLDDLIMAKDDLSGADIKAICTEAGLMALRERRMKVTNEDFKKSKENVLYKKQEGTPEGLYL

SEQ ID NO: 823657 - protein, 450 aa, Homo sapiens
GCTGPNLWMQMGQSQSGGHGPGGGKKDDKDKKKKYEPPVPTRVGKKKKKTKGPDAASKLPLVTPHTQCRLKLLKLERIKDYLLMEEEFIRNQEQMKPLEEKQEEERSKVDDLRGTPMSVGTLEEIIDDNHAIVSTSVGSEHYVSILSFVDKDLLEPGCSVLLNHKVHAVIGVLMDDTDPLVTVMKVEKAPQETYADIGGLDNQIQEIKESVELPLTHPEYYEEMGIKPPKGVILYGPPGTGKTLLAKAVANQTSATFLRVVGSELIQKYLGDGPKLVRELFRVAEEHAPSIVFIDEIDAIGTKRYDSNSGGEREIQRTMLELLNQLDGFDSRGDVKVIMATNRIETLDPALIRPGRIDRKIEFPLPDEKTKKRIFQIHTSRMTLADDVTLDDLIMAKDDLSGADIKAICTEAGLMALRERRMKVTNEDFKKSKENVLYKKQEGTPEGLYL

SEQ ID NO: 823658 - protein, 449 aa, Homo sapiens
RYLRMGNGKMGQSQSGGHGPGGGKKDDKDKKKKYEPPVPTRVGKKKKKTKGPDAASKLPLVTPHTQCRLKLLKLERIKDYLLMEEEFIRNQEQMKPLEEKQEEERSKVDDLRGTPMSVGTLEEIIDDNHAIVSTSVGSEHYVSILSFVDKDLLEPGCSVLLNHKVHAVIGVLMDDTDPLVTVMKVEKAPQETYADIGGLDNQIQEIKESVELPLTHPEYYEEMGIKPPKGVILYGPPGTGKTLLAKAVANQTSATFLRVVGSELIQKYLGDGPKLVRELFRVAEEHAPSIVFIDEIDAIGTKRYDSNSGGEREIQRTMLELLNQLDGFDSRGDVKVIMATNRIETLDPALIRPGRIDRKIEFPLPDEKTKKRIFQIHTSRMTLADDVTLDDLIMAKDDLSGADIKAICTEAGLMALRERRMKVTNEDFKKSKENVLYKKQEGTPEGLYL

SEQ ID NO: 823659 - protein, 352 aa, Homo sapiens
MGQSQSGGHGPGGGKKDDKDKKKKYEPPVPTRVGKKKKKTKGPDAASKLPLVTPHTQCRLKLLKLERIKDYLLMEEEFIRNQEQMKPLEEKQEEERSKVDDLRGTPMSVGTLEEIIDDNHAIVSTSVGSEHYVSILSFVDKDLLEPGCSVLLNHKVHAVIGVLMDDTDPLVTVMKVEKAPQETYADIGGLDNQIQEIKESVELPLTHPEYYEEMGIKPPKGVILYGPPGTGKTLLAKAVANQTSATFLRVVGSELIQKYLGDGPKLVRELFRVAEEHAPSIVFIDEIDAIGTKRGRLSHTYFALFSREHRIALLLRMGNLRGLSLWPQFLLCVAFHACFRLCSPRSQLTTAQ

SEQ ID NO: 823660 - protein, 395 aa, Homo sapiens
AHEVPLVTPHTQCRLKLLKLERIKDYLLMEEEFIRNQEQMKPLEEKQEEERSKVDDLRGTPMSVGTLEEIIDDNHAIVSTSVGSEHYVSILSFVDKDLLEPGCSVLLNHKVHAVIGVLMDDTDPLVTVMKVEKAPQETYADIGGLDNQIQEIKESVELPLTHPEYYEEMGIKPPKGVILYGPPGTGKTLLAKAVANQTSATFLRVVGSELIQKYLGDGPKLVRELFRVAEEHAPSIVFIDEIDAIGTKRYDSNSGGEREIQRTMLELLNQLDGFDSRGDVKVIMATNRIETLDPALIRPGRIDRKIEFPLPDEKTKKRIFQIHTSRMTLADDVTLDDLIMAKDDLSGADIKAICTEAGLMALRERRMKVTNEDFKKSKENVLYKKQEGTPEGLYL

SEQ ID NO: 823661 - protein, 389 aa, Homo sapiens
LTWIDCCVGNPLQGDEAEVRETGEEEFIRNQEQMKPLEEKQEEERSKVDDLRGTPMSVGTLEEIIDDNHAIVSTSVGSEHYVSILSFVDKDLLEPGCSVLLNHKVHAVIGVLMDDTDPLVTVMKVEKAPQETYADIGGLDNQIQEIKESVELPLTHPEYYEEMGIKPPKGVILYGPPGTGKTLLAKAVANQTSATFLRVVGSELIQKYLGDGPKLVRELFRVAEEHAPSIVFIDEIDAIGTKRYDSNSGGEREIQRTMLELLNQLDGFDSRGDVKVIMATNRIETLDPALIRPGRIDRKIEFPLPDEKTKKRIFQIHTSRMTLADDVTLDDLIMAKDDLSGADIKAICTEAGLMALRERRMKVTNEDFKKSKENVLYKKQEGTPEGLYL

SEQ ID NO: 823662 - protein, 420 aa, Homo sapiens
MGQSQSGGHGPGGGKKDDKDKKKKYEPPVPTRVGKKKKKTKGPDAASKLPLVTPHTQCRLKLLKLERIKDYLLMEEEFIRNQEQMKPLEEKQEEERSKVDDLRGTPMSVGTLEEIIDDNHAIVSTSVGSEHYVSILSFVDKDLLEPGCSVLLNHKVHAVIGVLMDDTDPLVTVMKVEKESVELPLTHPEYYEEMGIKPPKGVILYGPPGTGKTLLAKAVANQTSATFLRVVGSELIQKYLGDGPKLVRELFRVAEEHAPSIVFIDEIDAIGTKRYDSNSGGEREIQRTMLELLNQLDGFDSRGDVKVIMATNRIETLDPALIRPGRIDRKIEFPLPDEKTKKRIFQIHTSRMTLADDVTLDDLIMAKDDLSGADIKAICTEAGLMALRERRMKVTNEDFKKSKENVLYKKQEGTPEGLYL

SEQ ID NO: 823663 - protein, 226 aa, Homo sapiens [sequence omitted]

SEQ ID NO: 823664 - protein, 218 aa, Homo sapiens
MGQSQSGGHGPGGGKKDDKDKKKKYEPPVPTRVGKKKKKTKGPDAASKLPLVTPHTQCRLKLLKLERIKDYLLMEEEFIRNQEQMKPLEEKQEEERSKVDDLRGTPMSVGTLEEIIDDNHAIVSTSVGSEHYVSILSFVDKDLLEPGCSVLLNHKVHAVIGVLMDDTDPLVTVMKVEKAPQETYADIGGLDNQIQEIKHESVELPSQHMLTIMTRDGS

SEQ ID NO: 823665 - protein, 129 aa, Homo sapiens
MGQSQSGGHGPGGGKKDDKDKKKKYEPPVPTRVGKKKKKTKGPDAASKLPLVTPHTQCRLKLLKLERIKDYLLMEEEFIRNQEQMKPLEEKQERNRSQSWNGNFPFLWKKRGGGGLSFFKKIMPSWSTF

SEQ ID NO: 823666 - protein, 133 aa, Homo sapiens
AAYYYKIRGRSTDSRGDVKVIMATNRIETLDPALIRPGRIDRKIEFPLPDEKTKKRIFQIHTSRMTLADDVTLDDLIMAKDDLSGADIKAICTEAGLMALRERRMKVTNEDFKKSKENVLYKKQEGTPEGLYL

SEQ ID NO: 823667 - protein, 440 aa, Homo sapiens; identical to SEQ ID NO: 823649

SEQ ID NO: 823668 - protein, 467 aa, Homo sapiens
NSPPHRQKRLVRAGVIGRGGSSVVKGKMGQSQSGGHGPGGGKKDDKDKKKKYEPPVPTRVGKKKKKTKGPDAASKLPLVTPHTQCRLKLLKLERIKDYLLMEEEFIRNQEQMKPLEEKQEEERSKVDDLRGTPMSVGTLEEIIDDNHAIVSTSVGSEHYVSILSFVDKDLLEPGCSVLLNHKVHAVIGVLMDDTDPLVTVMKVEKAPQETYADIGGLDNQIQEIKESVELPLTHPEYYEEMGIKPPKGVILYGPPGTGKTLLAKAVANQTSATFLRVVGSELIQKYLGDGPKLVRELFRVAEEHAPSIVFIDEIDAIGTKRYDSNSGGEREIQRTMLELLNQLDGFDSRGDVKVIMATNRIETLDPALIRPGRIDRKIEFPLPDEKTKKRIFQIHTSRMTLADDVTLDDLIMAKDDLSGADIKAICTEAGLMALRERRMKVTNEDFKKSKENVLYKKQEGTPEGLYL

SEQ ID NO: 823669 - protein, 452 aa, Homo sapiens
GTPPDGYGIQGKMGQSQSGGHGPGGGKKDDKDKKKKYEPPVPTRVGKKKKKTKGPDAASKLPLVTPHTQCRLKLLKLERIKDYLLMEEEFIRNQEQMKPLEEKQEEERSKVDDLRGTPMSVGTLEEIIDDNHAIVSTSVGSEHYVSILSFVDKDLLEPGCSVLLNHKVHAVIGVLMDDTDPLVTVMKVEKAPQETYADIGGLDNQIQEIKESVELPLTHPEYYEEMGIKPPKGVILYGPPGTGKTLLAKAVANQTSATFLRVVGSELIQKYLGDGPKLVRELFRVAEEHAPSIVFIDEIDAIGTKRYDSNSGGEREIQRTMLELLNQLDGFDSRGDVKVIMATNRIETLDPALIRPGRIDRKIEFPLPDEKTKKRIFQIHTSRMTLADDVTLDDLIMAKDDLSGADIKAICTEAGLMALRERRMKVTNEDFKKSKENVLYKKQEGTPEGLYL

SEQ ID NO: 823670 - protein, 448 aa, Homo sapiens
MYGLVVNRPGQSQSGGHGPGGGKKDDKDKKKKYEPPVPTRVGKKKKKTKGPDAASKLPLVTPHTQCRLKLLKLERIKDYLLMEEEFIRNQEQMKPLEEKQEEERSKVDDLRGTPMSVGTLEEIIDDNHAIVSTSVGSEHYVSILSFVDKDLLEPGCSVLLNHKVHAVIGVLMDDTDPLVTVMKVEKAPQETYADIGGLDNQIQEIKESVELPLTHPEYYEEMGIKPPKGVILYGPPGTGKTLLAKAVANQTSATFLRVVGSELIQKYLGDGPKLVRELFRVAEEHAPSIVFIDEIDAIGTKRYDSNSGGEREIQRTMLELLNQLDGFDSRGDVKVIMATNRIETLDPALIRPGRIDRKIEFPLPDEKTKKRIFQIHTSRMTLADDVTLDDLIMAKDDLSGADIKAICTEAGLMALRERRMKVTNEDFKKSKENVLYKKQEGTPEGLYL

SEQ ID NO: 823671 - protein, 457 aa, Homo sapiens
NKKNNRQRRLGYSAEGQTGQSQSGGHGPGGGKKDDKDKKKKYEPPVPTRVGKKKKKTKGPDAASKLPLVTPHTQCRLKLLKLERIKDYLLMEEEFIRNQEQMKPLEEKQEEERSKVDDLRGTPMSVGTLEEIIDDNHAIVSTSVGSEHYVSILSFVDKDLLEPGCSVLLNHKVHAVIGVLMDDTDPLVTVMKVEKAPQETYADIGGLDNQIQEIKESVELPLTHPEYYEEMGIKPPKGVILYGPPGTGKTLLAKAVANQTSATFLRVVGSELIQKYLGDGPKLVRELFRVAEEHAPSIVFIDEIDAIGTKRYDSNSGGEREIQRTMLELLNQLDGFDSRGDVKVIMATNRIETLDPALIRPGRIDRKIEFPLPDEKTKKRIFQIHTSRMTLADDVTLDDLIMAKDDLSGADIKAICTEAGLMALRERRMKVTNEDFKKSKENVLYKKQEGTPEGLYL

SEQ ID NO: 823672 - protein, 345 aa, Homo sapiens; identical to SEQ ID NO: 823651

SEQ ID NO: 823673 - protein, 440 aa, Homo sapiens
MRDEEDHRITWKSGKKDDKDKKKKYEPPVPTRVGKKKKKTKGPDAASKLPLVTPHTQCRLKLLKLERIKDYLLMEEEFIRNQEQMKPLEEKQEEERSKVDDLRGTPMSVGTLEEIIDDNHAIVSTSVGSEHYVSILSFVDKDLLEPGCSVLLNHKVHAVIGVLMDDTDPLVTVMKVEKAPQETYADIGGLDNQIQEIKESVELPLTHPEYYEEMGIKPPKGVILYGPPGTGKTLLAKAVANQTSATFLRVVGSELIQKYLGDGPKLVRELFRVAEEHAPSIVFIDEIDAIGTKRYDSNSGGEREIQRTMLELLNQLDGFDSRGDVKVIMATNRIETLDPALIRPGRIDRKIEFPLPDEKTKKRIFQIHTSRMTLADDVTLDDLIMAKDDLSGADIKAICTEAGLMALRERRMKVTNEDFKKSKENVLYKKQEGTPEGLYL

SEQ ID NO: 823674 - protein, 430 aa, Homo sapiens
RYLRMGKGKMGQSQSGGHGPGGGKKDDKDKKKKYEPPVPTRVGKKKKKTKGPDAASKLPLVTPHTQCRLKLLKLERIKDYLLMEEEFIRNQEQMKPLEEKQEEEIIDDNHAIVSTSVGSEHYVSILSFVDKDLLEPGCSVLLNHKVHAVIGVLMDDTDPLVTVMKVEKAPQETYADIGGLDNQIQEIKESVELPLTHPEYYEEMGIKPPKGVILYGPPGTGKTLLAKAVANQTSATFLRVVGSELIQKYLGDGPKLVRELFRVAEEHAPSIVFIDEIDAIGTKRYDSNSGGEREIQRTMLELLNQLDGFDSRGDVKVIMATNRIETLDPALIRPGRIDRKIEFPLPDEKTKKRIFQIHTSRMTLADDVTLDDLIMAKDDLSGADIKAICTEAGLMALRERRMKVTNEDFKKSKENVLYKKQEGTPEGLYL

SEQ ID NO: 823675 - protein, 270 aa, Homo sapiens
SVPPINIQAPQETYADIGGLDNQIQEIKESVELPLTHPEYYEEMGIKPPKGVILYGPPGTGKTLLAKAVANQTSATFLRVVGSELIQKYLGDGPKLVRELFRVAEEHAPSIVFIDEIDAIGTKRYDSNSGGEREIQRTMLELLNQLDGFDSRGDVKVIMATNRIETLDPALIRPGRIDRKIEFPLPDEKTKKRIFQIHTSRMTLADDVTLDDLIMAKDDLSGADIKAICTEAGLMALRERRMKVTNEDFKKSKENVLYKKQEGTPEGLYL

SEQ ID NO: 823676 - protein, 132 aa, Homo sapiens
MLELLNQLDGFDSRGDVKVIMATNRIETLDPALIRPGRIDRKIEFPLPDEKTKKRIFQIHTSRMTLADDVTLDDLIMAKDDLSGADIKAICTEAGLMALRERRMKVTNEDFKKSKENVLYKKQEGTPEGLYL

SEQ ID NO: 823677 - protein, 282 aa, Homo sapiens
MSDTEEQEYEEEQPEEEAAEEEEEAPEEPEPVAEPEEERPKPSRPVVPPLIPPKIPEGERVDFDDIHRKRMEKDLLELQTLIDVHFEQRKKEEEELVALKERIERRRSERAEQQRFRTEKERERQAKLAEEKMRKEEEEAKKRAEDDAKKKKVLSNMGAHFGGYLVKAEQKRGKRQTGREMKVRILSERKKPLDIDYMGEEQLREKAQELSDWIHQLESEKFDLMAKLVNSRNMRSTCCTTASATPRSSGRGQGRAALEAAGSEDAAPDSGTWEAWECLSHR

SEQ ID NO: 823678 - protein, 271 aa, Homo sapiens
MSDTEEQEYEEEQPEEEAAEEEEEEEERPKPSRPVVPPLIPPKIPEGERVDFDDIHRKRMEKDLLELQTLIDVHFEQRKKEEEELVALKERIERRRSERAEQQRFRTEKERERQAKLAEEKMRKEEEEAKKRAEDDAKKKKVLSNMGAHFGGYLVKAEQKRGKRQTGREMKVRILSERKKPLDIDYMGEEQLREKAQELSDWIHQLESEKFDLMAKLVNSRNMRSTCCTTASATPRSSGRGQGRAALEAAGSEDAAPDSGTWEAWECLSHR

SEQ ID NO: 823679 - protein, 150 aa, Homo sapiens
MRKEEEEAKKRAEDDAKKKKVLSNMGAHFGGYLVKAEQKRGKRQTGREMKVRILSERKKPLDIDYMGEEQLREKAQELSDWIHQLESEKFDLMAKLVNSRNMRSTCCTTASATPRSSGRGQGRAALEAAGSEDAAPDSGTWEAWECLSHR

SEQ ID NO: 823680 - protein, 264 aa, Homo sapiens
MGTRPGALGRGGEECGTLAGKGRLSPRALARPLRVWSVSSRHPCTARGNVPIAAEARGTPVQQRLEPWSLATAPIPPPAPNAFSSVPPSPEEAAEEEEEAPEEPEPVAEPEEERPKPSRPVVPPLIPPKIPEGERVDFDDIHRKRMEKDLLELQTLIDVHFEQRKKEEEELVALKERIERRRSERAEQQRFRTEKERERQAKLAEEKMRKEEEEAKKRAEDDAKKKKVLSNMGAHFGGYLVKQNRSVVSGRSASLGDPARDRPS

SEQ ID NO: 823681 - protein, 66 aa, Homo sapiens
MSDTEEQEYEEEQPEEEAAEEEEEGRGQRPRSGERMRTFISRPVRYELSAERTQRAPVKASNRIST

SEQ ID NO: 823682 - protein, 346 aa, Homo sapiens
MGTRPGALGRGGEECGTLAGKGRLSPRALARPLRVWSVSSRHPCTARGNVPIAAEARGTPVQQRLEPWSLATAPIPPPAPNAFSSVPPSPEEAAEEEEEEEERPKPSRPVVPPLIPPKIPEGERVDFDDIHRKRMEKDLLELQTLIDVHFEQRKKEEEELVALKERIERRRSERAEQQRFRTEKERERQAKLAEEKMRKEEEEAKKRAEDDAKKKKVLSNMGAHFGGYLVKAEQKRGKRQTGREMKVRILSERKKPLDIDYMGEEQLREKAQELSDWIHQLESEKFDLMAKLVNSRNMRSTCCTTASATPRSSGRGQGRAALEAAGSEDAAPDSGTWEAWECLSHR

SEQ ID NO: 823683 - protein, 332 aa, Homo sapiens
PSSSSLTPRSPDPGVQAPSPSSLTPRSLGRPLLGAPPHWASSLWSLGRTRMSDTEEQEYEEEQPEEEAAEEEEEAPEEPEPVAEPEEERPKPSRPVVPPLIPPKIPEGERVDFDDIHRKRMEKDLLELQTLIDVHFEQRKKEEEELVALKERIERRRSERAEQQRFRTEKERERQAKLAEEKMRKEEEEAKKRAEDDAKKKKVLSNMGAHFGGYLVKAEQKRGKRQTGREMKVRILSERKKPLDIDYMGEEQLREKAQELSDWIHQLESEKFDLMAKLVNSRNMRSTCCTTASATPRSSGRGQGRAALEAAGSEDAAPDSGTWEAWECLSHR

SEQ ID NO: 823684 - protein, 361 aa, Homo sapiens
LRLGSEAGCVIGRGGGEECGTLAGKGRLSPRALARPLRVWSVSSRHPCTARGNVPIAAEARGTPVQQRLEPWSLATAPIPPPAPNAFSSVPPSPEEAAEEEEEAPEEPEPVAEPEEERPKPSRPVVPPLIPPKIPEGERVDFDDIHRKRMEKDLLELQTLIDVHFEQRKKEEEELVALKERIERRRSERAEQQRFRTEKERERQAKLAEEKMRKEEEEAKKRAEDDAKKKKVLSNMGAHFGGYLVKAEQKRGKRQTGREMKVRILSERKKPLDIDYMGEEQLREKAQELSDWIHQLESEKFDLMAKLVNSRNMRSTCCTTASATPRSSGRGQGRAALEAAGSEDAAPDSGTWEAWECLSHR

SEQ ID NO: 823685 - protein, 407 aa, Homo sapiens
LRLGSEAGCVIGRGGGEECGTLAGKGRLSPRALARPLRVWSVSSRHPCTARGNVPIAAEARGTPVQQRLEPWSLATAPIPPPAPNAFSSVPPSPEEAAEEEEEAPEEPEPVAEPEEERPKPSPPQLGPSTFRSLPGLAATSLDGTSRRWEVAQGGRATQWSLCFWPLSRPVVPPLIPPKIPEGERVDFDDIHRKRMEKDLLELQTLIDVHFEQRKKEEEELVALKERIERRRSERAEQQRFRTEKERERQAKLAEEKMRKEEEEAKKRAEDDAKKKKVLSNMGAHFGGYLVKAEQKRGKRQTGREMKVRILSERKKPLDIDYMGEEQLREKAQELSDWIHQLESEKFDLMAKLVNSRNMRSTCCTTASATPRSSGRGQGRAALEAAGSEDAAPDSGTWEAWECLSHR

SEQ ID NO: 823686 - protein, 257 aa, Homo sapiens
TTYFLEEEEEEEERPKPSRPVVPPLIPPKIPEGERVDFDDIHRKRMEKDLLELQTLIDVHFEQRKKEEEELVALKERIERRRSERAEQQRFRTEKERERQAKLAEEKMRKEEEEAKKRAEDDAKKKKVLSNMGAHFGGYLVKAEQKRGKRQTGREMKVRILSERKKPLDIDYMGEEQLREKAQELSDWIHQLESEKFDLMAKLVNSRNMRSTCCTTASATPRSSGRGQGRAALEAAGSEDAAPDSGTWEAWECLSHR

SEQ ID NO: 823687 - protein, 335 aa, Homo sapiens
MGTRPGALGRGGEECGTLAGKGRLSPRALARPLRVWSVSSRHPCTARGNVPIAAEARGTPVQQRLEPWSLATAPIPPPAPNAFSSVPPSPEEAAEEEEEEEERPKPSRPVVPPLIPPKIPEGERVDFDDIHRKRMEKDLLELQTLIDVHFEQRKKEEEELVALKERIERRRSERAEQQRFRTEEKMRKEEEEAKKRAEDDAKKKKVLSNMGAHFGGYLVKAEQKRGKRQTGREMKVRILSERKKPLDIDYMGEEQLREKAQELSDWIHQLESEKFDLMAKLVNSRNMRSTCCTTASATPRSSGRGQGRAALEAAGSEDAAPDSGTWEAWECLSHR

SEQ ID NO: 823688 - protein, 282 aa, Homo sapiens; identical to SEQ ID NO: 823677

SEQ ID NO: 823689 - protein, 282 aa, Homo sapiens; identical to SEQ ID NO: 823677

SEQ ID NO: 823690 - protein, 281 aa, Homo sapiens
SKAQPQDSQHLRRSLGRTRMSDTEEQEYEEEQPEEEAAEEEEEAPEEPEPVAEPEEERPKPSRPVVPPLIPPKIPEGERVDFDDIHRKRMEKDLLELQTLIDVHFEQRKKEEEELVALKERIERRRSERAEQQRFRTEKERERQAKLAEEKMRKEEEEAKKRAEDDAKKKKVLSNMGAHFGGYLVKAEQKRGKRQTGREMKVRILSERKKPLDIDYMGEEQLREKAQELSDWIHQLESEKFDLMAKLVNSRNMRSTCCTTASATPRSYCVSLCHPGWSAVE

SEQ ID NO: 823691 - protein, 264 aa, Homo sapiens
LRLGSEAGCVIGRGGGEECGTLAGKGRLSPRALARPLRVWSVSSRHPCTARGNVPIAAEARGTPVQQRLEPWSLATAPIPPPAPNAFSSVPPSPEEAAEEEEEEEERPKPSRPVVPPLIPPKIPEGERVDFDEEKMRKEEEEAKKRAEDDAKKKKVLSNMGAHFGGYLVKAEQKRGKRQTGREMKVRILSERKKPLDIDYMGEEQLREKAQELSDWIHQLESEKFDLMAKLVNSRNMRSTCCTNRIARQKVRKGAGRAALEALK

SEQ ID NO: 823692 - protein, 309 aa, Homo sapiens
LRLGSEAGCVIGRGGGEECGTLAGKGRLSPRALARPLRVWSVSSRHPCTARGNVPIAAEARGTPVQQRLEPWSLATAPIPPPAPNAFSSVPPSPEEAAEEEEEEEERPKPSPPQLGPSTFRSLPGLAATSLDGTSRRWEVAQGGRATQWSLCFWPLSRPVVPPLIPPKIPEGERVDFDDIHRKRMEKDLLELQTLIDVHFEQRKKEEEELVALKERIERRRSERAEQQRFRTEKERERQAKLALESEKFDLMAKLVNSRNMRSTCCTTASATPRSSGRGQGRAALEAAGSEDAAPDSGTWEAWECLSHR

SEQ ID NO: 823693 - protein, 174 aa, Homo sapiens
LRLGSEAGCVIGRGGGEECGTLAGKGRLSPRALARPLRVWSVSSRHPCTARGNVPIAAEARGTPVQQRLEPWSLATAPIPPPAPNAFSSVPPSPEEAAEEEEEAPEEPEPVAEPEEERPKPSPPQLGPSTFRSLPGLAATSLDGTSRRWEVAQGGRATHGLCVSGHSAAPWCLL

SEQ ID NO: 823694 - protein, 317 aa, Homo sapiens
SKAQPQDSQHLRRSLGRTRMSDTEEQEYEEEQPEEEAAEEEEEAPEEPEPVAEPEEERPKPSRPVVPPLIPPKIPEGERVDFDDIHRKRMEKDLLELQTLIDVHFEQRKKEEEELVALKERIERRRSERAEQQRFRTEKERERQAKLAEEKMRKEEEEAKKRAEDDAKKKKVLSNMGAHFGGYLVKAEQKRGKRQTGREMKVRILSERKKPLDIDYMGEEQLRARSAWLPPSQPSCPAREKAQELSDWIHQLESEKFDLMAKLVNSRNMRSTCCTTASATPRSSGRGQGRAALEAAGSEDAAPDSGTWEAWECLSHR

SEQ ID NO: 823695 - protein, 132 aa, Homo sapiens
MSDTEEQEYEEEQPEEEAAEEEEEAPEEPEPVAEPEEERPKPSRPVVPPLIPPKIPEGERVDFDDIHRKRMEKDLLELQTLIDVHFEQRKKEEEELVALKERIERRRSERAEQQRFRTEKERERQAKLARRR

SEQ ID NO: 823696 - protein, 357 aa, Homo sapiens
MGTRPGALGRGGEECGTLAGKGRLSPRALARPLRVWSVSSRHPCTARGNVPIAAEARGTPVQQRLEPWSLATAPIPPPAPNAFSSVPPSPEEAAEEEEEAPEEPEPVAEPEEERPKPSRPVVPPLIPPKIPEGERVDFDDIHRKRMEKDLLELQTLIDVHFEQRKKEEEELVALKERIERRRSERAEQQRFRTEKERERQAKLAEEKMRKEEEEAKKRAEDDAKKKKVLSNMGAHFGGYLVKAEQKRGKRQTGREMKVRILSERKKPLDIDYMGEEQLREKAQELSDWIHQLESEKFDLMAKLVNSRNMRSTCCTTASATPRSSGRGQGRAALEAAGSEDAAPDSGTWEAWECLSHR

SEQ ID NO: 823697 - protein, 347 aa, Homo sapiens
SKAQPQDSQHLRRSLGRTRMSDTEEQEYEEEQPEEEAAEEEEEAPEEPEPVAEPEEERPKPSRPVVPPLIPPKIPEGERVDFDDIHRKRMEKDLLELQTLIDVHFEQRKKEEEELVALKERIERRRSERAEQQRFRTEKERERQAKLAVQANLLPQPPSSWDYRILRPREGGQVRWLTPVIPALREAEAGGSLEEEKMRKEEEEAKKRAEDDAKKKKVLSNMGAHFGGYLVKAEQKRGKRQTGREMKVRILSERKKPLDIDYMGEEQLREKAQELSDWIHQLESEKFDLMAKLVNSRNMRSTCCTTASATPRSSGRGQGRAALEAAGSEDAAPDSGTWEAWECLSHR

SEQ ID NO: 823698 - protein, 282 aa, Homo sapiens; identical to SEQ ID NO: 823677

SEQ ID NO: 823699 - protein, 396 aa, Homo sapiens
LRLGSEAGCVIGRGGGEECGTLAGKGRLSPRALARPLRVWSVSSRHPCTARGNVPIAAEARGTPVQQRLEPWSLATAPIPPPAPNAFSSVPPSPEEAAEEEEEAPEEPEPVAEPEEERPKPSPPQLGPSTFRSLPGLAATSLDGTSRRWEVAQGGRATQWSLCFWPLSRPVVPPLIPPKIPEGERVDFDDIHRKRMEKDLLELQTLIDVHFEQRKKEEEELVALKERIERRRSERAEQQRFRTEEKMRKEEEEAKKRAEDDAKKKKVLSNMGAHFGGYLVKAEQKRGKRQTGREMKVRILSERKKPLDIDYMGEEQLREKAQELSDWIHQLESEKFDLMAKLVNSRNMRSTCCTTASATPRSSGRGQGRAALEAAGSEDAAPDSGTWEAWECLSHR

SEQ ID NO: 823700 - protein, 451 aa, Homo sapiens
SKAQPQDSQHLRRSLGRTRMSDTEEQEYEEEQPEEEAAEEEEEAPEEPEPVAEPEEERPKPSRPVVPPLIPPKIPEGERVDFDDIHRKRMEKDLLELQTLIDVHFEQRKKEEEELVALKERIERRRSERAEQQRFRTEKERERQAKLAEEKMRKEEEEAKKRAEDDAKKKKVLSNMGAHFGGYLVKAEQKRGKRQTGREMKVRILSERKKPLDIDYMGEEQLREKAQELSDWIHQLESEKFDLMAKLVNSRNMRSTCCTTASATPRSSGRGQGRAALEAAGSEDAAPDSGTWEAWECLSHVVNVQRLLTLGEDAHLHLPPRLPLTTLLFCLDQVAAKWAPMLDSTFFFLASSSARFLASSSSFLIFSSASFSLTFAFLLSSEALLLGSLCPAPLNALLQGNQLLFLLLPLLEMYIDECLQLQQVFLHALAVDVIEVNALPFWIFGGTSSRS

SEQ ID NO: 823701 - protein, 317 aa, Homo sapiens; identical to SEQ ID NO: 823694

SEQ ID NO: 823702 - protein, 208 aa, Homo sapiens
SKAQPQDSQHLRRSLGRTRMSDTEEQEYEEEQPEEEAAEEEEEAPEEPEPVAEPEEERPKPSRPVVPPLIPPKIPEGERVDFDDIHRKRMEKDLLELQTLIDVHFEQRKKEEEELVALKERIERRRSERAEQQRFRTEKERERQAKLAEEKMRKEEEEAKKRAEDDAKKKKVLSNMGAHFGGYLVKQNRSVVSGRSASLGDPARDRPS

SEQ ID NO: 823703 - protein, 150 aa, Homo sapiens
LYPSVFGMAPSRQPRRSSQRGPPGERGPPGPPGPPGVPGSDGIDGDNGPPGKAGPPGPKGEPGKAGPDGPDGKPGIDGLTGAKGEPGPMGIPGVKGQPGLPGPPGLPGPGFAGPPVSPQGWGRIPRTPREGGDNRKASREWPPWEGASLL

SEQ ID NO: 823704 - protein, 689 aa, Homo sapiens
MAAATASPRSLLVLLQVVVLALAQIRGPPGERGPPGPPGPPGVPGSDGIDGDNGPPGKAGPPGPKGEPGKAGPDGPDGKPGIDGLTGAKGEPGPMGIPGVKGQPGLPGPPGLPGPGFAGPPGPPGPVGLPGEIGIRGPKGDPGPDGPSGPPGPPGKPGRPGTIQGLEGSADFLCPTNCPPGMKGPPGLQGVKGHAGKRGILGDPGHQGKPGPKGDVGASGEQGIPGPPGPQGIRGYPGMAGPKGETGPHGYKGMVGAIGATGPPGEEGPRGPPGRAGEKGDEGSPGIRGPQGITGPKGATGPPGINGKDGTPGTPGMKGSAGQAGQPGSPGHQGLAGVPGQPGTKGGPGDQGEPGPQGLPGFSGPPGKEGEPGPRGEIGPQGIMGQKGDQGERGPVGQPGPQGRQGPKGEQGPPGIPGPQGLPGVKGDKGSPGKTGPRGKVGDPGVAGLPGEKGEKGESGEPGPKGQQGVRGEPGYPGPSGDAGAPGVQGYPGPPGPRGLAGNRGVPGQPGRQGVEGRDATDQHIVDVALKMLQEQLAEVAVSAKREALGAVGMMGPPGPPGPPGYPGKQGPHGHPGPRGVPGIVGAVGQIGNTGPKGKRGEKGDPGEVGRGHPGMPGPPGIPGLPGRPGQAINGKDGDRGSPGAPGEAGRPGLPGPVGLPGFCEPAACLGASAYASARLTEPGSIKGP

SEQ ID NO: 823705 - protein, 689 aa, Homo sapiens; identical to SEQ ID NO: 823704

SEQ ID NO: 823706 - protein, 306 aa, Homo sapiens [sequence omitted]

SEQ ID NO: 823707 - protein, 678 aa, Homo sapiens
TSPFRGPPGAAGARRGPPGERGPPGPPGPPGVPGSDGIDGDNGPPGKAGPPGPKGEPGKAGPDGPDGKPGIDGLTGAKGEPGPMGIPGVKGQPGLPGPPGLPGPGFAGPPGPPGPVGLPGEIGIRGPKGDPGPDGPSGPPGPPGKPGRPGTIQGLEGSADFLCPTNCPPGMKGPPGLQGVKGHAGKRGILGDPGHQGKPGPKGDVGASGEQGIPGPPGPQGIRGYPGMAGPKGETGPHGYKGMVGAIGATGPPGEEGPRGPPGRAGEKGDEGSPGIRGPQGITGPKGATGPPGINGKDGTPGTPGMKGSAGQAGQPGSPGHQGLAGVPGQPGTKGGPGDQGEPGPQGLPGFSGPPGKEGEPGPRGEIGPQGIMGQKGDQGERGPVGQPGPQGRQGPKGEQGPPGIPGPQGLPGVKGDKGSPGKTGPRGKVGDPGVAGLPGEKGEKGESGEPGPKGQQGVRGEPGYPGPSGDAGAPGVQGYPGPPGPRGLAGNRGVPGQPGRQGVEGRDATDQHIVDVALKMLQEQLAEVAVSAKREALGAVGMMGPPGPPGPPGYPGKQGPHGHPGPRGVPGIVGAVGQIGNTGPKGKRGEKGDPGEVGRGHPGMPGPPGIPGLPGRPGQAINGKDGDRGSPGAPGEAGRPGLPGPVGLPGFCEPAACLGASAYASARLTEPGSIKGP

SEQ ID NO: 823708 - protein, 618 aa, Homo sapiens
MAAATASPRSLLVLLQVVVLALAQIRGPPGERGPPGPPGPPGVPGSDGIDGPPGPVGLPGEIGIRGPKGDPGPDGPSGPPGPPGKPGRPGTIQGLEGSADFLCPTNCPPGMKGPPGLQGVKGHAGKRGILGDPGHQGKPGPKGDVGASGEQGIPGPPGPQGIRGYPGMAGPKGETGPHGYKGMVGAIGATGPPGEEGPRGPPGRAGEKGDEGSPGIRGPQGITGPKGATGPPGINGKDGTPGTPGMKGSAGQAGQPGSPGHQGLAGVPGQPGTKGGPGDQGEPGPQGLPGFSGPPGKEGEPGPRGEIGPQGIMGQKGDQGERGPVGQPGPQGRQGPKGEQGPPGIPGPQGLPGVKGDKGSPGKTGPRGKVGDPGVAGLPGEKGEKGESGEPGPKGQQGVRGEPGYPGPSGDAGAPGVQGYPGPPGPRGLAGNRGVPGQPGRQGVEGRDATDQHIVDVALKMLQEQLAEVAVSAKREALGAVGMMGPPGPPGPPGYPGKQGPHGHPGPRGVPGIVGAVGQIGNTGPKGKRGEKGDPGEVGRGHPGMPGPPGIPGLPGRPGQAINGKDGDRGSPGAPGEAGRPGLPGPVGLPGFCEPAACLGASAYASARLTEPGSIKGP

SEQ ID NO: 823709 - protein, 128 aa, Homo sapiens
PALQSGIELLPNSLIPLHVSLKAPTFLPHVPKSKRHQLGAPSPGSGSHSWHLMTSACLYLLACCCHPLQPGQGYSHAPVICFWFLFLRKRGLFSQRLQGLGDLDRREESEESLWERPARACVCPLGVV

SEQ ID NO: 823710 - protein, 689 aa, Homo sapiens; identical to SEQ ID NO: 823704

SEQ ID NO: 823711 - protein, 689 aa, Homo sapiens; identical to SEQ ID NO: 823704

SEQ ID NO: 823712 - protein, 689 aa, Homo sapiens
YPPTDKELLFSPPAAAHSEASSPSSPFPSLWGRRRLNPSPCLWHIWTLLQGDNGPPGKAGPPGPKGEPGKAGPDGPDGKPGIDGLTGAKGEPGPMGIPGVKGQPGLPGPPGLPGPGFAGPPGPPGPVGLPGEIGIRGPKGDPGPDGPSGPPGPPGKPGRPGTIQGLEGSADFLCPTNCPPGMKGPPGLQGVKGHAGKRGILGDPGHQGKPGPKGDVGASGEQGIPGPPGPQGIRGYPGMAGPKGETGPHGYKGMVGAIGATGPPGEEGPRGPPGRAGEKGDEGSPGIRGPQGITGPKGATGPPGINGKDGTPGTPGMKGSAGQAGQPGSPGHQGLAGVPGQPGTKGGPGDQGEPGPQGLPGFSGPPGKEGEPGPRGEIGPQGIMGQKGDQGERGPVGQPGPQGRQGPKGEQGPPGIPGPQGLPGVKGDKGSPGKTGPRGKVGDPGVAGLPGEKGEKGESGEPGPKGQQGVRGEPGYPGPSGDAGAPGVQGYPGPPGPRGLAGNRGVPGQPGRQGVEGRDATDQHIVDVALKMLQEQLAEVAVSAKREALGAVGMMGPPGPPGPPGYPGKQGPHGHPGPRGVPGIVGAVGQIGNTGPKGKRGEKGDPGEVGRGHPGMPGPPGIPGLPGRPGQAINGKDGDRGSPGAPGEAGRPGLPGPVGLPGFCEPAACLGASAYASARLTEPGSIKGP

SEQ ID NO: 823713 - protein, 781 aa, Homo sapiens
PALQSGIELLPNSLIPLHVSLKAPTFLPHVPKSKRHQLGAPSPGSGSHSWHLMTSACLYLLACCCHPLQPGQGYSHAPVICFWFLFLRKRGLFSQRLQGLGDLDRREESEESLWELACQGLCVPTWGSVSRSVLSPPTCILQGDNGPPGKAGPPGPKGEPGKAGPDGPDGKPGIDGLTGAKGEPGPMGIPGVKGQPGLPGPPGLPGPGFAGPPGPPGPVGLPGEIGIRGPKGDPGPDGPSGPPGPPGKPGRPGTIQGLEGSADFLCPTNCPPGMKGPPGLQGVKGHAGKRGILGDPGHQGKPGPKGDVGASGEQGIPGPPGPQGIRGYPGMAGPKGETGPHGYKGMVGAIGATGPPGEEGPRGPPGRAGEKGDEGSPGIRGPQGITGPKGATGPPGINGKDGTPGTPGMKGSAGQAGQPGSPGHQGLAGVPGQPGTKGGPGDQGEPGPQGLPGFSGPPGKEGEPGPRGEIGPQGIMGQKGDQGERGPVGQPGPQGRQGPKGEQGPPGIPGPQGLPGVKGDKGSPGKTGPRGKVGDPGVAGLPGEKGEKGESGEPGPKGQQGVRGEPGYPGPSGDAGAPGVQGYPGPPGPRGLAGNRGVPGQPGRQGVEGRDATDQHIVDVALKMLQEQLAEVAVSAKREALGAVGMMGPPGPPGPPGYPGKQGPHGHPGPRGVPGIVGAVGQIGNTGPKGKRGEKGDPGEVGRGHPGMPGPPGIPGLPGRPGQAINGKDGDRGSPGAPGEAGRPGLPGPVGLPGFCEPAACLGASAYASARLTEPGSIKGP

SEQ ID NO: 823714 - protein, 523 aa, Homo sapiens
YPPTDKELLFSPPAAAHSEASSPSSPFPSLWGRRRLNPSPCLWHIWTLLQGDNGPPGKAGPPGPKGEPGKAGPDGPDGKPGIDGLTGAKGEPGPMGIPGVKGQPGLPGPPGLPGPGFAGPPGPPGPVGLPGEIGIRGPKGDPGPDGPSGPPGPPGKPGRPGTIQGLEGSADFLCPTNCPPGMKGPPGLQGVKGHAGKRGILGDPGHQGKPGPKGDVGASGEQGIPGPPGPQGIRGYPGMAGPKGETGPHGYKGMVGAIGATGPPGEEGPRGPPGRAGEKGDEGSPGIRGPQGITGPKGATGPPGINGKDGTPGTPGMKGSAGQAGQPGSPGHQGLAGVPGQPGTKGGPGDQGEPGPQGLPGFSGPPGKEGEPGPRGEIGPQGIMGQKGDQGERGPVGQPGPQGRQGPKGEQGPPGIPGPQGLPGVKGDKGSPGKTGPRGKVGDPGVAGLPGEKGEKGESGEPGPKGQQGVRGEPGYPGPSGDAGAPGVQGYPGPPGPRGLAGNRGVPGQPGRQGVESNWQRSP

SEQ ID NO: 823715 - protein, 272 aa, Homo sapiens
MAAATASPRSLLVLLQVVVLALAQIRGPPGERGPPGPPGPPGVPGSDGIDGDNGPPGKAGPPGPKGEPGKAGPDGPDGKPGIDGLTGAKGEPGPMGIPGVKGQPGLPGPPGLPGPGFAGPPGPPGPVGLPGEIGIRGPKGDPGPDGPSGPPGPPGKPGRPGTIQGLEGSADFLCPTNCPPGMKGPPGLQGVKGHAGKRGILGDPGHQGKPVSARAEEPLYSLKSLDAPYLGPFPYPSLQHSQRWSTGGFQHHREADDSQISCSYTSFLLTAI

SEQ ID NO: 823716 - protein, 411 aa, Homo sapiens
SAAAGPGPAPRGSASRLGARHGDGGSAGLGGRPCIMETLSNASGTFAIRLLKILCQDNPSHNVFCSPVSISSALAMVLLGAKGNTATQMAQALSLNTEEDIHRAFQSLLTEVNKAGTQYLLRTANRLFGEKTCQFLSTFKESCLQFYHAELKELSFIRAAEESRKHINTWVSKKTEGKIEELLPGSSIDAETRLVLVNAIYFKGKWNEPFDETYTREMPFKINQEEQRPVQMMYQEATFKLAHVGEVRAQLLELPYARKELSLLVLLPDDGVELSTVEKSLTFEKLTAWTKPDCMKSTEVEVLLPKFKLQEDYDMESVLRHLGIVDAFQQGKADLSAMSAERDLCLSKFVHKSFVEVNEEGTEAAAASSCFVVAECCMESGPRFCADHPFLFFIRHNRANSILFCGRFSSP

SEQ ID NO: 823717 - protein, 411 aa, Homo sapiens; identical to SEQ ID NO: 823716

SEQ ID NO: 823718 - protein, 411 aa, Homo sapiens; identical to SEQ ID NO: 823716

SEQ ID NO: 823719 - protein, 376 aa, Homo sapiens; identical to SEQ ID NO: 739727

SEQ ID NO: 823720 - protein, 111 aa, Homo sapiens
MGDVLRLKSQQLFPAFLLGVFTTDALFRQWVSRDALSSLKQYHLISRERRGDLCLPTSSFPGMPSALLRGFSRNISSKSFWKLPMCPMSALPALSRPFWLLLTCPCIVTEC

SEQ ID NO: 823721 - protein, 411 aa, Homo sapiens; identical to SEQ ID NO: 823716

SEQ ID NO: 823722 - protein, 276 aa, Homo sapiens
MCVCAEDGKTLPVAVPIEDMQRIHLRFMFRHRSSLESKDKGEKNFAMSYVKLMKEDGTTLHDGFHDLVVLKGDSKKMEDASAYLTLPSYRHHVENKGATLSRSSSSVGGLSVSSRDVFSISTLVCSTKLTQNVGLHELLKWRMTLNWKNHETVLNHHNLMKATTNTHPYAGGGFEIHSMWFCMMQQMELMGRYQTSLYEWRRSPLGTPKRTYAYIKSNAALKDEAGNGSDAKNRRLTKEETLKKGHEKRPEGTTMTTGRQRIWEVNEETHTSLHVT

SEQ ID NO: 823723 - protein, 1138 aa, Homo sapiens
LPHGRTRGPGPAMAPWRKADKERHGVAIYNFQGSGAPQLSLQIGDVVRIQETCGDWYRGYLIKHKMLQGIFPKSFIHIKEVTVEKRRNTENIIPAEIPLAQEVTTTLWEWGSIWKQLYVASKKERFLQVQSMMYDLMEWRSQLLSGTLPKDELKELKQKVTSKIDYGNKILELDLIVRDEDGNILDPDNTSVISLFHAHEEATDKITERIKEEMSKDQPDYAMYSRISSSPTHSLYVFVRNFVCRIGEDAELFMSLYDPNKQTVISENYLVRWGSRGFPKEIEMLNNLKVVFTDLGNKDLNRDKIYLICQIVRVGKMDLKDTGAKKCTQGLRRPFGVAVMDITDIIKGKAESDEEKQHFIPFHPVTAENDFLHSLLGKVIASKGDSGGQGLWVTMKMLVGDIIQIRKDYPHLVDRTTVVARKLGFPEIIMPGDVRNDIYITLLQGDFDKYNKTTQRNVEVIMCVCAEDGKTLPNAICVGAGDKPMNEYRSVVYYQVKQPRWMETVKVAVPIEDMQRIHLRFMFRHRSSLESKDKGEKNFAMSYVKLMKEDGTTLHDGFHDLVVLKGDSKKMEDASAYLTLPSYRHHVENKGATLSRSSSSVGGLSVSSRDVFSISTLVCSTKLTQNVGLLGLLKWRMKPQLLQENLEKLKIVDGEEVVKFLQDTLDALFNIMMEHSQSDEYDILVFDALIYIIGLIADRKFQHFNTVLEAYIQQHFSATLAYKKLMTVLKTYLDTSSRGEQCEPILRTLKALEYVFKFIVRSRTLFSQLYEGKEQMEFEESMRRLFESINNLMKSQYKTTILLQVAALKYIPSVLHDVEMVFDAKLLSQLLYEFYTCIPPVKLQKQKVQSMNEIVQSNLFKKQECRDILLPVITKELKELLEQKDDMQHQVLERKYCVELLNSILEVLSYQDAAFTYHHIQEIMVQLLRTVNRTVITMGRDHILISHFVACMTAILNQMGDQHYSFYIETFQTSSELVDFLMETFIMFKDLIGKNVYPGDWMAMSMVQNRVFLRAINKFAETMNQKFLEHTNFEFQLWNNYFHLAVAFITQDSLQLEQFSHAKYNKILNKYGDMRRLIGFSIRDMWYKLGQNKICFIPGMVGPILEMTLIPEAELRKATIPIFFDMMLCGFRGILIES

SEQ ID NO: 823724 - protein, 1069 aa, Homo sapiens
LPHGRTRGPGPAMAPWRKADKERHGVAIYNFQGSGAPQLSLQIGDVVRIQETCGDWYRGYLIKHKMLQGIFPKSFIHIKEVTVEKRRNTENIIPAEIPLAQEVTTTLWEWGSIWKQLYVASKKERFLQVQSMMYDLMEWRSQLLSGTLPKDELKELKQKVTSKIDYGNKILELDLIVRDEDGNILDPDNTSVISLFHAHEEATDKITERIKEEMSKDQPDYAMYSRISSSPTHSLYVFVRNFVCRIGEDAELFMSLYDPNKQTVISENYLVRWGSRGFPKEIEMLNNLKVVFTDLGNKDLNRDKIYLICQIVRVGKMDLKDTGAKKCTQGLRRPFGVAVMDITDIIKGKAESDEEKQHFIPFHPVTAENDFLHSLLGKVIASKGDSGGQGLWVTMKMLVGDIIQIRKDYPHLVDRTTVVARKLGFPEIIMPGDVRNDIYITLLQGDFDKYNKTTQRNVEVIMCVCAEDGKTLPNAICVGAGDKPMNEYRSVVYYQVKQPRWMETVKVAVPIEDMQRIHLRFMFRHRSSLESKDKGEKNFAMSYVKLMKEDGTTLHDGFHDLVVLKGDSKKMEDASAYLTLPSYRHHVENKGATLSRSSSSVGGLSVSSRDVFSISTLVCSTKLTQNVGLLGLLKWRMKPQLLQENLEKLKIVDGEEVVKFLQDTLDALFNIMMEHSQSDEYDILVFDALIYIIGLIADRKFQHFNTVLEAYIQQHFSATLAYKKLMTVLKTYLDTSSRGEQCEPILRTLKALEYVFKFIVRSRTLFSQLYEGKEQMEFEESMRRLFESINNLMKSQYKTTILLQVAALKYIPSVLHDVEMVFDAKLLSQLLYEFYTCIPPVKLQKQKVQSMNEIVQSNLFKKQECRDILLPVITKELKELLEQKDDMQHQVLERKYCVELLNSILEVLSYQDAAFTYHHIQEIMVQLLRTVNRTVITMGRDHILISHFVACMTAILNQMGDQHYSFYIETFQTSSELVDFLMETFIMFKDLIGKNVYPGDWMAMSMVQNRVFLRAINKFAETMNQKFLEHTNFEFQALFRMLVLGVCISSCGQGRPREDFKFKSAGIFV

SEQ ID NO: 823725 - protein, 951 aa, Homo sapiens
LPHGRTRGPGPAMAPWRKADKERHGVAIYNFQGSGAPQLSLQIGDVVRIQETCGDWYRGYLIKHKMLQGIFPKSFIHIKEVTVEKRRNTENIIPAEIPLAQEVTTTLWEWGSIWKQLYVASKKERFLQVQSMMYDLMEWRSQLLSGTLPKDELKELKQKVTSKIDYGNKILELDLIVRDEDGNILDPDNTSVISLFHAHEEATDKITERIKEEMSKDQPDYAMYSRISSSPTHSLYVFVRNFVCRIGEDAELFMSLYDPNKQTVISENYLVRWGSRGFPKEIEMLNNLKVVFTDLGNKDLNRDKIYLICQIVRVGKMDLKDTGAKKCTQGLRRPFGVAVMDITDIIKGKAESDEEKQHFIPFHPVTAENDFLHSLLGKVIASKGDSGGQGLWVTMKMLVGDIIQIRKDYPHLVDRTTVVARKLGFPEIIMPGDVRNDIYITLLQGDFDKYNKTTQRNVEVIMCVCAEDGKTLPNAICVGAGDKPMNEYRSVVYYQVKQPRWMETVKVAVPIEDMQRIHLRFMFRHRSSLESKDKGEKNFAMSYVKLMKEDGTTLHDGFHDLVVLKGDSKKMEDASAYLTLPSYRHHVENKGATLSRSSSSVGGLSVSSRDVFSISTLVCSTKLTQNVGLLGLLKWRMKPQLLQENLEKLKIVDGEEVVKFLQDTLDALFNIMMEHSQSDEYDILVFDALIYIIGLIADRKFQHFNTVLEAYIQQHFSATLAYKKLMTVLKTYLDTSSRGEQCEPILRTLKALEYVFKFIVRSRTLFSQLYEGKEQMEFEESMRRLFESINNLMKSQYKTTILLQVAALKYIPSVLHDVEMVFDAKLLSQLLYEFYTCIPPVKLQKQKVQSMNEIVQSNLFKKQECRDILLPVITKELKELLEQKDDMQHQVLERKYCVELLNSILEVLSYQDAAFTYHHIQEIMVQLLRTVNRTVITMGRDHILINPARTL

SEQ ID NO: 823726 - protein, 121 aa, Homo sapiens
CRGVQWGGPFNSLCSELCFCLLRWLSLLKTCRGSICDSCFDIGHLWNVSTILNGISAPPPKGRRMEELGGPCIIFFPDPTMLFPAKDKGEKNFAMSYVKLMKEDGTTLHDGFHDLVVLKVP

SEQ ID NO: 823727 - protein, 1842 aa, Homo sapiens
LPHGRTRGPGPAMAPWRKADKERHGVAIYNFQGSGAPQLSLQIGDVVRIQETCGDWYRGYLIKHKMLQGIFPKSFIHIKEVTVEKRRNTENIIPAEIPLAQEVTTTLWEWGSIWKQLYVASKKERFLQVQSMMYDLMEWRSQLLSGTLPKDELKELKQKVTSKIDYGNKILELDLIVRDEDGNILDPDNTSVISLFHAHEEATDKITERIKEEMSKDQPDYAMYSRISSSPTHSLYVFVRNFVCRIGEDAELFMSLYDPNKQTVISENYLVRWGSRGFPKEIEMLNNLKVVFTDLGNKDLNRDKIYLICQIVRVGKMDLKDTGAKKCTQGLRRPFGVAVMDITDIIKGKAESDEEKQHFIPFHPVTAENDFLHSLLGKVIASKGDSGGQGLWVTMKMLVGDIIQIRKDYPHLVDRTTVVARKLGFPEIIMPGDVRNDIYITLLQGDFDKYNKTTQRNVEVIMCVCAEDGKTLPNAICVGAGDKPMNEYRSVVYYQVKQPRWMETVKVAVPIEDMQRIHLRFMFRHRSSLESKDKGEKNFAMSYVKLMKEDGTTLHDGFHDLVVLKGDSKKMEDASAYLTLPSYRHHVENKGATLSRSSSSVGGLSVSSRDVFSISTLVCSTKLTQNVGLLGLLKWRMKPQLLQENLEKLKIVDGEEVVKFLQDTLDALFNIMMEHSQSDEYDILVFDALIYIIGLIADRKFQHFNTVLEAYIQQHFSATLAYKKLMTVLKTYLDTSSRGEQCEPILRTLKALEYVFKFIVRSRTLFSQLYEGKEQMEFEESMRRLFESINNLMKSQYKTTILLQVAALKYIPSVLHDVEMVFDAKLLSQLLYEFYTCIPPVKLQKQKVQSMNEIVQSNLFKKQECRDILLPVITKELKELLEQKDDMQHQVLERKYCVELLNSILEVLSYQDAAFTYHHIQEIMVQLLRTVNRTVITMGRDHILISHFVACMTAILNQMGDQHYSFYIETFQTSSELVDFLMETFIMFKDLIGKNVYPGDWMAMSMVQNRVFLRAINKFAETMNQKFLEHTNFEFQLWNNYFHLAVAFITQDSLQLEQFSHAKYNKILNKYGDMRRLIGFSIRDMWYKLGQNKICFIPGMVGPILEMTLIPEAELRKATIPIFFDMMLCEYQRSGDFKKFENEIILKLDHEVEGGRGDEQYMQLLESILMECAAEHPTIAKSVENFVNLVKGLLEKLLDYRGVMTDESKDNRMSCTVNLLNFYKDNNREEMYIRYLYKLRDLHLDCDNYTEAAYTLLLHTWLLKWSDEQCASQVMQTGQQHPQTHRQLKETLYETIIGYFDKGKMWEEAISLCKELAEQYEMEIFDYELLSQNLIQQAKFYESIMKILRPKPDYFAVGYYGQGFPSFLRNKVFIYRGKEYERREDFQMQLMTQFPNAEKMNTTSAPGDDVKNAPGQYIQCFTVQPVLDEHPRFKNKPVPDQIINFYKSNYVQRFHYSRPVRRGTVDPENEFASMWIERTSFVTAYKLPGILRWFEVVHMSQTTISPLENAIETMSTANEKILMMINQYQSDETLPINPLSMLLNGIVDPAVMGGFAKYEKAFFTEEYVRDHPEDQDKLTHLKDLIAWQIPFLGAGIKIHEKRVSDNLRPFHDRMEECFKNLKMKVEKEYGVREMPDFDDRRVGRPRSMLRSYRQMSIISLASMNSDCSTPSKPTSESFDLELASPKTPRVEQEEPISPGSTLPEVKLRRSKKRTKRSSVVFADEKAAAESDLKRLSRKHEFMSDTNLSEHAAIPLKASVLSQMSFASQSMPTIPALALSVAGIPGLDEANTSPRLSQTFLQLSDGDKKTLTRKKVNQFFKTMLASKSAEEGKQIPDSLSTDL

SEQ ID NO: 823728 - protein, 1842 aa, Homo sapiens; identical to SEQ ID NO: 823727

SEQ ID NO: 823729 - protein, 957 aa, Homo sapiens
LPHGRTRGPGPAMAPWRKADKERHGVAIYNFQGSGAPQLSLQIGDVVRIQETCGDWYRGYLIKHKMLQGIFPKSFIHIKEVTVEKRRNTENIIPAEIPLAQEVTTTLWEWGSIWKQLYVASKKERFLQVQSMMYDLMEWRSQLLSGTLPKDELKELKQKVTSKIDYGNKILELDLIVRDEDGNILDPDNTSVISLFHAHEEATDKITERIKEEMSKDQPDYAMYSRISSSPTHSLYVFVRNFVCRIGEDAELFMSLYDPNKQTVISENYLVRWGSRGFPKEIEMLNNLKVVFTDLGNKDLNRDKIYLICQIVRVGKMDLKDTGAKKCTQGLRRPFGVAVMDITDIIKGKAESDEEKQHFIPFHPVTAENDFLHSLLGKVIASKGDSGGQGLWVTMKMLVGDIIQIRKDYPHLVDRTTVVARKLGFPEIIMPGDVRNDIYITLLQGDFDKYNKTTQRNVEVIMCVCAEDGKTLPNAICVGAGDKPMNEYRSVVYYQVKQPRWMETVKVAVPIEDMQRIHLRFMFRHRSSLESKDKGEKNFAMSYVKLMKEDGTTLHDGFHDLVVLKGDSKKMEDASAYLTLPSYRHHVENKGATLSRSSSSVGGLSVSSRDVFSISTLVCSTKLTQNVGLLGLLKWRMKPQLLQENLEKLKIVDGEEVVKFLQDTLDALFNIMMEHSQSDEYDILVFDALIYIIGLIADRKFQHFNTVLEAYIQQHFSATLAYKKLMTVLKTYLDTSSRGEQCEPILRTLKALEYVFKFIVRSRTLFSQLYEGKEQMEFEESMRRLFESINNLMKSQYKTTILLQVAALKYIPSVLHDVEMVFDAKLLSQLLYEFYTCIPPVKLQKQKVQSMNEIVQSNLFKKQECRDILLPVITKELKELLEQKDDMQHQVLERKYCVELLNSILEVLSYQDAAFTYHHIQEIMVQLLRTVNRTVITMGRDHILIGACCNCGFPSST

SEQ ID NO: 823730 - protein, 137 aa, Homo sapiens
QLPGYSRGTMFSKGHKTSLPSKLPCQESLCKSHSYGAQNTDLDFKCTTRDSARPEVYCNEPPWTVQGQIGCQQPGMATRSLSLFLSFSFYKSNYVQRFHYSRPVRRGTVDPENEFAVSIFPTLDHSLEPPGGTRACI

SEQ ID NO: 823731 - protein, 418 aa, Homo sapiens
MTEETHPDDDSYIVRVKAVVMTRDDSSGGWFPQEGGGISRVGVCKVMHPEGNGRSGFLIHGERQKDKLVVLECYVRKDLVYTKANPTFHHWKVDNRKFGLTFQSPADARAFDRGVRKAIEDLIEGSTTSSSTIHNEAELGDDDVFTTATDSSSNSSQKREQPTRTISSPTSCEHRRIYTLGHLHDSYPTDHYHLDQPMPRPYRQVSFPDDDEEIVRINPREKIWMTGYEDYRHAPVRGKYPDPSEDADSSYVRFAKGEVPKHDYNYPYVDSSDFGLGEDPKGRGGSVIKTQPSRGKSRRRKEDGERSRCVYCRDMFNHEENRRGHCQDAPDSVRTCIRRVSCMWCADSMLYHCMSDPEGDYTDPCSCDTSDEKFCLRWMALIALSFLAPCMCCYLPLRACYHCGVMCRCCGGKHKAAA

SEQ ID NO: 823732 - protein, 418 aa, Homo sapiens; identical to SEQ ID NO: 823731

SEQ ID NO: 823733 - protein, 418 aa, Homo sapiens; identical to SEQ ID NO: 823731

SEQ ID NO: 823734 - protein, 415 aa, Homo sapiens
MASPGSDSYIVRVKAVVMTRDDSSGGWFPQEGGGISRVGVCKVMHPEGNGRSGFLIHGERQKDKLVVLECYVRKDLVYTKANPTFHHWKVDNRKFGLTFQSPADARAFDRGVRKAIEDLIEGSTTSSSTIHNEAELGDDDVFTTATDSSSNSSQKREQPTRTISSPTSCEHRRIYTLGHLHDSYPTDHYHLDQPMPRPYRQVSFPDDDEEIVRINPREKIWMTGYEDYRHAPVRGKYPDPSEDADSSYVRFAKGEVPKHDYNYPYVDSSDFGLGEDPKGRGGSVIKTQPSRGKSRRRKEDGERSRCVYCRDMFNHEENRRGHCQDAPDSVRTCIRRVSCMWCADSMLYHCMSDPEGDYTDPCSCDTSDEKFCLRWMALIALSFLAPCMCCYLPLRACYHCGVMCRCCGGKHKAAA

SEQ ID NO: 823735 - protein, 418 aa, Homo sapiens; identical to SEQ ID NO: 823731

SEQ ID NO: 823736 - protein, 418 aa, Homo sapiens; identical to SEQ ID NO: 823731

SEQ ID NO: 823737 - protein, 418 aa, Homo sapiens; identical to SEQ ID NO: 823731

SEQ ID NO: 823738 - protein, 313 aa, Homo sapiens
MTEETHPDDDSYIVRVKAVVMTRDDSSGGWFPQEGGGISRVGVCKVMHPEGNGRSGFLIHGERQKDKLVVLECYVRKDLVYTKANPTFHHWKVDNRKFGLTFQSPADARAFDRGVRKAIEDLIEGSTTSSSTIHNEAELGDDDVFTTATDSSSNSSQKREQPTRTISSPTSCEHRRIYTLGHLHDSYPTDHYHLDQPMPRPYRQVSFPDDDEEIVRINPREKIWMTGYEDYRHAPVRGKYPDPSEDADSSYVRFRRGSPKLTKIPYVISIWLGKNQSGGQYQSTPGSAGQEKHPGVCGFTPGSGCERPKIRKM

SEQ ID NO: 823739 - protein, 144 aa, Homo sapiens
MTEETHPDDDSYIVRVKAVVMTRDDSSGGWFPQEGGGISRVGVCKVMHPEGNGRSGFLIHGERQKDKLVVLECYVRKDLVYTKANPTFHHWKVDNRKFGLTFQSPADARAFDRGVRKAIEDLIEEVENGFWRAQKAPGLPTVLL

SEQ ID NO: 823740 - protein, 392 aa, Homo sapiens
MAVVAAAAGWLLRLRAAGAEGHWRRLPGAGLARGFLHPAATVEDAAQRRQVAHFTFQPDPEPREYGQTQKMNLFQSVTSALDNSLAKDPTAVIFGEDVAFGGVFRCTVGLRDKYGKDRVFNTPLCEQGIVGFGIGIAVTGATAIAEIQFADYIFPAFDQIVNEAAKYRYRSGDLFNCGSLTIRSPWGCVGHGALYHSQSPEAFFAHCPGIKVVIPRSPFQAKGLLLSCIEDKNPCIFFEPKILYRAAAEEVPIEPYNIPLSQAEVIQEGSDVTLVAWGTQVHVIREVASMAKEKLGVSCEVIDLRTIIPWDVDTICKSVIKTGRLLISHEAPLTGGFASEISSTVQEECFLNLEAPISRVCGYDTPFPHIFEPFYIPDKWKCYDALRKMINY

SEQ ID NO: 823741 - protein, 392 aa, Homo sapiens; identical to SEQ ID NO: 823740

SEQ ID NO: 823742 - protein, 218 aa, Homo sapiens
MAVVAAAAGWLLRLRAAGAEGHWRRLPGAGLARGFLHPAATVEDAAQRRQVAHFTFQPDPEPREYGQTQKMNLFQSVTSALDNSLAKDPTAVIFGEDVAFGGVFRCTVGLRDKYGKDRVFNTPLCEQGIVGFGIGIAVTGATAIAEIQFADYIFPAFDQIVNEAAKYRYRSGDLFNCGSLTIRSPWGCVGHGALYHSQSPEAFFAHCPGIKIKVISLS

SEQ ID NO: 823743 - protein, 392 aa, Homo sapiens; identical to SEQ ID NO: 823740

SEQ ID NO: 823744 - protein, 392 aa, Homo sapiens; identical to SEQ ID NO: 823740

SEQ ID NO: 823745 - protein, 353 aa, Homo sapiens
MAVVAAAAGWLLRLRAAGAEGHWRRLPGAGLARGFLHPAATVEDAAQRRQVAHFTFQPDPEPREYGQTQKMNLFQSVTSALDNSLAKDPTAVIFGEDVAFGGVFRCTVGLRDKYGKDRVFNTPLCEQGIVGFGIGIAVTGATAIAEIQFADYIFPAFDQIVNEAAKYRYRSGDLFNCGSLTIRSPWGCVGHGALYHSQSPEAFFAHCPGIKVVIPRSPFQAKGLLLSCIEDKNPCIFFEPKILYRAAAEEVPIEPYNIPLSQAEVIQEGSDVTLVAWGTQVHVIREVASMAKEKLGVSCEVIDLRTIIPWDVDTICKSVIKTGRLLISHEAPLTGGFASEISSTVQQLEDTGD

SEQ ID NO: 823746 - protein, 392 aa, Homo sapiens; identical to SEQ ID NO: 823740

SEQ ID NO: 823747 - protein, 75 aa, Homo sapiens
CTKPSGWKAQWPAPRLVASRPPRQGCTSVSLVLLLTGQTARSPLPAAALTGTDDFAGKCGGQLCLSVDGSSAIPA

SEQ ID NO: 823748 - protein, 75 aa, Homo sapiens; identical to SEQ ID NO: 823747

SEQ ID NO: 823749 - protein, 153 aa, Homo sapiens
MGKISSLPTQLFKCCFCDFLKVKMHTMSSSHLFYLALCLLTFTSSATAGPETLCGAELVDALQFVCGDRGFYFNKPTGYGSSSRRAPQTGIVDECCFRSCDLRRLEMYCAPLKPAKSARSVRAQRHTDMPKTQKEVHLKNASRGSAGNKNYRM

SEQ ID NO: 823750 - protein, 153 aa, Homo sapiens; identical to SEQ ID NO: 823749

SEQ ID NO: 823751 - protein, 137 aa, Homo sapiens
MITPTVKMHTMSSSHLFYLALCLLTFTSSATAGPETLCGAELVDALQFVCGDRGFYFNKPTGYGSSSRRAPQTGIVDECCFRSCDLRRLEMYCAPLKPAKSARSVRAQRHTDMPKTQKEVHLKNASRGSAGNKNYRM

SEQ ID NO: 823752 - protein, 104 aa, Homo sapiens
MRPLCLICADKPTGYGSSSRRAPQTGIVDECCFRSCDLRRLEMYCAPLKPAKSARSVRAQRHTDMPKTQKVSPPGWDPAILKWSLSCACGWAKQKSCPIVSWLT

SEQ ID NO: 823753 - protein, 195 aa, Homo sapiens
MGKISSLPTQLFKCCFCDFLKVKMHTMSSSHLFYLALCLLTFTSSATAGPETLCGAELVDALQFVCGDRGFYFNKPTGYGSSSRRAPQTGIVDECCFRSCDLRRLEMYCAPLKPAKSARSVRAQRHTDMPKTQKYQPPSTNKNTKSQRRKGWPKTHPGGEQKEGTEASLQIRGKKKEQRREIGSRNAECRGKKGK

SEQ ID NO: 823754 - protein, 153 aa, Homo sapiens; identical to SEQ ID NO: 823749

SEQ ID NO: 823755 - protein, 341 aa, Homo sapiens
TEAAGGAAGGGGAAAERSIMADRDSGSEQGGAALGSGGSLGHPGSGSGSGGGGGGGGGGGGSGGGGGGAPGGLQHETQELASKRVDIQNKRFYLDVKQNAKGRFLKIAEVGAGGNKSRLTLSMSVAVEFRDYLGDFIEHYAQLGPSQPPDLAQAQDEPRRALKSEFLVRENRKYYMDLKENQRGRFLRIRQTVNRGPGLGSTQGQTIALPAQGLIEFRDALAKLIDDYGVEEEPAELPEGTSLTVDNKRFFFDVGSNKYGVFMRVSEVKPTYRNSITVPYKVWAKFGHTFCKYSEEMKKIQEKQREKRAACEQLHQQQQQQQEETAAATLLLQGEEEGEED

SEQ ID NO: 823756 - protein, 341 aa, Homo sapiens; identical to SEQ ID NO: 823755

SEQ ID NO: 823757 - protein, 341 aa, Homo sapiens; identical to SEQ ID NO: 823755

SEQ ID NO: 823758 - protein, 322 aa, Homo sapiens
TEAAGGAAGGGGAAAERSIMADRDSGSEQGGAALGSGGSLGHPGSGSGSGGGGGGGGGGGGSGGGGGGAPGGLQHETQELASKRVDIQNKRFYLDVKQNAKGRFLKIAEVGAGGNKSRLTLSMSVAVEFRDYLGDFIEHYAQLGPSQPPDLAQAQDEPRRALKSEFLVRENRKYYMDLKENQRGRFLRIRQTVNRGPGLGSTQGQTIALPAQGLIEFRDALAKLIDDYGVEEEPAELPEGTSLTVDNKRFFFDVGSNKYGVFMRVSEVKPTYRNSITVPYKVWAKFGHTFCKYSEEMKKIQEKQREKRSPPAAAVAAGEAAS

SEQ ID NO: 823759 - protein, 341 aa, Homo sapiens; identical to SEQ ID NO: 823755

SEQ ID NO: 823760 - protein, 341 aa, Homo sapiens; identical to SEQ ID NO: 823755

SEQ ID NO: 823761 - protein, 156 aa, Homo sapiens
MPVAAICGTFGKVKGDAFQHCSVTLDEPTVDYVLVHGWLIDDYGVEEEPAELPEGTSLTVDNKRFFFDVGSNKYGVFMRVSEVKPTYRNSITVPYKVWAKFGHTFCKYSEEMKKIQEKQREKRAACEQLHQQQQQQQEETAAATLLLQGEEEGEED

SEQ ID NO: 823762 - protein, 323 aa, Homo sapiens
MSDRPTARRWGKCGPLCTRENIMVAFKGVWTQAFWKAVTAEFLAMLIFVLLSLGSTINWGGTEKPLPVDMVLISLCFGLSIATMVQCFGHISGGHINPAVTVAMVCTRKISIAKSVFYIAAQCLGAIIGAGILYLVTPPSVVGGLGVTMVHGNLTAGHGLLVELIITFQLVFTIFASCDSKRTDVTGSIALAIGFSVAIGHLFAINYTGASMNPARSFGPAVIMGNWENHWIYWVGPIIGAVLAGGLYEYVFCPDVEFKRRFKEAFSKAAQQTKGSYMEVEDNRSQVETDDLILKPGVVHVIDVDRGEEKKGKDQSGEVLSSV

SEQ ID NO: 823763 - protein, 323 aa, Homo sapiens; identical to SEQ ID NO: 823762

SEQ ID NO: 823764 - protein, 301 aa, Homo sapiens
MVAFKGVWTQAFWKAVTAEFLAMLIFVLLSLGSTINWGGTEKPLPVDMVLISLCFGLSIATMVQCFGHISGGHINPAVTVAMVCTRKISIAKSVFYIAAQCLGAIIGAGILYLVTPPSVVGGLGVTMVHGNLTAGHGLLVELIITFQLVFTIFASCDSKRTDVTGSIALAIGFSVAIGHLFAINYTGASMNPARSFGPAVIMGNWENHWIYWVGPIIGAVLAGGLYEYVFCPDVEFKRRFKEAFSKAAQQTKGSYMEVEDNRSQVETDDLILKPGVVHVIDVDRGEEKKGKDQSGEVLSSV

SEQ ID NO: 823765 - protein, 112 aa, Homo sapiens
MNPARSFGPAVIMGNWENHWIYWVGPIIGAVLAGGLYEYVFCPDVEFKRRFKEAFSKAAQQTKGSYMEVEDNRSQVETDDLILKPGVVHVIDVDRGEEKKGKDQSGEVLSSV

SEQ ID NO: 823766 - protein, 323 aa, Homo sapiens; identical to SEQ ID NO: 823762

SEQ ID NO: 823767 - protein, 323 aa, Homo sapiens; identical to SEQ ID NO: 823762

SEQ ID NO: 823768 - protein, 323 aa, Homo sapiens; identical to SEQ ID NO: 823762

SEQ ID NO: 823769 - protein, 323 aa, Homo sapiens; identical to SEQ ID NO: 823762

SEQ ID NO: 823770 - protein, 141 aa, Homo sapiens
  misc_feature (124)..(124): Xaa can be any naturally occurring amino acid
EHRARYPAIYSMAKFAYRGVLNSPVKAVRDTLITQCAQILACYRKNCASPSSAGQLILPECMKLLPVYLNCVLKSDVLQPGAEVTTDDRAYVRQLVTSMDVTETNVFFYPRLLPLSAFPPDHSXAAAKVSSYDPFVPDATS

SEQ ID NO: 823771 - protein, 1094 aa, Homo sapiens
MNVNQSVPPVPPFGQPQPIYPGYHQSSYGGQSGSTAPAIPYGAYNGPVPGYQQTPPQGMSRAPPSSGAPPASTAQAPCGQAAYGQFGQGDVQNGPSSTVQMQRLPGSQPFGSPLAPVGNQPPVLQPYGPPPTSAQVATQLSGMQISGAVAPAPPSSGLGFGPPTSLASASGSFPNSGLYGSYPQGQAPPLSQAQGHPGIQTPQRSAPSQASSFTPPASGGPRLPSMTGPLLPGQSFGGPSVSQPNHVSSPPQALPPGTQMTGPLGPLPPMHSPQQPGYQPQQNGSFGPARGPQSNYGGPYPAAPTFGSQPGPPQPLPPKRLDPDAIPSPIQVIEDDRNNRGTEPFVTGVRGQVPPLVTTNFLVKDQGNASPRYIRCTSYNIPCTSDMAKQAQVPLAAVIKPLARLPPEEASPYVVDHGESGPLRCNRCKAYMCPFMQFIEGGRRFQCCFCSCINDVPPQYFQHLDHTGKRVDAYDRPELSLGSYEFLATVDYCKNNKFPSPPAFIFMIDVSYNAIRTGLVRLLCEELKSLLDFLPREGGAEESAIRVGFVTYNKVLHFYNVKSSLAQPQMMVVSDVADMFVPLLDGFLVNVNESRAVITSLLDQIPEMFADTRETETVFVPVIQAGMEALKAAECAGKLFLFHTSLPIAEAPGKLKNRDDRKLINTDKEKTLFQPQTGAYQTLAKECVAQGCCVDLFLFPNQYVDVATLSVVPQLTGGSVYKYASFQVENDQERFLSDLRRDVQKVVGFDAVMRVRTSTGIRAVDFFGAFYMSNTTDVELAGLDGDKTVTVEFKHDDRLNEESGALLQCALLYTSCAGQRRLRIHNLALNCCTQLADLYRNCETDTLINYMAKFAYRGVLNSPVKAVRDTLITQCAQILACYRKNCASPSSAGQLILPECMKLLPVYLNCVLKSDVLQPGAEVTTDDRAYVRQLVTSMDVTETNVFFYPRLLPLTKSPVESTTEPPAVRASEERLSNGDIYLLENGLNLFLWVGASVQQGVVQSLFSVSSFSQITSGLSVLPVLDNPLSKKVRGLIDSLRAQRSRYMKLTVVKQEDKMEMLFKHFLVEDKSLSGGASYVDFLCHMHKEIRQLLS

SEQ ID NO: 823772 - protein, 1094 aa, Homo sapiens; identical to SEQ ID NO: 823771

SEQ ID NO: 823773 - protein, 1094 aa, Homo sapiens; identical to SEQ ID NO: 823771

SEQ ID NO: 823774 - protein, 1094 aa, Homo sapiens; identical to SEQ ID NO: 823771

SEQ ID NO: 823775 - protein, 729 aa, Homo sapiens
  misc_feature (8)..(8): Xaa can be any naturally occurring amino acid
MLLLLGFXGERGRASWSAVLSCWDTAWALVLTEWLIVIFQTPEEASPYVVDHGESGPLRCNRCKAYMCPFMQFIEGGRRFQCCFCSCINDVPPQYFQHLDHTGKRVDAYDRPELSLGSYEFLATVDYCKNNKFPSPPAFIFMIDVSYNAIRTGLVRLLCEELKSLLDFLPREGGAEESAIRVGFVTYNKVLHFYNVKSSLAQPQMMVVSDVADMFVPLLDGFLVNVNESRAVITSLLDQIPEMFADTRETETVFVPVIQAGMEALKAAECAGKLFLFHTSLPIAEAPGKLKNRDDRKLINTDKEKTLFQPQTGAYQTLAKECVAQGCCVDLFLFPNQYVDVATLSVVPQLTGGSVYKYASFQVENDQERFLSDLRRDVQKVVGFDAVMRVRTSTGIRAVDFFGAFYMSNTTDVELAGLDGDKTVTVEFKHDDRLNEESGALLQCALLYTSCAGQRRLRIHNLALNCCTQLADLYRNCETDTLINYMAKFAYRGVLNSPVKAVRDTLITQCAQILACYRKNCASPSSAGQLILPECMKLLPVYLNCVLKSDVLQPGAEVTTDDRAYVRQLVTSMDVTETNVFFYPRLLPLTKSPVESTTEPPAVRASEERLSNGDIYLLENGLNLFLWVGASVQQGVVQSLFSVSSFSQITSGLSVLPVLDNPLSKKVRGLIDSLRAQRSRYMKLTVVKQEDKMEMLFKHFLVEDKSLSGGASYVDFLCHMHKEIRQLLS

SEQ ID NO: 823776 - protein, 961 aa, Homo sapiens
MNVNQSVPPVPPFGQPQPIYPGYHQSSYGGQSGSTAPAIPYGAYNGPVPGYQQTPPQGMSRAPPSSGAPPASTAQAPCGQAAYGQFGQGDVQNGPSSTVQMQRLPGSQPFGSPLAPVGNQPPVLQPYGPPPTSAQVATQLSGMQISGAVAPAPPSSGLGFGPPTSLASASGSFPNSGLYGSYPQGQAPPLSQAQGHPGIQTPQRSAPSQASSFTPPASGGPRLPSMTGPLLPGQSFGGPSVSQPNHVSSPPQALPPGTQMTGPLGPLPPMHSPQQPGYQPQQNGSFGPARGPQSNYGGPYPAAPTFGSQPGPPQPLPPKRLDPDAIPSPIQVIEDDRNNRGTEPFVTGVRGQVPPLVTTNFLVKDQGNASPRYIRCTSYNIPCTSDMAKQAQVPLAAVIKPLARLPPEEASPYVVDHGESGPLRCNRCKAYMCPFMQFIEGGRRFQCCFCSCINDVPPQYFQHLDHTGKRVDAYDRPELSLGSYEFLATVDYCKNNKFPSPPAFIFMIDVSYNAIRTGLVRLLCEELKSLLDFLPREGGAEESAIRVGFVTYNKVLHFYNVKSSLAQPQMMVVSDVADMFVPLLDGFLVNVNESRAVITSLLDQIPEMFADTRETETVFVPVIQAGMEALKAAECAGKLFLFHTSLPIAEAPGKLKNRDDRKLINTDKEKTLFQPQTGAYQTLAKECVAQGCCVDLFLFPNQYVDVATLSVVPQLTGGSVYKYASFQVENDQERFLSDLRRDVQKVVGFDAVMRVRTSTGIRAVDFFGAFYMSNTTDVELAGLDGDKTVTVEFKHDDRLNEESGALLQCALLYTSCAGQRRLRIHNLALNCCTQLADLYRNCETDTLINYMAKFAYRGVLNSPVKAVRDTLITQCAQILACYRKNCASPSSAGQLILPECMKLLPVYLNCVLKSDVLQPGAEVTTDDRAYVRQLVTSMDVTETNVFFYPRLLPLVRLRVGV

SEQ ID NO: 823777 - protein, 1022 aa, Homo sapiens
MNVNQSVPPVPPFGQPQPIYPGYHQSSYGGQSGSTAPAIPYGAYNGPVPGYQQTPPQGMSRAPPSSGAPPASTAQAPCGQAAYGQFGQGDVQNGPSSTVQMQRLPGSQPFGSPLAPVGNQPPVLQPYGPPPTSAQVATQLSGMQISGAVAPAPPSSGLGFGPPTSLASASGSFPNSGLYGSYPQGQAPPLSQAQGHPGIQTPQRSAPSQASSFTPPASGGPRLPSMTGPLLPGQSFGGPSVSQPNHVSSPPQALPPGTQMTGPLGPLPPMHSPQQPGYQPQQNGSFGPARGPQSNYGGPYPAAPTFGSQPGPPQPLPPKRLDPDAIPSPIQVIEDDRNNRGTEPFVTGVRGQVPPLVTTNFLVKDQGNASPRYIRCTSYNIPCTSDMAKQAQVPLAAVIKPLARLPPEEASPYVVDHGESGPLRCNRCKAYMCPFMQFIEGGRRFQCCFCSCINDVPPQYFQHLDHTGKRVDAYDRPELSLGSYEFLATVDYCKNNKFPSPPAFIFMIDVSYNAIRTGLVRLLCEELKSLLDFLPREGGAEESAIRVGFVTYNKVLHFYNVKSSLAQPQMMVVSDVADMFVPLLDGFLVNVNESRAVITSLLDQIPEMFADTRETETVFVPVIQAGMEALKAAECAGKLFLFHTSLPIAEAPGKLKNRDDRKLINTDKEKTLFQPQTGAYQTLAKECVAQGCCVDLFLFPNQYVDVATLSVVPQLTGGSVYKYASFQVENDQERFLSDLRRDVQKVVGFDAVMRVRTSTGIRAVDFFGAFYMSNTTDVELAGLDGDKTVTVEFKHDDRLNEESGALLQCALLYTSCAGQRRLRIHNLALNCCTQLADLYRNCETDTLINYMAKFAYRGVLNSPVKAVRDTLITQCAQILACYRKNCASPSSAGQLILPECMKLLPVYLNCVLKSDVLQPGAEVTTDDRAYVRQLVTSMDVTETNVFFYPRLLPLTKSPVESTTEPPAVRASEERLSNGDIYLLENGLNLFLWVGVFCQFWIIHCPRRFEASLIAYGHRDPGT

SEQ ID NO: 823778 - protein, 1094 aa, Homo sapiens; identical to SEQ ID NO: 823771

SEQ ID NO: 823779 - protein, 1094 aa, Homo sapiens; identical to SEQ ID NO: 823771

SEQ ID NO: 823780 - protein, 255 aa, Homo sapiens
SVGTSSTLINYMAKFAYRGVLNSPVKAVRDTLITQCAQILACYRKNCASPSSAGQLILPECMKLLPVYLNCVLKSDVLQPGAEVTTDDRAYVRQLVTSMDVTETNVFFYPRLLPLTKSPVESTTEPPAVRASEERLSNGDIYLLENGLNLFLWVGASVQQGVVQSLFSVSSFSQITSGLSVLPVLDNPLSKKVRGLIDSLRAQRSRYMKLTVVKQEDKMEMLFKHFLVEDKSLSGGASYVDFLCHMHKEIRQLLS

SEQ ID NO: 823781 - protein, 1094 aa, Homo sapiens; identical to SEQ ID NO: 823771

SEQ ID NO: 823782 - protein, 1094 aa, Homo sapiens; identical to SEQ ID NO: 823771

SEQ ID NO: 823783 - protein, 1094 aa, Homo sapiens; identical to SEQ ID NO: 823771

SEQ ID NO: 823784 - protein, 426 aa, Homo sapiens
MNVNQSVPPVPPFGQPQPIYPGYHQSSYGGQSGSTAPAIPYGAYNGPVPGYQQTPPQGMSRAPPSSGAPPASTAQAPCGQAAYGQFGQGDVQNGPSSTVQMQRLPGSQPFGSPLAPVGNQPPVLQPYGPPPTSAQVATQLSGMQISGAVAPAPPSSGLGFGPPTSLASASGSFPNSGLYGSYPQGQAPPLSQAQGHPGIQTPQRSAPSQASSFTPPASGGPRLPSMTGPLLPGQSFGGPSVSQPNHVSSPPQALPPGTQMTGPLGPLPPMHSPQQPGYQPQQNGSFGPARGPQSNYGGPYPAAPTFGSQPGPPQPLPPKRLDPDAIPSPIQVIEDDRNNRGTEPFVTGVRGQVPPLVTTNFLVKDQGNASPRYIRCTSYNIPCTSDMAKQAQVPLAAVIKPLEQASNRVLSRAFSASPPSVRSPVV

SEQ ID NO: 823785 - protein, 1094 aa, Homo sapiens; identical to SEQ ID NO: 823771

SEQ ID NO: 823786 - protein, 75 aa, Homo sapiens
TRGSGRVGRGRVGRPTRPRQESEWGSILCGLSLSYAQGDSAATELKQVGKWHRAQASFQKAPQDVREIGTVTYLM

SEQ ID NO: 823787 - protein, 110 aa, Homo sapiens
ESYRTEVFPEVNDRVSGLTEEMKLGVMKLWVVEKVASLGNNVTFYREGGAEESAIRVGFVTYNKVLHFYNVKSSLAQPQMMVVSDVADMFVPLLDGFLVNVNESRAVITR

SEQ ID NO: 823788 - protein, 101 aa, Homo sapiens
SFLFLRLSSLCVLCLRGLRLDVLTLQCMYICLLARLYDNVRDVVENLVRGLDGDKTVTVEFKHDDRLNEESGALLQALLYTSCAGGRREAGLGRKCFIRLV

SEQ ID NO: 823789 - protein, 1094 aa, Homo sapiens; identical to SEQ ID NO: 823771

SEQ ID NO: 823790 - protein, 1009 aa, Homo sapiens
MVGNQGPQPPPFPMEPTMAQYQAISKHLPKVCQEPHLPRGHLQPQQHRLLVARLHMASLAKEMYRMGQAPLFRCKGPPTSLASASGSFPNSGLYGSYPQGQAPPLSQAQGHPGIQTPQRSAPSQASSFTPPASGGPRLPSMTGPLLPGQSFGGPSVSQPNHVSSPPQALPPGTQMTGPLGPLPPMHSPQQPGYQPQQNGSFGPARGPQSNYGGPYPAAPTFGSQPGPPQPLPPKRLDPDAIPSPIQVIEDDRNNRGTEPFVTGVRGQVPPLVTTNFLVKDQGNASPRYIRCTSYNIPCTSDMAKQAQVPLAAVIKPLARLPPEEASPYVVDHGESGPLRCNRCKAYMCPFMQFIEGGRRFQCCFCSCINDVPPQYFQHLDHTGKRVDAYDRPELSLGSYEFLATVDYCKNNKFPSPPAFIFMIDVSYNAIRTGLVRLLCEELKSLLDFLPREGGAEESAIRVGFVTYNKVLHFYNVKSSLAQPQMMVVSDVADMFVPLLDGFLVNVNESRAVITSLLDQIPEMFADTRETETVFVPVIQAGMEALKAAECAGKLFLFHTSLPIAEAPGKLKNRDDRKLINTDKEKTLFQPQTGAYQTLAKECVAQGCCVDLFLFPNQYVDVATLSVVPQLTGGSVYKYASFQVENDQERFLSDLRRDVQKVVGFDAVMRVRTSTGIRAVDFFGAFYMSNTTDVELAGLDGDKTVTVEFKHDDRLNEESGALLQCALLYTSCAGQRRLRIHNLALNCCTQLADLYRNCETDTLINYMAKFAYRGVLNSPVKAVRDTLITQCAQILACYRKNCASPSSAGQLILPECMKLLPVYLNCVLKSDVLQPGAEVTTDDRAYVRQLVTSMDVTETNVFFYPRLLPLTKSPVESTTEPPAVRASEERLSNGDIYLLENGLNLFLWVGASVQQGVVQSLFSVSSFSQITSGLSVLPVLDNPLSKKVRGLIDSLRAQRSRYMKLTVVKQEDKMEMLFKHFLVEDKSLSGGASYVDFLCHMHKEIRQLLS

SEQ ID NO: 823791 - protein, 1042 aa, Homo sapiens
MNVNQSVPPVPPFGQPQPIYPGYHQSSYGGQSGSTAPAIPYGAYNGPVPGYQQTPPQGMSRAPPSSGAPPASTAQAPCGQAAYGQFGQGDVQNGPSSTVQMQRLPGSQPFGSPLAPVGNQPPVLQPYGPPPTSAQVATQLSGMQISGAVAPAPPSSGLGFGPPTSLASASGSFPNSGLYGSYPQGQAPPLSQAQGHPGIQTPQRSAPSQASSFTPPASGGPRLPSMTGPLLPGQSFGGPSVSQPNHVSSPPQALPPGTQMTGPLGPLPPMHSPQQPGYQPQQNGSFGPARGPQSNYGGPYPAAPTFGSQPGPPQPLPPKRLDPDAIPSPIQVIEDDRNNRGTEPFVTGVRGQVPPLVTTNFLVKDQGNASPRYIRCTSYNIPCTSDMAKQAQVPLAAVIKPLARLPPEEASPYVVDHGESGPLRCNRCKAYMCPFMQFIEGGRRFQCCFCSCINDVPPQYFQHLDHTGKRVDAYDRPELSLGSYEFLATVDYCKNNKFPSPPAFIFMIDVSYNAIRTGLVRLLCEELKSLLDFLPREGGAEESAIRVGFVTYNKVLHFYNVKSSLAQPQMMVVSDVADMFVPLLDGFLVNVNESRAVITSLLDQIPEMFADTRETETVFVPVIQAGMEALKAAECAGKLFLFHTSLPIAEAPGKLKNRDDRKLINTDKEKTLFQPQTGAYQTLAKECVAQGCCVDLFLFPNQYVDVATLSVVPQLTGGSVYKYASFQVENDQERFLSDLRRDVQKVVGFDAVMRVRTSTGIRAVDFFGAFYMSNTTDVELAGLDGDKTVTVEFKHDDRLNEESGALLQCALLYTSCAGQRRLRIHNLALNCCTQLADLYRNCETDTLINYMAKFAYRGVLNSPVKAVRDTLITQCAQILACYRKNCASPSSAGQLILPECMKLLPVYLNCVLKSDVLQPGAEVTTDDRAYVRQLVTSMDVTETNVFFYPRLLPLTKSPVESTTEPPAVRASEERLSNGDIYLLENGLNLFLWVGASVQQGVVQSLFSVSSFSQITSGLVRAGSQGEYGCGSILCETIGSQYS

SEQ ID NO: 823792 - protein, 710 aa, Homo sapiens
MNVNQSVPPVPPFGQPQPIYPGYHQSSYGGQSGSTAPAIPYGAYNGPVPGYQQTPPQGMSRAPPSSGAPPASTAQAPCGQAAYGQFGQGDVQNGPSSTVQMQRLPGSQPFGSPLAPVGNQPPVLQPYGPPPTSAQVATQLSGMQISGAVAPAPPSSGLGFGPPTSLASASGSFPNSGLYGSYPQGQAPPLSQAQGHPGIQTPQRSAPSQASSFTPPASGGPRLPSMTGPLLPGQSFGGPSVSQPNHVSSPPQALPPGTQMTGPLGPLPPMHSPQQPGYQPQQNGSFGPARGPQSNYGGPYPAAPTFGSQPGPPQPLPPKRLDPDAIPSPIQVIEDDRNNRGTEPFVTGVRGQVPPLVTTNFLVKDQGNASPRYIRCTSYNIPCTSDMAKQAQVPLAAVIKPLARLPPEEASPYVVDHGESGPLRCNRCKAYMCPFMQFIEGGRRFQCCFCSCINDVPPQYFQHLDHTGKRVDAYDRPELSLGSYEFLATVDYCKNNKFPSPPAFIFMIDVSYNAIRTGLVRLLCEELKSLLDFLPREGGAEESAIRVGFVTYNKVLHFYNVKSSLAQPQMMVVSDVADMFVPLLDGFLVNVNESRAVITSLLDQIPEMFADTRETETVFVPVIQAGMEALKAAECAGKLFLFHTSLPIAEAPGKLKNRDDRKLINTDKEKTLFQPQTGAYQTLAKECVAQGCCVDLFLFPNQWRTTRSGS

SEQ ID NO: 823793 - protein, 1094 aa, Homo sapiens; identical to SEQ ID NO: 823771

SEQ ID NO: 823794 - protein, 961 aa, Homo sapiens; identical to SEQ ID NO: 823776

SEQ ID NO: 823795 - protein, 255 aa, Homo sapiens
EHRARYPAIYSMAKFAYRGVLNSPVKAVRDTLITQCAQILACYRKNCASPSSAGQLILPECMKLLPVYLNCVLKSDVLQPGAEVTTDDRAYVRQLVTSMDVTETNVFFYPRLLPLTKSPVESTTEPPAVRASEERLSNGDIYLLENGLNLFLWVGASVQQGVVQSLFSVSSFSQITSGLSVLPVLDNPLSKKVRGLIDSLRAQRSRYMKLTVVKQEDKMEMLFKHFLVEDKSLSGGASYVDFLCHMHKEIRQLLS

SEQ ID NO: 823796 - protein, 228 aa, Homo sapiens
MLFNLCALVPGLLTRLVTASYRSSVPESPTLAERLACLPVYLNCVLKSDVLQPGAEVTTDDRAYVRQLVTSMDVTETNVFFYPRLLPLTKSPVESTTEPPAVRASEERLSNGDIYLLENGLNLFLWVGASVQQGVVQSLFSVSSFSQITSGLSVLPVLDNPLSKKVRGLIDSLRAQRSRYMKLTVVKQEDKMEMLFKHFLVEDKSLSGGASYVDFLCHMHKEIRQLLS

SEQ ID NO: 823797 - protein, 94 aa, Homo sapiens
LHNVCPYVSSFSQITSGLSVLPVLDNPLSKKVRGLIDSLRAQRSRYMKLTVVKQEDKMEMLFKHFLVEDKSLSGGASYVDFLCHMHKEIRQLLS

SEQ ID NO: 823798 - protein, 163 aa, Homo sapiens
MNVNQSVPPVPPFGQPQPIYPGYHQSSYGGQSGSTAPAIPYGAYNGPVPGYQQTPPQGMSRAPPSSGAPPASTAQAPCGQAAYGQFGQGDVQNGPSSTVQMQRLPGSQPFGSPLAPVGNQPPVLQPYGPPPTSAQVATQLSGMQRQLERRSLLLGHRLGFGID

SEQ ID NO: 823799 - protein, 115 aa, Homo sapiens
MNVNQSVPPVPPFGQPQPIYPGYHQSSYGGQSGSTAPAIPYGAYNGPVPGYQQTPPQGMSRAPPSSGAPPASTAQAPCGQAAYGQFGQGDVQNGPSSTVQMQRLQVLLTSSPVDY

SEQ ID NO: 823800 - protein, 277 aa, Homo sapiens [sequence omitted]

SEQ ID NO: 823801 - protein, 703 aa, Homo sapiens
MLTLGPFRNSNLTELGLQEIKTIGYTSPRSRTEVNRQCPGEKEPVSDLQLGLDAVEPTALHKTLETPAHDRAEPNSQLDSTHSGRGTMYSSWVKSPDRTGVNFSVNSNLRDLTPSHQLEVGGGFRISESKCLMQDDTRGMFMETTVFCTSEDGLVSGFGRTVNDNLIDGNCTPQNPPQKKKVSLLEYRKRQREARKSGSKTENFPLISVSPHASGSLSNNGDGCASSNDNGEQVDHTASLPLPTPATVYNATSEETSNNCPVKDATASEKNEPEVQWTASTSVEQVRERSYQRALLLSDHRKDKDSGGESPCVSCSPSHVQSSPSSHSNHIPQLQAKGPVPSFSELMEDPDPENPEPTTTNECPSPDTSQNTCKSPPKMSKPGSPGSVIPAQAHGKIFTKPDPQWDSTVSASEAENGVHLKTELQQKQLSNNNQALSKNHPPQTHVRNSSEQLSQKLPSVPTKLHCPPSPHLENPPKSSTPHTPVQHGYLSPKPPSQQLGSPYRPHHSQSPQVGTPQREPQRNFYPAAQNLPANTQQATSGTLFTQTPSGQSSATYSQFNQQSLNSTAPPPPPPPPPSSSYYQNQQPSANFQNYNQLKGSLSQQTVFTSGPNQALPGTTSQQTVPGHHVTPGHFLPSQNPTIHHQTAAAVVPPPPPPPPAPGPHLVQQPNSHQQHSVAHVVGPVHAVTPGSHIHSQTAGHHLP

SEQ ID NO: 823802 - protein, 555 aa, Homo sapiens
MLTLGPFRNSNLTELGLQEIKTIGYTSPRSRTEVNRQCPGEKEPVSDLQLGLDAVEPTALHKTLETPAHDRAEPNSQLDSTHSGRGTMYSSWVKSPDRTGVNFSVNSNLRDLTPSHQLEVGGGFRISESKCLMQDDTRGMFMETTVFCTSEDGLVSGFGRTVNDNLIDGNCTPQNPPQKKKVSLLEYRKRQREARKSGSKTENFPLISVSPHASGSLSNNGDGCASSNDNGEQVDHTASLPLPTPATVYNATSEETSNNCPVKDATASEKNEPEVQWTASTSVEQVRERSYQRALLLSDHRKDKDSGGESPCVSCSPSHVQSSPSSHSNHIPQLQAKGPVPSFSELMEDPDPENPEPTTTNECPSPDTSQNTCKSPPKMSKPGSPGSVIPAQAHGKIFTKPDPQWDSTVSASEAENGVHLKTELQQKQLSNNNQALSKNHPPQTHVRNSSEQLSQKLPSVPTKLHCPPSPHLENPPKSSTPHTPVQHGYLSPKPPSQQLGSPYRPHHSQSPQVGTYEEEEVTAEVLIFRGAAFKQGEKKEWRVTMMYNHSGYDLA

SEQ ID NO: 823803 - protein, 350 aa, Homo sapiens
MLTLGPFRNSNLTELGLQEIKTIGYTSPRSRTEVNRQCPGEKEPVSDLQLGLDAVEPTALHKTLETPAHDRAEPNSQLDSTHSGRGTMYSSWVKSPDRTGVNFSVNSNLRDLTPSHQLEVGGGFRISESKCLMQDDTRGMFMETTVFCTSEDGLVSGFGRTVNDNLIDGNCTPQNPPQKKKVSLLEYRKRQREARKSGSKTENFPLISVSPHASGSLSNNGDGCASSNDNGEQVDHTASLPLPTPATVYNATSEETSNNCPVKDATASEKNEPEVQWTASTSVEQVRERSYQRALLLSDHRKDKDSGGESPCVSCSPSHVQSSPSSHSNHIPQLQAKGPVPSFSELMEGQ

SEQ ID NO: 823804 - protein, 325 aa, Homo sapiens
MSKPGSPGSVIPAQAHGKIFTKPDPQWDSTVSASEAENGVHLKTELQQKQLSNNNQALSKNHPPQTHVRNSSEQLSQKLPSVPTKLHCPPSPHLENPPKSSTPHTPVQHGYLSPKPPSQQLGSPYRPHHSQSPQVGTPQREPQRNFYPAAQNLPANTQQATSGTLFTQTPSGQSSATYSQFNQQSLNSTAPPPPPPPPPSSSYYQNQQPSANFQNYNQLKGSLSQQTVFTSGPNQALPGTTSQQTVPGHHVTPGHFLPSQNPTIHHQTAAAVVPPPPPPPPAPGPHLVQQPNSHQQHSVAHVVGPVHAVTPGSHIHSQTAGHHLP

SEQ ID NO: 823805 - protein, 1012 aa, Homo sapiens
CRNGYKPIYSPVTPVTPGTPGNTMHFENISSPESSPEIKRRTYSQEGYDRSSTMLTLGPFRNSNLTELGLQEIKTIGYTSPRSRTEVNRQCPGEKEPVSDLQLGLDAVEPTALHKTLETPAHDRAEPNSQLDSTHSGRGTMYSSWVKSPDRTGVNFSVNSNLRDLTPSHQLEVGGGFRISESKCLMQDDTRGMFMETTVFCTSEDGLVSGFGRTVNDNLIDGNCTPQNPPQKKKVSLLEYRKRQREARKSGSKTENFPLISVSPHASGSLSNNGDGCASSNDNGEQVDHTASLPLPTPATVYNATSEETSNNCPVKDATASEKNEPEVQWTASTSVEQVRERSYQRALLLSDHRKDKDSGGESPCVSCSPSHVQSSPSSHSNHIPQLQAKGPVPSFSELMEDPDPENPEPTTTNECPSPDTSQNTCKSPPKMSKPGSPGSVIPAQAHGKIFTKPDPQWDSTVSASEAENGVHLKTELQQKQLSNNNQALSKNHPPQTHVRNSSEQLSQKLPSVPTKLHCPPSPHLENPPKSSTPHTPVQHGYLSPKPPSQQLGSPYRPHHSQSPQVGTPQREPQRNFYPAAQNLPANTQQATSGTLFTQTPSGQSSATYKMKYGIFTTPNFDETSSATTISTSEDGSYGTDVTRCICGFTHDDGYMICCDKCSVWQHIDCMGIDRQHIPDTYLCERCQPRNLDKERAVLLQRRKRENMSDGDTSATESGDEVPVELYTAFQHTPTSITLTASRVSKVNDKRRKKSGEKEQHISKCKKAFREGSRKSSRVKGSAPEIDPSSDGSNFGWETKIKAWMDRYEEANNNQYSEGVQREAQRIALRLGNGNDKKEMNKSDLNTNNLLFKPPVESHIQKNKKILKSAKDLPPDALIIEYRGKFMLREQFEANGYFFKRPYPFVLFYSKFHGLEMCVDARTFGNEARFIRRSCTPNAEVRHEIQDGTIHLYIYSIHSIPKGTEITIAFDFDYGNCKYKVDCACLKENPECPVLKRSSESMENINSGYETR

SEQ ID NO: 823806 - protein, 692 aa, Homo sapiens
MLTLGPFRNSNLTELGLQEIKTIGYTSPRSRTEVNRQCPGEKEPVSDLQLGLDAVEPTALHKTLETPAHDRAEPNSQLDSTHSGRGTMYSSWVKSPDRTGVNFSVNSNLRDLTPSHQLEVGGGFRISESKCLMQDDTRGMFMETTVFCTSEDGLVSGFGRTVNDNLIDGNCTPQNPPQKKKVSLLEYRKRQREARKSGSKTENFPLISVSPHASGSLSNNGDGCASSNDNGEQVDHTASLPLPTPATVYNATSEETSNNCPVKDATASEKNEPEVQWTASTSVEQVRERSYQRALLLSDHRKDKDSGGESPCVSCSPSHVQSSPSSHSNHIPQLQAKGPVPSFSELMEDPDPENPEPTTTNECPSPDTSQNTCKSPPKMSKPGSPGSVIPAQAHGKIFTKPDPQWDSTVSASEAENGVHLKTELQQKQLSNNNQALSKNHPPQTHVRNSSEQLSQKLPSVPTKLHCPPSPHLENPPKSSTPHTPVQHGYLSPKPPSQQLGSPYRPHHSQSPQVGTPQREPQRNFYPAAQNLPANTQQATSGTLFTQTPSGQSSATYSQFNQQSLNSTAPPPPPPPPPSSSYYQNQQPSANFQNYNQLKGSLSQQTVFTSGPNQALPGTTSQQTVPGHHVTPGHFLPSQNPTIHHQTAAAVVPPPPPPPSSSYYQNQQPSANFQNYNQLKGSLSQQTVFSSSP

SEQ ID NO: 823807 - protein, 325 aa, Homo sapiens; identical to SEQ ID NO: 823804

SEQ ID NO: 823808 - protein, 455 aa, Homo sapiens
  misc_feature (45)..(45): Xaa can be any naturally occurring amino acid
KRKKKLLLFLCVPNCLPPLLFVHPWAESVHPCTLFAPLYGYLWVXLTISAPLLPLSLSVLGSPSVHPYTLPLLSSAYLSVCLEPSTPLISTSSMVLKLMEDPDPENPEPTTTNECPSPDTSQNTCKSPPKMSKPGSPGSVIPAQAHGKIFTKPDPQWDSTVSASEAENGVHLKTELQQKQLSNNNQALSKNHPPQTHVRNSSEQLSQKLPSVPTKLHCPPSPHLENPPKSSTPHTPVQHGYLSPKPPSQQLGSPYRPHHSQSPQVGTPQREPQRNFYPAAQNLPANTQQATSGTLFTQTPSGQSSATYSQFNQQSLNSTAPPPPPPPPPSSSYYQNQQPSANFQNYNQLKGSLSQQTVFTSGPNQALPGTTSQQTVPGHHVTPGHFLPSQNPTIHHQTAAAVVPPPPPPPPAPGPHLVQQPNSHQQHSVAHVVGPVHAVTPGSHIHSQTAGHHLP

SEQ ID NO: 823809 - protein, 556 aa, Homo sapiens
RALKRGQTAIDAALTSVVDQDGGVHILQVPVWNQQEVEIHIPITLYPSILTFPWQPKTGAYQYTIRAHGGSGNFSWSSSSHLVATVTVKGVMTTGSDIGFSVIQAHDVQNPLHFGEMKVYVIEPHSMEFAPCQVEARVGQALELPLRISGLMPGGASEVVTLSDCSHFDLAVEVENQGVFQPLPGRLPPGSEHCSGVRVKAEAQGSTTLLVSYRHGHVHLSAKITIAAYLPLKAVDPSSVALVTLGSSKEMLFEGGPRPWILEPSKFFQNVTAEDTDSIGLALFAPHSSRNYQQHWILVTCQALGEQVIALSVGNKPSLTNPFPAVEPAVVKFVCAPPSRLTLAPVYTSPQLDMSCPLLQQNKQVVPVSSHRNPLLDLAAYDQEGRRFDNFSSLSIQWESTRPVLASIEPELPMQLVSQDDESGQKKLHGLQAILVHEASGTTAITATATGYQESHLSSARTKQPHDPLVPLSASIELILVEDVRVSPEEVTIYNHPGIQAELRIREGSGYFFLNTSTADVVKVAYQEARGVAMVSLGHRSPLLVFIPYLGCCVVN

SEQ ID NO: 823810 - protein, 105 aa, Homo sapiens
SCPPGSNGLALVLQHDPLVPLSASIELILVEDVRVSPEEVTIYNHPGIQAELRIREGSGYFFLNTSTADVVKVAYQEARGVAMVSLGHRSPLLVFIPYLGCCVVN

SEQ ID NO: 823811 - protein, 1476 aa, Homo sapiens
RALKRGQTAIDAALTSVVDQDGGVHILQVPVWNQQEVEIHIPITLYPSILTFPWQPKTGAYQYTIRAHGGSGNFSWSSSSHLVATVTVKGVMTTGSDIGFSVIQAHDVQNPLHFGEMKVYVIEPHSMEFAPCQVEARVGQALELPLRISGLMPGGASEVVTLSDCSHFDLAVEVENQGVFQPLPGRLPPGSEHCSGVRVKAEAQGSTTLLVSYRHGHVHLSAKITIAAYLPLKAVDPSSVALVTLGSSKEMLFEGGPRPWILEPSKFFQNVTAEDTDSIGLALFAPHSSRNYQQHWILVTCQALGEQVIALSVGNKPSLTNPFPAVEPAVVKFVCAPPSRLTLAPVYTSPQLDMSCPLLQQNKQVVPVSSHRNPLLDLAAYDQEGRRFDNFSSLSIQWESTRPVLASIEPELPMQLVSQDDESGQKKLHGLQAILVHEASGTTAITATATGYQESHLSSARTKQPHDPLVPLSASIELILVEDVRVSPEEVTIYNHPGIQAELRIREGSGYFFLNTSTADVVKVAYQEARGVAMVHPLLPGSSTIMIHDLCLVFPAPAKAVVYVSDIQELYIRVVDKVEIGKTVKAYVRVLDLHKKPFLAKYFPFMDLKLRAASPIITLVALDEALDNYTITFLIRGVAIGQTSLTASVTNKAGQRINSAPQQIEVFPPFRLMPRKVTLLIGATMQVTSEGGPQPQSNILFSISNESVALVSAAGLVQGLAIGNGTVSGLVQAVDAETGKVVIISQDLVQVEVLLLRAVRIRAPIMRMRTGTQMPIYVTGITNHQNPFSFGNAVPGLTFHWSVTKRDVLDLRGRHHEASIRLPSQYNFAMNVLGRVKGRTGLRVVVKAVDPTSGQLYGLARELSDEIQVQVFEKLQLLNPEIEAEQILMSPNSYIKLQTNRDGAASLSYRVLDGPEKVPVVHVDEKGFLASGSMIGTSTIEVIAQEPFGANQTIIVAVKVSPVSYLRVSMSPVLHTQNKEALVAVPLGMTVTFTVHFHDNSGDVFHAHSSVLNFATNRDDFVQIGKGPTNNTCVVRTVSVGLTLLRVWDAEHPGLSDFMPLPVLQAISPELSGAMVVGDVLCLATVLTSLEGLSGTWSSSANSILHIDPKTGVAVARAVGSVTVYYEVAGHLRTYKEVVVSVPQRIMARHLHPIQTSFQEATASKVIVAVGDRSSNLRGECTPTQREVIQALHPETLISCQSQFKPAVFDFPSQDVFTVEPQFDTALGQYFCSITMHRLTDKQRKHLSMKKTALVVSASLSSSHFSTEQVGAEVPFSPGLFADQAEILLSNHYTSSEIRVFGAPEVLENLEVKSGSPAVLAFAKEKSFGWPSFITYTVGVSDPAAGSQGPLSTTLTFSSPVTNQAIAIPVTVAFVMDRRGPGPYGASLFQHFLDSYQVMFFTLFALLAGTAVMIIAYHTVCTPRDLAVPAALTPRASPGHSPHYFAASSPTSPNALPPARKASPPSGLWSPAYASH

SEQ ID NO: 823812 - protein, 672 aa, Homo sapiens
MLVGTVDSRAAHEASIRLPSQYNFAMNVLGRVKGRTGLRVVVKAVDPTSGQLYGLARELSDEIQVQVFEKLQLLNPEIEAEQILMSPNSYIKLQTNRDGAASLSYRVLDGPEKVPVVHVDEKGFLASGSMIGTSTIEVIAQEPFGANQTIIVAVKVSPVSYLRVSMSPVLHTQNKEALVAVPLGMTVTFTVHFHDNSGDVFHAHSSVLNFATNRDDFVQIGKGPTNNTCVVRTVSVGLTLLRVWDAEHPGLSDFMPLPVLQAISPELSGAMVVGDVLCLATVLTSLEGLSGTWSSSANSILHIDPKTGVAVARAVGSVTVYYEVAGHLRTYKEVVVSVPQRIMARHLHPIQTSFQEATASKVIVAVGDRSSNLRGECTPTQREVIQALHPETLISCQSQFKPAVFDFPSQDVFTVEPQFDTALGQYFCSITMHRLTDKQRKHLSMKKTALVVSASLSSSHFSTEQVGAEVPFSPGLFADQAEILLSNHYTSSEIRVFGAPEVLENLEVKSGSPAVLAFAKEKSFGWPSFITYTVGVSDPAAGSQGPLSTTLTFSSPVTNQAIAIPVTVAFVMDRRGPGPYGASLFQHFLDSYQVMFFTLFALLAGTAVMIIAYHTVCTPRDLAVPAALTPRASPGHSPHYFAASSPTSPNALPPARKASPPSGLWSPAYASH

SEQ ID NO: 823813 - protein, 1476 aa, Homo sapiens; identical to SEQ ID NO: 823811

SEQ ID NO: 823814 - protein, 155 aa, Homo sapiens
IPRVIPFTPSGPRTVLEENVLEMQQESYSLSTTLTFSSPVTNQAIAIPVTVAFVMDRRGPGPYGASLFQHFLDSYQVMFFTLFALLAGTAVMIIAYHTVCTPRDLAVPAALTPRASPGHSPHYFAASSPTSPNALPPARKASPPSGLWSPAYASH

SEQ ID NO: 823815 - protein, 113 aa, Homo sapiens
SLPHCLHAPGSCCACSPHASSQPWTQPPLFRCLITHISQCIASCSQSQPSLRAVEPSLCLPLGRVKVPGGWVSAEPRAPPRWNIPAAFTLEQAPPDECPGPRPASLPSLHTEL

SEQ ID NO: 823816 - protein, 1476 aa, Homo sapiens; identical to SEQ ID NO: 823811

SEQ ID NO: 823817 - protein, 1476 aa, Homo sapiens; identical to SEQ ID NO: 823811

SEQ ID NO: 823818 - protein, 1384 aa, Homo sapiens
RALKRGQTAIDAALTSVVDQDGGVHILQVPVWNQQEVEIHIPITLYPSILTFPWQPKTGAYQYTIRAHGGSGNFSWSSSSHLVATVTVKGVMTTGSDIGFSVIQAHDVQNPLHFGEMKVYVIEPHSMEFAPCQVEARVGQALELPLRISGLMPGGASEVVTLSDCSHFDLAVEVENQGVFQPLPGRLPPGSEHCSGVRVKAEAQGSTTLLVSYRHGHVHLSAKITIAAYLPLKAVDPSSVALVTLGSSKEMLFEGGPRPWILEPSKFFQNVTAEDTDSIGLALFAPHSSRNYQQHWILVTCQALGEQVIALSVGNKPSLTNPFPAVEPAVVKFVCAPPSRLTLAPVYTSPQLDMSCPLLQQNKQVVPVSSHRNPLLDLAAYDQEGRRFDNFSSLSIQWESTRPVLASIEPELPMQLVSQDDESGQKKLHGLQAILVHEASGTTAITATATGYQESHLSSARTKQPHDPLVPLSASIELILVEDVRVSPEEVTIYNHPGIQAELRIREGSGYFFLNTSTADVVKVAYQEARGVAMVHPLLPGSSTIMIHDLCLVFPAPAKAVVYVSDIQELYIRVVDKVEIGKTVKAYVRVLDLHKKPFLAKYFPFMDLKLRAASPIITLVALDEALDNYTITFLIRGVAIGQTSLTASVTNKAGQRINSAPQQIEVFPPFRLMPRKVTLLIGATMQVTSEGGPQPQSNILFSISNESVALVSAAGLVQGLAIGNGTVSGLVQAVDAETGKVVIISQDLVQVEVLLLRAVRIRAPIMRMRTGTQMPIYVTGITNHQNPFSFGNAVPGLTFHWSVTKRDVLDLRGRHHEASIRLPSQYNFAMNVLGRVKGRTGLRVVVKAVDPTSGQLYGLARELSDEIQVQVFEKLQLLNPEIEAEQILMSPNSYIKLQTNRDGAASLSYRVLDGPEKVPVVHVDEKGFLASGSMIGTSTIEVIAQEPFGANQTIIVAVKVSPVSYLRVSMSPVLHTQNKEALVAVPLGMTVTFTVHFHDNSGDVFHAHSSVLNFATNRDDFVQIGKGPTNNTCVVRTVSVGLTLLRVWDAEHPGLSDFMPLPVLQAISPELSGAMVVGDVLCLATVLTSLEGLSGTWSSSANSILHIDPKTGVAVARAVGSVTVYYEVAGHLRTYKEVVVSVPQRIMARHLHPIQTSFQEATASKVIVAVGDRSSNLRGECTPTQREVIQALHPETLISCQSQFKPAVFDFPSQDVFTVEPQFDTALGQYFCSITMHRLTDKQRKHLSMKKTALVVSASLSSSHFSTEQVGAEVPFSPGLFADQAEILLSNHYTSSEIRVFGAPEVLENLEVKSGSPAVLAFAKEKSFGWPSFITYTVGVSDPAAGSQGPLSTTLTFSTLPGFLPGHVLHALRPVGWDSGHDHR

SEQ ID NO: 823819 - protein, 556 aa, Homo sapiens; identical to SEQ ID NO: 823809

SEQ ID NO: 823820 - protein, 70 aa, Homo sapiens
MIPVSAADDENEFQTGDGACLTTSPHKRGEDVGLGCPAPARAALEECQVFCLFCPQAVDPSSVALVTLGS

SEQ ID NO: 823821 - protein, 76 aa, Homo sapiens
MADGASLFQHFLDSYQVMFFTLFALLAGTAVMIIGEEAACISGSVPLPRPALTNPVLLQPTTLSARPGILLCLQPS

SEQ ID NO: 823822 - protein, 79 aa, Homo sapiens
AAANWEHDDLNGTAWAVDAGMGSKNEGGQLVILDNRYSDFMTMAYPTPSHDSKQSLRLGLSVTDMLTLPRLYGDGVGLV

SEQ ID NO: 823823 - protein, 681 aa, Homo sapiens
YAIVDQRSPRVEVLDLRGRHHEASIRLPSQYNFAMNVLGRVKGRTGLRVVVKAVDPTSGQLYGLARELSDEIQVQVFEKLQLLNPEIEAEQILMSPNSYIKLQTNRDGAASLSYRVLDGPEKVPVVHVDEKGFLASGSMIGTSTIEVIAQEPFGANQTIIVAVKVSPVSYLRVSMSPVLHTQNKEALVAVPLGMTVTFTVHFHDNSGDVFHAHSSVLNFATNRDDFVQIGKGPTNNTCVVRTVSVGLTLLRVWDAEHPGLSDFMPLPVLQAISPELSGAMVVGDVLCLATVLTSLEGLSGTWSSSANSILHIDPKTGVAVARAVGSVTVYYEVAGHLRTYKEVVVSVPQRIMARHLHPIQTSFQEATASKVIVAVGDRSSNLRGECTPTQREVIQALHPETLISCQSQFKPAVFDFPSQDVFTVEPQFDTALGQYFCSITMHRLTDKQRKHLSMKKTALVVSASLSSSHFSTEQVGAEVPFSPGLFADQAEILLSNHYTSSEIRVFGAPEVLENLEVKSGSPAVLAFAKEKSFGWPSFITYTVGVSDPAAGSQGPLSTTLTFSSPVTNQAIAIPVTVAFVMDRRGPGPYGASLFQHFLDSYQVMFFTLFALLAGTAVMIIAYHTVCTPRDLAVPAALTPRASPGHSPHYFAASSPTSPNALPPARKASPPSGLWSPAYASH

SEQ ID NO: 823824 - protein, 507 aa, Homo sapiens [sequence omitted]

SEQ ID NO: 823825 - protein, 187 aa, Homo sapiens
MLDVDQEDPTGICAPEVLENLEVKSGSPAVLAFAKEKSFGWPSFITYTVGVSDPAAGSQGPLSTTLTFSSPVTNQAIAIPVTVAFVMDRRGPGPYGASLFQHFLDSYQVMFFTLFALLAGTAVMIIAYHTVCTPRDLAVPAALTPRASPGHSPHYFAASSPTSPNALPPARKASPPSGLWSPAYASH

SEQ ID NO: 823826 - protein, 173 aa, Homo sapiens
PQLCCLFQVKSGSPAVLAFAKEKSFGWPSFITYTVGVSDPAAGSQGPLSTTLTFSSPVTNQAIAIPVTVAFVMDRRGPGPYGASLFQHFLDSYQVMFFTLFALLAGTAVMIIAYHTVCTPRDLAVPAALTPRASPGHSPHYFAASSPTSPNALPPARKASPPSGLWSPAYASH

SEQ ID NO: 823827 - protein, 140 aa, Homo sapiens
GGHGCSGSSRLCCLLQLLWQQVPALSSCLSQRAPPWVLGATPGSLQGLRSTAESLLPSGSLFLWRSCPRLHCIQMHGASLPHAPWTDAAVVLKLETRSPRKALRSWVLGWHPRPLCVNEASSEGARGLPSAGRGGLGASL

SEQ ID NO: 823828 - protein, 1476 aa, Homo sapiens; identical to SEQ ID NO: 823811

SEQ ID NO: 823829 - protein, 462 aa, Homo sapiens
RALKRGQTAIDAALTSVVDQDGGVHILQVPVWNQQEVEIHIPITLYPSILTFPWQPKTGAYQYTIRAHGGSGNFSWSSSSHLVATVTVKGVMTTGSDIGFSVIQAHDVQNPLHFGEMKVYVIEPHSMEFAPCQVEARVGQALELPLRISGLMPGGASEVVTLSDCSHFDLAVEVENQGVFQPLPGRLPPGSEHCSGVRVKAEAQGSTTLLVSYRHGHVHLSAKITIAAYLPLKAVDPSSVALVTLGSSKEMLFEGGPRPWILEPSKFFQNVTAEDTDSIGLALFAPHSSRNYQQHWILVTCQALGEQVIALSVGNKPSLTNPFPAVEPAVVKFVCAPPSRLTLAPVYTSPQLDMSCPLLQQNKQVVPVSSHRNPLLDLAAYDQEGRRFDNFSSLSIQWESTRPVLASIEPELPMQLVCRPFWFTRHQEPQPSLPLPLATRSPTSALPEQSSRMTLWCLCRPP

SEQ ID NO: 823830 - protein, 125 aa, Homo sapiens
RALKRGQTAIDAALTSVVDQDGGVHILQVPVWNQQEVEIHIPITLYPSILTFPWQPKTGAYQYTIRAHGGSGNFSWSSSSHLVATVTVKGVMTTGSDIGFSVIQAHDVQNPLHFGEMKVYVIVGL

SEQ ID NO: 823831 - protein, 129 aa, Homo sapiens
MAPGGWSQEHDRHWGRQRGCLLRLLSEPPWGYGSQRGSWPVIQVSWALTGVSSYGKGADTCASSPGLSGTWSSSANSILHIDPKTGVAVARAVGSVTVYYEVAGHLRTYKEVGSKQPEAHVAQWPVRRA

SEQ ID NO: 823832 - protein, 130 aa, Homo sapiens
SRRTLQMKACATKPEELSVHNNVSTQSNGSQQAWGMRSALPVSPSISSAPVPVEIENLPQSPGTDQHDRKWLSAASDCCQRGGNQWNTRALPPPQTAHRNYTDFVHEHNVKNAGIRHDVHFPGHTAMTEI

SEQ ID NO: 823833 - protein, 719 aa, Homo sapiens
MRKHAEKERLREAQRAATHIPAAGDSKSIITCRVSLLDGTDVSVDLPKKAKGQELFDQIMYHLDLIESDYFGLRFMDSAQVAHWLDGTKSIKKQVKIGSPYCLHLRVKFYSSEPNNLREELTRYLFVLQLKQDILSGKLDCPFDTAVQLAAYNLQAELGDYDLAEHSPELVSEFRFVPIQTEEMELAIFEKWKEYRGQTPAQAETNYLNKAKWLEMYGVDMHVVKARDGNDYSLGLTPTGVLVFEGDTKIGLFFWPKITRLDFKKNKLTLVVVEDDDQGKEQEHTFVFRLDHPKACKHLWKCAVEHHAFFRLRGPVQKSSHRSGFIRLGSRFRYSGKTEYQTTKTNKARRSTSFERRPSKRYSRRTLQMKACATKPEELSVHNNVSTQSNGSQQAWGMRSALPVSPSISSAPVPVEIENLPQSPGTDQHDRKCIPLNIDLLNSPDLLETTIGDVIGASDTMETSQALNDVNVATRLPGLGEPEVEYETLKDTSEKLKQLEMENSPLLSPRSNIDVNINSQEEVVKLTEKCLNNVIESPGLNVMRVPPDFKSNILKAQVEAVHKVTKEDSLLSHKNANVQDAATNSAVLNENNVPLPKESLETLMLITPADSGSVLKEATDELDALLASLTENLIDHTVAPQVSSTSMITPRWIVPSGAMSNGLAGCEMLLTGKEGHGNKDGISLISPPAPFLVDAVTSSGPILAEEAVLKQKCLLTTEL

SEQ ID NO: 823834 - protein, 719 aa, Homo sapiens; identical to SEQ ID NO: 823833

SEQ ID NO: 823835 - protein, 123 aa, Homo sapiens [sequence omitted]

SEQ ID NO: 823836 - protein, 674 aa, Homo sapiens
MRKHAEKERLREAQRAATHIPAAGDSKSIITCRVSLLDGTDVSVDLPKKAKGQELFDQIMYHLDLIESDYFGLRFMDSAQVAHWLDGTKSIKKQVKIGSPYCLHLRVKFYSSEPNNLREELTRYLFVLQLKQDILSGKLDCPFDTAVQLAAYNLQAELGDYDLAEHSPELVSEFRFVPIQTEEMELAIFEKWKEYRGQTPAQAETNYLNKAKWLEMYGVDMHVVKARDGNDYSLGLTPTGVLVFEGDTKIGLFFWPKITRLDFKKNKLTLVVVEDDDQGKEQEHTFVFRLDHPKACKHLWKCAVEHHAFFRLRGPVQKSSHRSGFIRLGSRFRYSGKTEYQTTKTNKARRSTSFERRPSKRYSRRTLQMKACATKPEELSVHNNVSTQSNGSQQAWGMRSALPVSPSISSAPVPVEIENLPQSPGTDQHDRKCIPLNIDLLNSPDLLETTIGDVIGASDTMETSQALNDVNVATRLPGLGEPEVEYETLKDTSEKLKQLEMENSPLLSPRSNIDVNINSQEEVVKLTEKCLNNVIESPGLNVMRVPPDFKSNILKAQVEAVHKVTKEDSLLSHKNANVQDAATNSAVLNENNVPLPKESLETLMLITPADSGSVLKEATDELDALLASLTENLIDHTVAPQVSSTSMITPRWIVPLWSHFGRRSCPEAEVFTDH

SEQ ID NO: 823837 - protein, 674 aa, Homo sapiens; identical to SEQ ID NO: 823836

SEQ ID NO: 823838 - protein, 492 aa, Homo sapiens [sequence omitted]

SEQ ID NO: 823839 - protein, 732 aa, Homo sapiens
MDPSADTWDLFSPLISLWINRFYIYLGFAVSISLWICVQIVIKTQGKNLQEKSVPKAAQDLMTNGYVSLQEKDIFVSGVKIFYGSQTGTAKGFATVLAEAVTSLDLPVAIINLKEYDPDDHLIEEVTSKNVCVFLVATYTDGLPTESAEWFCKWLEEASIDFRFGKTYLKGMRYAVFGLGNSAYASHFNKVGKNVDKWLWMLGAHRVMSRGEGDCDVVKSKHGSIEADFRAWKTKFISQLQALQKGERKKSCGGHCKKGKCESHQHGSEEREEGSHEQDELHHRDTEEEEPFESSSEEEFGGEDHQSLNSIVDVEDLGKIMDHVKKEKREKEQQEEKSGLFRNMGRNEDGERRAMITPALREALTKQGYQLIGSHSGVKLCRWTKSMLRGRGGCYKHTFYGIESHRCMETTPSLACANKCVFCWRHHTNPVGTEWRWKMDQPEMILKEAIENHQNMIKQFKGVPGVKAERFEEGMTVKHCALSLVGEPIMYPEINRFLKLLHQCKISSFLVTNAQFPAEIRNLEPVTQLYVSVDASTKDSLKKIDRPLFKDFWQRFLDSLKALAVKQQRTVYRLTLVKAWNVDELQAYAQLVSLGNPDFIEVKGVTYCGESSASSLTMAHVPWHEEVVQFVHELVDLIPEYEIACEHEHSNCLLIAHRKFKIGGEWWTWIDYNRFQELIQEYEDSGGSKTFSAKDYMARTPHWALFGASERGFDPKDTRHQRKNKSKAISGC

SEQ ID NO: 823840 - protein, 676 aa, Homo sapiens
MDPSADTWDLFSPLISLWINRFYIYLGFAVSISLWICVQIVIKTQGKNLQEKSVPKAAQDLMTNGYVSLQEKDIFVSGVKIFYGSQTGTAKGFATVLAEAVTSLDLPVAIINLKEYDPDDHLIEEVTSKNVCVFLVATYTDGLPTESAEWFCKWLEEASIDFRFGKTYLKGMRYAVFGLGNSAYASHFNKVGKNVDKWLWMLGAHRVMSRGEGDCDVVKSKHGSIEADFRAWKTKFISQLQALQKGERKKSCGGHCKKGKCESHQHGSEEREEGSHEQDELHHRDTEEEEPFESSSEEEFGGEDHQSLNSIVDVEDLGKIMDHVKKEKREKEQQEEKSGLFRNMGRNEDGERRAMITPALREALTKQGYQLIGSHSGVKLCRWTKSMLRGRGGCYKHTFYGIESHRCMETTPSLACANKCVFCWRHHTNPVGTEWRWKMDQPEMILKEAIENHQNMIKQFKGVPGVKAERFEEGMTVKHCALSLVGEPIMYPEINRFLKLLHQCKISSFLVTNAQFPAEIRNLEPVTQLYVSVDASTKDSLKKIDRPLFKDFWQRFLDSLKALAVKQQRTVYRLTLVKAWNVDELQAYAQLVSLGNPDFIEVKFKIGGEWWTWIDYNRFQELIQEYEDSGGSKTFSAKDYMARTPHWALFGASERGFDPKDTRHQRKNKSKAISGC

SEQ ID NO: 823841 - protein, 346 aa, Homo sapiens
MLRGRGGCYKHTFYGIESHRCMETTPSLACANKCVFCWRHHTNPVGTEWRWKMDQPEMILKEAIENHQNMIKQFKGVPGVKAERFEEGMTVKHCALSLVGEPIMYPEINRFLKLLHQCKISSFLVTNAQFPAEIRNLEPVTQLYVSVDASTKDSLKKIDRPLFKDFWQRFLDSLKALAVKQQRTVYRLTLVKAWNVDELQAYAQLVSLGNPDFIEVKGVTYCGESSASSLTMAHVPWHEEVVQFVHELVDLIPEYEIACEHEHSNCLLIAHRKFKIGGEWWTWIDYNRFQELIQEYEDSGGSKTFSAKDYMARTPHWALFGASERGFDPKDTRHQRKNKSKAISGC

SEQ ID NO: 823842 - protein, 258 aa, Homo sapiens
MTVKHCALSLVGEPIMYPEINRFLKLLHQCKISSFLVTNAQFPAEIRNLEPVTQLYVSVDASTKDSLKKIDRPLFKDFWQRFLDSLKALAVKQQRTVYRLTLVKAWNVDELQAYAQLVSLGNPDFIEVKGVTYCGESSASSLTMAHVPWHEEVVQFVHELVDLIPEYEIACEHEHSNCLLIAHRKFKIGGEWWTWIDYNRFQELIQEYEDSGGSKTFSAKDYMARTPHWALFGASERGFDPKDTRHQRKNKSKAISGC

SEQ ID NO: 823843 - protein, 684 aa, Homo sapiens
MDPSADTWDLFSPLISLWINRFYIYLGFAVSISLWICVQIVIKTQGKNLQEKSVPKAAQDLMTNGYVSLQEKDIFVSGVKIFYGSQTGTAKGFATVLAEAVTSLDLPVAIINLKEYDPDDHLIEEVTSKNVCVFLVATYTDGLPTESAEWFCKWLEEASIDFRFGKTYLKGMRYAVFGLGNSAYASHFNKVGKNVDKWLWMLGAHRVMSRGEGDCDVVKSKHGSIEADFRAWKTKFISQLQALQKGERKKSCGGHCKKGKCESHQHGSEEREEGSHEQDELHHRDTEEEEPFESSSEEEFGGEDHQSLNSIVDVEDLGKIMDHVKKEKREKEQQEEKSGLFRNMGRNEDGERRAMITPALREALTKQGYQLIGSHSGVKLCRWTKSMLRGRGGCYKHTFYGIESHRCMETTPSLACANKCVFCWRHHTNPVGTEWRWKMDQPEMILKEAIENHQNMIKQFKGVPGVKAERFEEGMTVKHCALSLVGEPIMYPEINRFLKLLHQCKISSFLVTNAQFPAEIRNLEPVTQLYVSVDASTKDSLKKIDRPLFKDFWQRFLDSLKALAVKQQRTVYRLTLVKAWNVDELQAYAQLVSLGNPDFIEVKGVTYCGESSASSLTMAHVPWHEEVVQFVHELVDLIPEYEIACEHEHSNCLLIAHRKTAVPGLERSEAVCCKRSGHVRAWSH

SEQ ID NO: 823844 - protein, 72 aa, Homo sapiens
  misc_feature (6)..(6): Xaa can be any naturally occurring amino acid
SSVPRXSTDVFALRVHLQPEHIPAFGPVGGEALQVDKGIFFVFIQYVYYMQLLNSYYYTLSINLLFRGIIYI

SEQ ID NO: 823845 - protein, 475 aa, Homo sapiens
PGDSRREVVVRMVRRKDLKSRTNGITETPREEEPFESSSEEEFGGEDHQSLNSIVDVEDLGKIMDHVKKEKREKEQQEEKSGLFRNMGRNEDGERRAMITPALREALTKQGYQLIGSHSGVKLCRWTKSMLRGRGGCYKHTFYGIESHRCMETTPSLACANKCVFCWRHHTNPVGTEWRWKMDQPEMILKEAIENHQNMIKQFKGVPGVKAERFEEGMTVKHCALSLVGEPIMYPEINRFLKLLHQCKISSFLVTNAQFPAEIRNLEPVTQLYVSVDASTKDSLKKIDRPLFKDFWQRFLDSLKALAVKQQRTVYRLTLVKAWNVDELQAYAQLVSLGNPDFIEVKGVTYCGESSASSLTMAHVPWHEEVVQFVHELVDLIPEYEIACEHEHSNCLLIAHRKFKIGGEWWTWIDYNRFQELIQEYEDSGGSKTFSAKDYMARTPHWALFGASERGFDPKDTRHQRKNKSKAISGC

SEQ ID NO: 823846 - protein, 732 aa, Homo sapiens; identical to SEQ ID NO: 823839

SEQ ID NO: 823847 - protein, 1070 aa, Homo sapiens
PASVHPSVRPTVQRKGLQAGRTSTRGTEARRGAKSAADPCGPGQGTVAAAMQSCARAWGLRLGRGVGGGRRLAGGSGPCWAPRSRDSSSGGGDSAAAGASRLLERLLPRHDDFARRHIGPGDKDQREMLQTLGLASIDELIEKTVPANIRLKRPLKMEDPVCENEILATLHAISSKNQIWRSYIGMGYYNCSVPQTILRNLLENSGWITQYTPYQPEVSQGRLESLLNYQTMVCDITGLDMANASLLDEGTAAAEALQLCYRHNKRRKFLVDPRCHPQTIAVVQTRAKYTGVLTELKLPCEMDFSGKDVSGVLFQYPDTEGKVEDFTELVERAHQSGSLACCATDLLALCILRPPGEFGVDIALGSSQRFGVPLGYGGPHAAFFAVRESLVRMMPGRMVGVTRDATGKEVYRLALQTREQHIRRDKATSNICTAQALLANMAAMFAIYHGSHGLEHIARRVHNATLILSEGLKRAGHQLQHDLFFDTLKIQCGCSVKEVLGRAAQRQINFRLFEDGTLGISLDETVNEKDLDDLLWIFGCESSAELVAESMGEECRGIPGSVFKRTSPFLTHQVFNSYHSETNIVRYMKKLENKDISLVHSMIPLGSCTMKLNSSSELAPITWKEFANIHPFVPLDQAQGYQQLFRELEKDLCELTGYDQVCFQPNSGAQGEYAGLATIRAYLNQKGEGHRTVCLIPKSAHGTNPASAHMAGMKIQPVEVDKYGNIDAVHLKAMVDKHKENLAAIMITYPSTNGVFEENISDVCDLIHQHGGQVYLDGANMNAQVGICRPGDFGSDVSHLNLHKTFCIPHGGGGPGMGPIGVKKHLAPFLPNHPVISLKRNEDACPVGTVSAAPWGSSSILPISWAYIKMMGGKGLKQATETAILNANYMAKRLETHYRILFRGARGYVGHEFILDTRPFKKSANIEAVDVAKRLQDYGFHAPTMSWPVAGTLMVEPTESEDKAELDRFCDAMISIRQEIADIEEGRIDPRVNPLKMSPHSLTCVTSSHWDRPYSREVAAFPLPFVKPENKFWPTIARIDDIYGDQHLVCTCPPMEVYESPFSEQKRASS

SEQ ID NO: 823848 - protein, 678 aa, Homo sapiens
MMPGRMVGVTRDATGKEVYRLALQTREQHIRRDKATSNICTAQALLANMAAMFAIYHGSHGLEHIARRVHNATLILSEGLKRAGHQLQHDLFFDTLKIQCGCSVKEVLGRAAQRQINFRLFEDGTLGISLDETVNEKDLDDLLWIFGCESSAELVAESMGEECRGIPGSVFKRTSPFLTHQVFNSYHSETNIVRYMKKLENKDISLVHSMIPLGSCTMKLNSSSELAPITWKEFANIHPFVPLDQAQGYQQLFRELEKDLCELTGYDQVCFQPNSGAQGEYAGLATIRAYLNQKGEGHRTVCLIPKSAHGTNPASAHMAGMKIQPVEVDKYGNIDAVHLKAMVDKHKENLAAIMITYPSTNGVFEENISDVCDLIHQHGGQVYLDGANMNAQVGICRPGDFGSDVSHLNLHKTFCIPHGGGGPGMGPIGVKKHLAPFLPNHPVISLKRNEDACPVGTVSAAPWGSSSILPISWAYIKMMGGKGLKQATETAILNANYMAKRLETHYRILFRGARGYVGHEFILDTRPFKKSANIEAVDVAKRLQDYGFHAPTMSWPVAGTLMVEPTESEDKAELDRFCDAMISIRQEIADIEEGRIDPRVNPLKMSPHSLTCVTSSHWDRPYSREVAAFPLPFVKPENKFWPTIARIDDIYGDQHLVCTCPPMEVYESPFSEQKRASS

SEQ ID NO: 823849 - protein, 1004 aa, Homo sapiens
PASVHPSVRPTVQRKGLQAGRTSTRGTEARRGAKSAADPCGPGQGTVAAAMQSCARAWGLRLGRGVGGGRRLAGGSGPCWAPRSRDSSSGGGDSAAAGASRLLERLLPRHDDFARRHIGPGDKDQREMLQTLGLASIDELIEKTVPANIRLKRPLKMEDPVCENEILATLHAISSKNQIWRSYIGMGYYNCSVPQTILRNLLENSGWITQYTPYQPEVSQGRLESLLNYQTMVCDITGLDMANASLLDEGTAAAEALQLCYRHNKRRKFLVDPRCHPQTIAVVQTRAKYTGVLTELKLPCEMDFSGKDVSGVLFQYPDTEGKVEDFTELVERAHQSGRCHWERSVSSCSSNQGATHSERQGYQQHLYSSGPLGEYGCHVSIYHGSHGLEHIARRVHNATLILSEGLKRAGHQLQHDLFFDTLKIQCGCSVKEVLGRAAQRQINFRLFEDGTLGISLDETVNEKDLDDLLWIFGCESSAELVAESMGEECRGIPGSVFKRTSPFLTHQVFNSYHSETNIVRYMKKLENKDISLVHSMIPLGSCTMKLNSSSELAPITWKEFANIHPFVPLDQAQGYQQLFRELEKDLCELTGYDQVCFQPNSGAQGEYAGLATIRAYLNQKGEGHRTVCLIPKSAHGTNPASAHMAGMKIQPVEVDKYGNIDAVHLKAMVDKHKENLAAIMITYPSTNGVFEENISDVCDLIHQHGGQVYLDGANMNAQVGICRPGDFGSDVSHLNLHKTFCIPHGGGGPGMGPIGVKKHLAPFLPNHPVISLKRNEDACPVGTVSAAPWGSSSILPISWAYIKMMGGKGLKQATETAILNANYMAKRLETHYRILFRGARGYVGHEFILDTRPFKKSANIEAVDVAKRLQDYGFHAPTMSWPVAGTLMVEPTESEDKAELDRFCDAMISIRQEIADIEEGRIDPRVNPLKMSPHSLTCVTSSHWDRPYSREVAAFPLPFVKPENKFWPTIARIDDIYGDQHLVCTCPPMEVYESPFSEQKRASS

SEQ ID NO: 823850 - protein, 286 aa, Homo sapiens
MPMIQNRCSVPLVNNNDVTKTFCIPHGGGGPGMGPIGVKKHLAPFLPNHPVISLKRNEDACPVGTVSAAPWGSSSILPISWAYIKMMGGKGLKQATETAILNANYMAKRLETHYRILFRGARGYVGHEFILDTRPFKKSANIEAVDVAKRLQDYGFHAPTMSWPVAGTLMVEPTESEDKAELDRFCDAMISIRQEIADIEEGRIDPRVNPLKMSPHSLTCVTSSHWDRPYSREVAAFPLPFVKPENKFWPTIARIDDIYGDQHLVCTCPPMEVYESPFSEQKRASS

SEQ ID NO: 823851 - protein, 1084 aa, Homo sapiens
PASVHPSVRPTVQRKGLQAGRTSTRGTEARRGAKSAADPCGPGQGTVAAAMQSCARAWGLRLGRGVGGGRRLAGGSGPCWAPRSRDSSSGGGDSAAAGASRLLERLLPRHDDFARRHIGPGDKDQREMLQTLGLASIDELIEKTVPANIRLKRPLKMEDPVCENEILATLHAISSKNQIWRSYIGMGYYNCSVPQTILRNLLENSGWITQYTPYQPEVSQGRLESLLNYQTMVCDITGLDMANASLLDEGTAAAEALQLCYRHNKRRKFLVDPRCHPQTIAVVQTRAKYTGVLTELKLPCEMDFSGKDVSGVLFQYPDTEGKVEDFTELVERAHQSGSLACCATDLLALCILRPPGEFGVDIALGSSQRFGVPLGYGGPHAAFFAVRESLVRMMPGRMVGVTRDATGKEVYRLALQTREQHIRRDKATSNICTAQALLANMAAMFAIYHGSHGLEHIARRVHNATLILSEGLKRAGHQLQHDLFFDTLKIQCGCSVKEVLGRAAQRQINFRLFEDGTLGISLDETVNEKDLDDLLWIFGCESSAELVAESMGEECRGIPGSVFKRTSPFLTHQVFNSYHSETNIVRYMKKLENKDISLVHSMIPLGSCTMKLNSSSELAPITWKEFANIHPFVPLDQAQGYQQLFRELEKDLCELTGYDQVCFQPNSGAQGEYAGLATIRAYLNQKGEGHRTVCLIPKSAHGTNPASAHMAGMKIQPVEVDKYGNIDAVHLKAMVDKHKENLAAIMITYPSTNGVFEENISDVCDLIHQHGGQVYLDGANMNAQVGICRPGDFGSDVSHLNLHKTFCIPHGGGGPGMGPIGVKKHLAPFLPNHPVISLKRNEDACPVGTVSAAPWGSSSILPISWAYIKMMGGKGLKQATETAILNANYMAKRLETHYRILFRGARGYVGHEFILDTRPFKKSANIEAVDVAKRLQDYGFHAPTMSWPVAGTLMVEPTESEDKAELDRFCDAMISIRQEIADIEEGRIDPRVNPLKMSPHSLTCVTSSHWDRPYSREVAAFPLPFVKPENKFWPTIARIDDIYGDQHLVCTCPPMEVYESPFSERLSPEHLISKKDFISHPSLK

SEQ ID NO: 823852 - protein, 246 aa, Homo sapiens
PASVHPSVRPTVQRKGLQAGRTSTRGTEARRGAKSAADPCGPGQGTVAAAMQSCARAWGLRLGRGVGGGRRLAGGSGPCWAPRSRDSSSGGGDSAAAGASRLLERLLPRHDDFARRHIGPGDKDQREMLQTLGLASIDELIEKTVPANIRLKRPLKMEDPVCENEILATLHAISSTQTILRNLLENSGWITQYTPYQPEVSQGRLESLLNYQTMVCDITGLDMANASLLDEGTAAAEALQLCYSPS

SEQ ID NO: 823853 - protein, 941 aa, Homo sapiens
PASVHPSVRPTVQRKGLQAGRTSTRGTEARRGAKSAADPCGPGQGTVAAAMQSCARAWGLRLGRGVGGGRRLAGGSGPCWAPRSRDSSSGGGDSAAAGASRLLERLLPRHDDFARRHIGPGDKDQREMLQTLGLASIDELIEKTVPANIRLKRPLKMEDPVCENEILATLHAISSKNQIWRSYIGMGYYNCSVPQTILRNLLENSGWITQYTPYQPEVSQGRLESLLNYQTMVCDITGLDMANASLLDEGTAAAEALQLCYRHNKRRKFLVDPRCHPQTIAVVQTRAKYTGVLTELKLPCEMDFSGKDVSGVLFQYPDTEGKVEDFTELVERAHQSGSLACCATDLLALCILRPPGEFGVDIALGSSQRFGVPLGYGGPHAAFFAVRESLVRMMPGRMVGVTRDATGKEVYRLALQTREQHIRRDKATSNICTAQALLANMAAMFAIYHGSHGLEHIARRVHNATLILSEGLKRAGHQLQHDLFFDTLKIQCGCSVKEVLGRAAQRQINFRLFEDGTLGISLDETVNEKDLDDLLWIFGCESSAELVAESMGEECRGIPGSVFKRTSPFLTHQVFNSYHSETNIVRYMKKLENKDISLVHSMIPLGSCTMKLNSSSELAPITWKEFANIHPFVPLDQAQGYQQLFRELEKDLCELTGYDQVCFQPNSGAQGEYAGLATIRAYLNQKGEGHRTVCLIPKSAHGTNPASAHMAGMKIQPVEVDKYGNIDAVHLKAMVLVFSLADGRGRDGDAGGDQGLDGLCKCLLLHSNEKSAVLPLTRVYSTPPITNREKSPFSNSSLCKKLNELFMVVVRVLLAEPACLFLPNLPSPSRLPHLIIKMAVTLTHLRVRNCNTNVSFANIHDCASPIMLNSWHHAAWFPPTPTLNLPTSRKKLLSNRICFPPADWQLHLKREGNQWNSNVILMVVLLGMETVNSVQLPSKGS

SEQ ID NO: 823854 - protein, 291 aa, Homo sapiens
MKARRPNRDPFLLVFASGAQGEYAGLATIRAYLNQKGEGHRTVCLIPKSAHGTNPASAHMAGMKIQPVEVDKYGNIDAVHLKAMVLVFSLADGRGRDGDAGGDQGLDGLCKCLLLHSNEKSAVLPLTRVYSTPPITNREKSPFSNSSLCKKLNELFMVVVRVLLAEPACLFLPNLPSPSRLPHLIIKMAVTLTHLRVRNCNTNVSFANIHDCASPIMLNSWHHAAWFPPTPTLNLPTSRKKLLSNRICFPPADWQLHLKREGNQWNSNVILMVVLLGMETVNSVQLPSKGS

SEQ ID NO: 823855 - protein, 1056 aa, Homo sapiens
PASVHPSVRPTVQRKGLQAGRTSTRGTEARRGAKSAADPCGPGQGTVAAAMQSCARAWGLRLGRGVGGGRRLAGGSGPCWAPRSRDSSSGGGDSAAAGASRLLERLLPRHDDFARRHIGPGDKDQREMLQTLGLASIDELIEKTVPANIRLKRPLKMEDPVCENEILATLHAISSKNQIWRSYIGMGYYNCSVPQTILRNLLENSGWITQYTPYQPEVSQGRLESLLNYQTMVCDITGLDMANASLLDEGTAAAEALQLCYRHNKRRKFLVDPRCHPQTIAVVQTRAKYTGVLTELKLPCEMDFSGKDVSGVLFQYPDTEGKVEDFTELVERAHQSGSLACCATDLLALCILRPPGEFGVDIALGSSQRFGVPLGYGGPHAAFFAVRESLVRMMPGRMVGVTRDATGKEVYRLALQTREQHIRRDKATSNICTAQALLANMAAMFAIYHGSHGLEHIARRVHNATLILSEGLKRAGHQLQHDLFFDTLKIQCGCSVKEVLGRAAQRQINFRLFEDGTLGISLDETVNEKDLDDLLWIFGCESSAELVAESMGEECRGIPGSVFKRTSPFLTHQVFNSYHSETNIVRYMKKLGSCTMKLNSSSELAPITWKEFANIHPFVPLDQAQGYQQLFRELEKDLCELTGYDQVCFQPNSGAQGEYAGLATIRAYLNQKGEGHRTVCLIPKSAHGTNPASAHMAGMKIQPVEVDKYGNIDAVHLKAMVDKHKENLAAIMITYPSTNGVFEENISDVCDLIHQHGGQVYLDGANMNAQVGICRPGDFGSDVSHLNLHKTFCIPHGGGGPGMGPIGVKKHLAPFLPNHPVISLKRNEDACPVGTVSAAPWGSSSILPISWAYIKMMGGKGLKQATETAILNANYMAKRLETHYRILFRGARGYVGHEFILDTRPFKKSANIEAVDVAKRLQDYGFHAPTMSWPVAGTLMVEPTESEDKAELDRFCDAMISIRQEIADIEEGRIDPRVNPLKMSPHSLTCVTSSHWDRPYSREVAAFPLPFVKPENKFWPTIARIDDIYGDQHLVCTCPPMEVYESPFSEQKRASS

SEQ ID NO: 823856 - protein, 420 aa, Homo sapiens
MKARRPNRDPFLLVFASGAQGEYAGLATIRAYLNQKGEGHRTVCLIPKSAHGTNPASAHMAGMKIQPVEVDKYGNIDAVHLKAMVDKHKENLAAIMITYPSTNGVFEENISDVCDLIHQHGGQVYLDGANMNAQVGICRPGDFGSDVSHLNLHKTFCIPHGGGGPGMGPIGVKKHLAPFLPNHPVISLKRNEDACPVGTVSAAPWGSSSILPISWAYIKMMGGKGLKQATETAILNANYMAKRLETHYRILFRGARGYVGHEFILDTRPFKKSANIEAVDVAKRLQDYGFHAPTMSWPVAGTLMVEPTESEDKAELDRFCDAMISIRQEIADIEEGRIDPRVNPLKMSPHSLTCVTSSHWDRPYSREVAAFPLPFVKPENKFWPTIARIDDIYGDQHLVCTCPPMEVYESPFSEQKRASS

SEQ ID NO: 823857 - protein, 1070 aa, Homo sapiens; identical to SEQ ID NO: 823847

SEQ ID NO: 823858 - protein, 108 aa, Homo sapiens
NLGLKQLSCTGYVGHEFILDTRPFKKSANIEAVDVAKRLQDYGFHAPTMSWPVAGTLMVEPTESEDKAELDRFCDAMISIRQEIADIEEGRIDPRVNPLKVRRPWNIA

SEQ ID NO: 823859 - protein, 1182 aa, Homo sapiens
MGLLTFRDVAIEFSPEEWQCLDTAQQNLYRNVMLENYRNLAFLGIALSKPDLITYLEQGKEPWNMKQHEMVDEPTGICPHFPQDFWPEQSMEDSFQKVLLRKYEKCGHENLQLRKGCKSVDECKVHKEGYNKLNQCLTTAQSKVFQCGKYLKVFYKFLNSNRHTIRHTGKKCFKCKKCVKSFCIRLHKTQHKCVYITEKSCKCKECEKTFHWSSTLTNHKEIHTEDKPYKCEECGKAFKQLSTLTTHKIICAKEKIYKCEECGKAFLWSSTLTRHKRIHTGEKPYKCEECGKAFSHSSTLAKHKRIHTGEKPYKCEECGKAFSRSSTLAKHKRIHTGEKPYKCKECGKAFSNSSTLANHKITHTEEKPYKCKECDKAFKRLSTLTKHKIIHAGEKLYKCEECGKAFNRSSNLTIHKFIHTGEKPYKCEECGKAFNWSSSLTKHKRFHTREKPFKCKECGKGFIWSSTLTRHKRIHTGEKPYKCEECGKAFRQSSTLTKHKIIHTGEKPYKFEECGKAFRQSLTLNKHKIIHSREKPYKCKECGKAFKQFSTLTTHKIIHAGKKLYKCEECGKAFNHSSSLSTHKIIHTGEKSYKCEECGKAFLWSSTLRRHKRIHTGEKPYKCEECGKAFSHSSALAKHKRIHTGEKPYKCKECGKAFSNSSTLANHKITHTEEKPYKCKECDKTFKRLSTLTKHKIIHAGEKLYKCEECGKAFNRSSNLTIHKFIHTGEKPYKCEECGKAFNWSSSLTKHKRIHTREKPFKCKECGKAFIWSSTLTRHKRIHTGEKPYKCEECGKAFSRSSTLTKHKTIHTGEKPYKCKECGKAFKHSSALAKHKIIHAGEKLYKCEECGKAFNQSSNLTTHKIIHTKEKPSKSEECDKAFIWSSTLTEHKRIHTREKTYKCEECGKAFSQPSHLTTHKRMHTGEKPYKCEECGKAFSQSSTLTTHKIIHTGEKPYKCEECGKAFRKSSTLTEHKIIHTGEKPYKCEECGKAFSQSSTLTRHTRMHTGEKPYKCEECGKAFNRSSKLTTHKIIHTGEKPYKCEECGKAFISSSTLNGHKRIHTREKPYKCEECGKAFSQSSTLTRHKRLHTGEKPYKCGECGKAFKESSALTKHKIIHTGEKPYKCEKCGKAFNQSSILTNHKKIHTITPVIPLLWEAEAGGSRGQEMETILANTVKPLLY

SEQ ID NO: 823860 - protein, 1182 aa, Homo sapiens; identical to SEQ ID NO: 823859

SEQ ID NO: 823861 - protein, 1092 aa, Homo sapiens
MEDSFQKVLLRKYEKCGHENLQLRKGCKSVDECKVHKEGYNKLNQCLTTAQSKVFQCGKYLKVFYKFLNSNRHTIRHTGKKCFKCKKCVKSFCIRLHKTQHKCVYITEKSCKCKECEKTFHWSSTLTNHKEIHTEDKPYKCEECGKAFKQLSTLTTHKIICAKEKIYKCEECGKAFLWSSTLTRHKRIHTGEKPYKCEECGKAFSHSSTLAKHKRIHTGEKPYKCEECGKAFSRSSTLAKHKRIHTGEKPYKCKECGKAFSNSSTLANHKITHTEEKPYKCKECDKAFKRLSTLTKHKIIHAGEKLYKCEECGKAFNRSSNLTIHKFIHTGEKPYKCEECGKAFNWSSSLTKHKRFHTREKPFKCKECGKGFIWSSTLTRHKRIHTGEKPYKCEECGKAFRQSSTLTKHKIIHTGEKPYKFEECGKAFRQSLTLNKHKIIHSREKPYKCKECGKAFKQFSTLTTHKIIHAGKKLYKCEECGKAFNHSSSLSTHKIIHTGEKSYKCEECGKAFLWSSTLRRHKRIHTGEKPYKCEECGKAFSHSSALAKHKRIHTGEKPYKCKECGKAFSNSSTLANHKITHTEEKPYKCKECDKTFKRLSTLTKHKIIHAGEKLYKCEECGKAFNRSSNLTIHKFIHTGEKPYKCEECGKAFNWSSSLTKHKRIHTREKPFKCKECGKAFIWSSTLTRHKRIHTGEKPYKCEECGKAFSRSSTLTKHKTIHTGEKPYKCKECGKAFKHSSALAKHKIIHAGEKLYKCEECGKAFNQSSNLTTHKIIHTKEKPSKSEECDKAFIWSSTLTEHKRIHTREKTYKCEECGKAFSQPSHLTTHKRMHTGEKPYKCEECGKAFSQSSTLTTHKIIHTGEKPYKCEECGKAFRKSSTLTEHKIIHTGEKPYKCEECGKAFSQSSTLTRHTRMHTGEKPYKCEECGKAFNRSSKLTTHKIIHTGEKPYKCEECGKAFISSSTLNGHKRIHTREKPYKCEECGKAFSQSSTLTRHKRLHTGEKPYKCGECGKAFKESSALTKHKIIHTGEKPYKCEKCGKAFNQSSILTNHKKIHTITPVIPLLWEAEAGGSRGQEMETILANTVKPLLY

SEQ ID NO: 823862 - protein, 889 aa, Homo sapiens
MSYFGEHFWGEKNHGFEVLYHSVKQGPISTKELADFIRERATIEETYSKAMAKLSKLASNGTPMGTFAPLWEVFRVSSDKLALCHLELTRKLQDLIKDVLRYGEEQLKTHKKCKEEVVSTLDAVQVLSGVSQLLPKSRENYLNRCMDQERLRRESTSQKEMDKAETKTKKAAESLRRSVEKYNSARADFEQKMLDSALRFQAMEETHLRHMKALLGSYAHSVEDTHVQIGQVHEEFKQNIENVSVEMLLRKFAESKGTGREKPGPLDFEAYSAAALQEAMKRLRGAKAFRLPGLSRREREPEPPAAVDFLEPDSGTCPEVDEEGFTVRPDVTQNSTAEPSRFSSSDSDFDDEEPRKFYVHIKPAPARAPACSPEAAAAQLRATAGSLILPPGPGGTMKRHSSRDAAGKPQRPRSAPRTSSCAERLQSEEQVSKNLFGPPLESAFDHEDFTGSSSLGFTSSPSPFSSSSPENVEDSGLDSPSHAAPGPSPDSWVPRPGTPQSPPSCRAPPPEARGIRAPPLPDSPQPLASSPGPWGLEALAGGDLMPAPADPTAREGLAAPPRRLRSRKVSCPLTRSNGDLSRSLSPSPLGSSAASTALERPSFLSQTGHGVSRGPSPVVLGSQDALPIATAFTEYVHAYFRGHSPSCLARVTGELTMTFPAGIVRVFSGTPPPPVLSFRLVHTTAIEHFQPNADLLFSDPSQSDPETKDFWLNMAALTEALQRQAEQNPTASYYNVVLLRYQFSRPGPQSVPLQLSAHWQCGATLTQVSVEYGYRPGATAVPTPLTNVQILLPVGEPVTNVRLQPAATWNLEEKRLTWRLPDVSEAGGSGRLSASWEPLSGPSTPSPVAAQFTSEGTTLSGVDLELVGSGYRMSLVKRRFATGMYLVSC

SEQ ID NO: 823863 - protein, 493 aa, Homo sapiens [sequence omitted]

SEQ ID NO: 823864 - protein, 472 aa, Homo sapiens
MRSCAERLQSEEQVSKNLFGPPLESAFDHEDFTGSSSLGFTSSPSPFSSSSPENVEDSGLDSPSHAAPGPSPDSWVPRPGTPQSPPSCRAPPPEARGIRAPPLPDSPQPLASSPGPWGLEALAGGDLMPAPADPTAREGLAAPPRRLRSRKVSCPLTRSNGDLSRSLSPSPLGSSAASTALERPSFLSQTGHGVSRGPSPVVLGSQDALPIATAFTEYVHAYFRGHSPSCLARVTGELTMTFPAGIVRVFSGTPPPPVLSFRLVHTTAIEHFQPNADLLFSDPSQSDPETKDFWLNMAALTEALQRQAEQNPTASYYNVVLLRYQFSRPGPQSVPLQLSAHWQCGATLTQVSVEYGYRPGATAVPTPLTNVQILLPVGEPVTNVRLQPAATWNLEEKRLTWRLPDVSEAGGSGRLSASWEPLSGPSTPSPVAAQFTSEGTTLSGVDLELVGSGYRMSLVKRRFATGMYLVSC

SEQ ID NO: 823865 - protein, 101 aa, Homo sapiens
TFAPLWEVFRVSSDKLALCHLELTRKLQDLIKDVLRYGEEQLKTHKKVCVVGAAQRLGGCGTPAAHRTPDLLGLYNLRMSASENSVNSTTSSPGSYGPERC

SEQ ID NO: 823866 - protein, 215 aa, Homo sapiens
MKRHSSRDAAGKPQRPRSAPRTSSCAERLQSEEQVSKNLFGPPLESAFDHEDFTGSSSLGFTSSPSPFSSSSPENVEDSGLDSPSHAAPGPSPDSWVPRPGTPQSPPSCRAPPPEARGIRAPPLPDSPQPLASSPGPWGLEALAGGDLMPAPADPTAREGLAAPPRRLRSRKVSCPLTRSNGDLSRSLSPSPLGSSAASTALERPSFLSQTGHGM

SEQ ID NO: 823867 - protein, 889 aa, Homo sapiens; identical to SEQ ID NO: 823862

SEQ ID NO: 823868 - protein, 952 aa, Homo sapiens
RAAAAEGGAGRAPVSATKPQVAASAGLGPSSGDGETEARSWTVTQTPDRHWTGPAGVSTETIRMSYFGEHFWGEKNHGFEVLYHSVKQGPISTKELADFIRERATIEETYSKAMAKLSKLASNGTPMGTFAPLWEVFRVSSDKLALCHLELTRKLQDLIKDVLRYGEEQLKTHKKCKEEVVSTLDAVQVLSGVSQLLPKSRENYLNRCMDQERLRRESTSQKEMDKAETKTKKAAESLRRSVEKYNSARADFEQKMLDSALRFQAMEETHLRHMKALLGSYAHSVEDTHVQIGQVHEEFKQNIENVSVEMLLRKFAESKGTGREKPGPLDFEAYSAAALQEAMKRLRGAKAFRLPGLSRREREPEPPAAVDFLEPDSGTCPEVDEEGFTVRPDVTQNSTAEPSRFSSSDSDFDDEEPRKFYVHIKPAPARAPACSPEAAAAQLRATAGSLILPPGPGGTMKRHSSRDAAGKPQRPRSAPRTSSCAERLQSEEQVSKNLFGPPLESAFDHEDFTGSSSLGFTSSPSPFSSSSPENVEDSGLDSPSHAAPGPSPDSWVPRPGTPQSPPSCRAPPPEARGIRAPPLPDSPQPLASSPGPWGLEALAGGDLMPAPADPTAREGLAAPPRRLRSRKVSCPLTRSNGDLSRSLSPSPLGSSAASTALERPSFLSQTGHGVSRGPSPVVLGSQDALPIATAFTEYVHAYFRGHSPSCLARVTGELTMTFPAGIVRVFSGTPPPPVLSFRLVHTTAIEHFQPNADLLFSDPSQSDPETKDFWLNMAALTEALQRQAEQNPTASYYNVVLLRYQFSRPGPQSVPLQLSAHWQCGATLTQVSVEYGYRPGATAVPTPLTNVQILLPVGEPVTNVRLQPAATWNLEEKRLTWRLPDVSEAGGSGRLSASWEPLSGPSTPSPVAAQFTSEGTTLSGVDLELVGSGYRMSLVKRRFATGMYLVSC

SEQ ID NO: 823869 - protein, 494 aa, Homo sapiens
LWRGKSPEGVALGACTRTLNGGPPDLPSTWPWPAGGWAGTLSGRGSELTARFPPQGSSSLGFTSSPSPFSSSSPENVEDSGLDSPSHAAPGPSPDSWVPRPGTPQSPPSCRAPPPEARGIRAPPLPDSPQPLASSPGPWGLEALAGGDLMPAPADPTAREGLAAPPRRLRSRKVSCPLTRSNGDLSRSLSPSPLGSSAASTALERPSFLSQTGHGVSRGPSPVVLGSQDALPIATAFTEYVHAYFRGHSPSCLARVTGELTMTFPAGIVRVFSGTPPPPVLSFRLVHTTAIEHFQPNADLLFSDPSQSDPETKDFWLNMAALTEALQRQAEQNPTASYYNVVLLRYQFSRPGPQSVPLQLSAHWQCGATLTQVSVEYGYRPGATAVPTPLTNVQILLPVGEPVTNVRLQPAATWNLEEKRLTWRLPDVSEAGGSGRLSASWEPLSGPSTPSPVAAQFTSEGTTLSGVDLELVGSGYRMSLVKRRFATGMYLVSC

SEQ ID NO: 823870 - protein, 456 aa, Homo sapiens
LWRGKSPEGVALGACTRTLNGGPPDLPSTWPWPAGGWAGTLSGRGSELTARFPPQGSSSLGFTSSPSPFSSSSPENVEDSGLDSPSHAAPGPSPDSWVPRPGTPQSPPSCRAPPPEARVSGHRLCQTRRSPSPRLQAPGGWRPWPEESRSLSPSPLGSSAASTALERPSFLSQTGHGVSRGPSPVVLGSQDALPIATAFTEYVHAYFRGHSPSCLARVTGELTMTFPAGIVRVFSGTPPPPVLSFRLVHTTAIEHFQPNADLLFSDPSQSDPETKDFWLNMAALTEALQRQAEQNPTASYYNVVLLRYQFSRPGPQSVPLQLSAHWQCGATLTQVSVEYGYRPGATAVPTPLTNVQILLPVGEPVTNVRLQPAATWNLEEKRLTWRLPDVSEAGGSGRLSASWEPLSGPSTPSPVAAQFTSEGTTLSGVDLELVGSGYRMSLVKRRFATGMYLVSC

SEQ ID NO: 823871 - protein, 253 aa, Homo sapiens
  misc_feature (250)..(250): Xaa can be any naturally occurring amino acid
ESQLIAGPPGARRVPGRPGSGDPLHPEEPPAHSVPSPAAGTMGAGASAEEKHSRELEKKLKEDAEKDARTVKLLLLGAGESGKSTIVKQMKIIHQDGYSLEECLEFIAIIYGNTLQSILAIVRAMTTLNIQYGDSARQDDARKLMHMADTIEEGTMPKEMSDIIQRLWKDSGIQACFERASEYQLNDSAGYYLSDLERLVTPGYVPTEQDVLRSRVKTTGIIETQFSFKDLNFRLFDVGGSLGAKKWSTXRGY

SEQ ID NO: 823872 - protein, 302 aa, Homo sapiens
MKIIHQDGYSLEECLEFIAIIYGNTLQSILAIVRAMTTLNIQYGDSARQDDARKLMHMADTIEEGTMPKEMSDIIQRLWKDSGIQACFERASEYQLNDSAGYYLSDLERLVTPGYVPTEQDVLRSRVKTTGIIETQFSFKDLNFRMFDVGGQRSEPKKWIHCFEGVTCIIFIAALSAYDMVLVEDDEVNRMHESLHLFNSICNHRYFATTSIVLFLNKKDVFFEKIKKAHLSICFPDYDGPNTYEDAGNYIKVQFLELNMRRDVKEIYSHMTCATDTQNVKFVFDAVTDIIIKENLKDCGLF

SEQ ID NO: 823873 - protein, 391 aa, Homo sapiens
ESQLIAGPPGARRVPGRPGSGDPLHPEEPPAHSVPSPAAGTMGAGASAEEKHSRELEKKLKEDAEKDARTVKLLLLGAGESGKSTIVKQMKIIHQDGYSLEECLEFIAIIYGNTLQSILAIVRAMTTLNIQYGDSARQDDARKLMHMADTIEEGTMPKEMSDIIQRLWKDSGIQACFERASEYQLNDSAGYYLSDLERLVTPGYVPTEQDVLRSRVKTTGIIETQFSFKDLNFRMFDVGGQRSEPKKWIHCFEGVTCIIFIAALSAYDMVLVEDDEVNRMHESLHLFNSICNHRYFATTSIVLFLNKKDVFFEKIKKAHLSICFPDYDGPNTYEDAGNYIKVQFLELNMRRDVKEIYSHMTCATDTQNVKFVFDAVTDIIIKENLKDCGLF

SEQ ID NO: 823874 - protein, 331 aa, Homo sapiens
KELIPSEPPGDTCTPSGAGESGKSTIVKQMKIIHQDGYSLEECLEFIAIIYGNTLQSILAIVRAMTTLNIQYGDSARQDDARKLMHMADTIEEGTMPKEMSDIIQRLWKDSGIQACFERASEYQLNDSAGYYLSDLERLVTPGYVPTEQDVLRSRVKTTGIIETQFSFKDLNFRMFDVGGQRSEPKKWIHCFEGVTCIIFIAALSAYDMVLVEDDEVNRMHESLHLFNSICNHRYFATTSIVLFLNKKDVFFEKIKKAHLSICFPDYDGPNTYEDAGNYIKVQFLELNMRRDVKEIYSHMTCATDTQNVKFVFDAVTDIIIKENLKDCGLF

SEQ ID NO: 823875 - protein, 273 aa, Homo sapiens
MGQKLSGSLKSVEVREPALRPAKRELRGAEPGRPARLDQLLDMPAAGLAVQLRHAWNPEDRSLNVFVKDDDRLTFHRHPVAQSTDGIRGKVGHARGLHAWQINWPARQRGTHAVVGVATARAPLHSVGYTALVGSDAESWGWDLGRSRLYHDGKNQPGVAYPAFLGPDEAFALPDSLLVVLDMDEGTLSFIVDGQYLGVAFRGLKGKKLYPVVSAVWGHCEVTMRYINGLDPEPLPLMDLCRRSIRSALGRQRLQDISSLPLPQSLKNYLQYQ

SEQ ID NO: 823876 - protein, 394 aa, Homo sapiens
MDLCHPEPAELSSGETEELQRIKWHRKQLLEDIQKLKDEIADVFAQIDCFESAEESRMAQKEKELCIGRKKFNMDPAKGIQYFIEHKLLTPDVQDIARFLYKGEGLNKTAIGTYLGERDPINLQVLQAFVDCHEFANLNLVQALRQFLWSFRLPGEAQKIDRMMEAFATRYCLCNPGVFQSTDTCYVLSFSIIMLNTSLHNPNVRDRPPFERFVSMNRGINNGSDLPEDQLRNLFDSIKSEPFSIPEDDGNDLTHTFFNPDREGWLLKLGGRVKTWKRRWFILTDNCLYYFEFTTDKEPRGIIPLENLSVQKVDDPKKPFCLELYNPSCRGQKIKACKTDGDGRVVEGKHESYRISATSAEERDQWIESIRASITRVPFYDLVSTRKKKIASKQ

SEQ ID NO: 823877 - protein, 118 aa, Homo sapiens
MDLCHPEPAELSSGETEELQRIKWHRKQLLEDIQKLKDEIADVFAQIDCFESAEESRMAQKEKELCIGRKKFNMDPAKGIQYFIEHKLLTPDVQDIARFLYKGEGLNKTAIGTYLGER

SEQ ID NO: 823878 - protein, 394 aa, Homo sapiens; identical to SEQ ID NO: 823876

SEQ ID NO: 823879 - protein, 103 aa, Homo sapiens
SVWASLSLRRAHPASLSSHPCLATSPQFFCLELYNPSCRGQKIKACKTDGDGRVVEGKHESYRISATSAEERDQWIESIRASITRVPFYDLVSTRKKKIASKQ

SEQ ID NO: 823880 - protein, 394 aa, Homo sapiens; identical to SEQ ID NO: 823876

SEQ ID NO: 823881 - protein, 157 aa, Homo sapiens
MDLCHPEPAELSSGETEELQRIKWHRKQLLEDIQKLKDEIADVFAQIDCFESAEESRMAQKEKELCIGRKKFNMDPAKGIQYFIEHKLLTPDVQDIARFLYKGEGLNKTAIGTYLGERDPINLQVLQAFVDCHEFANLNLVQALRFREGASDLGFGG

SEQ ID NO: 823882 - protein, 94 aa, Homo sapiens
AAPMKEGSKLPRTDCANTRMPGSRILAMEAPSSLPPPRPASMQQLLTASVYPLQGIQYFIEHKLLTPDVQDIARFLYKGEGLNKTAIGTYLGER

SEQ ID NO: 823883 - protein, 385 aa, Homo sapiens
MDLCHPEPAELSSGETEELQRIKWHRKQLLEDIQKLKDEIADVFAQIDCFESAEESRMAQKEKELCIGRKKFNMDPAKGIQYFIEHKLLTPDVQDIARFLYKGEGLNKTAIGTYLGERDPINLQVLQAFVDCHEFANLNLVQALRQFLWSFRLPGEAQKIDRMMEAFATRYCLCNPGVFQSTDTCYVLSFSIIMLNTSLHNPNVRDRPPFERFVSMNRGINNGSDLPEDQLRVTWECSQGEAGKGHFKKKKWPERRRVLIGKGEVSSVAENLFDSIKSEPFSIPEDDGNDLTHTFFNPDREGWLLKLGERPTDTRRRTHTHARAGTHRCMHTPGRTGPQLTRGSHASWGMELDSPRSPGPQCSRLPAPSIHLSREGREPVVGAEL

SEQ ID NO: 823884 - protein, 394 aa, Homo sapiens; identical to SEQ ID NO: 823876

SEQ ID NO: 823885 - protein, 417 aa, Homo sapiens
MDLCHPEPAELSSGETEELQRIKWHRKQLLEDIQKLKDEIADVFAQIDCFESAEESRMAQKEKELCIGRKKFNMDPAKGIQYFIEHKLLTPDVQDIARFLYKGEGLNKTAIGTYLGERDPINLQVLQAFVDCHEFANLNLVQALRQFLWSFRLPGEAQKIDRMMEAFATRYCLCNPGVFQSTGDPPASTSHSAEITGVSHHAKPKLLNPYINRLDTCYVLSFSIIMLNTSLHNPNVRDRPPFERFVSMNRGINNGSDLPEDQLRVTWECSQRRSRERTFQKEEVARTEAVLIGKGEVSSVAENLFDSIKSEPFSIPEDDGNDLTHTFFNPDREGWLLKLGERPTDTRRRTHTHARAGTHRCMHTPGRTGPQLTRGSHASWGMELDSPRSPGPQCSRLPAPSIHLSREGREPVVGAEL

SEQ ID NO: 823886 - protein, 386 aa, Homo sapiens
MDLCHPEPAELSSGETEELQRIKWHRKQLLEDIQKLKDEIADVFAQIDCFESAEESRMAQKEKELCIGRKKFNMDPAKGIQYFIEHKLLTPDVQDIARFLYKGEGLNKTAIGTYLGERDPINLQVLQAFVDCHEFANLNLVQALRQFLWSFRLPGEAQKIDRMMEAFATRYCLCNPGVFQSTDTCYVLSFSIIMLNTSLHNPNVRDRPPFERFVSMNRGINNGSDLPEDQLRNLFDSIKSEPFSIPEDDGNDLTHTFFNPDREGWLLKLGGRVKTWKRRWFILTDNCLYYFEFTTDKEPRGIIPLENLSVQKVDDPKKPFCLELYNPSCRGQKIKACKTDGDGRVVEGKHESYRISATSAEERDQWIESIRASITRGPTSPRGPTS

SEQ ID NO: 823887 - protein, 75 aa, Homo sapiens
TSLHNPNVRDRPPFERFVSMNRGINNGSDLPEDQLRVREAQPTQPGPGESRRDLSLDGWPGRGSSEIDSPQWGLC

SEQ ID NO: 823888 - protein, 148 aa, Homo sapiens
MFRRPVLQVLRQFVRHESETTTSLVLERSLNRVHLLGRVGQDPVLRQVEGKNPVTIFSLATNEMWRSGDSEVYQLGDVSQKTTWHRISVFRPGLRDVAYQYVKKGSRIYLEGKIDYGEYMDKNNVRRQATTIIADNIIFLSDQTKEKE

SEQ ID NO: 823889 - protein, 148 aa, Homo sapiens; identical to SEQ ID NO: 823888

SEQ ID NO: 823890 - protein, 148 aa, Homo sapiens; identical to SEQ ID NO: 823888

SEQ ID NO: 823891 - protein, 148 aa, Homo sapiens; identical to SEQ ID NO: 823888

SEQ ID NO: 823892 - protein, 164 aa, Homo sapiens
DPPGLQKFGPKEKYNAMFKRPVLQVLRQFVRHESETTTSLVLERSLNRVHLLGRVGQDPVLRQVEGKNPVTIFSLATNEMWRSGDSEVYQLGDVSQKTTWHRISVFRPGLRDVAYQYVKKGSRIYLEGKIDYGEYMDKNNVRRQATTIIADNIIFLSDQTKEKE

SEQ ID NO: 823893 - protein, 148 aa, Homo sapiens; identical to SEQ ID NO: 823888

SEQ ID NO: 823894 - protein, 148 aa, Homo sapiens; identical to SEQ ID NO: 823888

SEQ ID NO: 823895 - protein, 148 aa, Homo sapiens; identical to SEQ ID NO: 823888

SEQ ID NO: 823896 - protein, 148 aa, Homo sapiens; identical to SEQ ID NO: 823888

SEQ ID NO: 823897 - protein, 148 aa, Homo sapiens; identical to SEQ ID NO: 823888

SEQ ID NO: 823898 - protein, 148 aa, Homo sapiens; identical to SEQ ID NO: 823888

SEQ ID NO: 823899 - protein, 148 aa, Homo sapiens; identical to SEQ ID NO: 823888

SEQ ID NO: 823900 - protein, 148 aa, Homo sapiens; identical to SEQ ID NO: 823888

SEQ ID NO: 823901 - protein, 159 aa, Homo sapiens
MFRRPVLQVLRQFVRHESETTTSLVLERSLNRVHLLGRVGQDPVLRQVEGKNPVTIFSLATNEMWRSGDSEVYQLGDVSQKTTWHRISVFRPGLRDVAYQYVKKGSRIYLEGKIDYGEYMDKNNVRRQATTIIAGKKLVKIAVFFFFSFSFLKAWLHCN

SEQ ID NO: 823902 - protein, 159 aa, Homo sapiens; identical to SEQ ID NO: 823901

SEQ ID NO: 823903 - protein, 68 aa, Homo sapiens
LPRRPRFPRTASLVSAANITDLPALGHRTVAKRCPSIPNLTHPRLSLGEGGRDSQREGSAGVVCFGCA

SEQ ID NO: 823904 - protein, 135 aa, Homo sapiens
MFRRPVLQVLRQFVRHESETTTSLVLERSLNRVHLLGRVGQDPVLRQVEGKNPVTIFSLATNEMWRSGDSEVYQLGDVSQKTTWHRISVFRPGLRDVAYQYVKKGSRIYLEGKIDYGEYMDNNIIFLSDQTKEKE

SEQ ID NO: 823905 - protein, 148 aa, Homo sapiens; identical to SEQ ID NO: 823888

SEQ ID NO: 823906 - protein, 148 aa, Homo sapiens; identical to SEQ ID NO: 823888

SEQ ID NO: 823907 - protein, 148 aa, Homo sapiens; identical to SEQ ID NO: 823888

SEQ ID NO: 823908 - protein, 116 aa, Homo sapiens
MFRRPVLQVLRQFVRHESETTTSLVLERSLNRVHFVGSAAHEVAAHKWKKSSRQGTANKFILHATFSQQDVALQIAVFRRNLRLQPHTGERLLRLIAISNISLNPEETNGTSWAAG

SEQ ID NO: 823909 - protein, 148 aa, Homo sapiens; identical to SEQ ID NO: 823888

SEQ ID NO: 823910 - protein, 148 aa, Homo sapiens; identical to SEQ ID NO: 823888

SEQ ID NO: 823911 - protein, 148 aa, Homo sapiens; identical to SEQ ID NO: 823888

SEQ ID NO: 823912 - protein, 159 aa, Homo sapiens; identical to SEQ ID NO: 823901

SEQ ID NO: 823913 - protein, 148 aa, Homo sapiens; identical to SEQ ID NO: 823888

SEQ ID NO: 823914 - protein, 157 aa, Homo sapiens
  misc_feature (142)..(142): Xaa can be any naturally occurring amino acid
  misc_feature (155)..(155): Xaa can be any naturally occurring amino acid
MFRRPVLQVLRQFVRHESETTTSLVLERSLNRVHLLGRVGQDPVLRQVEGKNPVTIFSLATNEMWRSGDSEVYQLGDVSQKTTWHRISVFRPGLRDVAYQYVKKGSRIYLEGKIDYGEYMDKNNVRRQATTIIADEYYYFLXWTPDDKEERGVRXGK

SEQ ID NO: 823915 - protein, 68 aa, Homo sapiens; identical to SEQ ID NO: 823903

SEQ ID NO: 823916 - protein, 4367 aa, Homo sapiens
MADGGEGEDEIQFLRTDDEVVLQCTATIHKEQQKLCLAAEGFGNRLCFLESTSNSKNVPPDLSICTFVLEQSLSVRALQEMLANTVEKSEGQVDVEKWKFMMKTAQGGGHRTLLYGHAILLRHSYSGMYLCCLSTSRSSTDKLAFDVGLQEDTTGEACWWTIHPASKQRSEGEKVRVGDDLILVSVSSERYLHLSYGNGSLHVDAAFQQTLWSVAPISSGSEAAQGYLIGGDVLRLLHGHMDECLTVPSGEHGEEQRRTVHYEGGAVSVHARSLWRLETLRVAWSGSHIRWGQPFRLRHVTTGKYLSLMEDKNLLLMDKEKADVKSTAFTFRSSKEKLDVGVRKEVDGMGTSEIKYGDSVCYIQHVDTGLWLTYQSVDVKSVRMGSIQRKAIMHHEGHMDDGISLSRSQHEESRTARVIRSTVFLFNRFIRGLDALSKKAKASTVDLPIESVSLSLQDLIGYFHPPDEHLEHEDKQNRLRALKNRQNLFQEEGMINLVLECIDRLHVYSSAAHFADVAGREAGESWKSILNSLYELLAALIRGNRKNCAQFSGSLDWLISRLERLEASSGILEVLHCVLVESPEALNIIKEGHIKSIISLLDKHGRNHKVLDVLCSLCVCHGVAVRSNQHLICDNLLPGRDLLLQTRLVNHVSSMRPNIFLGVSEGSAQYKKWYYELMVDHTEPFVTAEATHLRVGWASTEGYSPYPGGGEEWGGNGVGDDLFSYGFDGLHLWSGCIARTVSSPNQHLLRTDDVISCCLDLSAPSISFRINGQPVQGMFENFNIDGLFFPVVSFSAGIKVRFLLGGRHGEFKFLPPPGYAPCYEAVLPKEKLKVEHSREYKQERTYTRDLLGPTVSLTQAAFTPIPVDTSQIVLPPHLERIREKLAENIHELWVMNKIELGWQYGPVRDDNKRQHPCLVEFSKLPEQERNYNLQMSLETLKTLLALGCHVGISDEHAEDKVKKMKLPKNYQLTSGYKPAPMDLSFIKLTPSQEAMVDKLAENAHNVWARDRIRQGWTYGIQQDVKNRRNPRLVPYTPLDDRTKKSNKDSLREAVRTLLGYGYNLEAPDQDHAARAEVCSGTGERFRIFRAEKTYAVKAGRWYFEFETVTAGDMRVGWSRPGCQPDQELGSDERAFAFDGFKAQRWHQGNEHYGRSWQAGDVVGCMVDMNEHTMMFTLNGEILLDDSGSELAFKDFDVGDGFIPVCSLGVAQVGRMNFGKDVSTLKYFTICGLQEGYEPFAVNTNRDITMWLSKRLPQFLQVPSNHEHIEVTRIDGTIDSSPCLKVTQKSFGSQNSNTDIMFYRLSMPIECAEVFSKTVAGGLPGAGLFGPKNDLEDYDADSDFEVLMKTAHGHLVPDRVDKDKEATKPEFNNHKDYAQEKPSRLKQRFLLRRTKPDYSTSHSARLTEDVLADDRDDYDFLMQTSTYYYSVRIFPGQEPANVWVGWITSDFHQYDTGFDLDRVRTVTVTLGDEKGKVHESIKRSNCYMVCAGESMSPGQGRNNNGLEIGCVVDAASGLLTFIANGKELSTYYQVEPSTKLFPAVFAQATSPNVFQFELGRIKNVMPLSAGLFKSEHKNPVPQCPPRLHVQFLSHVLWSRMPNQFLKVDVSRISERQGWLVQCLDPLQFMSLHIPEENRSVDILELTEQEELLKFHYHTLRLYSAVCALGNHRVAHALCSHVDEPQLLYAIENKYMPGLLRAGYYDLLIDIHLSSYATARLMMNNEYIVPMTEETKSITLFPDENKKHGLPGIGLSTSLRPRMQFSSPSFVSISNECYQYSPEFPLDILKSKTIQMLTEAVKEGSLHARDPVGGTTEFLFVPLIKLFYTLLIMGIFHNEDLKHILQLIEPSVFKEAATPEEESDTLEKELSVDDAKLQGAGEEEAKGGKRPKEGLLQMKLPEPVKLQMCLLLQYLCDCQVRHRIEAIVAFSDDFVAKLQDNQRFRYNEVMQALNMSAALTARKTKEFRSPPQEQINMLLNFKDDKSECPCPEEIRDQLLDFHEDLMTHCGIELDEDGSLDGNSDLTIRGRLLSLVEKVTYLKKKQAEKPVESDSKKSSTLQQLISETMVRWAQESVIEDPELVRAMFVLLHRQYDGIGGLVRALPKTYTINGVSVEDTINLLASLGQIRSLLSVRMGKEEEKLMIRGLGDIMNNKVFYQHPNLMRALGMHETVMEVMVNVLGGGESKEITFPKMVANCCRFLCYFCRISRQNQKAMFDHLSYLLENSSVGLASPAMRGSTPLDVAAASVMDNNELALALREPDLEKVVRYLAGCGLQSCQMLVSKGYPDIGWNPVEGERYLDFLRFAVFCNGESVEENANVVVRLLIRRPECFGPALRGEGGNGLLAAMEEAIKIAEDPSRDGPSPNSGSSKTLDTEEEEDDTIHMGNAIMTFYSALIDLLGRCAPEMHLIHAGKGEAIRIRSILRSLIPLGDLVGVISIAFQMPTIAKDGNVVEPDMSAGFCPDHKAAMVLFLDRVYGIEVQDFLLHLLEVGFLPDLRAAASLDTAALSATDMALALNRYLCTAVLPLLTRCAPLFAGTEHHASLIDSLLHTVYRLSKGCSLTKAQRDSIEVCLLSICGQLRPSMMQHLLRRLVFDVPLLNEHAKMPLKLLTNHYERCWKYYCLPGGWGNFGAASEEELHLSRKLFWGIFDALSQKKYEQELFKLALPCLSAVAGALPPDYMESNYVSMMEKQSSMDSEGNFNPQPVDTSNITIPEKLEYFINKYAEHSHDKWSMDKLANGWIYGEIYSDSSKVQPLMKPYKLLSEKEKEIYRWPIKESLKTMLARTMRTERTREGDSMALYNRTRRISQTSQVSVDAAHGYSPRAIDMSNVTLSRDLHAMAEMMAENYHNIWAKKKKMELESKGGGNHPLLVPYDTLTAKEKAKDREKAQDILKFLQINGYAVSRGFKDLELDTPSIEKRFAYSFLQQLIRYVDEAHQYILEFDGGSRGKGEHFPYEQEIKFFAKVVLPLIDQYFKNHRLYFLSAASRPLCSGGHASNKEKEMVTSLFCKLGVLVRHRISLFGNDATSIVNCLHILGQTLDARTVMKTGLESVKSALRAFLDNAAEDLEKTMENLKQGQFTHTRNQPKGVTQIINYTTVALLPMLSSLFEHIGQHQFGEDLILEDVQVSCYRILTSLYALGTSKSIYVERQRSALGECLAAFAGAFPVAFLETHLDKHNIYSIYNTKSSRERAALSLPTNVEDVCPNIPSLEKLMEEIVELAESGIRYTQMPHVMEVILPMLCSYMSRWWEHGPENNPERAEMCCTALNSEHMNTLLGNILKIIYNNLGIDEGAWMKRLAVFSQPIINKVKPQLLKTHFLPLMEKLKKKAATVVSEEDHLKAEARGDMSEAELLILDEFTTLARDLYAFYPLLIRFVDYNRAKWLKEPNPEAEELFRMVAEVFIYWSKSHNFKREEQNFVVQNEINNMSFLITDTKSKMSKAAVSDQERKKMKRKGDRYSMQTSLIVAALKRLLPIGLNICAPGDQELIALAKNRFSLKDTEDEVRDIIRSNIHLQGKLEDPAIRWQMALYKDLPNRTDDTSDPEKTVERVLDIANVLFHLEQKSKRVGRRHYCLVEHPQRSKKAVWHKLLSKQRKRAVVACFRMAPLYNLPRHRAVNLFLQGYEKSWIETEEHYFEDKLIEDLAKPGAEPPEEDEGTKRVDPLHQLILLFSRTALTEKCKLEEDFLYMAYADIMAKSCHDEEDDDGEEEVKSFEEKEMEKQKLLYQQARLHDRGAAEMVLQTISASKGETGPMVAATLKLGIAILNGGNSTVQQKMLDYLKEKKDVGFFQSLAGLMQSCSVLDLNAFERQNKAEGLGMVTEEGSGEKVLQDDEFTCDLFRFLQLLCEGHNSDFQNYLRTQTGNNTTVNIIISTVDYLLRVQESISDFYWYYSGKDVIDEQGQRNFSKAIQVAKQVFNTLTEYIQGPCTGNQQSLAHSRLWDAVVGFLHVFAHMQMKLSQDSSQIELLKELMDLQKDMVVMLLSMLEGNVVNGTIGKQMVDMLVESSNNVEMILKFFDMFLKLKDLTSSDTFKEYDPDGKGVISKRDFHKAMESHKHYTQSETEFLLSCAETDENETLDYEEFVKRFHEPAKDIGFNVAVLLTNLSEHMPNDTRLQTFLELAESVLNYFQPFLGRIEIMGSAKRIERVYFEISESSRTQWEKPQVKESKRQFIFDVVNEGGEKEKMELFVNFCEDTIFEMQLAAQISESDLNERSANKEESEKERPEEQGPRMAFFSILTVRSALFALRYNILTLMRMLSLKSLKKQMKKVKKMTVKDMVTAFFSSYWSIFMTLLHFVASVFRGFFRIICSLLLGGSLVEGAKKIKVAELLANMPDPTQDEVRGDGEEGERKPLEAALPSEDLTDLK

SEQ ID NO: 823917 - protein, 4367 aa, Homo sapiens; identical to SEQ ID NO: 823916

SEQ ID NO: 823918 - protein, 372 aa, Homo sapiens
MLDGLGVVAISIFGIQLKTEGSLRTAVPGIPTQSAFNKCLQRYIGALGARVICDNIPGLVSRQRQLCQRYPDIMRSVGEGAREWIRECQHQFRHHRWNCTTLDRDHTVFGRVMLRSSREAAFVYAISSAGVVHAITRACSQGELSVCSCDPYTRGRHHDQRGDFDWGGCSDNIHYGVRFAKAFVDAKEKRLKDARALMNLHNNRCGRTAVRRFLKLECKCHGVSGSCTLRTCWRALSDFRRTGDYLRRRYDGAVQVMATQDGANFTAARQGYRRATRTDLVYFDNSPDYCVLDKAAGSLGTAGRVCSKTSKGTDGCEIMCCGRGYDTTRVTRVTQCECKFHWCCAVRCKECRNTVDVHTCKAPKKAEWLDQT

SEQ ID NO: 823919 - protein, 372 aa, Homo sapiens; identical to SEQ ID NO: 823918

SEQ ID NO: 823920 - protein, 397 aa, Homo sapiens
GSLRGAMLRPGGAEEAAQLPLRRASAPVPVPSPAAPDGSRASARLGLACLLLLLLLTLPARVDTSWWYIGALGARVICDNIPGLVSRQRQLCQRYPDIMRSVGEGAREWIRECQHQFRHHRWNCTTLDRDHTVFGRVMLRSSREAAFVYAISSAGVVHAITRACSQGELSVCSCDPYTRGRHHDQRGDFDWGGCSDNIHYGVRFAKAFVDAKEKRLKDARALMNLHNNRCGRTAVRRFLKLECKCHGVSGSCTLRTCWRALSDFRRTGDYLRRRYDGAVQVMATQDGANFTAARQGYRRATRTDLVYFDNSPDYCVLDKAAGSLGTAGRVCSKTSKGTDGCEIMCCGRGYDTTRVTRVTQCECKFHWCCAVRCKECRNTVDVHTCKAPKKAEWLDQT

SEQ ID NO: 823921 - protein, 372 aa, Homo sapiens; identical to SEQ ID NO: 823918

SEQ ID NO: 823922 - protein, 181 aa, Homo sapiens
MCHWKPSLFLHFIQQKPEKQYCFHFKDMINIINIIMMMMMMKTKDFSRDLSFQNISGQYLIVFFFLNKSTSTFEKTHRAGQETQQKRGPPNKYPPRGGPTSNATTRFVANRGAPIGRAQISARPGARQHSRGGQTGTRRSWQETQLARAIGTTTRIKRDNTLAMWYNSMRGNLTGITKHTR

SEQ ID NO: 823923 - protein, 1837 aa, Homo sapiens
MGAMTQLLAGVFLAFLALATEGGVLKKVIRHKRQSGVNATLPEENQPVVFNHVYNIKLPVGSQCSVDLESASGEKDLAPPSEPSESFQEHTVDGENQIVFTHRINIPRRACGCAAAPDVKELLSRLEELENLVSSLREQCTAGAGCCLQPATGRLDTRPFCSGRGNFSTEGCGCVCEPGWKGPNCSEPECPGNCHLRGRCIDGQCICDDGFTGEDCSQLACPSDCNDQGKCVNGVCICFEGYAGADCSREICPVPCSEEHGTCVDGLCVCHDGFAGDDCNKPLCLNNCYNRGRCVENECVCDEGFTGEDCSELICPNDCFDRGRCINGTCYCEEGFTGEDCGKPTCPHACHTQGRCEEGQCVCDEGFAGVDCSEKRCPADCHNRGRCVDGRCECDDGFTGADCGELKCPNGCSGHGRCVNGQCVCDEGYTGEDCSQLRCPNDCHSRGRCVEGKCVCEQGFKGYDCSDMSCPNDCHQHGRCVNGMCVCDDGYTGEDCRDRQCPRDCSNRGLCVDGQCVCEDGFTGPDCAELSCPNDCHGQGRCVNGQCVCHEGFMGKDCKEQRCPSDCHGQGRCVDGQCICHEGFTGLDCGQHSCPSDCNNLGQCVSGRCICNEGYSGEDCSEVSPPKDLVVTEVTEETVNLAWDNEMRVTEYLVVYTPTHEGGLEMQFRVPGDQTSTIIQELEPGVEYFIRVFAILENKKSIPVSARVATYLPAPEGLKFKSIKETSVEVEWDPLDIAFETWEIIFRNMNKEDEGEITKSLRRPETSYRQTGLAPGQEYEISLHIVKNNTRGPGLKRVTTTRLDAPSQIEVKDVTDTTALITWFKPLAEIDGIELTYGIKDVPGDRTTIDLTEDENQYSIGNLKPDTEYEVSLISRRGDMSSNPAKETFTTGLDAPRNLRRVSQTDNSITLEWRNGKAAIDSYRIKYAPISGGDHAEVDVPKSQQATTKTTLTGLRPGTEYGIGVSAVKEDKESNPATINAATELDTPKDLQVSETAETSLTLLWKTPLAKFDRYRLNYSLPTGQWVGVQLPRNTTSYVLRGLEPGQEYNVLLTAEKGRHKSKPARVKASTEQAPELENLTVTEVGWDGLRLNWTAADQAYEHFIIQVQEANKVEAARNLTVPGSLRAVDIPGLKAATPYTVSIYGVIQGYRTPVLSAEASTGETPNLGEVVVAEVGWDALKLNWTAPEGAYEYFFIQVQEADTVEAAQNLTVPGGLRSTDLPGLKAATHYTITIRGVTQDFSTTPLSVEVLTEEVPDMGNLTVTEVSWDALRLNWTTPDGTYDQFTIQVQEADQVEEAHNLTVPGSLRSMEIPGLRAGTPYTVTLHGEVRGHSTRPLAVEVVTAMGSPKEVIFSDITENSATVSWRAPTAQVESFRITYVPITGGTPSMVTVDGTKTQTRLVKLIPGVEYLVSIIAMKGFEESEPVSGSFTTALDGPSGLVTANITDSEALARWQPAIATVDSYVISYTGEKVPEITRTVSGNTVEYALTDLEPATEYTLRIFAEKGPQKSSTITAKFTTDLDSPRDLTATEVQSETALLTWRPPRASVTGYLLVYESVDGTVKEVIVGPDTTSYSLADLSPSTHYTAKIQALNGPLRSNMIQTIFTTIGLLYPFPKDCSQAMLNGDTTSGLYTIYLNGDKAQALEVFCDMTSDGGGWIVFLRRKNGRENFYQNWKAYAAGFGDRREEFWLGLDNLNKITAQGQYELRVDLRDHGETAFAVYDKFSVGDAKTRYKLKVEGYSGTAGDSMAYHNGRSFSTFDKDTDSAITNCALSYKGAFWYRNCHRVNLMGRYGDNNHSQGVNWFHWKGHEHSIQFAEMKLRPSNFRNLEGRRKRA

SEQ ID NO: 823924 - protein, 1564 aa, Homo sapiens
MGAMTQLLAGVFLAFLALATEGGVLKKVIRHKRQSGVNATLPEENQPVVFNHVYNIKLPVGSQCSVDLESASGEKDLAPPSEPSESFQEHTVDGENQIVFTHRINIPRRACGCAAAPDVKELLSRLEELENLVSSLREQCTAGAGCCLQPATGRLDTRPFCSGRGNFSTEGCGCVCEPGWKGPNCSEPECPGNCHLRGRCIDGQCICDDGFTGEDCSQLACPSDCNDQGKCVNGVCICFEGYAGADCSREICPVPCSEEHGTCVDGLCVCHDGFAGDDCNKPLCLNNCYNRGRCVENECVCDEGFTGEDCSELICPNDCFDRGRCINGTCYCEEGFTGEDCGKPTCPHACHTQGRCEEGQCVCDEGFAGVDCSEKRCPADCHNRGRCVDGRCECDDGFTGADCGELKCPNGCSGHGRCVNGQCVCDEGYTGEDCSQLRCPNDCHSRGRCVEGKCVCEQGFKGYDCSDMSCPNDCHQHGRCVNGMCVCDDGYTGEDCRDRQCPRDCSNRGLCVDGQCVCEDGFTGPDCAELSCPNDCHGQGRCVNGQCVCHEGFMGKDCKEQRCPSDCHGQGRCVDGQCICHEGFTGLDCGQHSCPSDCNNLGQCVSGRCICNEGYSGEDCSEVSPPKDLVVTEVTEETVNLAWDNEMRVTEYLVVYTPTHEGGLEMQFRVPGDQTSTIIQELEPGVEYFIRVFAILENKKSIPVSARVATYLPAPEGLKFKSIKETSVEVEWDPLDIAFETWEIIFRNMNKEDEGEITKSLRRPETSYRQTGLAPGQEYEISLHIVKNNTRGPGLKRVTTTRLDAPSQIEVKDVTDTTALITWFKPLAEIDGIELTYGIKDVPGDRTTIDLTEDENQYSIGNLKPDTEYEVSLISRRGDMSSNPAKETFTTGLDAPRNLRRVSQTDNSITLEWRNGKAAIDSYRIKYAPISGGDHAEVDVPKSQQATTKTTLTGLRPGTEYGIGVSAVKEDKESNPATINAATELDTPKDLQVSETAETSLTLLWKTPLAKFDRYRLNYSLPTGQWVGVQLPRNTTSYVLRGLEPGQEYNVLLTAEKGRHKSKPARVKASTAMGSPKEVIFSDITENSATVSWRAPTAQVESFRITYVPITGGTPSMVTVDGTKTQTRLVKLIPGVEYLVSIIAMKGFEESEPVSGSFTTALDGPSGLVTANITDSEALARWQPAIATVDSYVISYTGEKVPEITRTVSGNTVEYALTDLEPATEYTLRIFAEKGPQKSSTITAKFTTDLDSPRDLTATEVQSETALLTWRPPRASVTGYLLVYESVDGTVKEVIVGPDTTSYSLADLSPSTHYTAKIQALNGPLRSNMIQTIFTTIGLLYPFPKDCSQAMLNGDTTSGLYTIYLNGDKAQALEVFCDMTSDGGGWIVFLRRKNGRENFYQNWKAYAAGFGDRREEFWLGLDNLNKITAQGQYELRVDLRDHGETAFAVYDKFSVGDAKTRYKLKVEGYSGTAGDSMAYHNGRSFSTFDKDTDSAITNCALSYKGAFWYRNCHRVNLMGRYGDNNHSQGVNWFHWKGHEHSIQFAEMKLRPSNFRNLEGRRKRA

SEQ ID NO: 823925 - protein, 915 aa, Homo sapiens
MVLYKACILEARDVHSSEAARQREVLGFLHFVDLLHLNDKVLIGIVSCGPVESEAIPANLRHGYISQLWEILCDDLYSKGSSAVAPDLAVQVDCVRSARPEAWDFHGTQAARNREIVSLFHQVSLLDLNSKLVIGSIWRGPVLSAEASTAKEPEIGNLNVSDITPESFNLSWMATDGIFETFTIEIIDSNRLLETVEYNISGAERTAHISGLPPSTDFIVYLSGLAPSIRTKTISATATTEALPLLENLTISDINPYGFTVSWMASENAFDSFLVTVVDSGKLLDPQEFTLSGTQRKLELRGLITGIGYEVMVSGFTQGHQTKPLRAEIVTEAEPEVDNLLVSDATPDGFRLSWTADEGVFDNFVLKIRDTKKQSEPLEITLLAPERTRDLTGLREATEYEIELYGISKGRRSQTVSAIATTAMGSPKEVIFSDITENSATVSWRAPTAQVESFRITYVPITGGTPSMVTVDGTKTQTRLVKLIPGVEYLVSIIAMKGFEESEPVSGSFTTALDGPSGLVTANITDSEALARWQPAIATVDSYVISYTGEKVPEITRTVSGNTVEYALTDLEPATEYTLRIFAEKGPQKSSTITAKFTTDLDSPRDLTATEVQSETALLTWRPPRASVTGYLLVYESVDGTVKEVIVGPDTTSYSLADLSPSTHYTAKIQALNGPLRSNMIQTIFTTIGLLYPFPKDCSQAMLNGDTTSGLYTIYLNGDKAQALEVFCDMTSDGGGWIVFLRRKNGRENFYQNWKAYAAGFGDRREEFWLGLDNLNKITAQGQYELRVDLRDHGETAFAVYDKFSVGDAKTRYKLKVEGYSGTAGDSMAYHNGRSFSTFDKDTDSAITNCALSYKGAFWYRNCHRVNLMGRYGDNNHSQGVNWFHWKGHEHSIQFAEMKLRPSNFRNLEGRRKRA

SEQ ID NO: 823926 - protein, 1796 aa, Homo sapiens
MGAMTQLLAGVFLAFLALATEGGVLKKVIRHKRQSGVNATLPEENQPVVFNHVYNIKLPVGSQCSVDLESASGEKDLAPPSEPSESFQEHTVDGENQIVFTHRINIPRRACGCAAAPDVKELLSRLEELENLVSSLREQCTAGAGCCLQPATGRLDTRPFCSGRGNFSTEGCGCVCEPGWKGPNCSEPECPGNCHLRGRCIDGQCICDDGFTGEDCSQLACPSDCNDQGKCVNGVCICFEGYAGADCSREICPVPCSEEHGTCVDGLCVCHDGFAGDDCNKPLCLNNCYNRGRCVENECVCDEGFTGEDCSELICPNDCFDRGRCINGTCYCEEGFTGEDCGKPTCPHACHTQGRCEEGQCVCDEGFAGVDCSEKRCPADCHNRGRCVDGRCECDDGFTGADCGELKCPNGCSGHGRCVNGQCVCDEGYTGEDCSQLRCPNDCHSRGRCVEGKCVCEQGFKGYDCSDMSCPNDCHQHGRCVNGMCVCDDGYTGEDCRDRQCPRDCSNRGLCVDGQCVCEDGFTGPDCAELSCPNDCHGQGRCVNGQCVCHEGFMGKDCKEQRCPSDCHGQGRCVDGQCICHEGFTGLDCGQHSCPSDCNNLGQCVSGRCICNEGYSGEDCSEVSPPKDLVVTEVTEETVNLAWDNEMRVTEYLVVYTPTHEGGLEMQFRVPGDQTSTIIQELEPGVEYFIRVFAILENKKSIPVSARVATYLPAPEGLKFKSIKETSVEVEWDPLDIAFETWEIIFRNMNKEDEGEITKSLRRPETSYRQTGLAPGQEYEISLHIVKNNTRGPGLKRVTTTRLDAPSQIEVKDVTDTTALITWFKPLAEIDGIELTYGIKDVPGDRTTIDLTEDENQYSIGNLKPDTEYEVSLISRRGDMSSNPAKETFTTGLDAPRNLRRVSQTDNSITLEWRNGKAAIDSYRIKYAPISGGDHAEVDVPKSQQATTKTTLTGLRPGTEYGIGVSAVKEDKESNPATINAATELDTPKDLQVSETAETSLTLLWKTPLAKFDRYRLNYSLPTGQWVGVQLPRNTTSYVLRGLEPGQEYNVLLTAEKGRHKSKPARVKASTEQAPELENLTVTEVGWDGLRLNWTAADQAYEHFIIQVQEANKVEAARNLTVPGSLRAVDIPGLKAATPYTVSIYGVIQGYRTPVLSAEASTGETPNLGEVVVAEVGWDALKLNWTAPEGAYEYFFIQVQEADTVEAAQNLTVPGGLRSTDLPGLKAATHYTITIRGVTQDFSTTPLSVEVLTEEVPDMGNLTVTEVSWDALRLNWTTPDGTYDQFTIQVQEADQVEEAHNLTVPGSLRSMEIPGLRAGTPYTVTLHGEVRGHSTRPLAVEVVTEDLPQLGDLAVSEVGWDGLRLNWTAADNAYEHFVIQVQEVNKVEAAQNLTLPGSLRAVDIPGLEAATPYRVSIYGVIRGYRTPVLSAEASTAKEPEIGNLNVSDITPESFNLSWMATDGIFETFTIEIIDSNRLLETVEYNISGAERTAHISGLPPSTDFIVYLSGLAPSIRTKTISATATTEAEPEVDNLLVSDATPDGFRLSWTADEGVFDNFVLKIRDTKKQSEPLEITLLAPERTRDLTGLREATEYEIELYGISKGRRSQTVSAIATTAMGSPKEVIFSDITENSATVSWRAPTAQVESFRITYVPITGGTPSMVTVDGTKTQTRLVKLIPGVEYLVSIIAMKGFEESEPVSGSFTTALDGPSGLVTANITDSEALARWQPAIATVDSYVISYTGEKVPEITRTVSGNTVEYALTDLEPATEYTLRIFAEKGPQKSSTISHRLPAGL

SEQ ID NO: 823927 - protein, 2201 aa, Homo sapiens
MGAMTQLLAGVFLAFLALATEGGVLKKVIRHKRQSGVNATLPEENQPVVFNHVYNIKLPVGSQCSVDLESASGEKDLAPPSEPSESFQEHTVDGENQIVFTHRINIPRRACGCAAAPDVKELLSRLEELENLVSSLREQCTAGAGCCLQPATGRLDTRPFCSGRGNFSTEGCGCVCEPGWKGPNCSEPECPGNCHLRGRCIDGQCICDDGFTGEDCSQLACPSDCNDQGKCVNGVCICFEGYAGADCSREICPVPCSEEHGTCVDGLCVCHDGFAGDDCNKPLCLNNCYNRGRCVENECVCDEGFTGEDCSELICPNDCFDRGRCINGTCYCEEGFTGEDCGKPTCPHACHTQGRCEEGQCVCDEGFAGVDCSEKRCPADCHNRGRCVDGRCECDDGFTGADCGELKCPNGCSGHGRCVNGQCVCDEGYTGEDCSQLRCPNDCHSRGRCVEGKCVCEQGFKGYDCSDMSCPNDCHQHGRCVNGMCVCDDGYTGEDCRDRQCPRDCSNRGLCVDGQCVCEDGFTGPDCAELSCPNDCHGQGRCVNGQCVCHEGFMGKDCKEQRCPSDCHGQGRCVDGQCICHEGFTGLDCGQHSCPSDCNNLGQCVSGRCICNEGYSGEDCSEVSPPKDLVVTEVTEETVNLAWDNEMRVTEYLVVYTPTHEGGLEMQFRVPGDQTSTIIQELEPGVEYFIRVFAILENKKSIPVSARVATYLPAPEGLKFKSIKETSVEVEWDPLDIAFETWEIIFRNMNKEDEGEITKSLRRPETSYRQTGLAPGQEYEISLHIVKNNTRGPGLKRVTTTRLDAPSQIEVKDVTDTTALITWFKPLAEIDGIELTYGIKDVPGDRTTIDLTEDENQYSIGNLKPDTEYEVSLISRRGDMSSNPAKETFTTGLDAPRNLRRVSQTDNSITLEWRNGKAAIDSYRIKYAPISGGDHAEVDVPKSQQATTKTTLTGLRPGTEYGIGVSAVKEDKESNPATINAATELDTPKDLQVSETAETSLTLLWKTPLAKFDRYRLNYSLPTGQWVGVQLPRNTTSYVLRGLEPGQEYNVLLTAEKGRHKSKPARVKASTEQAPELENLTVTEVGWDGLRLNWTAADQAYEHFIIQVQEANKVEAARNLTVPGSLRAVDIPGLKAATPYTVSIYGVIQGYRTPVLSAEASTGETPNLGEVVVAEVGWDALKLNWTAPEGAYEYFFIQVQEADTVEAAQNLTVPGGLRSTDLPGLKAATHYTITIRGVTQDFSTTPLSVEVLTEEVPDMGNLTVTEVSWDALRLNWTTPDGTYDQFTIQVQEADQVEEAHNLTVPGSLRSMEIPGLRAGTPYTVTLHGEVRGHSTRPLAVEVVTEDLPQLGDLAVSEVGWDGLRLNWTAADNAYEHFVIQVQEVNKVEAAQNLTLPGSLRAVDIPGLEAATPYRVSIYGVIRGYRTPVLSAEASTAKEPEIGNLNVSDITPESFNLSWMATDGIFETFTIEIIDSNRLLETVEYNISGAERTAHISGLPPSTDFIVYLSGLAPSIRTKTISATATTEALPLLENLTISDINPYGFTVSWMASENAFDSFLVTVVDSGKLLDPQEFTLSGTQRKLELRGLITGIGYEVMVSGFTQGHQTKPLRAEIVTEAEPEVDNLLVSDATPDGFRLSWTADEGVFDNFVLKIRDTKKQSEPLEITLLAPERTRDLTGLREATEYEIELYGISKGRRSQTVSAIATTAMGSPKEVIFSDITENSATVSWRAPTAQVESFRITYVPITGGTPSMVTVDGTKTQTRLVKLIPGVEYLVSIIAMKGFEESEPVSGSFTTALDGPSGLVTANITDSEALARWQPAIATVDSYVISYTGEKVPEITRTVSGNTVEYALTDLEPATEYTLRIFAEKGPQKSSTITAKFTTDLDSPRDLTATEVQSETALLTWRPPRASVTGYLLVYESVDGTVKEVIVGPDTTSYSLADLSPSTHYTAKIQALNGPLRSNMIQTIFTTIGLLYPFPKDCSQAMLNGDTTSGLYTIYLNGDKAQALEVFCDMTSDGGGWIVFLRRKNGRENFYQNWKAYAAGFGDRREEFWLGLDNLNKITAQGQYELRVDLRDHGETAFAVYDKFSVGDAKTRYKLKVEGYSGTAGDSMAYHNGRSFSTFDKDTDSAITNCALSYKGAFWYRNCHRVNLMGRYGDNNHSQGVNWFHWKGHEHSIQFAEMKLRPSNFRNLEGRRKRA

SEQ ID NO: 823928 - protein, 288 aa, Homo sapiens
RVEHAMTRYKLKVERVQMGQQVTPWPTTMADPSPPLTRTQKIQALNGPLRSNMIQTIFTTIGLLYPFPKDCSQAMLNGDTTSGLYTIYLNGDKAQALEVFCDMTSDGGGWIVFLRRKNGRENFYQNWKAYAAGFGDRREEFWLGLDNLNKITAQGQYELRVDLRDHGETAFAVYDKFSVGDAKTRYKLKVEGYSGTAGDSMAYHNGRSFSTFDKDTDSAITNCALSYKGAFWYRNCHRVNLMGRYGDNNHSQGVNWFHWKGHEHSIQFAEMKLRPSNFRNLEGRRKRA

SEQ ID NO: 823929 - protein, 215 aa, Homo sapiens
MDRMEPDALSTVPHSFLSQRCPLSCNSLSTPRFIDMFIGFLRRKNGRENFYQNWKAYAAGFGDRREEFWLGLDNLNKITAQGQYELRVDLRDHGETAFAVYDKFSVGDAKTRYKLKVEGYSGTAGDSMAYHNGRSFSTFDKDTDSAITNCALSYKGAFWYRNCHRVNLMGRYGDNNHSQGVNWFHWKGHEHSIQFAEMKLRPSNFRNLEGRRKRA

SEQ ID NO: 823930 - protein, 110 aa, Homo sapiens
CPGGKFQLRFLRSIFLSLPGDSMAYHNGRSFSTFDKDTDSAITNCALSYKGAFWYRNCHRVNLMGRYGDNNHSQGVNWFHWKGHEHSIQFAEMKLRPSNFRNLEGRRKRA

SEQ ID NO: 823931 - protein, 2201 aa, Homo sapiens; identical to SEQ ID NO: 823927

SEQ ID NO: 823932 - protein, 2201 aa, Homo sapiens; identical to SEQ ID NO: 823927

SEQ ID NO: 823933 - protein, 1742 aa, Homo sapiens
MGAMTQLLAGVFLAFLALATEGGVLKKVIRHKRQSGVNATLPEENQPVVFNHVYNIKLPVGSQCSVDLESASGEKDLAPPSEPSESFQEHTVDGENQIVFTHRINIPRRACGCAAAPDVKELLSRLEELENLVSSLREQCTAGAGCCLQPATGRLDTRPFCSGRGNFSTEGCGCVCEPGWKGPNCSEPECPGNCHLRGRCIDGQCICDDGFTGEDCSQLACPSDCNDQGKCVNGVCICFEGYAGADCSREICPVPCSEEHGTCVDGLCVCHDGFAGDDCNKPLCLNNCYNRGRCVENECVCDEGFTGEDCSELICPNDCFDRGRCINGTCYCEEGFTGEDCGKPTCPHACHTQGRCEEGQCVCDEGFAGVDCSEKRCPADCHNRGRCVDGRCECDDGFTGADCGELKCPNGCSGHGRCVNGQCVCDEGYTGEDCSQLRCPNDCHSRGRCVEGKCVCEQGFKGYDCSDMSCPNDCHQHGRCVNGMCVCDDGYTGEDCRDRQCPRDCSNRGLCVDGQCVCEDGFTGPDCAELSCPNDCHGQGRCVNGQCVCHEGFMGKDCKEQRCPSDCHGQGRCVDGQCICHEGFTGLDCGQHSCPSDCNNLGQCVSGRCICNEGYSGEDCSEVSPPKDLVVTEVTEETVNLAWDNEMRVTEYLVVYTPTHEGGLEMQFRVPGDQTSTIIQELEPGVEYFIRVFAILENKKSIPVSARVATYLPAPEGLKFKSIKETSVEVEWDPLDIAFETWEIIFRNMNKEDEGEITKSLRRPETSYRQTGLAPGQEYEISLHIVKNNTRGPGLKRVTTTRLDAPSQIEVKDVTDTTALITWFKPLAEIDGIELTYGIKDVPGDRTTIDLTEDENQYSIGNLKPDTEYEVSLISRRGDMSSNPAKETFTTGLDAPRNLRRVSQTDNSITLEWRNGKAAIDSYRIKYAPISGGDHAEVDVPKSQQATTKTTLTGLRPGTEYGIGVSAVKEDKESNPATINAATELDTPKDLQVSETAETSLTLLWKTPLAKFDRYRLNYSLPTGQWVGVQLPRNTTSYVLRGLEPGQEYNVLLTAEKGRHKSKPARVKASTEQAPELENLTVTEVGWDGLRLNWTAADQAYEHFIIQVQEANKVEAARNLTVPGSLRAVDIPGLKAATPYTVSIYGVIQGYRTPVLSAEASTGETPNLGEVVVAEVGWDALKLNWTAPEGAYEYFFIQVQEADTVEAAQNLTVPGGLRSTDLPGLKAATHYTITIRGVTQDFSTTPLSVEVLTEEVPDMGNLTVTEVSWDALRLNWTTPDGTYDQFTIQVQEADQVEEAHNLTVPGSLRSMEIPGLRAGTPYTVTLHGEVRGHSTRPLAVEVVTEDLPQLGDLAVSEVGWDGLRLNWTAADNAYEHFVIQVQEVNKVEAAQNLTLPGSLRAVDIPGLEAATPYRVSIYGVIRGYRTPVLSAEASTAKEPEIGNLNVSDITPESFNLSWMATDGIFETFTIEIIDSNRLLETVEYNISGAERTAHISGLPPSTDFIVYLSGLAPSIRTKTISATATTEAEPEVDNLLVSDATPDGFRLSWTADEGVFDNFVLKIRDTKKQSEPLEITLLAPERTRDLTGLREATEYEIELYGISKGRRSQTVSAIATTAMGSPKEVIFSDITENSATVSWRAPTAQVESFRITYVPITGGTPSMVTVDGTKTQTRLVKLIPGVEYLVSIIAMKGFEESEPVSGSFTTALDGPSGLVTANMFLFCCLIQQKSPSDNIAIVFYFS

SEQ ID NO: 823934 - protein, 1800 aa, Homo sapiens
MGAMTQLLAGVFLAFLALATEGGVLKKVIRHKRQSGVNATLPEENQPVVFNHVYNIKLPVGSQCSVDLESASGEKDLAPPSEPSESFQEHTVDGENQIVFTHRINIPRRACGCAAAPDVKELLSRLEELENLVSSLREQCTAGAGCCLQPATGRLDTRPFCSGRGNFSTEGCGCVCEPGWKGPNCSEPECPGNCHLRGRCIDGQCICDDGFTGEDCSQLACPSDCNDQGKCVNGVCICFEGYAGADCSREICPVPCSEEHGTCVDGLCVCHDGFAGDDCNKPLCLNNCYNRGRCVENECVCDEGFTGEDCSELICPNDCFDRGRCINGTCYCEEGFTGEDCGKPTCPHACHTQGRCEEGQCVCDEGFAGVDCSEKRCPADCHNRGRCVDGRCECDDGFTGADCGELKCPNGCSGHGRCVNGQCVCDEGYTGEDCSQLRCPNDCHSRGRCVEGKCVCEQGFKGYDCSDMSCPNDCHQHGRCVNGMCVCDDGYTGEDCRDRQCPRDCSNRGLCVDGQCVCEDGFTGPDCAELSCPNDCHGQGRCVNGQCVCHEGFMGKDCKEQRCPSDCHGQGRCVDGQCICHEGFTGLDCGQHSCPSDCNNLGQCVSGRCICNEGYSGEDCSEVSPPKDLVVTEVTEETVNLAWDNEMRVTEYLVVYTPTHEGGLEMQFRVPGDQTSTIIQELEPGVEYFIRVFAILENKKSIPVSARVATYLPAPEGLKFKSIKETSVEVEWDPLDIAFETWEIIFRNMNKEDEGEITKSLRRPETSYRQTGLAPGQEYEISLHIVKNNTRGPGLKRVTTTRLDAPSQIEVKDVTDTTALITWFKPLAEIDGIELTYGIKDVPGDRTTIDLTEDENQYSIGNLKPDTEYEVSLISRRGDMSSNPAKETFTTGLDAPRNLRRVSQTDNSITLEWRNGKAAIDSYRIKYAPISGGDHAEVDVPKSQQATTKTTLTGLRPGTEYGIGVSAVKEDKESNPATINAATELDTPKDLQVSETAETSLTLLWKTPLAKFDRYRLNYSLPTGQWVGVQLPRNTTSYVLRGLEPGQEYNVLLTAEKGRHKSKPARVKASTEQAPELENLTVTEVGWDGLRLNWTAADQAYEHFIIQVQEANKVEAARNLTVPGSLRAVDIPGLKAATPYTVSIYGVIQGYRTPVLSAEASTGETPNLGEVVVAEVGWDALKLNWTAPEGAYEYFFIQVQEADTVEAAQNLTVPGGLRSTDLPGLKAATHYTITIRGVTQDFSTTPLSVEVLTEEVPDMGNLTVTEVSWDALRLNWTTPDGTYDQFTIQVQEADQVEEAHNLTVPGSLRSMEIPGLRAGTPYTVTLHGEVRGHSTRPLAVEVVTEDLPQLGDLAVSEVGWDGLRLNWTAADNAYEHFVIQVQEVNKVEAAQNLTLPGSLRAVDIPGLEAATPYRVSIYGVIRGYRTPVLSAEASTAKEPEIGNLNVSDITPESFNLSWMATDGIFETFTIEIIDSNRLLETVEYNISGAERTAHISGLPPSTDFIVYLSGLAPSIRTKTISATATTEAEPEVDNLLVSDATPDGFRLSWTADEGVFDNFVLKIRDTKKQSEPLEITLLAPERTRDLTGLREATEYEIELYGISKGRRSQTVSAIATTAMGSPKEVIFSDITENSATVSWRAPTAQVESFRITYVPITGGTPSMVTVDGTKTQTRLVKLIPGVEYLVSIIAMKGFEESEPVSGSFTTALDGPSGLVTANITDSEALARWQPAIATVDSYVISYTGEKVPEITRTVSGNTVEYALTDLEPATEYTLRIFAEKGPQKSSTITAKFTTDLDSPG

SEQ ID NO: 823935 - protein, 1639 aa, Homo sapiens
MGAMTQLLAGVFLAFLALATEGGVLKKVIRHKRQSGVNATLPEENQPVVFNHVYNIKLPVGSQCSVDLESASGEKDLAPPSEPSESFQEHTVDGENQIVFTHRINIPRRACGCAAAPDVKELLSRLEELENLVSSLREQCTAGAGCCLQPATGRLDTRPFCSGRGNFSTEGCGCVCEPGWKGPNCSEPECPGNCHLRGRCIDGQCICDDGFTGEDCSQLACPSDCNDQGKCVNGVCICFEGYAGADCSREICPVPCSEEHGTCVDGLCVCHDGFAGDDCNKPLCLNNCYNRGRCVENECVCDEGFTGEDCSELICPNDCFDRGRCINGTCYCEEGFTGEDCGKPTCPHACHTQGRCEEGQCVCDEGFAGVDCSEKRCPADCHNRGRCVDGRCECDDGFTGADCGELKCPNGCSGHGRCVNGQCVCDEGYTGEDCSQLRCPNDCHSRGRCVEGKCVCEQGFKGYDCSDMSCPNDCHQHGRCVNGMCVCDDGYTGEDCRDRQCPRDCSNRGLCVDGQCVCEDGFTGPDCAELSCPNDCHGQGRCVNGQCVCHEGFMGKDCKEQRCPSDCHGQGRCVDGQCICHEGFTGLDCGQHSCPSDCNNLGQCVSGRCICNEGYSGEDCSEVSPPKDLVVTEVTEETVNLAWDNEMRVTEYLVVYTPTHEGGLEMQFRVPGDQTSTIIQELEPGVEYFIRVFAILENKKSIPVSARVATYLPAPEGLKFKSIKETSVEVEWDPLDIAFETWEIIFRNMNKEDEGEITKSLRRPETSYRQTGLAPGQEYEISLHIVKNNTRGPGLKRVTTTRLDAPSQIEVKDVTDTTALITWFKPLAEIDGIELTYGIKDVPGDRTTIDLTEDENQYSIGNLKPDTEYEVSLISRRGDMSSNPAKETFTTGLDAPRNLRRVSQTDNSITLEWRNGKAAIDSYRIKYAPISGGDHAEVDVPKSQQATTKTTLTGLRPGTEYGIGVSAVKEDKESNPATINAATELDTPKDLQVSETAETSLTLLWKTPLAKFDRYRLNYSLPTGQWVGVQLPRNTTSYVLRGLEPGQEYNVLLTAEKGRHKSKPARVKASTEQAPELENLTVTEVGWDGLRLNWTAADQAYEHFIIQVQEANKVEAARNLTVPGSLRAVDIPGLKAATPYTVSIYGVIQGYRTPVLSAEASTGETPNLGEVVVAEVGWDALKLNWTAPEGAYEYFFIQVQEADTVEAAQNLTVPGGLRSTDLPGLKAATHYTITIRGVTQDFSTTPLSVEVLTEEVPDMGNLTVTEVSWDALRLNWTTPDGTYDQFTIQVQEADQVEEAHNLTVPGSLRSMEIPGLRAGTPYTVTLHGEVRGHSTRPLAVEVVTEDLPQLGDLAVSEVGWDGLRLNWTAADNAYEHFVIQVQEVNKVEAAQNLTLPGSLRAVDIPGLEAATPYRVSIYGVIRGYRTPVLSAEASTAKEPEIGNLNVSDITPESFNLSWMATDGIFETFTIEIIDSNRLLETVEYNISGAERTAHISGLPPSTDFIVYLSGLAPSIRTKTISATATTEAEPEVDNLLVSDATPDGFRLSWTADEGVFDNFVLKIRDTKKQSEPLEITLLAPERTRDLTGLREATEYEIELYGISKGRRSQTVSAIATTGTVNKQERTEKSHDSGVFFSQG

SEQ ID NO: 823936 - protein, 1292 aa, Homo sapiens
MGAMTQLLAGVFLAFLALATEGGVLKKVIRHKRQSGVNATLPEENQPVVFNHVYNIKLPVGSQCSVDLESASGEKDLAPPSEPSESFQEHTVDGENQIVFTHRINIPRRACGCAAAPDVKELLSRLEELENLVSSLREQCTAGAGCCLQPATGRLDTRPFCSGRGNFSTEGCGCVCEPGWKGPNCSEPECPGNCHLRGRCIDGQCICDDGFTGEDCSQLACPSDCNDQGKCVNGVCICFEGYAGADCSREICPVPCSEEHGTCVDGLCVCHDGFAGDDCNKPLCLNNCYNRGRCVENECVCDEGFTGEDCSELICPNDCFDRGRCINGTCYCEEGFTGEDCGKPTCPHACHTQGRCEEGQCVCDEGFAGVDCSEKRCPADCHNRGRCVDGRCECDDGFTGADCGELKCPNGCSGHGRCVNGQCVCDEGYTGEDCSQLRCPNDCHSRGRCVEGKCVCEQGFKGYDCSDMSCPNDCHQHGRCVNGMCVCDDGYTGEDCRDRQCPRDCSNRGLCVDGQCVCEDGFTGPDCAELSCPNDCHGQGRCVNGQCVCHEGFMGKDCKEQRCPSDCHGQGRCVDGQCICHEGFTGLDCGQHSCPSDCNNLGQCVSGRCICNEGYSGEDCSEVSPPKDLVVTEVTEETVNLAWDNEMRVTEYLVVYTPTHEGGLEMQFRVPGDQTSTIIQELEPGVEYFIRVFAILENKKSIPVSARVATYLPAPEGLKFKSIKETSVEVEWDPLDIAFETWEIIFRNMNKEDEGEITKSLRRPETSYRQTGLAPGQEYEISLHIVKNNTRGPGLKRVTTTRLDAPSQIEVKDVTDTTALITWFKPLAEIDGIELTYGIKDVPGDRTTIDLTEDENQYSIGNLKPDTEYEVSLISRRGDMSSNPAKETFTTGLDAPRNLRRVSQTDNSITLEWRNGKAAIDSYRIKYAPISGGDHAEVDVPKSQQATTKTTLTGLRPGTEYGIGVSAVKEDKESNPATINAATELDTPKDLQVSETAETSLTLLWKTPLAKFDRYRLNYSLPTGQWVGVQLPRNTTSYVLRGLEPGQEYNVLLTAEKGRHKSKPARVKASTEQAPELENLTVTEVGWDGLRLNWTAADQAYEHFIIQVQEANKVEAARNLTVPGSLRAVDIPGLKAATPYTVSIYGVIQGYRTPVLSAEASTGETPNLGEVVVAEVGWDALKLNWTAPEGAYEYFFIQVQEADTVEAAQNLTVPGGLRSTDLPGLKAATHYTITIRGVTQDFSTTPLSVEVLTGILDEFTNSLPPLCLCSGGIKALSCFKLGSAPTTLGKYQ

SEQ ID NO: 823937 - protein, 1083 aa, Homo sapiens
MGAMTQLLAGVFLAFLALATEGGVLKKVIRHKRQSGVNATLPEENQPVVFNHVYNIKLPVGSQCSVDLESASGEKDLAPPSEPSESFQEHTVDGENQIVFTHRINIPRRACGCAAAPDVKELLSRLEELENLVSSLREQCTAGAGCCLQPATGRLDTRPFCSGRGNFSTEGCGCVCEPGWKGPNCSEPECPGNCHLRGRCIDGQCICDDGFTGEDCSQLACPSDCNDQGKCVNGVCICFEGYAGADCSREICPVPCSEEHGTCVDGLCVCHDGFAGDDCNKPLCLNNCYNRGRCVENECVCDEGFTGEDCSELICPNDCFDRGRCINGTCYCEEGFTGEDCGKPTCPHACHTQGRCEEGQCVCDEGFAGVDCSEKRCPADCHNRGRCVDGRCECDDGFTGADCGELKCPNGCSGHGRCVNGQCVCDEGYTGEDCSQLRCPNDCHSRGRCVEGKCVCEQGFKGYDCSDMSCPNDCHQHGRCVNGMCVCDDGYTGEDCRDRQCPRDCSNRGLCVDGQCVCEDGFTGPDCAELSCPNDCHGQGRCVNGQCVCHEGFMGKDCKEQRCPSDCHGQGRCVDGQCICHEGFTGLDCGQHSCPSDCNNLGQCVSGRCICNEGYSGEDCSEVSPPKDLVVTEVTEETVNLAWDNEMRVTEYLVVYTPTHEGGLEMQFRVPGDQTSTIIQELEPGVEYFIRVFAILENKKSIPVSARVATYLPAPEGLKFKSIKETSVEVEWDPLDIAFETWEIIFRNMNKEDEGEITKSLRRPETSYRQTGLAPGQEYEISLHIVKNNTRGPGLKRVTTTRLDAPSQIEVKDVTDTTALITWFKPLAEIDGIELTYGIKDVPGDRTTIDLTEDENQYSIGNLKPDTEYEVSLISRRGDMSSNPAKETFTTGLDAPRNLRRVSQTDNSITLEWRNGKAAIDSYRIKYAPISGGDHAEVDVPKSQQATTKTTLTGLRPGTEYGIGVSAVKEDKESNPATINAATELDTPKDLQVSETAETSLTLLWKTPLAKFDRYRLNYSLPTGQWVGVQLPRNTTSYVLRGLEPGQEYNVLLTAEKGRHKSKPARVKASTGESALSFLQTLG

SEQ ID NO: 823938 - protein, 113 aa, Homo sapiens
PESQRAIAFLSNSATLCPYAEEVPDMGNLTVTEVSWDALRLNWTTPDGTYDQFTIQVQEADQVEEAHNLTVPGSLRSMEIPGLRAGTPYTVTLHGEVRGHSTRPLAVEVVTGI

SEQ ID NO: 823939 - protein, 2201 aa, Homo sapiens; identical to SEQ ID NO: 823927

SEQ ID NO: 823940 - protein, 2110 aa, Homo sapiens
MGAMTQLLAGVFLAFLALATEGGVLKKVIRHKRQSGVNATLPEENQPVVFNHVYNIKLPVGSQCSVDLESASGEKDLAPPSEPSESFQEHTVDGENQIVFTHRINIPRRACGCAAAPDVKELLSRLEELENLVSSLREQCTAGAGCCLQPATGRLDTRPFCSGRGNFSTEGCGCVCEPGWKGPNCSEPECPGNCHLRGRCIDGQCICDDGFTGEDCSQLACPSDCNDQGKCVNGVCICFEGYAGADCSREICPVPCSEEHGTCVDGLCVCHDGFAGDDCNKPLCLNNCYNRGRCVENECVCDEGFTGEDCSELICPNDCFDRGRCINGTCYCEEGFTGEDCGKPTCPHACHTQGRCEEGQCVCDEGFAGVDCSEKRCPADCHNRGRCVDGRCECDDGFTGADCGELKCPNGCSGHGRCVNGQCVCDEGYTGEDCSQLRCPNDCHSRGRCVEGKCVCEQGFKGYDCSDMSCPNDCHQHGRCVNGMCVCDDGYTGEDCRDRQCPRDCSNRGLCVDGQCVCEDGFTGPDCAELSCPNDCHGQGRCVNGQCVCHEGFMGKDCKEQRCPSDCHGQGRCVDGQCICHEGFTGLDCGQHSCPSDCNNLGQCVSGRCICNEGYSGEDCSEVSPPKDLVVTEVTEETVNLAWDNEMRVTEYLVVYTPTHEGGLEMQFRVPGDQTSTIIQELEPGVEYFIRVFAILENKKSIPVSARVATYLPAPEGLKFKSIKETSVEVEWDPLDIAFETWEIIFRNMNKEDEGEITKSLRRPETSYRQTGLAPGQEYEISLHIVKNNTRGPGLKRVTTTRLDAPSQIEVKDVTDTTALITWFKPLAEIDGIELTYGIKDVPGDRTTIDLTEDENQYSIGNLKPDTEYEVSLISRRGDMSSNPAKETFTTGLDAPRNLRRVSQTDNSITLEWRNGKAAIDSYRIKYAPISGGDHAEVDVPKSQQATTKTTLTGLRPGTEYGIGVSAVKEDKESNPATINAATELDTPKDLQVSETAETSLTLLWKTPLAKFDRYRLNYSLPTGQWVGVQLPRNTTSYVLRGLEPGQEYNVLLTAEKGRHKSKPARVKASTEQAPELENLTVTEVGWDGLRLNWTAADQAYEHFIIQVQEANKVEAARNLTVPGSLRAVDIPGLKAATPYTVSIYGVIQGYRTPVLSAEASTGETPNLGEVVVAEVGWDALKLNWTAPEGAYEYFFIQVQEADTVEAAQNLTVPGGLRSTDLPGLKAATHYTITIRGVTQDFSTTPLSVEVLTEEVPDMGNLTVTEVSWDALRLNWTTPDGTYDQFTIQVQEADQVEEAHNLTVPGSLRSMEIPGLRAGTPYTVTLHGEVRGHSTRPLAVEVVTEDLPQLGDLAVSEVGWDGLRLNWTAADNAYEHFVIQVQEVNKVEAAQNLTLPGSLRAVDIPGLEAATPYRVSIYGVIRGYRTPVLSAEASTAKEPEIGNLNVSDITPESFNLSWMATDGIFETFTIEIIDSNRLLETVEYNISGAERTAHISGLPPSTDFIVYLSGLAPSIRTKTISATATTEAEPEVDNLLVSDATPDGFRLSWTADEGVFDNFVLKIRDTKKQSEPLEITLLAPERTRDLTGLREATEYEIELYGISKGRRSQTVSAIATTAMGSPKEVIFSDITENSATVSWRAPTAQVESFRITYVPITGGTPSMVTVDGTKTQTRLVKLIPGVEYLVSIIAMKGFEESEPVSGSFTTALDGPSGLVTANITDSEALARWQPAIATVDSYVISYTGEKVPEITRTVSGNTVEYALTDLEPATEYTLRIFAEKGPQKSSTITAKFTTDLDSPRDLTATEVQSETALLTWRPPRASVTGYLLVYESVDGTVKEVIVGPDTTSYSLADLSPSTHYTAKIQALNGPLRSNMIQTIFTTIGLLYPFPKDCSQAMLNGDTTSGLYTIYLNGDKAQALEVFCDMTSDGGGWIVFLRRKNGRENFYQNWKAYAAGFGDRREEFWLGLDNLNKITAQGQYELRVDLRDHGETAFAVYDKFSVGDAKTRYKLKVEGYSGTAGDSMAYHNGRSFSTFDKDTDSAITNCALSYKGAFWYRNCHRVNLMGRYGDNNHSQGVNWFHWKGHEHSIQFAEMKLRPSNFRNLEGRRKRA

SEQ ID NO: 823941 - protein, 1655 aa, Homo sapiens
MGAMTQLLAGVFLAFLALATEGGVLKKVIRHKRQSGVNATLPEENQPVVFNHVYNIKLPVGSQCSVDLESASGEKDLAPPSEPSESFQEHTVDGENQIVFTHRINIPRRACGCAAAPDVKELLSRLEELENLVSSLREQCTAGAGCCLQPATGRLDTRPFCSGRGNFSTEGCGCVCEPGWKGPNCSEPECPGNCHLRGRCIDGQCICDDGFTGEDCSQLACPSDCNDQGKCVNGVCICFEGYAGADCSREICPVPCSEEHGTCVDGLCVCHDGFAGDDCNKPLCLNNCYNRGRCVENECVCDEGFTGEDCSELICPNDCFDRGRCINGTCYCEEGFTGEDCGKPTCPHACHTQGRCEEGQCVCDEGFAGVDCSEKRCPADCHNRGRCVDGRCECDDGFTGADCGELKCPNGCSGHGRCVNGQCVCDEGYTGEDCSQLRCPNDCHSRGRCVEGKCVCEQGFKGYDCSDMSCPNDCHQHGRCVNGMCVCDDGYTGEDCRDRQCPRDCSNRGLCVDGQCVCEDGFTGPDCAELSCPNDCHGQGRCVNGQCVCHEGFMGKDCKEQRCPSDCHGQGRCVDGQCICHEGFTGLDCGQHSCPSDCNNLGQCVSGRCICNEGYSGEDCSEVSPPKDLVVTEVTEETVNLAWDNEMRVTEYLVVYTPTHEGGLEMQFRVPGDQTSTIIQELEPGVEYFIRVFAILENKKSIPVSARVATYLPAPEGLKFKSIKETSVEVEWDPLDIAFETWEIIFRNMNKEDEGEITKSLRRPETSYRQTGLAPGQEYEISLHIVKNNTRGPGLKRVTTTRLDAPSQIEVKDVTDTTALITWFKPLAEIDGIELTYGIKDVPGDRTTIDLTEDENQYSIGNLKPDTEYEVSLISRRGDMSSNPAKETFTTGLDAPRNLRRVSQTDNSITLEWRNGKAAIDSYRIKYAPISGGDHAEVDVPKSQQATTKTTLTGLRPGTEYGIGVSAVKEDKESNPATINAATELDTPKDLQVSETAETSLTLLWKTPLAKFDRYRLNYSLPTGQWVGVQLPRNTTSYVLRGLEPGQEYNVLLTAEKGRHKSKPARVKASTEAEPEVDNLLVSDATPDGFRLSWTADEGVFDNFVLKIRDTKKQSEPLEITLLAPERTRDLTGLREATEYEIELYGISKGRRSQTVSAIATTAMGSPKEVIFSDITENSATVSWRAPTAQVESFRITYVPITGGTPSMVTVDGTKTQTRLVKLIPGVEYLVSIIAMKGFEESEPVSGSFTTALDGPSGLVTANITDSEALARWQPAIATVDSYVISYTGEKVPEITRTVSGNTVEYALTDLEPATEYTLRIFAEKGPQKSSTITAKFTTDLDSPRDLTATEVQSETALLTWRPPRASVTGYLLVYESVDGTVKEVIVGPDTTSYSLADLSPSTHYTAKIQALNGPLRSNMIQTIFTTIGLLYPFPKDCSQAMLNGDTTSGLYTIYLNGDKAQALEVFCDMTSDGGGWIVFLRRKNGRENFYQNWKAYAAGFGDRREEFWLGLDNLNKITAQGQYELRVDLRDHGETAFAVYDKFSVGDAKTRYKLKVEGYSGTAGDSMAYHNGRSFSTFDKDTDSAITNCALSYKGAFWYRNCHRVNLMGRYGDNNHSQGVNWFHWKGHEHSIQFAEMKLRPSNFRNLEGRRKRA

SEQ ID NO: 823942 - protein, 1100 aa, Homo sapiens
MTLLSCWCFNRDSTSRGCSEQSLALGLQWPIDVALGLPFPGSQKQNFLRNSLTDPISVIDSEQAPELENLTVTEVGWDGLRLNWTAADQAYEHFIIQVQEANKVEAARNLTVPGSLRAVDIPGLKAATPYTVSIYGVIQGYRTPVLSAEASTGETPNLGEVVVAEVGWDALKLNWTAPEGAYEYFFIQVQEADTVEAAQNLTVPGGLRSTDLPGLKAATHYTITIRGVTQDFSTTPLSVEVLTEEVPDMGNLTVTEVSWDALRLNWTTPDGTYDQFTIQVQEADQVEEAHNLTVPGSLRSMEIPGLRAGTPYTVTLHGEVRGHSTRPLAVEVVTEDLPQLGDLAVSEVGWDGLRLNWTAADNAYEHFVIQVQEVNKVEAAQNLTLPGSLRAVDIPGLEAATPYRVSIYGVIRGYRTPVLSAEASTAKEPEIGNLNVSDITPESFNLSWMATDGIFETFTIEIIDSNRLLETVEYNISGAERTAHISGLPPSTDFIVYLSGLAPSIRTKTISATATTEAEPEVDNLLVSDATPDGFRLSWTADEGVFDNFVLKIRDTKKQSEPLEITLLAPERTRDLTGLREATEYEIELYGISKGRRSQTVSAIATTAMGSPKEVIFSDITENSATVSWRAPTAQVESFRITYVPITGGTPSMVTVDGTKTQTRLVKLIPGVEYLVSIIAMKGFEESEPVSGSFTTALDGPSGLVTANITDSEALARWQPAIATVDSYVISYTGEKVPEITRTVSGNTVEYALTDLEPATEYTLRIFAEKGPQKSSTITAKFTTDLDSPRDLTATEVQSETALLTWRPPRASVTGYLLVYESVDGTVKEVIVGPDTTSYSLADLSPSTHYTAKIQALNGPLRSNMIQTIFTTIGLLYPFPKDCSQAMLNGDTTSGLYTIYLNGDKAQALEVFCDMTSDGGGWIVFLRRKNGRENFYQNWKAYAAGFGDRREEFWLGLDNLNKITAQGQYELRVDLRDHGETAFAVYDKFSVGDAKTRYKLKVEGYSGTAGDSMAYHNGRSFSTFDKDTDSAITNCALSYKGAFWYRNCHRVNLMGRYGDNNHSQGVNWFHWKGHEHSIQFAEMKLRPSNFRNLEGRRKRA

SEQ ID NO: 823943 - protein, 598 aa, Homo sapiens
MLSFLLLPPFSLPLEAEPEVDNLLVSDATPDGFRLSWTADEGVFDNFVLKIRDTKKQSEPLEITLLAPERTRDLTGLREATEYEIELYGISKGRRSQTVSAIATTAMGSPKEVIFSDITENSATVSWRAPTAQVESFRITYVPITGGTPSMVTVDGTKTQTRLVKLIPGVEYLVSIIAMKGFEESEPVSGSFTTALDGPSGLVTANITDSEALARWQPAIATVDSYVISYTGEKVPEITRTVSGNTVEYALTDLEPATEYTLRIFAEKGPQKSSTITAKFTTDLDSPRDLTATEVQSETALLTWRPPRASVTGYLLVYESVDGTVKEVIVGPDTTSYSLADLSPSTHYTAKIQALNGPLRSNMIQTIFTTIGLLYPFPKDCSQAMLNGDTTSGLYTIYLNGDKAQALEVFCDMTSDGGGWIVFLRRKNGRENFYQNWKAYAAGFGDRREEFWLGLDNLNKITAQGQYELRVDLRDHGETAFAVYDKFSVGDAKTRYKLKVEGYSGTAGDSMAYHNGRSFSTFDKDTDSAITNCALSYKGAFWYRNCHRVNLMGRYGDNNHSQGVNWFHWKGHEHSIQFAEMKLRPSNFRNLEGRRKRA

SEQ ID NO: 823944 - protein, 2201 aa, Homo sapiens; identical to SEQ ID NO: 823927

SEQ ID NO: 823945 - protein, 317 aa, Homo sapiens
MDLDSPRDLTATEVQSETALLTWRPPRASVTGYLLVYESVDGTVKEVIVGPDTTSYSLADLSPSTHYTAKIQALNGPLRSNMIQTIFTTIGLLYPFPKDCSQAMLNGDTTSGLYTIYLNGDKAQALEVFCDMTSDGGGWIVFLRRKNGRENFYQNWKAYAAGFGDRREEFWLGLDNLNKITAQGQYELRVDLRDHGETAFAVYDKFSVGDAKTRYKLKVEGYSGTAGDSMAYHNGRSFSTFDKDTDSAITNCALSYKGAFWYRNCHRVNLMGRYGDNNHSQGVNWFHWKGHEHSIQFAEMKLRPSNFRNLEGRRKRA

SEQ ID NO: 823946 - protein, 2201 aa, Homo sapiens; identical to SEQ ID NO: 823927

SEQ ID NO: 823947 - protein, 2201 aa, Homo sapiens; identical to SEQ ID NO: 823927

SEQ ID NO: 823948 - protein, 2201 aa, Homo sapiens; identical to SEQ ID NO: 823927

SEQ ID NO: 823949 - protein, 171 aa, Homo sapiens
DEPKSIEAGVKSVLDHPLPHKAKTHLSCKKLQLTPNDYESGFNISEHTIVYAVSINYKIQALNGPLRSNMIQTIFTTIGLLYPFPKDCSQAMLNGDTTSGLYTIYLNGDKAQALEVFCDMTRNKAQSEERILPKHQYNQPNHRSTPGHLVRVKADHGSLGPTATAWASPPL

SEQ ID NO: 823950 - protein, 1952 aa, Homo sapiens
  misc_feature (1942)..(1942): Xaa can be any naturally occurring amino acid
MGAMTQLLAGVFLAFLALATEGGVLKKVIRHKRQSGVNATLPEENQPVVFNHVYNIKLPVGSQCSVDLESASGEKDLAPPSEPSESFQEHTVDGENQIVFTHRINIPRRACGCAAAPDVKELLSRLEELENLVSSLREQCTAGAGCCLQPATGRLDTRPFCSGRGNFSTEGCGCVCEPGWKGPNCSEPECPGNCHLRGRCIDGQCICDDGFTGEDCSQLACPSDCNDQGKCVNGVCICFEGYAGADCSREICPVPCSEEHGTCVDGLCVCHDGFAGDDCNKPLCLNNCYNRGRCVENECVCDEGFTGEDCSELICPNDCFDRGRCINGTCYCEEGFTGEDCGKPTCPHACHTQGRCEEGQCVCDEGFAGVDCSEKRCPADCHNRGRCVDGRCECDDGFTGADCGELKCPNGCSGHGRCVNGQCVCDEGYTGEDCSQLRCPNDCHSRGRCVEGKCVCEQGFKGYDCSDMSCPNDCHQHGRCVNGMCVCDDGYTGEDCRDRQCPRDCSNRGLCVDGQCVCEDGFTGPDCAELSCPNDCHGQGRCVNGQCVCHEGFMGKDCKEQRCPSDCHGQGRCVDGQCICHEGFTGLDCGQHSCPSDCNNLGQCVSGRCICNEGYSGEDCSEVSPPKDLVVTEVTEETVNLAWDNEMRVTEYLVVYTPTHEGGLEMQFRVPGDQTSTIIQELEPGVEYFIRVFAILENKKSIPVSARVATYLPAPEGLKFKSIKETSVEVEWDPLDIAFETWEIIFRNMNKEDEGEITKSLRRPETSYRQTGLAPGQEYEISLHIVKNNTRGPGLKRVTTTRLDAPSQIEVKDVTDTTALITWFKPLAEIDGIELTYGIKDVPGDRTTIDLTEDENQYSIGNLKPDTEYEVSLISRRGDMSSNPAKETFTTGLDAPRNLRRVSQTDNSITLEWRNGKAAIDSYRIKYAPISGGDHAEVDVPKSQQATTKTTLTGLRPGTEYGIGVSAVKEDKESNPATINAATELDTPKDLQVSETAETSLTLLWKTPLAKFDRYRLNYSLPTGQWVGVQLPRNTTSYVLRGLEPGQEYNVLLTAEKGRHKSKPARVKASTEQAPELENLTVTEVGWDGLRLNWTAADQAYEHFIIQVQEANKVEAARNLTVPGSLRAVDIPGLKAATPYTVSIYGVIQGYRTPVLSAEASTGETPNLGEVVVAEVGWDALKLNWTAPEGAYEYFFIQVQEADTVEAAQNLTVPGGLRSTDLPGLKAATHYTITIRGVTQDFSTTPLSVEVLTEEVPDMGNLTVTEVSWDALRLNWTTPDGTYDQFTIQVQEADQVEEAHNLTVPGSLRSMEIPGLRAGTPYTVTLHGEVRGHSTRPLAVEVVTEDLPQLGDLAVSEVGWDGLRLNWTAADNAYEHFVIQVQEVNKVEAAQNLTLPGSLRAVDIPGLEAATPYRVSIYGVIRGYRTPVLSAEASTAKEPEIGNLNVSDITPESFNLSWMATDGIFETFTIEIIDSNRLLETVEYNISGAERTAHISGLPPSTDFIVYLSGLAPSIRTKTISATATTEAEPEVDNLLVSDATPDGFRLSWTADEGVFDNFVLKIRDTKKQSEPLEITLLAPERTRDLTGLREATEYEIELYGISKGRRSQTVSAIATTAMGSPKEVIFSDITENSATVSWRAPTAQVESFRITYVPITGGTPSMVTVDGTKTQTRLVKLIPGVEYLVSIIAMKGFEESEPVSGSFTTALDGPSGLVTANITDSEALARWQPAIATVDSYVISYTGEKVPEITRTVSGNTVEYALTDLEPATEYTLRIFAEKGPQKSSTITAKFTTDLDSPRDLTATEVQSETALLTWRPPRASVTGYLLVYESVDGTVKEVIVGPDTTSYSLADLSPSTHYTAKIQALNGPLRSNMIQTIFTTIGLLYPFPKDCSQAMLNGDTTSGLYTIYLNGDKAQALEVFCDMTSDGGGWIVFLRRKNGXENFNQGKIFK

SEQ ID NO: 823951 - protein, 1673 aa, Homo sapiens
MGAMTQLLAGVFLAFLALATEGGVLKKVIRHKRQSGVNATLPEENQPVVFNHVYNIKLPVGSQCSVDLESASGEKDLAPPSEPSESFQEHTVDGENQIVFTHRINIPRRACGCAAAPDVKELLSRLEELENLVSSLREQCTAGAGCCLQPATGRLDTRPFCSGRGNFSTEGCGCVCEPGWKGPNCSEPECPGNCHLRGRCIDGQCICDDGFTGEDCSQLACPSDCNDQGKCVNGVCICFEGYAGADCSREICPVPCSEEHGTCVDGLCVCHDGFAGDDCNKPLCLNNCYNRGRCVENECVCDEGFTGEDCSELICPNDCFDRGRCINGTCYCEEGFTGEDCGKPTCPHACHTQGRCEEGQCVCDEGFAGVDCSEKRCPADCHNRGRCVDGRCECDDGFTGADCGELKCPNGCSGHGRCVNGQCVCDEGYTGEDCSQLRCPNDCHSRGRCVEGKCVCEQGFKGYDCSDMSCPNDCHQHGRCVNGMCVCDDGYTGEDCRDRQCPRDCSNRGLCVDGQCVCEDGFTGPDCAELSCPNDCHGQGRCVNGQCVCHEGFMGKDCKEQRCPSDCHGQGRCVDGQCICHEGFTGLDCGQHSCPSDCNNLGQCVSGRCICNEGYSGEDCSEVSPPKDLVVTEVTEETVNLAWDNEMRVTEYLVVYTPTHEGGLEMQFRVPGDQTSTIIQELEPGVEYFIRVFAILENKKSIPVSARVATYLPAPEGLKFKSIKETSVEVEWDPLDIAFETWEIIFRNMNKEDEGEITKSLRRPETSYRQTGLAPGQEYEISLHIVKNNTRGPGLKRVTTTRLDAPSQIEVKDVTDTTALITWFKPLAEIDGIELTYGIKDVPGDRTTIDLTEDENQYSIGNLKPDTEYEVSLISRRGDMSSNPAKETFTTGLDAPRNLRRVSQTDNSITLEWRNGKAAIDSYRIKYAPISGGDHAEVDVPKSQQATTKTTLTGLRPGTEYGIGVSAVKEDKESNPATINAATELDTPKDLQVSETAETSLTLLWKTPLAKFDRYRLNYSLPTGQWVGVQLPRNTTSYVLRGLEPGQEYNVLLTAEKGRHKSKPARVKASTEQAPELENLTVTEVGWDGLRLNWTAADQAYEHFIIQVQEANKVEAARNLTVPGSLRAVDIPGLKAATPYTVSIYGVIQGYRTPVLSAEASTGETPNLGEVVVAEVGWDALKLNWTAPEGAYEYFFIQVQEADTVEAAQNLTVPGGLRSTDLPGLKAATHYTITIRGVTQDFSTTPLSVEVLTEEVPDMGNLTVTEVSWDALRLNWTTPDGTYDQFTIQVQEADQVEEAHNLTVPGSLRSMEIPGLRAGTPYTVTLHGEVRGHSTRPLAVEVVTEDLPQLGDLAVSEVGWDGLRLNWTAADNAYEHFVIQVQEVNKVEAAQNLTLPGSLRAVDIPGLEAATPYRVSIYGVIRGYRTPVLSAEASTAKEPEIGNLNVSDITPESFNLSWMATDGIFETFTIEIIDSNRLLETVEYNISGAERTAHISGLPPSTDFIVYLSGLAPSIRTKTISATATTEALPLLENLTISDINPYGFTVSWMASENAFDSFLVTVVDSGKLLDPQEFTLSGTQRKLELRGLITGIGYEVMVSGFTQGHQTKPLRAEIVTGISNQVSHLFLFLVPFCVICLPDRHDFNIFVHIPYLIHKCSLLFHLLPTLPLVICT

SEQ ID NO: 823952 - protein, 1253 aa, Homo sapiens
MGAMTQLLAGVFLAFLALATEGGVLKKVIRHKRQSGVNATLPEENQPVVFNHVYNIKLPVGSQCSVDLESASGEKDLAPPSEPSESFQEHTVDGENQIVFTHRINIPRRACGCAAAPDVKELLSRLEELENLVSSLREQCTAGAGCCLQPATGRLDTRPFCSGRGNFSTEGCGCVCEPGWKGPNCSEPECPGNCHLRGRCIDGQCICDDGFTGEDCSQLACPSDCNDQGKCVNGVCICFEGYAGADCSREICPVPCSEEHGTCVDGLCVCHDGFAGDDCNKPLCLNNCYNRGRCVENECVCDEGFTGEDCSELICPNDCFDRGRCINGTCYCEEGFTGEDCGKPTCPHACHTQGRCEEGQCVCDEGFAGVDCSEKRCPADCHNRGRCVDGRCECDDGFTGADCGELKCPNGCSGHGRCVNGQCVCDEGYTGEDCSQLRCPNDCHSRGRCVEGKCVCEQGFKGYDCSDMSCPNDCHQHGRCVNGMCVCDDGYTGEDCRDRQCPRDCSNRGLCVDGQCVCEDGFTGPDCAELSCPNDCHGQGRCVNGQCVCHEGFMGKDCKEQRCPSDCHGQGRCVDGQCICHEGFTGLDCGQHSCPSDCNNLGQCVSGRCICNEGYSGEDCSEVSPPKDLVVTEVTEETVNLAWDNEMRVTEYLVVYTPTHEGGLEMQFRVPGDQTSTIIQELEPGVEYFIRVFAILENKKSIPVSARVATYLPAPEGLKFKSIKETSVEVEWDPLDIAFETWEIIFRNMNKEDEGEITKSLRRPETSYRQTGLAPGQEYEISLHIVKNNTRGPGLKRVTTTRLDAPSQIEVKDVTDTTALITWFKPLAEIDGIELTYGIKDVPGDRTTIDLTEDENQYSIGNLKPDTEYEVSLISRRGDMSSNPAKETFTTGLDAPRNLRRVSQTDNSITLEWRNGKAAIDSYRIKYAPISGGDHAEVDVPKSQQATTKTTLTGLRPGTEYGIGVSAVKEDKESNPATINAATELDTPKDLQVSETAETSLTLLWKTPLAKFDRYRLNYSLPTGQWVGVQLPRNTTSYVLRGLEPGQEYNVLLTAEKGRHKSKPARVKASTEQAPELENLTVTEVGWDGLRLNWTAADQAYEHFIIQVQEANKVEAARNLTVPGSLRAVDIPGLKAATPYTVSIYGVIQGYRTPVLSAEASTGETPNLGEVVVAEVGWDALKLNWTAPEGAYEYFFIQVQEADTVEAAQNLTVPGGLRSTDLPSTSVLPSTSVLPSTSVLPSTSVLPSTSVLP

SEQ ID NO: 823953 - protein, 1045 aa, Homo sapiens
MGAMTQLLAGVFLAFLALATEGGVLKKVIRHKRQSGVNATLPEENQPVVFNHVYNIKLPVGSQCSVDLESASGEKDLAPPSEPSESFQEHTVDGENQIVFTHRINIPRRACGCAAAPDVKELLSRLEELENLVSSLREQCTAGAGCCLQPATGRLDTRPFCSGRGNFSTEGCGCVCEPGWKGPNCSEPECPGNCHLRGRCIDGQCICDDGFTGEDCSQLACPSDCNDQGKCVNGVCICFEGYAGADCSREICPVPCSEEHGTCVDGLCVCHDGFAGDDCNKPLCLNNCYNRGRCVENECVCDEGFTGEDCSELICPNDCFDRGRCINGTCYCEEGFTGEDCGKPTCPHACHTQGRCEEGQCVCDEGFAGVDCSEKRCPADCHNRGRCVDGRCECDDGFTGADCGELKCPNGCSGHGRCVNGQCVCDEGYTGEDCSQLRCPNDCHSRGRCVEGKCVCEQGFKGYDCSDMSCPNDCHQHGRCVNGMCVCDDGYTGEDCRDRQCPRDCSNRGLCVDGQCVCEDGFTGPDCAELSCPNDCHGQGRCVNGQCVCHEGFMGKDCKEQRCPSDCHGQGRCVDGQCICHEGFTGLDCGQHSCPSDCNNLGQCVSGRCICNEGYSGEDCSEVSPPKDLVVTEVTEETVNLAWDNEMRVTEYLVVYTPTHEGGLEMQFRVPGDQTSTIIQELEPGVEYFIRVFAILENKKSIPVSARVATYLPAPEGLKFKSIKETSVEVEWDPLDIAFETWEIIFRNMNKEDEGEITKSLRRPETSYRQTGLAPGQEYEISLHIVKNNTRGPGLKRVTTTRLDAPSQIEVKDVTDTTALITWFKPLAEIDGIELTYGIKDVPGDRTTIDLTEDENQYSIGNLKPDTEYEVSLISRRGDMSSNPAKETFTTGLDAPRNLRRVSQTDNSITLEWRNGKAAIDSYRIKYAPISGGDHAEVDVPKSQQATTKTTLTGLRPGTEYGIGVSAVKEDKESNPATINAATELDTPKDLQVSETAETSLTLLWKTPLAKFDRYRLNYSLPTGQWGDCNEAVADQIRPTDVYRT

SEQ ID NO: 823954 - protein, 1918 aa, Homo sapiens
MEERRPHLDARPRNSHTNHRGPVDGELPPRARNQANNPPANALRGGASHPGRHPRANNHPAAYWQREERFRAMGRNPHQGRRNQEGHASDEARDQRHDQENDTRWRNGNQDCRNRRPPWSNDNFQQWRTPHQKPTEQPQQAKKLGYKFLESLLQKDPSEVVITLATSLGLKELLSHSSMKSNFLELICQVLRKACSSKMDRQSVLHVLGILKNSKFLKVCLPAYVVGMITEPIPDIRNQYPEHISNIISLLQDLVSVFPASSVQETSMLVSLLPTSLNALRASGVDIEEETEKNLEKVQTIIEHLQEKRREGTLRVDTYTLVQPEAEDHVESYRTMPIYPTYNEVHLDERPFLRPNIISGKYDSTAIYLDTHFRLLREDFVRPLREGILELLQSFEDQGLRKRKFDDIRIYFDTRIITPMCSSSGIVYKVQFDTKPLKFVRWQNSKRLLYGSLVCMSKDNFETFLFATVSNREQEDLCRGIVQLCFNEQSQQLLAEVQPSDSFLMVETTAYFEAYRHVLEGLQEVQEEDVPFQRNIVECNSHVKEPRYLLMGGRYDFTPLIENPSATGEFLRNVEGLRHPRINVLDPGQWPSKEALKLDDSQMEALQFALTRELAIIQGPPGTGKTYVGLKIVQALLTNESVWQISLQKFPILVVCYTNHALDQFLEGIYNCQKTSIVRVGGRSNSEILKQFTLRELRNKREFRRNLPMHLRRAYMSIMTQMKESEQELHEGAKTLECTMRGVLREQYLQKYISPQHWESLMNGPVQDSEWICFQHWKHSMMLEWLGLGVGSFTQSVSPAGPENTAQAEGDEEEEGEEESSLIEIAEEADLIQADRVIEEEEVVRPQRRKKEESGADQELAKMLLAMRLDHCGTGTAAGQEQATGEWQTQRNQKKKMKKRVKDELRKLNTMTAAEANEIEDVWHLDLSSRWQLYRLWLQLYQADTRRKILSYERQYRTSAERMAELRLQEDLHILKDAQVVGMTTTGAAKYRQILQKVEPRIVIVEEAAEVLEAHTIATLSKACQHLILIGDHQQLRPSANVYDLAKNFNLEVSLFERLVKVNIPFVRLNYQHRMCPEIARLLTPHIYQDLENHPSVLKYEKIKGVSSNLFFVEHNFPEQEIQEGKSHQNQHEAHFVVELCKYFLCQEYLPSQITILTTYTGQLFCLRKLMPAKTFAGVRVHVVDKYQGEENDIILLSLVRSNQEGKVGFLQISNRICVALSRAKKGMYCIGNMQMLAKVPLWSKIIHTLRENNQIGPMLRLCCQNHPETHTLVSKASDFQKVPEGGCSLPCEFRLGCGHVCTRACHPYDSSHKEFQCMKPCQKVICQEGHRCPLVCFQECQPCQVKVPKTIPRCGHEQMVPCSVPESDFCCQEPCSKSLRCGHRCSHPCGEDCVQLCSEMVTIKLKCGHSQPVKCGHVEGLLYGGLLVKCTTKCGTILDCGHPCPGSCHSCFEGRFHERCQQPCKRLLICSHKCQEPCIGECPPCQRTCQNRCVHSQCKKKCGELCSPCVEPCVWRCQHYQCTKLCSEPCNRPPCYVPCTKLLVCGHPCIGLCGEPCPKKCRICHMDEVTQIFFGFEDEPDARFVQLEDCSHIFEVQALDRYMNEQKDDEVAIRLKVCPICQVPIRKNLRYGTSIKQRLEEIEIIKEKIQGSAGEIATSQERLKALLERKSLLHQLLPEDFLMLKEKLAQKNLSVKDLGLVENYISFYDHLASLWDSLKKMHVLEEKRVRTRLEQVHEWLAKKRLSFTSQELSDLRSEIQRLTYLVNLLTRYKIAEKKVKDSIAVEVYSVQNILEKTCKFTQEDEQLVQEKMEALKATLPCSGLGISEEERVQIVSAIGYPRGHWFKCRNGHIYVIGDCGGAMERGTCPDCKEVIGGTNHTLERSNQLASEMDGAQHAAWSDTANNLMNFEEIQGMM

SEQ ID NO: 823955 - protein, 71 aa, Homo sapiens
LYSTGEVYSTGRLYSSGRLYSSRQGATPGGTHMAASPEQETGYGQRCLMITSASTSINAFHVFTPDKPTIL

SEQ ID NO: 823956 - protein, 1918 aa, Homo sapiens; identical to SEQ ID NO: 823954

SEQ ID NO: 823957 - protein, 2157 aa, Homo sapiens
MEERRPHLDARPRNSHTNHRGPVDGELPPRARNQANNPPANALRGGASHPGRHPRANNHPAAYWQREERFRAMGRNPHQGRRNQEGHASDEARDQRHDQENDTRWRNGNQDCRNRRPPWSNDNFQQWRTPHQKPTEQPQQAKKLGYKFLESLLQKDPSEVVITLATSLGLKELLSHSSMKSNFLELICQVLRKACSSKMDRQSVLHVLGILKNSKFLKVCLPAYVVGMITEPIPDIRNQYPEHISNIISLLQDLVSVFPASSVQETSMLVSLLPTSLNALRASGVDIEEETEKNLEKVQTIIEHLQEKRREGTLRVDTYTLVQPEAEDHVESYRTMPIYPTYNEVHLDERPFLRPNIISGKYDSTAIYLDTHFRLLREDFVRPLREGILELLQSFEDQGLRKRKFDDIRIYFDTRIITPMCSSSGIVYKVQFDTKPLKFVRWQNSKRLLYGSLVCMSKDNFETFLFATVSNREQEDLCRGIVQLCFNEQSQQLLAEVQPSDSFLMVETTAYFEAYRHVLEGLQEVQEEDVPFQRNIVECNSHVKEPRYLLMGGRYDFTPLIENPSATGEFLRNVEGLRHPRINVLDPGQWPSKEALKLDDSQMEALQFALTRELAIIQGPPGTGKTYVGLKIVQALLTNESVWQISLQKFPILVVCYTNHALDQFLEGIYNCQKTSIVRVGGRSNSEILKQFTLRELRNKREFRRNLPMHLRRAYMSIMTQMKESEQELHEGAKTLECTMRGVLREQYLQKYISPQHWESLMNGPVQDSEWICFQHWKHSMMLEWLGLGVGSFTQSVSPAGPENTAQAEGDEEEEGEEESSLIEIAEEADLIQADRVIEEEEVVRPQRRKKEESGADQELAKMLLAMRLDHCGTGTAAGQEQATGEWQPDSTLPGIDVLQTQRNQKKKMKKRVKDELRKLNTMTAAEANEIEDVWHLDLSSRWQLYRLWLQLYQADTRRKILSYERQYRTSAERMAELRLQEDLHILKDAQVVGMTTTGKKLWRNLPVASKFTSGARLSKDRYKRSFFGRLEENTMKSYESTHILRTLGEIHSLSPGAVAHAYNPNTLGGQGRWITRGHKFAISLANMVKSLSTKNTKISWVQWWVPVILATREAGAQESLEPGRWRLQSAEIAPLHSSLGDRVRLSQRKKKKKKEIHSLSPAGFETPTVTNTVLMFWRPPRTLQGPAVADAGSGKIQKWIPRGPVALWVLCLSSEEPFSSFLTGGAAKYRQILQKVEPRIVIVEEAAEVLEAHTIATLSKACQHLILIGDHQQLRPSANVYDLAKNFNLEVSLFERLVKVNIPFVRLNYQHRMCPEIARLLTPHIYQDLENHPSVLKYEKIKGVSSNLFFVEHNFPEQEIQEGKSHQNQHEAHFVVELCKYFLCQEYLPSQITILTTYTGQLFCLRKLMPAKTFAGVRVHVVDKYQGEENDIILLSLVRSNQEGKVGFLQISNRICVALSRAKKGMYCIGNMQMLAKVPLWSKIIHTLRENNQIGPMLRLCCQNHPETHTLVSKASDFQKVPEGGCSLPCEFRLGCGHVCTRACHPYDSSHKEFQCMKPCQKVICQEGHRCPLVCFQECQPCQVKVPKTIPRCGHEQMVPCSVPESDFCCQEPCSKSLRCGHRCSHPCGEDCVQLCSEMVTIKLKCGHSQPVKCGHVEGLLYGGLLVKCTTKCGTILDCGHPCPGSCHSCFEGRFHERCQQPCKRLLICSHKCQEPCIGECPPCQRTCQNRCVHSQCKKKCGELCSPCVEPCVWRCQHYQCTKLCSEPCNRPPCYVPCTKLLVCGHPCIGLCGEPCPKKCRICHMDEVTQIFFGFEDEPDARFVQLEDCSHIFEVQALDRYMNEQKDDEVAIRLKVCPICQVPIRKNLRYGTSIKQRLEEIEIIKEKIQGSAGEIATSQERLKALLERKSLLHQLLPEDFLMLKEKLAQKNLSVKDLGLVENYISFYDHLASLWDSLKKMHVLEEKRVRTRLEQVHEWLAKKRLSFTSQELSDLRSEIQRLTYLVNLLTRYKIAEKKVKDSIAVEVYSVQNILEKTCKFTQEDEQLVQEKMEALKATLPCSGLGISEEERVQIVSAIGYPRGHWFKCRNGHIYVIGDCGGAMERGTCPDCKEVIGGTNHTLERSNQLASEMDGAQHAAWSDTANNLMNFEEIQGMM

SEQ ID NO: 823958 - protein, 1022 aa, Homo sapiens
MEERRPHLDARPRNSHTNHRGPVDGELPPRARNQANNPPANALRGGASHPGRHPRANNHPAAYWQREERFRAMGRNPHQGRRNQEGHASDEARDQRHDQENDTRWRNGNQDCRNRRPPWSNDNFQQWRTPHQKPTEQPQQAKKLGYKFLESLLQKDPSEVVITLATSLGLKELLSHSSMKSNFLELICQVLRKACSSKMDRQSVLHVLGILKNSKFLKVCLPAYVVGMITEPIPDIRNQYPEHISNIISLLQDLVSVFPASSVQETSMLVSLLPTSLNALRASGVDIEEETEKNLEKVQTIIEHLQEKRREGTLRVDTYTLVQPEAEDHVESYRTMPIYPTYNEVHLDERPFLRPNIISGKYDSTAIYLDTHFRLLREDFVRPLREGILELLQSFEDQGLRKRKFDDIRIYFDTRIITPMCSSSGIVYKVQFDTKPLKFVRWQNSKRLLYGSLVCMSKDNFETFLFATVSNREQEDLCRGIVQLCFNEQSQQLLAEVQPSDSFLMVETTAYFEAYRHVLEGLQEVQEEDVPFQRNIVECNSHVKEPRYLLMGGRYDFTPLIENPSATGEFLRNVEGLRHPRINVLDPGQWPSKEALKLDDSQMEALQFALTRELAIIQGPPGTGKTYVGLKIVQALLTNESVWQISLQKFPILVVCYTNHALDQFLEGIYNCQKTSIVRVGGRSNSEILKQFTLRELRNKREFRRNLPMHLRRAYMSIMTQMKESEQELHEGAKTLECTMRGVLREQYLQKYISPQHWESLMNGPVQDSEWICFQHWKHSMMLEWLGLGVGSFTQSVSPAGPENTAQAEGDEEEEGEEESSLIEIAEEADLIQADRVIEEEEVVRPQRRKKEESGADQELAKMLLAMRLDHCGTGTAAGQEQATGEWQPDSTLPGIDVLQTQRNQKKKMKKRVKDELRKLNTMTAAEANEIEDVWHLDLSSRWQLYRLWLQLYQADTRRKILSYERQYRTSAERMAELRLQEDLHILKDAQVVGMTTTGKKLWRNLPVASKFTSGARLSKDR

SEQ ID NO: 823959 - protein, 1204 aa, Homo sapiens
  misc_feature (3)..(3): Xaa can be any naturally occurring amino acid
  misc_feature (7)..(8): Xaa can be any naturally occurring amino acid
  misc_feature (12)..(12): Xaa can be any naturally occurring amino acid
RPXGFLXXSGGXRPGFMRTKTLECTMRGVLREQYLQKYISPQHWESLMNGPVQDSEWICFQHWKHSMMLEWLGLGVGSFTQSVSPAGPENTAQAEGDEEEEGEEESSLIEIAEEADLIQADRVIEEEEVVRPQRRKKEESGADQELAKMLLAMRLDHCGTGTAAGQEQATGEWQTQRNQKKKMKKRVKDELRKLNTMTAAEANEIEDVWHLDLSSRWQLYRLWLQLYQADTRRKILSYERQYRTSAERMAELRLQEDLHILKDAQVVGMTTTGAAKYRQILQKVEPRIVIVEEAAEVLEAHTIATLSKACQHLILIGDHQQLRPSANVYDLAKNFNLEVSLFERLVKVNIPFVRLNYQHRMCPEIARLLTPHIYQDLENHPSVLKYEKIKGVSSNLFFVEHNFPEQEIQEGKSHQNQHEAHFVVELCKYFLCQEYLPSQITILTTYTGQLFCLRKLMPAKTFAGVRVHVVDKYQGEENDIILLSLVRSNQEGKVGFLQISNRICVALSRAKKGMYCIGNMQMLAKVPLWSKIIHTLRENNQIGPMLRLCCQNHPETHTLVSKASDFQKVPEGGCSLPCEFRLGCGHVCTRACHPYDSSHKEFQCMKPCQKVICQEGHRCPLVCFQECQPCQVKVPKTIPRCGHEQMVPCSVPESDFCCQEPCSKSLRCGHRCSHPCGEDCVQLCSEMVTIKLKCGHSQPVKCGHVEGLLYGGLLVKCTTKCGTILDCGHPCPGSCHSCFEGRFHERCQQPCKRLLICSHKCQEPCIGECPPCQRTCQNRCVHSQCKKKCGELCSPCVEPCVWRCQHYQCTKLCSEPCNRPPCYVPCTKLLVCGHPCIGLCGEPCPKKCRICHMDEVTQIFFGFEDEPDARFVQLEDCSHIFEVQALDRYMNEQKDDEVAIRLKVCPICQVPIRKNLRYGTSIKQRLEEIEIIKEKIQGSAGEIATSQERLKALLERKSLLHQLLPEDFLMLKEKLAQKNLSVKDLGLVENYISFYDHLASLWDSLKKMHVLEEKRVRTRLEQVHEWLAKKRLSFTSQELSDLRSEIQRLTYLVNLLTRYKIAEKKVKDSIAVEVYSVQNILEKTCKFTQEDEQLVQEKMEALKATLPCSGLGISEEERVQIVSAIGYPRGHWFKCRNGHIYVIGDCGGAMERGTCPDCKEVIGGTNHTLERSNQLASEMDGAQHAAWSDTANNLMNFEEIQGMM

SEQ ID NO: 823960 - protein, 1810 aa, Homo sapiens
MEERRPHLDARPRNSHTNHRGPVDGELPPRARNQANNPPANALRGGASHPGRHPRANNHPAAYWQREERFRAMGRNPHQGRRNQEGHASDEARDQRHDQENDTRWRNGNQDCRNRRPPWSNDNFQQWRTPHQKPTEQPQQAKKLGYKFLESLLQKDPSEVVITLATSLGLKELLSHSSMKSNFLELICQVLRKACSSKMDRQSVLHVLGILKNSKFLKVCLPAYVVGMITEPIPDIRNQYPEHISNIISLLQDLVSVFPASSVQETSMLVSLLPTSLNALRASGVDIEEETEKNLEKVQTIIEHLQEKRREGTLRVDTYTLVQPEAEDHVESYRTMPIYPTYNEVHLDERPFLRPNIISGKYDSTAIYLDTHFRLLREDFVRPLREGILELLQSFEDQGLRKRKFDDIRIYFDTRIITPMCSSSGIVYKVQFDTKPLKFVRWQNSKRLLYGSLVCMSKDNFETFLFATVSNREQEDLCRGIVQLCFNEQSQQLLAEVQPSDSFLMVETTAYFEAYRHVLEGLQEVQEEDVPFQRNIVECNSHVKEPRYLLMGGRYDFTPLIENPSATGEFLRNVEGLRHPRINVLDPGQWPSKEALKLDDSQMEALQFALTRELAIIQGPPGTGKTYVGLKIVQALLTNESVWQISLQKFPILVVCYTNHALDQFLEGIYNCQKTSIVRVGGRSNSEILKQFTLRELRNKREFRRNLPMHLRRAYMSIMTQMKESEQELHEGAKTLECTMRGVLREQYLQKYISPQHWESLMNGPVQDSEWICFQHWKHSMMLEWLGLGVGSFTQSVSPAGPENTAQAEGDEEEEGEEESSLIEIAEEADLIQADRVIEEEEVVRPQRRKKEESGADQELAKMLLAMRLDHCGTGTAAGQEQATGEWQPDSTLPGIDVLQTQRNQKKKMKKRVKDELRKLNTMTAAEANEIEDVWHLDLSSRWQLYRLWLQLYQADTRRKILSYERQYRTSAERMAELRLQEDLHILKDAQVVGMTTTGAAKYRQILQKVEPRIVIVEEAAEVLEAHTIATLSKACQHLILIGDHQQLRPSANVYDLAKNFNLEVSLFERLVKVNIPFVRLNYQHRMCPEIARLLTPHIYQDLENHPSVLKYEKIKGVSSNLFFVEHNFPEQEIQEGKSHQNQHEAHFVVELCKYFLCQEYLPSQITILTTYTGQLFCLRKLMPAKTFAGVRVHVVDKYQGEENDIILLSLVRSNQEGKVGFLQISNRICVALSRAKKGMYCIGNMQMLAKVPLWSKIIHTLRENNQIGPMLRLCCQNHPETHTLVSKASDFQKVPEGGCSLPCEFRLGCGHVCTRACHPYDSSHKEFQCMKPCQKVICQEGHRCPLVCFQECQPCQVKVPKTIPRCGHEQMVPCSVPESDFCCQEPCSKSLRCGHRCSHPCGEDCVQLCSEMVTIKLKCGHSQPVKCGHVEGLLYGGLLVKCTTKCGTILDCGHPCPGSCHSCFEGRFHERCQQPCKRLLICSHKCQEPCIGECPPCQRTCQNRCVHSQCKKKCGELCSPCVEPCVWRCQHYQCTKLCSEPCNRPPCYVPCTKLLVCGHPCIGLCGEPCPKKCRICHMDEVTQIFFGFEDEPDARFVQLEDCSHIFEVQALDRYMNEQKDDEVAIRLKVCPICQVPIRKNLRYGTSIKQRLEEIEIIKEKIQGSAGEIATSQERLKALLERKSLLHQLLPEDFLMLKEKLAQKNLSVKDLGLVENYISFYDHLASLWDSLKKMHVLEEKRVRTRLEQVHEWLAKKRLSFTSQELSDLRSEIQRLTYLVNLLTRYKIAEKKVKDSIAVEVYSVQNILEKL

SEQ ID NO: 823961 - protein, 908 aa, Homo sapiens
MEERRPHLDARPRNSHTNHRGPVDGELPPRARNQANNPPANALRGGASHPGRHPRANNHPAAYWQREERFRAMGRNPHQGRRNQEGHASDEARDQRHDQENDTRWRNGNQDCRNRRPPWSNDNFQQWRTPHQKPTEQPQQAKKLGYKFLESLLQKDPSEVVITLATSLGLKELLSHSSMKSNFLELICQVLRKACSSKMDRQSVLHVLGILKNSKFLKVCLPAYVVGMITEPIPDIRNQYPEHISNIISLLQDLVSVFPASSVQETSMLVSLLPTSLNALRASGVDIEEETEKNLEKVQTIIEHLQEKRREGTLRVDTYTLVQPEAEDHVESYRTMPIYPTYNEVHLDERPFLRPNIISGKYDSTAIYLDTHFRLLREDFVRPLREGILELLQSFEDQGLRKRKFDDIRIYFDTRIITPMCSSSGIVYKVQFDTKPLKFVRWQNSKRLLYGSLVCMSKDNFETFLFATVSNREQEDLCRGIVQLCFNEQSQQLLAEVQPSDSFLMVETTAYFEAYRHVLEGLQEVQEEDVPFQRNIVECNSHVKEPRYLLMGGRYDFTPLIENPSATGEFLRNVEGLRHPRINVLDPGQWPSKEALKLDDSQMEALQFALTRELAIIQGPPGTGKTYVGLKIVQALLTNESVWQISLQKFPILVVCYTNHALDQFLEGIYNCQKTSIVRVGGRSNSEILKQFTLRELRNKREFRRNLPMHLRRAYMSIMTQMKESEQELHEGAKTLECTMRGVLREQYLQKYISPQHWESLMNGPVQDSEWICFQHWKHSMMLEWLGLGVGSFTQSVSPAGPENTAQAEGDEEEEGEEESSLIEIAEEADLIQADRVIEEEEVVRPQRRKKEESGADQELAKMLLAMRLDHCGTGTAAGQEQATGEWQPDSTLPGIDVCRPSATRKRK

SEQ ID NO: 823962 - protein, 86 aa, Homo sapiens
RPAPPRVCGERKPKVRGAGRGHRPAWAEAPALAGGSERTRRSRVSGPATAPAPDSSLPRREPRRPRRPATASALFQITESNVKEFR

SEQ ID NO: 823963 - protein, 154 aa, Homo sapiens
  misc_feature (6)..(6): Xaa can be any naturally occurring amino acid
EVSLAXLARSTNIAIFVVAMRLDHCGTGTAAGQEQATGEWQTQRNQKKKMKKRVKDELRKLNTMTAAEANEIEDVWHLDLSSRWQLYRLWLQLYQADTRRKILSYERQYRTSAERMAELRLQEDLHILKDAQVVGMTTTGAAKYRQNHKYRGAS

SEQ ID NO: 823964 - protein, 1930 aa, Homo sapiens
MEERRPHLDARPRNSHTNHRGPVDGELPPRARNQANNPPANALRGGASHPGRHPRANNHPAAYWQREERFRAMGRNPHQGRRNQEGHASDEARDQRHDQENDTRWRNGNQDCRNRRPPWSNDNFQQWRTPHQKPTEQPQQAKKLGYKFLESLLQKDPSEVVITLATSLGLKELLSHSSMKSNFLELICQVLRKACSSKMDRQSVLHVLGILKNSKFLKVCLPAYVVGMITEPIPDIRNQYPEHISNIISLLQDLVSVFPASSVQETSMLVSLLPTSLNALRASGVDIEEETEKNLEKVQTIIEHLQEKRREGTLRVDTYTLVQPEAEDHVESYRTMPIYPTYNEVHLDERPFLRPNIISGKYDSTAIYLDTHFRLLREDFVRPLREGILELLQSFEDQGLRKRKFDDIRIYFDTRIITPMCSSSGIVYKVQFDTKPLKFVRWQNSKRLLYGSLVCMSKDNFETFLFATVSNREQEDLCRGIVQLCFNEQSQQLLAEVQPSDSFLMVETTAYFEAYRHVLEGLQEVQEEDVPFQRNIVECNSHVKEPRYLLMGGRYDFTPLIENPSATGEFLRNVEGLRHPRINVLDPGQWPSKEALKLDDSQMEALQFALTRELAIIQGPPGTGKTYVGLKIVQALLTNESVWQISLQKFPILVVCYTNHALDQFLEGIYNCQKTSIVRVGGRSNSEILKQFTLRELRNKREFRRNLPMHLRRAYMSIMTQMKESEQELHEGAKTLECTMRGVLREQYLQKYISPQHWESLMNGPVQDSEWICFQHWKHSMMLEWLGLGVGSFTQSVSPAGPENTAQAEGDEEEEGEEESSLIEIAEEADLIQADRVIEEEEVVRPQRRKKEESGADQELAKMLLAMRLDHCGTGTAAGQEQATGEWQPDSTLPGIDVLQTQRNQKKKMKKRVKDELRKLNTMTAAEANEIEDVWHLDLSSRWQLYRLWLQLYQADTRRKILSYERQYRTSAERMAELRLQEDLHILKDAQVVGMTTTGAAKYRQILQKVEPRIVIVEEAAEVLEAHTIATLSKACQHLILIGDHQQLRPSANVYDLAKNFNLEVSLFERLVKVNIPFVRLNYQHRMCPEIARLLTPHIYQDLENHPSVLKYEKIKGVSSNLFFVEHNFPEQEIQEGKSHQNQHEAHFVVELCKYFLCQEYLPSQITILTTYTGQLFCLRKLMPAKTFAGVRVHVVDKYQGEENDIILLSLVRSNQEGKVGFLQISNRICVALSRAKKGMYCIGNMQMLAKVPLWSKIIHTLRENNQIGPMLRLCCQNHPETHTLVSKASDFQKVPEGGCSLPCEFRLGCGHVCTRACHPYDSSHKEFQCMKPCQKVICQEGHRCPLVCFQECQPCQVKVPKTIPRCGHEQMVPCSVPESDFCCQEPCSKSLRCGHRCSHPCGEDCVQLCSEMVTIKLKCGHSQPVKCGHVEGLLYGGLLVKCTTKCGTILDCGHPCPGSCHSCFEGRFHERCQQPCKRLLICSHKCQEPCIGECPPCQRTCQNRCVHSQCKKKCGELCSPCVEPCVWRCQHYQCTKLCSEPCNRPPCYVPCTKLLVCGHPCIGLCGEPCPKKCRICHMDEVTQIFFGFEDEPDARFVQLEDCSHIFEVQALDRYMNEQKDDEVAIRLKVCPICQVPIRKNLRYGTSIKQRLEEIEIIKEKIQGSAGEIATSQERLKALLERKSLLHQLLPEDFLMLKEKLAQKNLSVKDLGLVENYISFYDHLASLWDSLKKMHVLEEKRVRTRLEQVHEWLAKKRLSFTSQELSDLRSEIQRLTYLVNLLTRYKIAEKKVKDSIAVEVYSVQNILEKTCKFTQEDEQLVQEKMEALKATLPCSGLGISEEERVQIVSAIGYPRGHWFKCRNGHIYVIGDCGGAMERGTCPDCKEVIGGTNHTLERSNQLASEMDGAQHAAWSDTANNLMNFEEIQGMM

SEQ ID NO: 823965 - protein, 1880 aa, Homo sapiens
MEERRPHLDARPRNSHTNHRGPVDGELPPRARNQANNPPANALRGGASHPGRHPRANNHPAAYWQREERFRAMGRNPHQGRRNQEGHASDEARDQRHDQENDTRWRNGNQDCRNRRPPWSNDNFQQWRTPHQKPTEQPQQAKKLGYKFLESLLQKDPSEVVITLATSLGLKELLSHSSMKSNFLELICQVLRKACSSKMDRQSVLHVLGILKNSKFLKVCLPAYVVGMITEPIPDIRNQYPEHISNIISLLQDLVSVFPASSVQETSMLVSLLPTSLNALRASGVDIEEETEKNLEKVQTIIEHLQEKRREGTLRVDTYTLVQPEAEDHVESYRTMPIYPTYNEVHLDERPFLRPNIISGKYDSTAIYLDTHFRLLREDFVRPLREGILELLQSFEDQGLRKRKFDDIRIYFDTRIITPMCSSSGIVYKVQFDTKPLKFVRWQNSKRLLYGSLVCMSKDNFETFLFATVSNREQEDLCRGIVQLCFNEQSQQLLAEVQPSDSFLMVETTAYFEAYRHVLEGLQEVQEEDVPFQRNIVECNSHVKEPRYLLMGGRYDFTPLIENPSATGEFLRNVEGLRHPRINVLDPGQWPSKEALKLDDSQMEALQFALTRELAIIQGPPGTGKTYVGLKIVQALLTNESVWQISLQKFPILVVCYTNHALDQFLEGIYNCQKTSIVRVGGRSNSEILKQFTLRELRNKREFRRNLPMHLRRAYMSIMTQMKESEQELHEGGQDPGVHHAWCPTGTVPAEVHLTPALGKSHEWTSAAQAEGDEEEEGEEESSLIEIAEEADLIQADRVIEEEEVVRPQRRKKEESGADQELAKMLLAMRLDHCGTGTAAGQEQATGEWQTQRNQKKKMKKRVKDELRKLNTMTAAEANEIEDVWHLDLSSRWQLYRLWLQLYQADTRRKILSYERQYRTSAERMAELRLQEDLHILKDAQVVGMTTTGAAKYRQILQKVEPRIVIVEEAAEVLEAHTIATLSKACQHLILIGDHQQLRPSANVYDLAKNFNLEVSLFERLVKVNIPFVRLNYQHRMCPEIARLLTPHIYQDLENHPSVLKYEKIKGVSSNLFFVEHNFPEQEIQEGKSHQNQHEAHFVVELCKYFLCQEYLPSQITILTTYTGQLFCLRKLMPAKTFAGVRVHVVDKYQGEENDIILLSLVRSNQEGKVGFLQISNRICVALSRAKKGMYCIGNMQMLAKVPLWSKIIHTLRENNQIGPMLRLCCQNHPETHTLVSKASDFQKVPEGGCSLPCEFRLGCGHVCTRACHPYDSSHKEFQCMKPCQKVICQEGHRCPLVCFQECQPCQVKVPKTIPRCGHEQMVPCSVPESDFCCQEPCSKSLRCGHRCSHPCGEDCVQLCSEMVTIKLKCGHSQPVKCGHVEGLLYGGLLVKCTTKCGTILDCGHPCPGSCHSCFEGRFHERCQQPCKRLLICSHKCQEPCIGECPPCQRTCQNRCVHSQCKKKCGELCSPCVEPCVWRCQHYQCTKLCSEPCNRPPCYVPCTKLLVCGHPCIGLCGEPCPKKCRICHMDEVTQIFFGFEDEPDARFVQLEDCSHIFEVQALDRYMNEQKDDEVAIRLKVCPICQVPIRKNLRYGTSIKQRLEEIEIIKEKIQGSAGEIATSQERLKALLERKSLLHQLLPEDFLMLKEKLAQKNLSVKDLGLVENYISFYDHLASLWDSLKKMHVLEEKRVRTRLEQVHEWLAKKRLSFTSQELSDLRSEIQRLTYLVNLLTRYKIAEKKVKDSIAVEVYSVQNILEKTCKFTQEDEQLVQEKMEALKATLPCSGLGISEEERVQIVSAIGYPRGHWFKCRNGHIYVIGDCGGAMERGTCPDCKEVIGGTNHTLERSNQLASEMDGAQHAAWSDTANNLMNFEEIQGMM

SEQ ID NO: 823966 - protein, 1930 aa, Homo sapiens; identical to SEQ ID NO: 823964

SEQ ID NO: 823967 - protein, 1071 aa, Homo sapiens
  misc_feature (6)..(6): Xaa can be any naturally occurring amino acid
EVSLAXLARSTNIAIFVVAMRLDHCGTGTAAGQEQATGEWQTQRNQKKKMKKRVKDELRKLNTMTAAEANEIEDVWHLDLSSRWQLYRLWLQLYQADTRRKILSYERQYRTSAERMAELRLQEDLHILKDAQVVGMTTTGAAKYRQILQKVEPRIVIVEEAAEVLEAHTIATLSKACQHLILIGDHQQLRPSANVYDLAKNFNLEVSLFERLVKVNIPFVRLNYQHRMCPEIARLLTPHIYQDLENHPSVLKYEKIKGVSSNLFFVEHNFPEQEIQEGKSHQNQHEAHFVVELCKYFLCQEYLPSQITILTTYTGQLFCLRKLMPAKTFAGVRVHVVDKYQGEENDIILLSLVRSNQEGKVGFLQISNRICVALSRAKKGMYCIGNMQMLAKVPLWSKIIHTLRENNQIGPMLRLCCQNHPETHTLVSKASDFQKVPEGGCSLPCEFRLGCGHVCTRACHPYDSSHKEFQCMKPCQKVICQEGHRCPLVCFQECQPCQVKVPKTIPRCGHEQMVPCSVPESDFCCQEPCSKSLRCGHRCSHPCGEDCVQLCSEMVTIKLKCGHSQPVKCGHVEGLLYGGLLVKCTTKCGTILDCGHPCPGSCHSCFEGRFHERCQQPCKRLLICSHKCQEPCIGECPPCQRTCQNRCVHSQCKKKCGELCSPCVEPCVWRCQHYQCTKLCSEPCNRPPCYVPCTKLLVCGHPCIGLCGEPCPKKCRICHMDEVTQIFFGFEDEPDARFVQLEDCSHIFEVQALDRYMNEQKDDEVAIRLKVCPICQVPIRKNLRYGTSIKQRLEEIEIIKEKIQGSAGEIATSQERLKALLERKSLLHQLLPEDFLMLKEKLAQKNLSVKDLGLVENYISFYDHLASLWDSLKKMHVLEEKRVRTRLEQVHEWLAKKRLSFTSQELSDLRSEIQRLTYLVNLLTRYKIAEKKVKDSIAVEVYSVQNILEKTCKFTQEDEQLVQEKMEALKATLPCSGLGISEEERVQIVSAIGYPRGHWFKCRNGHIYVIGDCGGAMERGTCPDCKEVIGGTNHTLERSNQLASEMDGAQHAAWSDTANNLMNFEEIQGMM

SEQ ID NO: 823968 - protein, 1218 aa, Homo sapiens
MEERRPHLDARPRNSHTNHRGPVDGELPPRARNQANNPPANALRGGASHPGRHPRANNHPAAYWQREERFRAMGRNPHQGRRNQEGHASDEARDQRHDQENDTRWRNGNQDCRNRRPPWSNDNFQQWRTPHQKPTEQPQQAKKLGYKFLESLLQKDPSEVVITLATSLGLKELLSHSSMKSNFLELICQVLRKACSSKMDRQSVLHVLGILKNSKFLKVCLPAYVVGMITEPIPDIRNQYPEHISNIISLLQDLVSVFPASSVQETSMLVSLLPTSLNALRASGVDIEEETEKNLEKVQTIIEHLQEKRREGTLRVDTYTLVQPEAEDHVESYRTMPIYPTYNEVHLDERPFLRPNIISGKYDSTAIYLDTHFRLLREDFVRPLREGILELLQSFEDQGLRKRKFDDIRIYFDTRIITPMCSSSGIVYKVQFDTKPLKFVRWQNSKRLLYGSLVCMSKDNFETFLFATVSNREQEDLCRGIVQLCFNEQSQQLLAEVQPSDSFLMVETTAYFEAYRHVLEGLQEVQEEDVPFQRNIVECNSHVKEPRYLLMGGRYDFTPLIENPSATGEFLRNVEGLRHPRINVLDPGQWPSKEALKLDDSQMEALQFALTRELAIIQGPPGTGKTYVGLKIVQALLTNESVWQISLQKFPILVVCYTNHALDQFLEGIYNCQKTSIVRVGGRSNSEILKQFTLRELRNKREFRRNLPMHLRRAYMSIMTQMKESEQELHEGAKTLECTMRGVLREQYLQKYISPQHWESLMNGPVQDSEWICFQHWKHSMMLEWLGLGVGSFTQSVSPAGPENTAQAEGDEEEEGEEESSLIEIAEEADLIQADRVIEEEEVVRPQRRKKEESGADQELAKMLLAMRLDHCGTGTAAGQEQATGEWQPDSTLPGIDVLQTQRNQKKKMKKRVKDELRKLNTMTAAEANEIEDVWHLDLSSRWQLYRLWLQLYQADTRRKILSYERQYRTSAERMAELRLQEDLHILKDAQVVGMTTTGAAKYRQILQKVEPRIVIVEEAAEVLEAHTIATLSKACQHLILIGDHQQLRPSANVYDLAKNFNLEVSLFERLVKVNIPFVRLNYQHRMCPEIARLLTPHIYQDLENHPSVLKYEKIKGVSSNLFFVEHNFPEQEIQEGKSHQNQHEAHFVVELCKYFLCQEYLPSQITILTTYTGQLFCLRKLMPAKTFAGVRVHVVDKYQGEENDIILLSLVRSHTVD

SEQ ID NO: 823969 - protein, 1012 aa, Homo sapiens
MEERRPHLDARPRNSHTNHRGPVDGELPPRARNQANNPPANALRGGASHPGRHPRANNHPAAYWQREERFRAMGRNPHQGRRNQEGHASDEARDQRHDQENDTRWRNGNQDCRNRRPPWSNDNFQQWRTPHQKPTEQPQQAKKLGYKFLESLLQKDPSEVVITLATSLGLKELLSHSSMKSNFLELICQVLRKACSSKMDRQSVLHVLGILKNSKFLKVCLPAYVVGMITEPIPDIRNQYPEHISNIISLLQDLVSVFPASSVQETSMLVSLLPTSLNALRASGVDIEEETEKNLEKVQTIIEHLQEKRREGTLRVDTYTLVQPEAEDHVESYRTMPIYPTYNEVHLDERPFLRPNIISGKYDSTAIYLDTHFRLLREDFVRPLREGILELLQSFEDQGLRKRKFDDIRIYFDTRIITPMCSSSGIVYKVQFDTKPLKFVRWQNSKRLLYGSLVCMSKDNFETFLFATVSNREQEDLCRGIVQLCFNEQSQQLLAEVQPSDSFLMVETTAYFEAYRHVLEGLQEVQEEDVPFQRNIVECNSHVKEPRYLLMGGRYDFTPLIENPSATGEFLRNVEGLRHPRINVLDPGQWPSKEALKLDDSQMEALQFALTRELAIIQGPPGTGKTYVGLKIVQALLTNESVWQISLQKFPILVVCYTNHALDQFLEGIYNCQKTSIVRVGGRSNSEILKQFTLRELRNKREFRRNLPMHLRRAYMSIMTQMKESEQELHEGAKTLECTMRGVLREQYLQKYISPQHWESLMNGPVQDSEWICFQHWKHSMMLEWLGLGVGSFTQSVSPAGPENTAQAEGDEEEEGEEESSLIEIAEEADLIQADRVIEEEEVVRPQRRKKEESGADQELAKMLLAMRLDHCGTGTAAGQEQATGEWQPDSTLPGIDVLQTQRNQKKKMKKRVKDELRKLNTMTAAEANEIEDVWHLDLSSRWQLYRLWLQLYQADTRRKILSYERQYRTSAERMAELRLQEDLHILKDAQVVGMTTTGAAKYRQNHKYRGA

SEQ ID NO: 823970 - protein, 103 aa, Homo sapiens
QLSRDFQGSERGGRPRGKLEARVGNMSESELGRKWDRCLADAVVKIGTGFGLGIVFSLTFFKRRMWPLAFGSGMGLGMAYSNCQHDFQAPYLLHGKYVKEQEQ

SEQ ID NO: 823971 - protein, 103 aa, Homo sapiens; identical to SEQ ID NO: 823970

SEQ ID NO: 823972 - protein, 114 aa, Homo sapiens
MSTINTHSSARAEFGTSGTMERGGRPRGKLEARVGNMSESELGRKWDRCLADAVVKIGTGFGLGIVFSLTFFKRRMWPLAFGSGMGLGMAYSNCQHDFQAPYLLHGKYVKEQEQ

SEQ ID NO: 823973 - protein, 110 aa, Homo sapiens
QQVSVQVMKGLHYIDRPLQYQGLFTTANFLAPQDCNVNNKHTQFSSAEFGTSGTMERGGRPRGKLEARVGNMSESELGRKWDRCLADAVVKIVETGFHRVSQDGLDLLTS

SEQ ID NO: 823974 - protein, 114 aa, Homo sapiens; identical to SEQ ID NO: 823972

SEQ ID NO: 823975 - protein, 133 aa, Homo sapiens
QQVSVQVMKGLHYIDRPLQYQGLFTTANFLAPQDCNVNNKHTQFSSAEFGTSGTMERGGRPRGKLEARVGNMSESELGRKWDRCLADAVVKIGRMWPLAFGSGMGLGMAYSNCQHDFQAPYLLHGKYVKEQEQ

SEQ ID NO: 823976 - protein, 95 aa, Homo sapiens
QQVSVQVMKGLHYIDRPLQYQGLFTTANFLAPQDCNVNNKHTQFSSAEFGTSGTMERGGRPRGKLEARVGNMSESELGRKWDRCLADAVVKIESW

SEQ ID NO: 823977 - protein, 124 aa, Homo sapiens
QQVSVQVMKGLHYIDRPLQYQGLFTTANFLAPQDCNVNNKHTQFSSAEFGTSGTMERGGRPRGKLEARVGNMSESELGRKWDRCLADAVVKIEMGFHHVAQAGLELRVQTIHLPWPPNVPGLQA

SEQ ID NO: 823978 - protein, 140 aa, Homo sapiens
MSTINTHSSARAEFGTSGTMERGGRPRGKLEARVGNMSESELGRKWDRCLADAVVKIGTGFGLGIVFSLTFFKRRMWPLAFGSGMGLGMAYSNCQHDFQAPYLLHGKYVKDKRNHVYSSGILKCPGVSCHSSVTMLSVML

SEQ ID NO: 823979 - protein, 124 aa, Homo sapiens; identical to SEQ ID NO: 823977

SEQ ID NO: 823980 - protein, 70 aa, Homo sapiens
RGKLEARVGNMSESELGRKWDRCLADAVVKIGKGLFAPAGPAGAELLAPGCAAQEEGREAPREVRPLGLF

SEQ ID NO: 823981 - protein, 114 aa, Homo sapiens; identical to SEQ ID NO: 823972

SEQ ID NO: 823982 - protein, 74 aa, Homo sapiens
HLCTKARVRSSQGPCKKRRSCVALKPAAGLFHHSLAPRFPGIRADCGENRKEQTEKLQVFCLKHFHCSKLSCQG

SEQ ID NO: 823983 - protein, 95 aa, Homo sapiens; identical to SEQ ID NO: 823976

SEQ ID NO: 823984 - protein, 114 aa, Homo sapiens; identical to SEQ ID NO: 823972

SEQ ID NO: 823985 - protein, 69 aa, Homo sapiens
  misc_feature (2)..(2): Xaa can be any naturally occurring amino acid
  misc_feature (16)..(16): Xaa can be any naturally occurring amino acid
  misc_feature (24)..(24): Xaa can be any naturally occurring amino acid
AXDPQNGRAAIRLKKXCLDRIVSXLPPERRMWPLAFGSGMGLGMAYSNCQHDFQAPYLLHGKYVKEQEQ

SEQ ID NO: 823986 - protein, 110 aa, Homo sapiens; identical to SEQ ID NO: 823973

SEQ ID NO: 823987 - protein, 140 aa, Homo sapiens; identical to SEQ ID NO: 823978

SEQ ID NO: 823988 - protein, 134 aa, Homo sapiens
MSTINTHSSARAEFGTSGTMERGGRPRGKLEARVGNMSESELGRKWDRCLADAVVKIEMGFHHVAQAGLELRVQTIHLPWPPNVPGLQAVNQYFISDTRYVGVFPHTSTSSPTGYPVTHFNSDTVCLETTTRLP

SEQ ID NO: 823989 - protein, 1506 aa, Homo sapiens
HIRASATSERKMAAAAVVVPAEWIKNWEKSGRGEFLHLCRILSENKSHDSSTYRDFQQALYELSYHVIKGNLKHEQASNVLSDISEFREDMPSILADVFCILDIETNCLEEKSKRDYFTQLVLACLYLVSDTVLKERLDPETLESLGLIKQSQQFNQKSVKIKTKLFYKQQKFNLLREENEGYAKLIAELGQDLSGSITSDLILENIKSLIGCFNLDPNRVLDVILEVFECRPEHDDFFISLLESYMSMCEPQTLCHILGFKFKFYQEPNGETPSSLYRVAAVLLQFNLIDLDDLYVHLLPADNCIMDEHKREIAEAKQIVRKLTMVVLSSEKMDEREKEKEKEEEKVEKPPDNQKLGLLEALLKIGDWQHAQNIMDQMPPYYAASHKLIALAICKLIHITIEPLYRRVGVPKGAKGSPVNALQNKRAPKQAESFEDLRRDVFNMFCYLGPHLSHDPILFAKVVRIGKSFMKEFQSDGSKQEDKEKTEVILSCLLSITDQVLLPSLSLMDCNACMSEELWGMFKTFPYQHRYIHIIFSERMKHDDTTISSWLQSLASFCGAVFRKYPIDLAGLLQYVANQLKAGKSFDLLILKEVVQKMAGIEITEEMTMEQLEAMTGGEQLKAEGGYFGQIRNTKKSSQRLKDALLDHDLALPLCLLMAQQRNGVIFQEGGEKHLKLVGKLYDQCHDTLVQFGGFLASNLSTEDYIKRVPSIDVLCNEFHTPHDAAFFLSRPMYAHHISSKYDELKKSEKGSKQQHKVHKYITSCEMVMAPVHEAVVSLHVSKVWDDISPQFYATFWSLTMYDLAVPHTSYEREVNKLKVQMKAIDDNQEMPPNKKKKEKERCTALQDKLLEEEKKQMEHVQRVLQRLKLEKDNWLLAKSTKNETITKFLQLCIFPRCIFSAIDAVYCARFVELVHQQKTPNFSTLLCYDRVFSDIIYTVASCTENEASRYGRFLCCMLETVTRWHSDRATYEKECGNYPGFLTILRATGFDGGNKADQLDYENFRHVVHKWHYKLTKASVHCLETGEYTHIRNILIVLTKILPWYPKVLNLGQALERRVHKICQEEKEKRPDLYALAMGYSGQLKSRKSYMIPENEFHHKDPPPRNAVASVQNGPGGGPSSSSIGSASKSDESSTEETDKSRERSQCGVKAVNKASSTTPKGNSSNGNSGSNSNKAVKENDKEKGKEKEKEKKEKTPATTPEARVLGKDGKEKPKEERPNKDEKARETKERTPKSDKEKEKFKKEEKAKDEKFKTTVPNAESKSTQEREREKEPSRERDIAKEMKSKENVKGGEKTPVSGSLKSPVPRSDIPEPEREQKRRKIDTHPSPSHSSTVKDSLIELKESSAKLYINHTPPPLSKSKEREMDKKDLDKSRERSREREKKDEKDRKERKRDHSNNDREVPPDLTKRRKEENGTMGVSKHKSESPCESPYPNEKDKEKNKSKSSGKEKGSDSFKSEKMDKISSGGKKESRHDKEKIEKKEKRDSSGGKEEKKHHKSSDKHR

SEQ ID NO: 823990 - protein, 1533 aa, Homo sapiens
HIRASATSERKMAAAAVVVPAEWIKNWEKSGRGEFLHLCRILSENKSHDSSTYRDFQQALYELSYHVIKGNLKHEQASNVLSDISEFREDMPSILADVFCILDIETNCLEEKSKRDYFTQLVLACLYLVSDTVLKERLDPETLESLGLIKQSQQFNQKSVKIKTKLFYKQQKFNLLREENEGYAKLIAELGQDLSGSITSDLILENIKSLIGCFNLDPNRVLDVILEVFECRPEHDDFFISLLESYMSMCEPQTLCHILGFKFKFYQEPNGETPSSLYRVAAVLLQFNLIDLDDLYVHLLPADNCIMDEHKREIAEAKQIVRKLTMVVLSSEKMDEREKEKEKEEEKVEKPPDNQKLGLLEALLKIGDWQHAQNIMDQMPPYYAASHKLIALAICKLIHITIEPLYRRVGVPKGAKGSPVNALQNKRAPKQAESFEDLRRDVFNMFCYLGPHLSHDPILFAKVVRIGKSFMKEFQSDGSKQEDKEKTEVILSCLLSITDQVLLPSLSLMDCNACMSEELWGMFKTFPYQHRYIHIIFSERMKHDDTTISSWLQSLASFCGAVFRKYPIDLAGLLQYVANQLKAGKSFDLLILKEVVQKMAGIEITEEMTMEQLEAMTGGEQLKAEGGYFGQIRNTKKSSQRLKDALLDHDLALPLCLLMAQQRNGVIFQEGGEKHLKLVGKLYDQCHDTLVQFGGFLASNLSTEDYIKRVPSIDVLCNEFHTPHDAAFFLSRPMYAHHISSKYDELKKSEKGSKQQHKVHKYITSCEMVMAPVHEAVVSLHVSKVWDDISPQFYATFWSLTMYDLAVPHTSYEREVNKLKVQMKAIDDNQEMPPNKKKKEKERCTALQDKLLEEEKKQMEHVQRVLQRLKLEKDNWLLAKSTKNETITKFLQLCIFPRCIFSAIDAVYCARFVELVHQQKTPNFSTLLCYDRVFSDIIYTVASCTENEASRYGRFLCCMLETVTRWHSDRATYEKECGNYPGFLTILRATGFDGGNKADQLDYENFRHVVHKWHYKLTKASVHCLETGEYTHIRNILIVLTKILPWYPKVLNLGQALERRVHKICQEEKEKRPDLYALAMGYSGQLKSRKSYMIPENEFHHKDPPPRNAVASVQNGPGGGPSSSSIGSASKSDESSTEETDKSRERSQCGVKAVNKASSTTPKGNSSNGNSGSNSNKAVKENDKEKGKEKEKEKKEKTPATTPEARVLGKDGKEKPKEERPNKDEKARETKERTPKSDKEKEKFKKEEKAKDEKFKTTVPNAESKSTQEREREKEPSRERDIAKEMKSKENVKGGEKTPVSGSLKSPVPRSDIPEPEREQKRRKIDTHPSPSHSSTVKVTAILPKVPLGSENYASSPVISIHFLQDSLIELKESSAKLYINHTPPPLSKSKEREMDKKDLDKSRERSREREKKDEKDRKERKRDHSNNDREVPPDLTKRRKEENGTMGVSKHKSESPCESPYPNEKDKEKNKSKSSGKEKGSDSFKSEKMDKISSGGKKESRHDKEKIEKKEKRDSSGGKEEKKHHKSSDKHR

SEQ ID NO: 823991 - protein, 1081 aa, Homo sapiens
HIRASATSERKMAAAAVVVPAEWIKNWEKSGRGEFLHLCRILSENKSHDSSTYRDFQQALYELSYHVIKGNLKHEQASNVLSDISEFREDMPSILADVFCILDIETNCLEEKSKRDYFTQLVLACLYLVSDTVLKERLDPETLESLGLIKQSQQFNQKSVKIKTKLFYKQQKFNLLREENEGYAKLIAELGQDLSGSITSDLILENIKSLIGCFNLDPNRVLDVILEVFECRPEHDDFFISLLESYMSMCEPQTLCHILGFKFKFYQEPNGETPSSLYRVAAVLLQFNLIDLDDLYVHLLPADNCIMDEHKREIAEAKQIVRKLTMVVLSSEKMDEREKEKEKEEEKVEKPPDNQKLGLLEALLKIGDWQHAQNIMDQMPPYYAASHKLIALAICKLIHITIEPLYRRVGVPKGAKGSPVNALQNKRAPKQAESFEDLRRDVFNMFCYLGPHLSHDPILFAKVVRIGKSFMKEFQSDGSKQEDKEKTEVILSCLLSITDQVLLPSLSLMDCNACMSEELWGMFKTFPYQHRYIHIIFSERMKHDDTTISSWLQSLASFCGAVFRKYPIDLAGLLQYVANQLKAGKSFDLLILKEVVQKMAGIEITEEMTMEQLEAMTGGEQLKAEGGYFGQIRNTKKSSQRLKDALLDHDLALPLCLLMAQQRNGVIFQEGGEKHLKLVGKLYDQCHDTLVQFGGFLASNLSTEDYIKRVPSIDVLCNEFHTPHDAAFFLSRPMYAHHISSKYDELKKSEKGSKQQHKVHKYITSCEMVMAPVHEAVVSLHVSKVWDDISPQFYATFWSLTMYDLAVPHTSYEREVNKLKVQMKAIDDNQEMPPNKKKKEKERCTALQDKLLEEEKKQMEHVQRVLQRLKLEKDNWLLAKSTKNETITKFLQLCIFPRCIFSAIDAVYCARFVELVHQQKTPNFSTLLCYDRVFSDIIYTVASCTENEASRYGRFLCCMLETVTRWHSDRATYEKECGNYPGFLTILRATGFDGGNKADQLDYENFRHVVHKWHYKLTKASVHCLETGEYTHIRNILIVLTKILPWYPKVLNLGQALERRVHKICQEEKEKRPDLYALAMG

SEQ ID NO: 823992 - protein, 1506 aa, Homo sapiens; identical to SEQ ID NO: 823989

SEQ ID NO: 823993 - protein, 821 aa, Homo sapiens
ENVKPSGRQIGKLSHSNPTILFDYILSQIQKYDNLITPVVDSLKYLTSLNYDVLAYCIIEALANPEKERMKHDDTTISSWLQSLASFCGAVFRKYPIDLAGLLQYVANQLKAGKSFDLLILKEVVQKMAGIEITEEMTMEQLEAMTGGEQLKAEGGYFGQIRNTKKSSQRLKDALLDHDLALPLCLLMAQQRNGVIFQEGGEKHLKLVGKLYDQCHDTLVQFGGFLASNLSTEDYIKRVPSIDVLCNEFHTPHDAAFFLSRPMYAHHISSKYDELKKSEKGSKQQHKVHKYITSCEMVMAPVHEAVVSLHVSKVWDDISPQFYATFWSLTMYDLAVPHTSYEREVNKLKVQMKAIDDNQEMPPNKKKKEKERCTALQDKLLEEEKKQMEHVQRVLQRLKLEKDNWLLAKSTKNETITKFLQLCIFPRCIFSAIDAVYCARFVELVHQQKTPNFSTLLCYDRVFSDIIYTVASCTENEASRYGRFLCCMLETVTRWHSDRATYEKECGNYPGFLTILRATGFDGGNKADQLDYENFRHVVHKWHYKLTKASVHCLETGEYTHIRNILIVLTKILPWYPKVLNLGQALERRVHKICQEEKEKRPDLYALAMGYSGQLKSRKSYMIPENEFHHKDPPPRNAVASVQNGPGGGPSSSSIGSASKSDESSTEETDKSRERSQCGVKAVNKASSTTPKGNSSNGNSGSNSNKAVKENDKEKGKEKEKEKKEKTPATTPEARVLGKDGKEKPKEERPNKDEKARETKERTPKSDKEKEKFKKEEKAKDEKFKTTVPNAESKSTQEREKREGAIQRKRYSKGNEIKGKC

SEQ ID NO: 823994 - protein, 1506 aa, Homo sapiens; identical to SEQ ID NO: 823989

SEQ ID NO: 823995 - protein, 1506 aa, Homo sapiens; identical to SEQ ID NO: 823989

SEQ ID NO: 823996 - protein, 1357 aa, Homo sapiens
HIRASATSERKMAAAAVVVPAEWIKNWEKSGRGEFLHLCRILSENKSHDSSTYRDFQQALYELSYHVIKGNLKHEQASNVLSDISEFREDMPSILADVFCILDIETNCLEEKSKRDYFTQLVLACLYLVSDTVLKERLDPETLESLGLIKQSQQFNQKSVKIKTKLFYKQQKFNLLREENEGYAKLIAELGQDLSGSITSDLILENIKSLIGCFNLDPNRVLDVILEVFECRPEHDDFFISLLESYMSMCEPQTLCHILGFKFKFYQEPNGETPSSLYRVAAVLLQFNLIDLDDLYVHLLPADNCIMDEHKREIAEAKQIVRKLTMVVLSSEKMDEREKEKEKEEEKVEKPPDNQKLGLLEALLKIGDWQHAQNIMDQMPPYYAASHKLIALAICKLIHITIEPLYRRVGVPKGAKGSPVNALQNKRAPKQAESFEDLRRDVFNMFCYLGPHLSHDPILFAKVVRIGKSFMKEFQSDGSKQEDKEKTEVILSCLLSITDQVLLPSLSLMDCNACMSEELWGMFKTFPYQHRYIHIIFSERMKHDDTTISSWLQSLASFCGAVFRKYPIDLAGLLQYVANQLKAGKSFDLLILKEVVQKMAGIEITEEMTMEQLEAMTGGEQLKAEGGYFGQIRNTKKSSQRLKDALLDHDLALPLCLLMAQQRNGVIFQEGGEKHLKLVGKLYDQCHDTLVQFGGFLASNLSTEDYIKRVPSIDVLCNEFHTPHDAAFFLSRPMYAHHISSKYDELKKSEKGSKQQHKVHKYITSCEMVMAPVHEAVVSLHVSKVWDDISPQFYATFWSLTMYDLAVPHTSYEREVNKLKVQMKAIDDNQEMPPNKKKKEKERCTALQDKLLEEEKKQMEHVQRVLQRLKLEKDNWLLAKSTKNETITKFLQLCIFPRCIFSAIDAVYCARFVELVHQQKTPNFSTLLCYDRVFSDIIYTVASCTENEASRYGRFLCCMLETVTRWHSDRATYEKECGNYPGFLTILRATGFDGGNKADQLDYENFRHVVHKWHYKLTKASVHCLETGEYTHIRNILIVLTKILPWYPKVLNLGQALERRVHKICQEEKEKRPDLYALAMGYSGQLKSRKSYMIPENEFHHKDPPPRNAVASVQNGPGGGPSSSSIGSASKSDESSTEETDKSRERSQCGVKAVNKASSTTPKGNSSNGNSGSNSNKAVKENDKEKGKEKEKEKKEKKKNTQKKKKKKGGGAKKKLPPGGGTIEHVLKKGGPKRERGDKTHSGRGADQNNAGVGETAVRRDTWARTQTTGGETTREHHQDNYSPRGKTRRGIGGTTHERADDRNGYRDECTLSRGQKRSWTTEITNTATSDKPQGIHEREKSTTDEEPHERDNEPTE

SEQ ID NO: 823997 - protein, 1081 aa, Homo sapiens; identical to SEQ ID NO: 823991

SEQ ID NO: 823998 - protein, 238 aa, Homo sapiens
HIRASATSERKMAAAAVVVPAEWIKNWEKSGRGEFLHLCRILSENKSHDSSTYRDFQQALYELSYHVIKGNLKHEQASNVLSDISEFREDMPSILADVFCILDIETNCLEEKSKRDYFTQLVLACLYLVSDTVLKERLDPETLESLGLIKQSQQFNQKSVKIKTKLFYKQQKFNLLREENEGYAKLIAELGQDLSGSITSDLILENIKSLIGKTFICIVCVVKITSYFSYWRISIKTK

SEQ ID NO: 823999 - protein, 1292 aa, Homo sapiens
HIRASATSERKMAAAAVVVPAEWIKNWEKSGRGEFLHLCRILSENKSHDSSTYRDFQQALYELSYHVIKGNLKHEQASNVLSDISEFREDMPSILADVFCILDIETNCLEEKSKRDYFTQLVLACLYLVSDTVLKERLDPETLESLGLIKQSQQFNQKSVKIKTKLFYKQQKFNLLREENEGYAKLIAELGQDLSGSITSDLILENIKSLIGCFNLDPNRVLDVILEVFECRPEHDDFFISLLESYMSMCEPQTLCHILGFKFKFYQEPNGETPSSLYRVAAVLLQFNLIDLDDLYVHLLPADNCIMDEHKREIAEAKQIVRKLTMVVLSSEKMDEREKEKEKEEEKVEKPPDNQKLGLLEALLKIGDWQHAQNIMDQMPPYYAASHKLIALAICKLIHITIEPLYRRVGVPKGAKGSPVNALQNKRAPKQAESFEDLRRDVFNMFCYLGPHLSHDPILFAKVVRIGKSFMKEFQSDGSKQEDKEKTEVILSCLLSITDQVLLPSLSLMDCNACMSEELWGMFKTFPYQHRYIHIIFSERMKHDDTTISSWLQSLASFCGAVFRKYPIDLAGLLQYVANQLKAGKSFDLLILKEVVQKMAGIEITEEMTMEQLEAMTGGEQLKAEGGYFGQIRNTKKSSQRLKDALLDHDLALPLCLLMAQQRNGVIFQEGGEKHLKLVGKLYDQCHDTLVQFGGFLASNLSTEDYIKRVPSIDVLCNEFHTPHDAAFFLSRPMYAHHISSKYDELKKSEKGSKQQHKVHKYITSCEMVMAPVHEAVVSLHVSKVWDDISPQFYATFWSLTMYDLAVPHTSYEREVNKLKVQMKAIDDNQEMPPNKKKKEKERCTALQDKLLEEEKKQMEHVQRVLQRLKLEKDNWLLAKSTKNETITKFLQLCIFPRCIFSAIDAVYCARFVELVHQQKTPNFSTLLCYDRVFSDIIYTVASCTENEASRYGRFLCCMLETVTRWHSDRATYEKECGNYPGFLTILRATGFDGGNKADQLDYENFRHVVHKWHYKLTKASVHCLETGEYTHIRNILIVLTKILPWYPKVLNLGQALERRVHKICQEEKEKRPDLYALAMGYSGQLKSRKSYMIPENEFHHKDPPPRNAVASVQNGPGGGPSSSSIGSASKSDESSTEETDKSRERSQCGVKAVNKASSTTPKGNSSNGNSGSNSNKAVKENDKEKGKEKEKEKKEKTPATTPEARVLGKDGKEKPKEERPNKDEKARETKERTPKSDKEKEKFKKEEKAKDEKFKTTVPNAESKSTQEREKREGAIQRKRYSKGNEIKGKC

SEQ ID NO: 824000 - protein, 1314 aa, Homo sapiens
HIRASATSERKMAAAAVVVPAEWIKNWEKSGRGEFLHLCRILSENKSHDSSTYRDFQQALYELSYHVIKGNLKHEQASNVLSDISEFREDMPSILADVFCILDIETNCLEEKSKRDYFTQLVLACLYLVSDTVLKERLDPETLESLGLIKQSQQFNQKSVKIKTKLFYKQQKFNLLREENEGYAKLIAELGQDLSGSITSDLILENIKSLIGCFNLDPNRVLDVILEVFECRPEHDDFFISLLESYMSMCEPQTLCHILGFKFKFYQEPNGETPSSLYRVAAVLLQFNLIDLDDLYVHLLPADNCIMDEHKREIAEAKQIVRKLTMVVLSSEKMDEREKEKEKEEEKVEKPPDNQKLGLLEALLKIGDWQHAQNIMDQMPPYYAASHKLIALAICKLIHITIEPLYRRVGVPKGAKGSPVNALQNKRAPKQAESFEDLRRDVFNMFCYLGPHLSHDPILFAKVVRIGKSFMKEFQSDGSKQEDKEKTEVILSCLLSITDQVLLPSLSLMDCNACMSEELWGMFKTFPYQHRYIHIIFSERMKHDDTTISSWLQSLASFCGAVFRKYPIDLAGLLQYVANQLKAGKSFDLLILKEVVQKMAGIEITEEMTMEQLEAMTGGEQLKAEGGYFGQIRNTKKSSQRLKDALLDHDLALPLCLLMAQQRNGVIFQEGGEKHLKLVGKLYDQCHDTLVQFGGFLASNLSTEDYIKRVPSIDVLCNEFHTPHDAAFFLSRPMYAHHISSKYDELKKSEKGSKQQHKVHKYITSCEMVMAPVHEAVVSLHVSKVWDDISPQFYATFWSLTMYDLAVPHTSYEREVNKLKVQMKAIDDNQEMPPNKKKKEKERCTALQDKLLEEEKKQMEHVQRVLQRLKLEKDNWLLAKSTKNETITKFLQLCIFPRCIFSAIDAVYCARFVELVHQQKTPNFSTLLCYDRVFSDIIYTVASCTENEASRYGRFLCCMLETVTRWHSDRATYEKECGNYPGFLTILRATGFDGGNKADQLDYENFRHVVHKWHYKLTKASVHCLETGEYTHIRNILIVLTKILPWYPKVLNLGQALERRVHKICQEEKEKRPDLYALAMGVEVYLLPSGDYGRLCDHVSTGCYSGQLKSRKSYMIPENEFHHKDPPPRNAVASVQNGPGGGPSSSSIGSASKSDESSTEETDKSRERSQCGVKAVNKASSTTPKGNSSNGNSGSNSNKAVKENDKEKGKEKEKEKKEKTPATTPEARVLGKDGKEKPKEERPNKDEKARETKERTPKSDKEKEKFKKEEKAKDEKFKTTVPNAESKSTQEREKREGAIQRKRYSKGNEIKGKC

SEQ ID NO: 824001 - protein, 548 aa, Homo sapiens
MLETVTRWHSDRATYEKECGNYPGFLTILRATGFDGGNKADQLDYENFRHVVHKWHYKLTKASVHCLETGEYTHIRNILIVLTKILPWYPKVLNLGQALERRVHKICQEEKEKRPDLYALAMGYSGQLKSRKSYMIPENEFHHKDPPPRNAVASVQNGPGGGPSSSSIGSASKSDESSTEETDKSRERSQCGVKAVNKASSTTPKGNSSNGNSGSNSNKAVKENDKEKGKEKEKEKKEKTPATTPEARVLGKDGKEKPKEERPNKDEKARETKERTPKSDKEKEKFKKEEKAKDEKFKTTVPNAESKSTQEREREKEPSRERDIAKEMKSKENVKGGEKTPVSGSLKSPVPRSDIPEPEREQKRRKIDTHPSPSHSSTVKDSLIELKESSAKLYINHTPPPLSKSKEREMDKKDLDKSRERSREREKKDEKDRKERKRDHSNNDREVPPDLTKRRKEENGTMGVSKHKSESPCESPYPNEKDKEKNKSKSSGKEKGSDSFKSEKMDKISSGGKKESRHDKEKIEKKEKRDSSGGKEEKKHHKSSDKHR

SEQ ID NO: 824002 - protein, 339 aa, Homo sapiens
MEIVALTATKLLKKMTKKKGKRKKKRKKKRLQLLLQRPGYLVKMVKKNQRKSGQIKMKKQERPRKERRSLTKRKKNSRRKKKLKMRNLRPLSPTQNQNQLKKGKREKEPSRERDIAKEMKSKENVKGGEKTPVSGSLKSPVPRSDIPEPEREQKRRKIDTHPSPSHSSTVKDSLIELKESSAKLYINHTPPPLSKSKEREMDKKDLDKSRERSREREKKDEKDRKERKRDHSNNDREVPPDLTKRRKEENGTMGVSKHKSESPCESPYPNEKDKEKNKSKSSGKEKGSDSFKSEKMDKISSGGKKESRHDKEKIEKKEKRDSSGGKEEKKHHKSSDKHR

SEQ ID NO: 824003 - protein, 377 aa, Homo sapiens
ATVATSSRGAGRLSGKRRARGRRAGWGSAAQCQRQRQTRAPRSPARRLPWDSRARTPALPVRCPSMELLCCEGTRHAPRAGPDPRLLGDQRVLQSLLRLEERYVPRASYFQCVQREIKPHMRKMLAYWMLEVCEEQRCEEEVFPLAMNYLDRYLSCVPTRKAQLQLLGAVCMLLASKLRETTPLTIEKLCIYTDHAVSPRQLRDWEVLVLGKLKWDLAAVIAHDFLAFILHRLSLPRDRQALVKKHAQTFLALCATDYTFAMYPPSMIATGSIGAAVQGLGACSMSGDELTELLAGITGTEVDCLRACQEQIEAALRESLREAAQTSSSQPRAQPDQHSYRCHSHTPVALERPSGVATKQRRGRCHPPPCLQEPHHI

SEQ ID NO: 824004 - protein, 357 aa, Homo sapiens
ATVATSSRGAGRLSGKRRARGRRAGWGSAAQCQRQRQTRAPRSPARRLPWDSRARTPALPVRCPSMELLCCEGTRHAPRAGPDPRLLGDQRVLQSLLRLEERYVPRASYFQCVQREIKPHMRKMLAYWMLEVCEEQRCEEEVFPLAMNYLDRYLSCVPTRKAQLQLLGAVCMLLASKLRETTPLTIEKLCIYTDHAVSPRQLRDWEVLVLGKLKWDLAAVIAHDFLAFILHRLSLPRDRQALVKKHAQTFLALCATDYTFAMYPPSMIATGSIGAAVQGLGACSMSGDELTELLAGITGTEVDCLRACQEQIEAALRESLREAAQTSSSPAPKAPRGSSSQGPSQTSTPTDVTAIHL

SEQ ID NO: 824005 - protein, 357 aa, Homo sapiens; identical to SEQ ID NO: 824004

SEQ ID NO: 824006 - protein, 290 aa, Homo sapiens
MTTTGSREHGPRGMLRGVTVSLLSCVFFWIDVCEVPTASSTSFAYSRRSSRYCGMNAGLTEWLEVCEEQRCEEEVFPLAMNYLDRYLSCVPTRKAQLQLLGAVCMLLASKLRETTPLTIEKLCIYTDHAVSPRQLRDWEVLVLGKLKWDLAAVIAHDFLAFILHRLSLPRDRQALVKKHAQTFLALCATDYTFAMYPPSMIATGSIGAAVQGLGACSMSGDELTELLAGITGTEVDCLRACQEQIEAALRESLREAAQTSSSPAPKAPRGSSSQGPSQTSTPTDVTAIHL

SEQ ID NO: 824007 - protein, 242 aa, Homo sapiens
MPLCLLRPLFPTSCPALDRRRGADFVNTSPLQGGDWLCSDAGRGGEVQSSPRGWWLRPPPLPKGRLRRRRDRAPATPVGAPGRSPDEEDWEVLVLGKLKWDLAAVIAHDFLAFILHRLSLPRDRQALVKKHAQTFLALCATDYTFAMYPPSMIATGSIGAAVQGLGACSMSGDELTELLAGITGTEVDCLRACQEQIEAALRESLREAAQTSSSPAPKAPRGSSSQGPSQTSTPTDVTAIHL

SEQ ID NO: 824008 - protein, 285 aa, Homo sapiens
ATVATSSRGAGRLSGKRRARGRRAGWGSAAQCQRQRQTRAPRSPARRLPWDSRARTPALPVRCPSMELLCCEGTRHAPRAGPDPRLLGDQRVLQSLLRLEERYVPRASYFQCVQREIKPHMRKMLAYWMLEDWEVLVLGKLKWDLAAVIAHDFLAFILHRLSLPRDRQALVKKHAQTFLALCATDYTFAMYPPSMIATGSIGAAVQGLGACSMSGDELTELLAGITGTEVDCLRACQEQIEAALRESLREAAQTSSSPAPKAPRGSSSQGPSQTSTPTDVTAIHL

SEQ ID NO: 824009 - protein, 231 aa, Homo sapiens
MNYLDRYLSCVPTRKAQLQLLGAVCMLLASKLRETTPLTIEKLCIYTDHAVSPRQLRDWEVLVLGKLKWDLAAVIAHDFLAFILHRLSLPRDRQALVKKHAQTFLALCATDYTFAMYPPSMIATGSIGAAVQGLGACSMSGDELTELLAGITGTEVDCLRACQEQIEAALRESLREAAQTSSSQPRAQPDQHSYRCHSHTPVALERPSGVATKQRRGRCHPPPCLQEPHHI

SEQ ID NO: 824010 - protein, 357 aa, Homo sapiens; identical to SEQ ID NO: 824004

SEQ ID NO: 824011 - protein, 274 aa, Homo sapiens
ATVATSSRGAGRLSGKRRARGRRAGWGSAAQCQRQRQTRAPRSPARRLPWDSRARTPALPVRCPSMELLCCEGTRHAPRAGPDPRLLGDQRVLQSLLRLEERYVPRASYFQCVQREIKPHMRKMLAYWMLEVCEEQRCEEEVFPLAMNYLDRYLSCVPTRKAQLQLLGAVCMLLASKLRETTPLTIEKLCIYTDHAVSPRQLRDWEVLVLGKLKWDLAAVIAHDFLAFILHRLSLPRDRQALVKKHAQTFLALCATDYSFAMFPPCMNTPGGSC

SEQ ID NO: 824012 - protein, 169 aa, Homo sapiens
MNYLDRYLSCVPTRKAQLQLLGAVCMLLASKLRETTPLTIEKLCIYTDHAVSPRQLRDWEVLVLGKLKWDLAAVIAHDFLAFILHRLSLPRDRQALVKKHAQTFLALCATDYTFAMYPPSMIATGSIGAAVQGLGACSMSGDELTELLAGITGTEVGECWVAGQQPLHS

SEQ ID NO: 824013 - protein, 357 aa, Homo sapiens; identical to SEQ ID NO: 824004

SEQ ID NO: 824014 - protein, 211 aa, Homo sapiens [sequence omitted]

SEQ ID NO: 824015 - protein, 357 aa, Homo sapiens; identical to SEQ ID NO: 824004

SEQ ID NO: 824016 - protein, 341 aa, Homo sapiens
ATVATSSRGAGRLSGKRRARGRRAGWGSAAQCQRQRQTRAPRSPARRLPWDSRARTPALPVRCPSMELLCCEGTRHAPRAGPDPRLLGDQRVLQSLLRLEERYVPRASYFQCVQREIKPHMRKMLAYWMLEVCEEQRCEEEVFPLAMNYLDRYLSCVPTRKAQLQLLGAVCMLLASKLRETTPLTIEKLCIYTDHAVSPRQLRDWEVLVLGKLKWDLAAVIAHDFLAFILHRLSLPRDRQALVKKHAQTFLALCATGLPAGLSGADRSCTQGEPQGSRSDQLQPSAQSPPGLQQPRAQPDQHSYRCHSHTPVALERPSGVATKQRRGRCHPPPCLQEPHHI

SEQ ID NO: 824017 - protein, 187 aa, Homo sapiens
PHVCNSEMGPGLGTHDEWTGVELPAFSRDLYWQDWEVLVLGKLKWDLAAVIAHDFLAFILHRLSLPRDRQALVKKHAQTFLALCATDYTFAMYPPSMIATGSIGAAVQGLGACSMSGDELTELLAGITGTEVDCLRACQEQIEAALRESLREAAQTSSSPAPKAPRGSSSQGPSQTSTPTDVTAIHL

SEQ ID NO: 824018 - protein, 112 aa, Homo sapiens
SARYEAWGVATDYTFAMYPPSMIATGSIGAAVQGLGACSMSGDELTELLAGITGTEVDCLRACQEQIEAALRESLREAAQTSSSPAPKAPRGSSSQGPSQTSTPTDVTAIHL

SEQ ID NO: 824019 - protein, 352 aa, Homo sapiens
MDFLRNLFSQTLSLGSQKERLLDELTLEGVARYMQSERCRRVICLVGAGISTSAGIPDFRSPSTGLYDNLEKYHLPYPEAIFEISYFKKHPEPFFALAKELYPGQFKPTICHYFMRLLKDKGLLLRCYTQNIDTLERIAGLEQEDLVEAHGTFYTSHCVSASCRHEYPLSWMKEKIFSEVTPKCEDCQSLVKPDIVFFGESLPARFFSCMQSDFLKVDLLLVMGTSLQVQPFASLISKAPLSTPRLLINKEKAGQSDPFLGMIMGLGGGMDFDSKKAYRDVAWLGECDQGCLALAELLGWKKELEDLVRREHASIDAQSGAGVPNPSTSASPKKSPPPAKDEARTTEREKPQ

SEQ ID NO: 824020 - protein, 112 aa, Homo sapiens
  misc_feature (111)..(111): Xaa can be any naturally occurring amino acid
MDFLRNLFSQTLSLGSQKERLLDELTLEGVARYMQSERCRRVICLVGAGISTSAGIPDFRSPSTGLYDNLEKYHLPYPEAIFEISYFKKHPEPLFAHYDTGLLTLWTVTRXN

SEQ ID NO: 824021 - protein, 352 aa, Homo sapiens; identical to SEQ ID NO: 824019

SEQ ID NO: 824022 - protein, 352 aa, Homo sapiens; identical to SEQ ID NO: 824019

SEQ ID NO: 824023 - protein, 352 aa, Homo sapiens; identical to SEQ ID NO: 824019

SEQ ID NO: 824024 - protein, 352 aa, Homo sapiens; identical to SEQ ID NO: 824019

SEQ ID NO: 824025 - protein, 352 aa, Homo sapiens; identical to SEQ ID NO: 824019

SEQ ID NO: 824026 - protein, 352 aa, Homo sapiens; identical to SEQ ID NO: 824019

SEQ ID NO: 824027 - protein, 352 aa, Homo sapiens; identical to SEQ ID NO: 824019

SEQ ID NO: 824028 - protein, 352 aa, Homo sapiens; identical to SEQ ID NO: 824019

SEQ ID NO: 824029 - protein, 352 aa, Homo sapiens; identical to SEQ ID NO: 824019

SEQ ID NO: 824030 - protein, 238 aa, Homo sapiens [sequence omitted]

SEQ ID NO: 824031 - protein, 331 aa, Homo sapiens
MDFLRNLFSQTLSLGSQKERLLDELTLEGVARYMQSERCRRVICLVGAGISTSAGIPDFRSPSTGLYDNLEKYHLPYPEAIFEISYFKKHPEPFFALAKELYPGQFKPTICHYFMRLLKDKGLLLRCYTQNIDTLERIAGLEQEDLVEAHGTFYTSHCVSASCRHEYPLSWMKEKIFSEVTPKCEDCQSLVKPDIVFFGESLPARFFSCMQSDFLKVDLLLVMGTSLQVQPFASLISKAPLSTPRLLINKEKAGQSDPFLGMIMGLGGGMDFDSKKAYRDVAWLGECDQGCPRTFNSSRTGSFGPPLCLPAPGGLWLSKPYLTYPSVGVGL

SEQ ID NO: 824032 - protein, 143 aa, Homo sapiens [sequence omitted]

SEQ ID NO: 824033 - protein, 283 aa, Homo sapiens
MDFLRNLFSQTLSLGSQKERLLDELTLEGVARYMQSERCRRVICLVGAGISTSAGIPDFRSPSTGLYDNLEKYHLPYPEAIFEISYFKKHPEPFFALAKELYPGQFKPTICHYFMRLLKDKGLLLRCYTQNIDTLERIAGLEQEDLVEAHGTFYTSHCVSASCRHEYPLSWMKEKIFSEVTPKCEDCQSLVKPDIVFFGESLPARFFSCMQSDFLKVDLLLVMGTSLQVQPFASLISKAPLSTPRLLINKEKAGQVRALLQAPVVTGSPFPLTLFLRGNPHCG

SEQ ID NO: 824034 - protein, 389 aa, Homo sapiens
MAEPDPSHPLETQAGKVQEAQDSDSDSEGGAAGGEADMDFLRNLFSQTLSLGSQKERLLDELTLEGVARYMQSERCRRVICLVGAGISTSAGIPDFRSPSTGLYDNLEKYHLPYPEAIFEISYFKKHPEPFFALAKELYPGQFKPTICHYFMRLLKDKGLLLRCYTQNIDTLERIAGLEQEDLVEAHGTFYTSHCVSASCRHEYPLSWMKEKIFSEVTPKCEDCQSLVKPDIVFFGESLPARFFSCMQSDFLKVDLLLVMGTSLQVQPFASLISKAPLSTPRLLINKEKAGQSDPFLGMIMGLGGGMDFDSKKAYRDVAWLGECDQGCLALAELLGWKKELEDLVRREHASIDAQSGAGVPNPSTSASPKKSPPPAKDEARTTEREKPQ

SEQ ID NO: 824035 - protein, 352 aa, Homo sapiens; identical to SEQ ID NO: 824019

SEQ ID NO: 824036 - protein, 352 aa, Homo sapiens; identical to SEQ ID NO: 824019

SEQ ID NO: 824037 - protein, 265 aa, Homo sapiens
MDFLRNLFSQTLSLGSQKERLLDELTLEGVARYMQSERCRRVICLVGAGISTSAGIPDFRSPSTGLYDNLEKYHLPYPEAIFEISYFKKHPEPFFALAKELYPGQFKPTICHYFMRLLKDKGLLLRCYTQNIDTLERIAGLEQEDLVEAHGTFYTSHCVSASCRHEYPLSWMKEKIFSEVTPKCEDCQSLVKPDIVFFGESLPARFFSCMQSDFLKVDLLLVMGTSLQVRTWPGWVNATRAAWPLLSSLDGRRSWRTLSGGSTPA

SEQ ID NO: 824038 - protein, 352 aa, Homo sapiens; identical to SEQ ID NO: 824019

SEQ ID NO: 824039 - protein, 352 aa, Homo sapiens; identical to SEQ ID NO: 824019

SEQ ID NO: 824040 - protein, 352 aa, Homo sapiens; identical to SEQ ID NO: 824019

SEQ ID NO: 824041 - protein, 375 aa, Homo sapiens
MDFLRNLFSQTLSLGSQKERLLDELTLEGVARYMQSERCRRVICLVGAGISTSAGIPDFRSPSTGLYDNLEKYHLPYPEAIFEISYFKKHPEPFFALAKELYPGQFKFLICDLGIAVVSPRRGCCDGSLGPTICHYFMRLLKDKGLLLRCYTQNIDTLERIAGLEQEDLVEAHGTFYTSHCVSASCRHEYPLSWMKEKIFSEVTPKCEDCQSLVKPDIVFFGESLPARFFSCMQSDFLKVDLLLVMGTSLQVQPFASLISKAPLSTPRLLINKEKAGQSDPFLGMIMGLGGGMDFDSKKAYRDVAWLGECDQGCLALAELLGWKKELEDLVRREHASIDAQSGAGVPNPSTSASPKKSPPPAKDEARTTEREKPQ

SEQ ID NO: 824042 - protein, 386 aa, Homo sapiens
  misc_feature (6)..(6): Xaa can be any naturally occurring amino acid
  misc_feature (12)..(12): Xaa can be any naturally occurring amino acid
  misc_feature (25)..(25): Xaa can be any naturally occurring amino acid
  misc_feature (27)..(27): Xaa can be any naturally occurring amino acid
  misc_feature (30)..(30): Xaa can be any naturally occurring amino acid
  misc_feature (36)..(37): Xaa can be any naturally occurring amino acid
  misc_feature (39)..(39): Xaa can be any naturally occurring amino acid
  misc_feature (41)..(42): Xaa can be any naturally occurring amino acid
  misc_feature (44)..(44): Xaa can be any naturally occurring amino acid
  misc_feature (46)..(46): Xaa can be any naturally occurring amino acid
  misc_feature (51)..(51): Xaa can be any naturally occurring amino acid
  misc_feature (54)..(55): Xaa can be any naturally occurring amino acid
  misc_feature (59)..(59): Xaa can be any naturally occurring amino acid
  misc_feature (61)..(62): Xaa can be any naturally occurring amino acid
  misc_feature (67)..(69): Xaa can be any naturally occurring amino acid
  misc_feature (73)..(73): Xaa can be any naturally occurring amino acid
  misc_feature (76)..(78): Xaa can be any naturally occurring amino acid
  misc_feature (81)..(81): Xaa can be any naturally occurring amino acid
  misc_feature (95)..(95): Xaa can be any naturally occurring amino acid
  misc_feature (98)..(98): Xaa can be any naturally occurring amino acid
  misc_feature (101)..(102): Xaa can be any naturally occurring amino acid
  misc_feature (105)..(105): Xaa can be any naturally occurring amino acid
  misc_feature (110)..(110): Xaa can be any naturally occurring amino acid
  misc_feature (113)..(113): Xaa can be any naturally occurring amino acid
  misc_feature (116)..(116): Xaa can be any naturally occurring amino acid
DPSHPXADPGRXLCRRLRPQPSPSXGXAAXGAAALXXLXPXXSXPXRLGPXPAXXPAAXPXXGVRPXXXERPXSPXXXSGXTPDSPHPPPPRLSXSIXRPXXPPXAVPPXLPXAIXELPYFHKHPEPFFALAKELYPGQFKPTICHYFMRLLKDKGLLLRCYTQNIDTLERIAGLEQEDLVEAHGTFYTSHCVSASCRHEYPLSWMKEKIFSEVTPKCEDCQSLVKPDIVFFGESLPARFFSCMQSDFLKVDLLLVMGTSLQVQPFASLISKAPLSTPRLLINKEKAGQSDPFLGMIMGLGGGMDFDSKKAYRDVAWLGECDQGCLALAELLGWKKELEDLVRREHASIDAQSGAGVPNPSTSASPKKSPPPAKDEARTTEREKPQ

SEQ ID NO: 824043 - protein, 283 aa, Homo sapiens; identical to SEQ ID NO: 824033

SEQ ID NO: 824044 - protein, 261 aa, Homo sapiens
MDFLRNLFSQTLSLGSQKERLLDELTLEGVARYMQSERCRRVICLVGAGISTSAGIPDFRSPSTGLYDNLEKYHLPYPEAIFEISYFKKHPEPFFALAKELYPGQFKPTICHYFMRLLKDKGLLLRCYTQNIDTLERIAGLEQEDLVEAHGTFYTSHCVSASCRHEYPLSWMKEKIFSEVTPKCEDCQSLVKPDIVFFGESLPARFFSCMQSDFLKVDLLLVMGTSLQVLGSSWRHPFNLAGLTGKVAVDLLGDMARGLDG

SEQ ID NO: 824045 - protein, 199 aa, Homo sapiens
MTEITAEGNASTTTTVIDSKNGSVPKSPGKVLKRTVTEDIVTTFSSPAAWLLVIALIITWSAVAIVMFDLVDYKNFSASSIAKIGSDPLKLVRDAMEETTDWIYGFFSLLSDIISSEDEEDDDGDEDTDKGEIDEPPLRKKEIHKDKTEKQEKPERKIQTKGFPQERKAEQLRKKLKKPPGNIGKETEKEGEKRTWEGE

SEQ ID NO: 824046 - protein, 486 aa, Homo sapiens
  misc_feature (486)..(486): Xaa can be any naturally occurring amino acid
MTEITAEGNASTTTTVIDSKNGSVPKSPGKVLKRTVTEDIVTTFSSPAAWLLVIALIITWSAVAIVMFDLVDYKNFSASSIAKIGSDPLKLVRDAMEETTDWIYGFFSLLSDIISSEDEEDDDGDEDTDKGEIDEPPLRKKEIHKDKTEKQEKPERKIQTKVTHKEKEKGKEKVREKEKPEKKATHKEKIEKKEKPETKTVAKEQKKAKTAEKSEEKTKKEVKGGKQEKVKQTAAKVKEVQKTPSKPKEKEDKEKAAVSKHEQKDQYAFCRYMIDIFVHGDLKPGQSPAIPPPLPTEQASRPTPASPALEEKEGEKKKAEKKVTSETKKKEKKKISKRKVRRKLPLMWKKKEPGKASETKQGTVKIAAQAAAKKDEKKEDSKKTKKPAEVEQPKGKKQEKKEKHVEPAKSPKKEHSVPSDKQVKAKTERAKEEIGAVSSKKAVPGKKEEKTTRQWSQKLDNETSATTSPILEDKELIRARPESPGX

SEQ ID NO: 824047 - protein, 167 aa, Homo sapiens
MTEITAEGNASTTTTVIDSKNGSVPKSPGKVLKRTVTEDIVTTFSSPAAWLLVIALIITWSAVAIVMFDLVDYKNFSASSIAKIGSDPLKLVRDAMEETTDWIYGFFSLLSDIISSEDEEDDDGDEDTDKGEIDEPPLRKKEIHKDKTEKQEKPERKIQTKEVGHSS

SEQ ID NO: 824048 - protein, 312 aa, Homo sapiens
MTEITAEGNASTTTTVIDSKNGSVPKSPGKVLKRTVTEDIVTTFSSPAAWLLVIALIITWSAVAIVMFDLVDYKNFSASSIAKIGSDPLKLVRDAMEETTDWIYGFFSLLSDIISSEDEEDDDGDEDTDKGEIDEPPLRKKEIHKDKTEKQEKPERKIQTKVTHKEKEKGKEKVREKEKPEKKATHKEKIEKKEKPETKTVAKEQKKAKTAEKSEEKTKKEVKGGKQEKVKQTAAKVKEVQKTPSKPKEKEDKEKAAVSKHEQKGFPGPGIRNSSYYCQYIKGQINAWNDLRTSLLPIPYLSCGKMCSNFNN

SEQ ID NO: 824049 - protein, 295 aa, Homo sapiens
MTEITAEGNASTTTTVIDSKNGSVPKSPGKVLKRTVTEDIVTTFSSPAAWLLVIALIITWSAVAIVMFDLVDYKNFSASSIAKIGSDPLKLVRDAMEETTDWIYGFFSLLSDIISSEDEEDDDGDEDTDKGEIDEPPLRKKEIHKDKTEKQEKPERKIQTKVTHKEKEKGKEKVREKEKPEKKATHKEKIEKKEKPETKTVAKEQKKAKTAEKSEEKTKKEVKGGKQEKVKQTAAKVKEVQKTPSKPKEKEDKEKAAVSKHEQKDQYAFCRYMIDIFVHGDLKPGIPSNSCTCLF

SEQ ID NO: 824050 - protein, 185 aa, Homo sapiens
MTEITAEGNASTTTTVIDSKNGSVPKSPGKVLKRTVTEDIVTTFSSPAAWLLVIALIITWSAVAIVMFDLVDYKNFSASSIAKIGSDPLKLVRDAMEETTDWIYGFFSLLSDIISSEDEEDDDGDEDTDKGEIDEPPLRKKEIHKDKTEKQEKPERKIQTKDWSANSSTIRTLKLTQLKPIYICT

SEQ ID NO: 824051 - protein, 487 aa, Homo sapiens
  misc_feature (487)..(487): Xaa can be any naturally occurring amino acid
MTEITAEGNASTTTTVIDSKNGSVPKSPGKVLKRTVTEDIVTTFSSPAAWLLVIALIITWSAVAIVMFDLVDYKNFSASSIAKIGSDPLKLVRDAMEETTDWIYGFFSLLSDIISSEDEEDDDGDEDTDKGEIDEPPLRKKEIHKDKTEKQEKPERKIQTKVTHKEKEKGKEKVREKEKPEKKATHKEKIEKKEKPETKTVAKEQKKAKTAEKSEEKTKKEVKGGKQEKVKQTAAKVKEVQKTPSKPKEKEDKEKAAVSKHEQKDQYAFCRYMIDIFVHGDLKPGQSPAIPPPLPTEQASRPTPASPALEEKEGEKKKAEKKVTSETKKKEKKKISKRKVRRKLPLMWKKKEPGKASETKQGTVKIAAQAAAKKDEKKEDSKKTKKPAEVEQPKGKKQEKKEKHVEPAKSPKKEHSVPSDKQVKAKTERAKEEIGAVSSKKSCTWKRRKRKQPRQWSQKLDNETSATTSPILEDKELIRARPESPGX

SEQ ID NO: 824052 - protein, 487 aa, Homo sapiens; identical to SEQ ID NO: 824051
  misc_feature (487)..(487): Xaa can be any naturally occurring amino acid

SEQ ID NO: 824053 - protein, 351 aa, Homo sapiens
MTEITAEGNASTTTTVIDSKNGSVPKSPGKVLKRTVTEDIVTTFSSPAAWLLVIALIITWSAVAIVMFDLVDYKNFSASSIAKIGSDPLKLVRDAMEETTDWIYGFFSLLSDIISSEDEEDDDGDEDTDKGEIDEPPLRKKEIHKDKTEKQEKPERKIQTKVTHKEKEKGKEKVREKEKPEKKATHKEKIEKKEKPETKTVAKEQKKAKTAEKSEEKTKKEVKGGKQEKVKQTAAKVKEVQKTPSKPKEKEDKEKAAVSKHEQKDQYAFCRYMIDIFVHGDLKPGQSPAIPPPLPTEQASRPTPASPALEEKKGNRKGEKKSSETKKKKRDYQEGEERWWEKERKLNKRRN

SEQ ID NO: 824054 - protein, 417 aa, Homo sapiens
  misc_feature (417)..(417): Xaa can be any naturally occurring amino acid
MTEITAEASSIAKIGSDPLKLVRDAMEETTDWIYGFFSLLSDIISSEDEEDDDGDEDTDKGEIDEPPLRKKEIHKDKTEKQEKPERKIQTKVTHKEKEKGKEKVREKEKPEKKATHKEKIEKKEKPETKTVAKEQKKAKTAEKSEEKTKKEVKGGKQEKVKQTAAKVKEVQKTPSKPKEKEDKEKAAVSKHEQKDQYAFCRYMIDIFVHGDLKPGQSPAIPPPLPTEQASRPTPASPALEEKEGEKKKAEKKVTSETKKKEKKKISKRKVRRKLPLMWKKKEPGKASETKQGTVKIAAQAAAKKDEKKEDSKKTKKPAEVEQPKGKKQEKKEKHVEPAKSPKKEHSVPSDKQVKAKTERAKEEIGAVSSKKSCTWKRRKRKQPRQWSQKLDNETSATTSPILEDKELIRARPESPGX

SEQ ID NO: 824055 - protein, 188 aa, Homo sapiens
RKARAGIPGVVVSCLDVLEQSDHTAAWRNPGTMGASRLYTLVLVLQPQRVLLGMKKRGFGAGRWNGFGGKVQEGETIEDGARRELQEESGLTVDALHKVGQIVFEFVGEPELMDVHVFCTDSIQGTPVESDEMRPCWFQLDQIPFKDMWPDDSYWFPLLLQKKKFHGYFKFQGQDTILDYTLREVDTV

SEQ ID NO: 824056 - protein, 171 aa, Homo sapiens
SEATPPEAAVQNPGTMGASRLYTLVLVLQPQRVLLGMKKRGFGAGRWNGFGGKVQEGETIEDGARRELQEESGLTVDALHKVGQIVFEFVGEPELMDVHVFCTDSIQGTPVESDEMRPCWFQLDQIPFKDMWPDDSYWFPLLLQKKKFHGYFKFQGQDTILDYTLREVDTV

SEQ ID NO: 824057 - protein, 171 aa, Homo sapiens
MGEPEGSWSGKNPGTMGASRLYTLVLVLQPQRVLLGMKKRGFGAGRWNGFGGKVQEGETIEDGARRELQEESGLTVDALHKVGQIVFEFVGEPELMDVHVFCTDSIQGTPVESDEMRPCWFQLDQIPFKDMWPDDSYWFPLLLQKKKFHGYFKFQGQDTILDYTLREVDTV

SEQ ID NO: 824058 - protein, 171 aa, Homo sapiens; identical to SEQ ID NO: 824056

SEQ ID NO: 824059 - protein, 181 aa, Homo sapiens
MKEVGSVPTLPRAGLETVDKWLDSTGPGLSLVHRGHWARTAFLPPEAPHHLRAPPQSLSTKISVFKVQVDSEAAARELQEESGLTVDALHKVGQIVFEFVGEPELMDVHVFCTDSIQGTPVESDEMRPCWFQLDQIPFKDMWPDDSYWFPLLLQKKKFHGYFKFQGQDTILDYTLREVDTV

SEQ ID NO: 824060 - protein, 131 aa, Homo sapiens
MGLGESGAGSSKETRRAGGLGERQGERGGGLGETRSKSQKFTLETVASGRNRSVSGQSTRAWCETKPQTHLPCLTCLRHQDPVSVKWERFPCPPRRACDEDVAHFFSAPLLKPLGEHTDRQAEGLPPHGSV

SEQ ID NO: 824061 - protein, 200 aa, Homo sapiens
MKEVGSVPTLPRAGLETVDKWLDSTGPGLSLVHRGHWARTAFLPPEAPHHLRAPPQSLSTKISVFKVQVDSEAQPGRDQIMHSRGHPPGSPIHPGGSWAVCRCPAPPPCHRVGMAPCPDGLPPLPTSARRELQEESGLTVDALHKVGQIVFEFVGEPELMDVHVFCTDSIQGTPVESDGESHRACSPSPLCGSHLLAGRK

SEQ ID NO: 824062 - protein, 171 aa, Homo sapiens; identical to SEQ ID NO: 824057

SEQ ID NO: 824063 - protein, 77 aa, Homo sapiens
RGSPHHNIARQHSGTPVESDEMRPCWFQLDQIPFKDMWPDDSYWFPLLLQKKKFHGYFKFQGQDTILDYTLREVDTV

SEQ ID NO: 824064 - protein, 156 aa, Homo sapiens
MGASRLYTLVLVLQPQRVLLGMKKRGFGAGRWNGFGGKVQEGETIEDGARRELQEESGLTVDALHKVGQIVFEFVGEPELMDVHVFCTDSIQGTPVESDEMRPCWFQLDQIPFKDMWPDDSYWFPLLLQKKKFHGYFKFQGQDTILDYTLREVDTV

SEQ ID NO: 824065 - protein, 156 aa, Homo sapiens; identical to SEQ ID NO: 824064

SEQ ID NO: 824066 - protein, 165 aa, Homo sapiens
MGASRLYTLVLVLQPQRVLLGMKKRGFGAGRWNGFGGKVQEGETIEDGARRELQEESGLTVDALHKVGQIVFEFVGEPELMDVHVFCTDSIQGTPVESDVPPLPPLVTEMRPCWFQLDQIPFKDMWPDDSYWFPLLLQKKKFHGYFKFQGQDTILDYTLREVDTV

SEQ ID NO: 824067 - protein, 206 aa, Homo sapiens
MGAEWELGAEAGGSLLLCAALLAAGCALGLRLGRGQGAADRGALIWLCYDALVHFALEGPFVYLSLVGNVANSDGLIASLWKEYGKADARWVYFDPTIVSVEILTVALDGSLALFLIYAIVKEKYYRHFLQITLCVCELYGCWMTFLPEWLTRSPNLNTSNWLYCWLYLFFFNGVWVLIPGLLLWQSWLELKKMHQKETSSVKKFQ

SEQ ID NO: 824068 - protein, 246 aa, Homo sapiens
MHAGTGWGFWILGLLCVVKPEALALSGSWVACCDWLCSVCLSVLPAVSLCCAVCCCPCVLCCSVCPAVCSAVLCVTCCVALIWLCYALLCALLLLECEGPFVYLSLVGNVANSDGLIASLWKEYGKADARWVYFDPTIVSVEILTVALDGSLALFLIYAIVKEKYYRHFLQITLCVCELYGCWMTFLPEWLTRSPNLNTSNWLYCWLYLFFFNGVWVLIPGLLLWQSWLELKKMHQKETSSVKKFQ

SEQ ID NO: 824069 - protein, 121 aa, Homo sapiens
GPDPAGEPRPSPDRLGQSAPLLLGHPAPPLPGQPRPVVSLPAFLCRMVLGRWRRKPEAWALSGSWGPRLAVRCCCAPRCWRRAAPWACAWAAGRGRRTAGRSSGSATTRWCTSRWERIWQS

SEQ ID NO: 824070 - protein, 164 aa, Homo sapiens
PPTLPRARREHALPKLVLIGCMHSGVGVASMGAEWELGAEAGGSLLLCAALLAAGCALGLRLGRGQGAADRGALIWLCYDALVHFALEGPFVYLSLVGNVANSDGLIASLWKEYGKADARWVYFDPTIVSVEILTVALDGSLALFLIYAIVKEKYYRDRVAWGE

SEQ ID NO: 824071 - protein, 206 aa, Homo sapiens; identical to SEQ ID NO: 824067

SEQ ID NO: 824072 - protein, 206 aa, Homo sapiens; identical to SEQ ID NO: 824067

SEQ ID NO: 824073 - protein, 152 aa, Homo sapiens
MGAEWELGAEAGGSLLLCAALLAAGCALGLRLGRGQGAADRGALIWLCYDALVHFALEGPFVYLSLVGNVANSDGLIASLCESRSVPQAGAQWHHLGSLQAPPPRFTPFSCLSLPSSWDYRRPPPRLANFFVFLVETGFHHVSQDGLDLLTS

SEQ ID NO: 824074 - protein, 102 aa, Homo sapiens
MGAEWELGAEAGGSLLLCAALLAAGCALGLRLGRGQGAADRGALIWLCYDALVHFALAFPADHPVRVRAVWLLDDLPPRVAHQKPQPQHQQLAVLLALPVFF

SEQ ID NO: 824075 - protein, 134 aa, Homo sapiens
MGAEWELGAEAGGSLLLCAALLAAGCALGLRLGRGQGAADRGALIWLCYDALVHFALEGPFVYLSLVGNVANSDGLIASLWKEYGKADARWVYFDPTIVSVEILTVALDGSLALFLIYAIVKEKYYRDRVAWGE

SEQ ID NO: 824076 - protein, 123 aa, Homo sapiens
GPDPAGEPRPSPDRLGQSAPLLLGHPAPPLPGQPRPVVSLPAFLCRMVLGRWRRKPEAWALSGSWGPRLAVRCCCAPRCWRRAAPWACAWAAGRGRRTAGRSSGSATTRWCTSRWKALLSTCL

SEQ ID NO: 824077 - protein, 206 aa, Homo sapiens; identical to SEQ ID NO: 824067

SEQ ID NO: 824078 - protein, 551 aa, Homo sapiens
MAGDLSAGFFMEELNTYRQKQGVVLKYQELPNSGPPHDRRFTFQVIIDGREFPEGEGRSKKEAKNAAAKLAVEILNKEKKAVSPLLLTTTNSSEGLSMGNYIGLINRIAQKKRLTVNYEQCASGVHGPEGFHYKCKMGQKEYSIGTGSTKQEAKQLAAKLAYLQILSEETSVKSDYLSSGSFATTCESQSNSLVTSTLASESSSEGDFSADTSEINSNSDSLNSSSLLMNGLRNNQRKAKRSLAPRFDLPDMKETKYTVDKRFGMDFKEIELIGSGGFGQVFKAKHRIDGKTYVIKRVKYNNEKAEREVKALAKLDHVNIVHYNGCWDGFDYDPETSDDSLESSDYDPENSKNSSRSKTKCLFIQMEFCDKGTLEQWIEKRRGEKLDKVLALELFEQITKGVDYIHSKKLIHRDLKPSNIFLVDTKQVKIGDFGLVTSLKNDGKRTRSKGTLRYMSPEQISSQDYGKEVDLYALGLILAELLHVCDTAFETSKFFTDLRDGIISDIFDKKEKTLLQKLLSKKPEDRPNTSEILRTLTVWKKSPEKNERHTC

SEQ ID NO: 824079 - protein, 191 aa, Homo sapiens
  misc_feature (189)..(189): Xaa can be any naturally occurring amino acid
MAGDLSAGFFMEELNTYRQKQGVVLKYQELPNSGPPHDRRFTFQVIIDGREFPEGEGRSKKEAKNAAAKLAVEILNKEKKAVSPLLLTTTNSSEGLSMGNYIGLINRIAQKKRLTVNYEQCASGVHGPEGFHYKCKMGQKEYSIGTGSTKQEAKQLAAKLAYLQILSEETSVENLAYLVPLGSFWLTYXGG

SEQ ID NO: 824080 - protein, 728 aa, Homo sapiens
MCKKALFAGEQEFNQKGQIPCHHLTLQTPPSSHLSSPLLQQGQNQQQGLQSLGQQSGYSPTSRYTGKLANTLGNDVFNVFSIQLTDNLVSRSSSASIPTLSKIFLMSLALGEELPPEGSQQVGGDVAHRGGVCGGGGGEVSRVRPSCRIRHENQHPHFRDYLRAFWTKLPTRIREEEMAGDLSAGFFMEELNTYRQKQGVVLKYQELPNSGPPHDRRFTFQVIIDGREFPEGEGRSKKEAKNAAAKLAVEILNKEKKAVSPLLLTTTNSSEGLSMGNYIGLINRIAQKKRLTVNYEQCASGVHGPEGFHYKCKMGQKEYSIGTGSTKQEAKQLAAKLAYLQILSEETSVKSDYLSSGSFATTCESQSNSLVTSTLASESSSEGDFSADTSEINSNSDSLNSSSLLMNGLRNNQRKAKRSLAPRFDLPDMKETKYTVDKRFGMDFKEIELIGSGGFGQVFKAKHRIDGKTYVIKRVKYNNEKAEREVKALAKLDHVNIVHYNGCWDGFDYDPETSDDSLESSDYDPENSKNSSRSKTKCLFIQMEFCDKGTLEQWIEKRRGEKLDKVLALELFEQITKGVDYIHSKKLIHRDLKPSNIFLVDTKQVKIGDFGLVTSLKNDGKRTRSKGTLRYMSPEQISSQDYGKEVDLYALGLILAELLHVCDTAFETSKFFTDLRDGIISDIFDKKEKTLLQKLLSKKPEDRPNTSEILRTLTVWKKSPEKNERHTC

SEQ ID NO: 824081 - protein, 551 aa, Homo sapiens; identical to SEQ ID NO: 824078

SEQ ID NO: 824082 - protein, 571 aa, Homo sapiens
MFCEHHSFKCLFHCRIREEEMAGDLSAGFFMEELNTYRQKQGVVLKYQELPNSGPPHDRRFTFQVIIDGREFPEGEGRSKKEAKNAAAKLAVEILNKEKKAVSPLLLTTTNSSEGLSMGNYIGLINRIAQKKRLTVNYEQCASGVHGPEGFHYKCKMGQKEYSIGTGSTKQEAKQLAAKLAYLQILSEETSVKSDYLSSGSFATTCESQSNSLVTSTLASESSSEGDFSADTSEINSNSDSLNSSSLLMNGLRNNQRKAKRSLAPRFDLPDMKETKYTVDKRFGMDFKEIELIGSGGFGQVFKAKHRIDGKTYVIKRVKYNNEKAEREVKALAKLDHVNIVHYNGCWDGFDYDPETSDDSLESSDYDPENSKNSSRSKTKCLFIQMEFCDKGTLEQWIEKRRGEKLDKVLALELFEQITKGVDYIHSKKLIHRDLKPSNIFLVDTKQVKIGDFGLVTSLKNDGKRTRSKGTLRYMSPEQISSQDYGKEVDLYALGLILAELLHVCDTAFETSKFFTDLRDGIISDIFDKKEKTLLQKLLSKKPEDRPNTSEILRTLTVWKKSPEKNERHTC

SEQ ID NO: 824083 - protein, 519 aa, Homo sapiens
RILLPSGRFTFQVIIDGREFPEGEGRSKKEAKNAAAKLAVEILNKEKKAVSPLLLTTTNSSEGLSMGNYIGLINRIAQKKRLTVNYEQCASGVHGPEGFHYKCKMGQKEYSIGTGSTKQEAKQLAAKLAYLQILSEETSVKSDYLSSGSFATTCESQSNSLVTSTLASESSSEGDFSADTSEINSNSDSLNSSSLLMNGLRNNQRKAKRSLAPRFDLPDMKETKYTVDKRFGMDFKEIELIGSGGFGQVFKAKHRIDGKTYVIKRVKYNNEKAEREVKALAKLDHVNIVHYNGCWDGFDYDPETSDDSLESSDYDPENSKNSSRSKTKCLFIQMEFCDKGTLEQWIEKRRGEKLDKVLALELFEQITKGVDYIHSKKLIHRDLKPSNIFLVDTKQVKIGDFGLVTSLKNDGKRTRSKGTLRYMSPEQISSQDYGKEVDLYALGLILAELLHVCDTAFETSKFFTDLRDGIISDIFDKKEKTLLQKLLSKKPEDRPNTSEILRTLTVWKKSPEKNERHTC

SEQ ID NO: 824084 - protein, 417 aa, Homo sapiens
MAGDLSAGFFMEELNTYRQKQGVVLKYQELPNSGPPHDRRFTFQVIIDGREFPEGEGRSKKEAKNAAAKLAVEILNKEKKAVSPLLLTTTNSSEGLSMGNYIGLINRIAQKKRLTVNYEQCASGVHGPEGFHYKCKMGQKEYSIGTGSTKQEAKQLAAKLAYLQILSEETSVKSDYLSSGSFATTCESQSNSLVTSTLASESSSEGDFSADTSEINSNSDSLNSSSLLMNGLRNNQRKAKRSLAPRFDLPDMKETKYTVDKRFGMDFKEIELIGSGGFGQVFKAKHRIDGKTYVIKRVKYNNEKAEREVKALAKLDHVNIVHYNGCWDGFDYDPETSDDSLESSDYDPENSKNSSRSKTKCLFIQMEFCDKGTLEQWIEKRRGEKLDKVLALELFEQITKGVDYIHSKKLIHRDLKP

SEQ ID NO: 824085 - protein, 241 aa, Homo sapiens [sequence omitted]

SEQ ID NO: 824086 - protein, 551 aa, Homo sapiens; identical to SEQ ID NO: 824078

SEQ ID NO: 824087 - protein, 630 aa, Homo sapiens
QTRACARGGRAAAGKAESKGKTKLRTSSPEAAGLRPAAAAAAAAAQVCFSGGLQNQHPHFRDYLRAFWTKLPTRIREEEMAGDLSAGFFMEELNTYRQKQGVVLKYQELPNSGPPHDRRFTFQVIIDGREFPEGEGRSKKEAKNAAAKLAVEILNKEKKAVSPLLLTTTNSSEGLSMGNYIGLINRIAQKKRLTVNYEQCASGVHGPEGFHYKCKMGQKEYSIGTGSTKQEAKQLAAKLAYLQILSEETSVKSDYLSSGSFATTCESQSNSLVTSTLASESSSEGDFSADTSEINSNSDSLNSSSLLMNGLRNNQRKAKRSLAPRFDLPDMKETKYTVDKRFGMDFKEIELIGSGGFGQVFKAKHRIDGKTYVIKRVKYNNEKAEREVKALAKLDHVNIVHYNGCWDGFDYDPETSDDSLESSDYDPENSKNSSRSKTKCLFIQMEFCDKGTLEQWIEKRRGEKLDKVLALELFEQITKGVDYIHSKKLIHRDLKPSNIFLVDTKQVKIGDFGLVTSLKNDGKRTRSKGTLRYMSPEQISSQDYGKEVDLYALGLILAELLHVCDTAFETSKFFTDLRDGIISDIFDKKEKTLLQKLLSKKPEDRPNTSEILRTLTVWKKSPEKNERHTC

SEQ ID NO: 824088 - protein, 551 aa, Homo sapiens; identical to SEQ ID NO: 824078

SEQ ID NO: 824089 - protein, 358 aa, Homo sapiens
MAGDLSAGFFMEELNTYRQKQGVVLKYQELPNSGPPHDRRFTFQVIIDGREFPEGEGRSKKEAKNAAAKLAVEILNKEKKAVSPLLLTTTNSSEGLSMGNYIGLINRIAQKKRLTVNYEQCASGVHGPEGFHYKCKMGQKEYSIGTGSTKQEAKQLAAKLAYLQILSEETSVKSDYLSSGSFATTCESQSNSLVTSTLASESSSEGDFSADTSEINSNSDSLNSSSLLMNGLRNNQRKAKRSLAPRFDLPDMKETKYTVDKRFGMDFKEIELIGSGGFGQVFKAKHRIDGKTYVIKRVKYNNEKAEREVKALAKLDHVNIVHYNGCWDGFDYDPETSDDSLESSDYDPENSKNSSRMD

SEQ ID NO: 824090 - protein, 115 aa, Homo sapiens
CAPVFLFPFSSRLPYPPSLYNLKISSQDYGKEVDLYALGLILAELLHVCDTAFETSKFFTDLRDGIISDIFDKKEKTLLQKLLSKKPEDRPNTSEILRTLTVWKKSPEKNERHTC

SEQ ID NO: 824091 - protein, 1185 aa, Homo sapiens
MSLLNPVLLPPKVKAYLSQGERFIKWDDETTVASPVILRVDPKGYYLYWTYQSKEMEFLDITSIRDTRFGKFAKMPKSQKLRDVFNMDFPDNSFLLKTLTVVSGPDMVDLTFHNFVSYKENVGKAWAEDVLALVKHPLTANASRSTFLDKILVKLKMQLNSEGKIPVKNFFQMFPADRKRVEAALSACHLPKGKNDAINPEDFPEPVYKSFLMSLCPRPEIDEIFTSYHAKAKPYMTKEHLTKFINQKQRDSRLNSLLFPPARPDQVQGLIDKYEPSGINAQRGQLSPEGMVWFLCGPENSVLAQDKLLLHHDMTQPLNHYFINSSHNTYLTAGQFSGLSSAEMYRQVLLSGCRCVELDCWKGKPPDEEPIITHGFTMTTDIFFKEAIEAIAESAFKTSPYPIILSFENHVDSPRQQAKMAEYCRTIFGDMLLTEPLEKFPLKPGVPLPSPEDLRGKILIKNKKNQFSGPTSSSKDTGGEAEGSSPPSAPAGEGTVWAGEEGTELEEEEVEEEEEEESGNLDEEEIKKMQSDEGTAGLEVTAYEEMSSLVNYIQPTKFVSFEFSAQKNRSYVISSFTELKAYDLLSKASVQFVDYNKRQMSRIYPKGTRMDSSNYMPQMFWNAGCQMVALNFQTMDLPMQQNMAVFEFNGQSGYLLKHEFMRRPDKQFNPFSVDRIDVVVATTLSITVISGQFLSERSVRTYVEVELFGLPGDPKRRYRTKLSPSTNSINPVWKEEPFVFEKILMPELASLRVAVMEEGNKFLGHRIIPINALNSGYHHLCLHSESNMPLTMPALFIFLEMKDYIPGAWADLTVALANPIKFFSAHDTKSVKLKEAMGGLPEKPFPLASPVASQVNGALAPTSNGSPAARAGAREEAMKEAAEPRTASLEELRELKGVVKLQRRHEKELRELERRGARRWEELLQRGAAQLAELGPPGVGGVGACKLGPGKGSRKKRSLPREESAGAAPGEGPEGVDGRVRELKDRLELELLRQGEEQYECVLKRKEQHVAEQISKMMELAREKQAAELKALKETSENDTKEMKKKLETKRLERIQGMTKVTTDKMAQERLKREINNSHIQEVVQVIKQMTENLERHQEKLEEKQAACLEQIREMEKQFQKEALAEYEARMKGLEAEVKESVRACLRTCFPSEAKDKPERACECPPELCEQDPLIAKADAQESRL

SEQ ID NO: 824092 - protein, 199 aa, Homo sapiens
MSLLNPVLLPPKVKAYLSQGERFIKWDDETTVASPVILRVDPKGYYLYWTYQSKEMEFLDITSIRDTRFGKFAKMPKSQKLRDVFNMDFPDNSFLLKTLTVVSGPDMVDLTFHNFVSYKENVGKAWAEDVLALVKHPLTANASRSTFLDKILVKLKMQLNSEGKIPVKNFFQMFPADRKRVEAALSACHLPKGKPGGAR

SEQ ID NO: 824093 - protein, 707 aa, Homo sapiens
MSRIPSIMCAQEGIQLHFYKVRTLRSDRNCPEITVMERVVATTTSMRSTEKGLNCLSGRRMKLMLEEMSSLVNYIQPTKFVSFEFSAQKNRSYVISSFTELKAYDLLSKASVQFVDYNKRQMSRIYPKGTRMDSSNYMPQMFWNAGCQMVALNFQTMDLPMQQNMAVFEFNGQSGYLLKHEFMRRPDKQFNPFSVDRIDVVVATTLSITVISGQFLSERSVRTYVEVELFGLPGDPKRRYRTKLSPSTNSINPVWKEEPFVFEKILMPELASLRVAVMEEGNKFLGHRIIPINALNSGYHHLCLHSESNMPLTMPALFIFLEMKDYIPGAWADLTVALANPIKFFSAHDTKSVKLKEAMGGLPEKPFPLASPVASQVNGALAPTSNGSPAARAGAREEAMKEAAEPRTASLEELRELKGVVKLQRRHEKELRELERRGARRWEELLQRGAAQLAELGPPGVGGVGACKLGPGKGSRKKRSLPREESAGAAPGEGPEGVDGRVRELKDRLELELLRQGEEQYECVLKRKEQHVAEQISKMMELAREKQAAELKALKETSENDTKEMKKKLETKRLERIQGMTKVTTDKMAQERLKREINNSHIQEVVQVIKQMTENLERHQEKLEEKQAACLEQIREMEKQFQKEALAEYEARMKGLEAEVKESVRACLRTCFPSEAKDKPERACECPPELCEQDPLIAKADAQESRL

SEQ ID NO: 824094 - protein, 961 aa, Homo sapiens
MSLLNPVLLPPKVKAYLSQGERFIKWDDETTVASPVILRVDPKGYYLYWTYQSKEMEFLDITSIRDTRFGKFAKMPKSQKLRDVFNMDFPDNSFLLKTLTVVSGPDMVDLTFHNFVSYKENVGKAWAEDVLALVKHPLTANASRSTFLDKILVKLKMQLNSEGKIPVKNFFQMFPADRKRVEAALSACHLPKGKNDAINPEDFPEPVYKSFLMSLCPRPEIDEIFTSYHAKAKPYMTKEHLTKFINQKQRDSRLNSLLFPPARPDQVQGLIDKYEPSGINAQRGQLSPEGMVWFLCGPENSVLAQDKLLLHHDMTQPLNHYFINSSHNTYLTAGQFSGLSSAEMYRQVLLSGCRCVELDCWKGKPPDEEPIITHGFTMTTDIFFKEAIEAIAESAFKTSPYPIILSFENHVDSPRQQAKMAEYCRTIFGDMLLTEPLEKFPLKPGVPLPSPEDLRGKILIKNKKNQFSGPTSSSKDTGGEAEGSSPPSAPAGEGTVWAGEEGTELEEEEVEEEEEEESGNLDEEEIKKMQSDEGTAGLEVTAYEEMSSLVNYIQPTKFVSFEFSAQKNRSYVISSFTELKAYDLLSKASVQFVDYNKRQMSRIYPKGTRMDSSNYMPQMFWNAGCQMVALNFQTMDLPMQQNMAVFEFNGQSGYLLKHEFMRRPDKQFNPFSVDRIDVVVATTLSITVISGQFLSERSVRTYVEVELFGLPGDPKRRYRTKLSPSTNSINPVWKEEPFVFEKILMPELASLRVAVMEEGNKFLGHRIIPINALNSGYHHLCLHSESNMPLTMPALFIFLEMKDYIPGAWADLTVALANPIKFFSAHDTKSVKLKEAMGGLPEKPFPLASPVASQVNGALAPTSNGSPAARAGAREEAMKEAAEPRTASLEELRELKGVVKLQRRHEKELRELERRGARRWEELLQRGAAQLAELGPPGVGGVGACKLGPGKGSRKKSKSPK

SEQ ID NO: 824095 - protein, 1185 aa, Homo sapiens; identical to SEQ ID NO: 824091

SEQ ID NO: 824096 - protein, 1057 aa, Homo sapiens
MSLLNPVLLPPKVKAYLSQGERFIKWDDETTVASPVILRVDPKGYYLYWTYQSKEMEFLDITSIRDTRFGKFAKMPKSQKLRDVFNMDFPDNSFLLKTLTVVSGPDMVDLTFHNFVSYKENVGKAWAEDVLALVKHPLTANASRSTFLDKILVKLKMQLNSEGKIPVKNFFQMFPADRKRVEAALSACHLPKGKNDAINPEDFPEPVYKSFLMSLCPRPEIDEIFTSYHAKAKPYMTKEHLTKFINQKQRDSRLNSLLFPPARPDQVQGLIDKYEPSGINAQRGQLSPEGMVWFLCGPENSVLAQDKLLLHHDMTQPLNHYFINSSHNTYLTAGQFSGLSSAEMYRQVLLSGCRCVELDCWKGKPPDEEPIITHGFTMTTDIFFKEAIEAIAESAFKTSPYPIILSFENHVDSPRQQAKMAEYCRTIFGDMLLTEPLEKFPLKPGVPLPSPEDLRGKILIKNKKNQFSGPTSSSKDTGGEAEGSSPPSAPAGEGTVWAGEEGTELEEEEVEEEEEEESGNLDEEEIKKMQSDEGTAGLEVTAYEEMSSLVNYIQPTKFVSFEFSAQKNRSYVISSFTELKAYDLLSKASVQFVDYNKRQMSRIYPKGTRMDSSNYMPQMFWNAGCQMVALNFQTMDLPMQQNMAVFEFNGQSGYLLKHEFMRRPDKQFNPFSVDRIDVVVATTLSITVISGQFLSERSVRTYVEVELFGLPGDPKRRYRTKLSPSTNSINPVWKEEPFVFEKILMPELASLRVAVMEEGNKFLGHRIIPINALNSGYHHLCLHSESNMPLTMPALFIFLEMKDYIPGAWADLTVALANPIKFFSAHDTKSVKLKEAMGGLPEKPFPLASPVASQVNGALAPTSNGSPAARAGAREEAMKEAAEPRTASLEELRELKGVVKLQRRHEKELRELERRGARRWEELLQRGAAQLAELGPPGVGGVGACKLGPGKGSRKKRSLPREESAGAAPGEGPEGVDGRVRELKDRLELELLRQGEEQYECVLKRKEQHVAEQISKMMELAREKQAAELKALKETSENDTKETERERERERERERES

SEQ ID NO: 824097 - protein, 199 aa, Homo sapiens; identical to SEQ ID NO: 824092

SEQ ID NO: 824098 - protein, 1185 aa, Homo sapiens; identical to SEQ ID NO: 824091

SEQ ID NO: 824099 - protein, 1173 aa, Homo sapiens
MSLLNPVLLPPKVKAYLSQGERFIKWDDETTVASPVILRVDPKGYYLYWTYQSKEMEFLDITSIRDTRFGKFAKMPKSQKLRDVFNMDFPDNSFLLKTLTVVSGPDMVDLTFHNFVSYKENVGKAWAEDVLALVKHPLTANASRSTFLDKILVKLKMQLNSEGKIPVKNFFQMFPADRKRVEAALSACHLPKGKNDAINPEDFPEPVYKSFLMSLCPRPEIDEIFTSYHAKAKPYMTKEHLTKFINQKQRDSRLNSLLFPPARPDQVQGLIDKYEPSGINAQRGQLSPEGMVWFLCGPENSVLAQDKLLLHHDMTQPLNHYFINSSHNTYLTAGQFSGLSSAEMYRQVLLSGCRCVELDCWKGKPPDEEPIITHGFTMTTDIFFKEAIEAIAESAFKTSPYPIILSFENHVDSPRQQAKMAEYCRTIFGDMLLTEPLEKFPLKPGVPLPSPEDLRGKILIKNKKNQFSGPTSSSKDTGGEAEGSSPPSAPAGEGTVWAGEEGTELEEEEVEEEEEEESGNLDEEEIKKMQSDEGTAGLEVTAYEEMSSLVNYIQPTKFVSFEFSAQKNRSYVISSFTELKAYDLLSKASVQFVDYNKRQMSRIYPKGTRMDSSNYMPQMFWNAGCQMVALNFQTMDLPMQQNMAVFEFNGQSGYLLKHEFMRRPDKQFNPFSVDRIDVVVATTLSITVISGQFLSERSVRTYVEVELFGLPGDPKRRYRTKLSPSTNSINPVWKEEPFVFEKILMPELASLRVAVMEEGNKFLGHRIIPINALNSGYHHLCLHSESNMPLTMPALFIFLEMKDYIPGAWADLTVALANPIKFFSAHDTKSVKLKEAMGGLPEKPFPLASPVASQVNGALAPTSNGSPAARAGAREEAMKEAAEPRTASLEELRELKGVVKLQRRHEKELRELERRGARRWEELLQRGAAQLAELGPPGVGGVGACKLGPGKGSRKKRSLPREESAGAAPGEGPEGVDGRVRELKDRLELELLRQGEEQYEQISKMMELAREKQAAELKALKETSENDTKEMKKKLETKRLERIQGMTKVTTDKMAQERLKREINNSHIQEVVQVIKQMTENLERHQEKLEEKQAACLEQIREMEKQFQKEALAEYEARMKGLEAEVKESVRACLRTCFPSEAKDKPERACECPPELCEQDPLIAKADAQESRL

SEQ ID NO: 824100 - protein, 973 aa, Homo sapiens
MSLCPRPEIDEIFTSYHAKAKPYMTKEHLTKFINQKQRDSRLNSLLFPPARPDQVQGLIDKYEPSGINAQRGQLSPEGMVWFLCGPENSVLAQDKLLLHHDMTQPLNHYFINSSHNTYLTAGQFSGLSSAEMYRQVLLSGCRCVELDCWKGKPPDEEPIITHGFTMTTDIFFKEAIEAIAESAFKTSPYPIILSFENHVDSPRQQAKMAEYCRTIFGDMLLTEPLEKFPLKPGVPLPSPEDLRGKILIKNKKNQFSGPTSSSKDTGGEAEGSSPPSAPAGEGTVWAGEEGTELEEEEVEEEEEEESGNLDEEEIKKMQSDEGTAGLEVTAYEEMSSLVNYIQPTKFVSFEFSAQKNRSYVISSFTELKAYDLLSKASVQFVDYNKRQMSRIYPKGTRMDSSNYMPQMFWNAGCQMVALNFQTMDLPMQQNMAVFEFNGQSGYLLKHEFMRRPDKQFNPFSVDRIDVVVATTLSITVISGQFLSERSVRTYVEVELFGLPGDPKRRYRTKLSPSTNSINPVWKEEPFVFEKILMPELASLRVAVMEEGNKFLGHRIIPINALNSGYHHLCLHSESNMPLTMPALFIFLEMKDYIPGAWADLTVALANPIKFFSAHDTKSVKLKEAMGGLPEKPFPLASPVASQVNGALAPTSNGSPAARAGAREEAMKEAAEPRTASLEELRELKGVVKLQRRHEKELRELERRGARRWEELLQRGAAQLAELGPPGVGGVGACKLGPGKGSRKKRSLPREESAGAAPGEGPEGVDGRVRELKDRLELELLRQGEEQYECVLKRKEQHVAEQISKMMELAREKQAAELKALKETSENDTKEMKKKLETKRLERIQGMTKVTTDKMAQERLKREINNSHIQEVVQVIKQMTENLERHQEKLEEKQAACLEQIREMEKQFQKEALAEYEARMKGLEAEVKESVRACLRTCFPSEAKDKPERACECPPELCEQDPLIAKADAQESRL

SEQ ID NO: 824101 - protein, 810 aa, Homo sapiens
PSLPDLLAPDLGHQGHKRMHNRVGAERLNPIPAFAPRRPRQQAKMAEYCRTIFGDMLLTEPLEKFPLKPGVPLPSPEDLRGKILIKNKKNQFSGPTSSSKDTGGEAEGSSPPSAPAGEGTVWAGEEGTELEEEEVEEEEEEESGNLDEEEIKKMQSDEGTAGLEVTAYEEMSSLVNYIQPTKFVSFEFSAQKNRSYVISSFTELKAYDLLSKASVQFVDYNKRQMSRIYPKGTRMDSSNYMPQMFWNAGCQMVALNFQTMDLPMQQNMAVFEFNGQSGYLLKHEFMRRPDKQFNPFSVDRIDVVVATTLSITVISGQFLSERSVRTYVEVELFGLPGDPKRRYRTKLSPSTNSINPVWKEEPFVFEKILMPELASLRVAVMEEGNKFLGHRIIPINALNSGYHHLCLHSESNMPLTMPALFIFLEMKDYIPGAWADLTVALANPIKFFSAHDTKSVKLKEAMGGLPEKPFPLASPVASQVNGALAPTSNGSPAARAGAREEAMKEAAEPRTASLEELRELKGVVKLQRRHEKELRELERRGARRWEELLQRGAAQLAELGPPGVGGVGACKLGPGKGSRKKRSLPREESAGAAPGEGPEGVDGRVRELKDRLELELLRQGEEQYECVLKRKEQHVAEQISKMMELAREKQAAELKALKETSENDTKEMKKKLETKRLERIQGMTKVTTDKMAQERLKREINNSHIQEVVQVIKQMTENLERHQEKLEEKQAACLEQIREMEKQFQKEALAEYEARMKGLEAEVKESVRACLRTCFPSEAKDKPERACECPPELCEQDPLIAKADAQESRL

SEQ ID NO: 824102 - protein, 1124 aa, Homo sapiens
MSLLNPVLLPPKVKAYLSQGERFIKWDDETTVASPVILRVDPKGYYLYWTYQSKEMEFLDITSIRDTRFGKFAKMPKSQKLRDVFNMDFPDNSFLLKTLTVVSGPDMVDLTFHNFVSYKENVGKAWAEDVLALVKHPLTANASRSTFLDKILVKLKMQLNSEGKIPVKNFFQMFPADRKRVEAALSACHLPKGKNDAINPEDFPEPVYKSFLMSLCPRPEIDEIFTSYHAKAKPYMTKEHLTKFINQKQRDSRLNSLLFPPARPDQVQGLIDKYEPSGINAQRGQLSPEGMVWFLCGPENSVLAQDKLLLHHDMTQPLNHYFINSSHNTYLTAGQFSGLSSAEMYRQVLLSGCRCVELDCWKGKPPDEEPIITHGFTMTTDIFFKEAIEAIAESAFKTSPYPIILSFENHVDSPRQQAKMAEYCRTIFGDMLLTEPLEKFPLKPGVPLPSPEDLRGKILIKNKKNQFSGPTSSSKDTGGEAEGSSPPSAPAGEGTVWAGEEGTELEEEEVEEEEEEESGNLDEEEIKKMQSDEGTAGLEVTAYEEMSSLVNYIQPTKFVSFEFSAQKNRSYVISSFTELKAYDLLSKASVQFVDYNKRQMSRIYPKGTRMDSSNYMPQMFWNAGCQMVALNFQTMDLPMQQNMAVFEFNGQSGYLLKHEFMRRPDKQFNPFSVDRIDVVVATTLSITVISGQFLSERSVRTYVEVELFGLPGDPKRRYRTKLSPSTNSINPVWKEEPFVFEKILMPELASLRVAVMEEGNKFLGHRIIPINALNSGYHHLCLHSESNMPLTMPALFIFLEMKDYIPGAWADLTVALANPIKFFSAHDTKSVKLKEAMGGLPEKPFPLASPVASQVNGALAPTSNGSPAARAGAREEAMKEAAEPRTASLEELRELKGVVKLQRRHEKELRELERRGARRWEELLQRGAAQLAELGPPGVGGVGACKLGPGKGSRKKRSLPREESAGAAPGEGPEGVDGRVRELKDRLELELLRQGEEQYECVLKRKEQHVAEQISKMMELAREKQAAELKALKETSENDTKEMKKKLETKRLERIQGMTKVTTDKMAQERLKREINNSHIQEVVQVIKQMTENLERHQEKLEEKQAACLEQIREMEKQPDPAHP

SEQ ID NO: 824103 - protein, 837 aa, Homo sapiens
MSLLNPVLLPPKVKAYLSQGERFIKWDDETTVASPVILRVDPKGYYLYWTYQSKEMEFLDITSIRDTRFGKFAKMPKSQKLRDVFNMDFPDNSFLLKTLTVVSGPDMVDLTFHNFVSYKENVGKAWAEDVLALVKHPLTANASRSTFLDKILVKLKMQLNSEGKIPVKNFFQMFPADRKRVEAALSACHLPKGKNDAINPEDFPEPVYKSFLMSLCPRPEIDEIFTSYHAKAKPYMTKEHLTKFINQKQRDSRLNSLLFPPARPDQVQGLIDKYEPSGINAQRGQLSPEGMVWFLCGPENSVLAQDKLLLHHDMTQPLNHYFINSSHNTYLTAGQFSGLSSAEMYRQVLLSGCRCVELDCWKGKPPDEEPIITHGFTMTTDIFFKEAIEAIAESAFKTSPYPIILSFENHVDSPRQQAKMAEYCRTIFGDMLLTEPLEKFPLKPGVPLPSPEDLRGKILIKNKKNQFSGPTSSSKDTGGEAEGSSPPSAPAGEGTVWAGEEGTELEEEEVEEEEEEESGNLDEEEIKKMQSDEGTAGLEVTAYEEMSSLVNYIQPTKFVSFEFSAQKNRSYVISSFTELKAYDLLSKASVQFVDYNKRQMSRIYPKGTRMDSSNYMPQMFWNAGCQMVALNFQTMDLPMQQNMAVFEFNGQSGYLLKHEFMRRPDKQFNPFSVDRIDVVVATTLSITVISGQFLSERSVRTYVEVELFGLPGDPKRRYRTKLSPSTNSINPVWKEEPFVFEKILMPELASLRVAVMEEGNKFLGHRIIPINALNSGYHHLCLHSESNMPLTMPALFIFLEMKDYIPGAWADLTVALANLTCNNSKNKTLVTQNSGVE

SEQ ID NO: 824104 - protein, 112 aa, Homo sapiens
VKLKEAMGGLPEVCVACTAARGSPEISPIYGRGWGEGRVPGSGREGCQATFLTCSPYTEALPTGESSCQPGQWGVGPNEQWVTRYELRSAHLLGAPPPLHPQALPFKKFHLG

SEQ ID NO: 824105 - protein, 518 aa, Homo sapiens
MQARYSVSSPNSLGVVPYLGGEQSYYRAAAAAAGGGYTAMPAPMSVYSHPAHAEQYPGGMARAYGPYTPQPQPKDMVKPPYSYIALITMAIQNAPDKKITLNGIYQFIMDRFPFYRDNKQGWQNSIRHNLSLNECFVKVPRDDKKPGKGSYWTLDPDSYNMFENGTPARAAGAGRRQRARSAAAARAHPGHQDRERYVPLAAPAPVPGRRPGQRQRRRGAQDREPRQQQQQPVQREQPPGQPAVGAAAQPGRCGFRAAAARALRPAAAPYQGFSVDNIMTSLRGSPQSAAAELSSGLLASAAASSRAGIAPPLALGAYSPGQSSLYSSPCSQTSSAGSSGGGGGGAGAAGGAGGAGTYHCNLQAMSLYAAGERGGHLQGAPGGAGGSAVDDPLPDYSLPPVTSSSSSSLSHGGGGGGGGGGQEAGHHPAAHQGRLTSWYLNQAGGDLGHLASAAAAAAAAGYPGQQQNFHSVREMFESQRIGLNNSPVNGNSSCQMAFPSSQSLYRTSGAFVYDCSKF

SEQ ID NO: 824106 - protein, 553 aa, Homo sapiens
MQARYSVSSPNSLGVVPYLGGEQSYYRAAAAAAGGGYTAMPAPMSVYSHPAHAEQYPGGMARAYGPYTPQPQPKDMVKPPYSYIALITMAIQNAPDKKITLNGIYQFIMDRFPFYRDNKQGWQNSIRHNLSLNECFVKVPRDDKKPGKGSYWTLDPDSYNMFENGSFLRRRRRFKKKDAVKDKEEKDRLHLKEPPPPGRQPPPAPPEQADGNAPGPQPPPVRIQDIKTENGTCPSPPQPLSPAAALGSGSAAAVPKIESPDSSSSSLSSGSSPPGSLPSARPLSLDGADSAPPPPAPSAPPPHHSQGFSVDNIMTSLRGSPQSAAAELSSGLLASAAASSRAGIAPPLALGAYSPGQSSLYSSPCSQTSSAGSSGGGGGGAGAAGGAGGAGTYHCNLQAMSLYAAGERGGHLQGAPGGAGGSAVDDPLPDYSLPPVTSSSSSSLSHGGGGGGGGGGQEAGHHPAAHQGRLTSWYLNQAGGDLGHLASAAAAAAAAGYPGQQQNFHSVREMFESQRIGLNNSPVNGNSSCQMAFPSSQSLYRTSGAFVYDCSKF

SEQ ID NO: 824107 - protein, 553 aa, Homo sapiens; identical to SEQ ID NO: 824106

SEQ ID NO: 824108 - protein, 279 aa, Homo sapiens
PGGEFGTRDISDSKIRYESGDHVAVYPANDSALVNQLGKILGADLDVVMSLNNLDEESNKKHPFPCPTSYRTALTYYLDITNPPRTNVLYELAQYASEPSEQELLRKMASSSGEGKELYLSWVVEARRHILAILQDCPSLRPPIDHLCELLPRLQARYYSIASSSKVHPNSVHICAVVVEYETKDGTIKEGKWDNHKLSWRAQREDLSRGNQTGRQSQTGAQIGTLQNRIPNIPTLPLSKGHQRPLVLMAENTATRGEHPTRSYKPGERPDSTRREDVR

SEQ ID NO: 824109 - protein, 695 aa, Homo sapiens
PCPGARREQPGCQRFMINMGDSHVDTSSTVSEAVAEEVSLFSMTDMILFSLIVGLLTYWFLFRKKKEEVPEFTKIQTLTSSVRESSFVEKMKKTGRNIIVFYGSQTGTAEEFANRLSKDAHRYGMRGMSADPEEYDLADLSSLPEIDNALVVFCMATYGEGDPTDNAQDFYDWLQETDVDLSGVKFAVFGLGNKTYEHFNAMGKYVDKRLEQLGAQRIFELGLGDDDGNLEEDFITWREQFWPAVCEHFGVEATGEESSIRQYELVVHTDIDAAKVYMGEMGRLKSYENQKPPFDAKNPFLAAVTTNRKLNQGTERHLMHLELDISDSKIRYESGDHVAVYPANDSALVNQLGKILGADLDVVMSLNNLDEESNKKHPFPCPTSYRTALTYYLDITNPPRTNVLYELAQYASEPSEQELLRKMASSSGEGKELYLSWVVEARRHILAILQDCPSLRPPIDHLCELLPRLQARYYSIASSSKVHPNSVHICAVVVEYETKAGRINKGVATNWLRAKEPAGENGGRALVPMFVRKSQFRLPFKATTPVIMVGPGTGVAPFIGFIQERAWLRQQGKEVGETLLYYGCRRSDEDYLYREELAQFHRDGALTQLNVAFSREQSHKVYVQHLLKQDREHLWKLIEGGAHIYVCGDARNMARDVQNTFYDIVAELGAMEHAQAVDYIKKLMTKGRYSLDVWS

SEQ ID NO: 824110 - protein, 700 aa, Homo sapiens
QTRLVRGCVCIGRGPGCQRFMINMGDSHVDTSSTVSEAVAEEVSLFSMTDMILFSLIVGLLTYWFLFRKKKEEVPEFTKIQTLTSSVRESSFVEKMKKTGRNIIVFYGSQTGTAEEFANRLSKDAHRYGMRGMSADPEEYDLADLSSLPEIDNALVVFCMATYGEGDPTDNAQDFYDWLQETDVDLSGVKFAVFGLGNKTYEHFNAMGKYVDKRLEQLGAQRIFELGLGDDDGNLEEDFITWREQFWPAVCEHFGVEATGEESSIRQYELVVHTDIDAAKVYMGEMGRLKSYENQKPPFDAKNPFLAAVTTNRKLNQGTERHLMHLELDISDSKIRYESGDHVAVYPANDSALVNQLGKILGADLDVVMSLNNLDEESNKKHPFPCPTSYRTALTYYLDITNPPRTNVLYELAQYASEPSEQELLRKMASSSGEGKELYLSWVVEARRHILAILQDCPSLRPPIDHLCELLPRLQARYYSIASSSKVHPNSVHICAVVVEYETKAGRINKGVATNWLRAKEPAGENGGRALVPMFVRKSQFRLPFKATTPVIMVGPGTGVAPFIGFIQERAWLRQQGKEVGETLLYYGCRRSDEDYLYREELAQFHRDGALTQLNVAFSREQSHKVYVQHLLKQDREHLWKLIEGGAHIYVCGDARNMARDVQNTFYDIVAELGAMEHAQAVDYIKKLMTKGRYSLDVWS

SEQ ID NO: 824111 - protein, 644 aa, Homo sapiens
QTRLVRGCVCIGRGPGCQRFMINMGDSHVDTSSTVSEAVAEEVSLFSMTDMILFSLIVGLLTYWFLFRKKKEEVPEFTKIQTLTSSVRESSFVEKMKKTGRNIIVFYGSQTGTAEEFANRLSKDAHRYGMRGMSADPEEYDLADLSSLPEIDNALVVFCMATYGEGDPTDNAQDFYDWLQETDVDLSGVKFAVFGLGNKTYEHFNAMGKYVDKRLEQLGAQRIFELGLGDDDGNLEEDFITWREQFWPAVCEHFGVEATGEESSIRQYELVVHTDIDAAKVYMGEMGRLKSYENQKPPFDAKNPFLAAVTTNRKLNQGTERHLMHLELDISDSKIRYESGDHVAVYPANDSALVNQLGKILGADLDVVMSLNNLDEESNKKHPFPCPTSYRTALTYYLDITNPPRTNVLYELAQYASEPSEQELLRKMASSSGEGKELYLSWVVEARRHILAILQDCPSLRPPIDHLCELLPRLQARYYSIASSSKVHPNSVHICAVVVEYETKAGRINKGVATNWLRAKEPAGENGGRALVPMFVRKSQFRLPFKATTPVIMVGPGTGVAPFIGFIQERAWLRQQGKEVGETLLYYGCRRSDEDYLYREELAQFHRDGALTQLNVAFSREQSHKVYVQHLLKQDREHLLRHRG

SEQ ID NO: 824112 - protein, 697 aa, Homo sapiens
ASVMTTGRPHEPLWGPPGPLKPPTPQRAFSTVSEAVAEEVSLFSMTDMILFSLIVGLLTYWFLFRKKKEEVPEFTKIQTLTSSVRESSFVEKMKKTGRNIIVFYGSQTGTAEEFANRLSKDAHRYGMRGMSADPEEYDLADLSSLPEIDNALVVFCMATYGEGDPTDNAQDFYDWLQETDVDLSGVKFAVFGLGNKTYEHFNAMGKYVDKRLEQLGAQRIFELGLGDDDGNLEEDFITWREQFWPAVCEHFGVEATGEESSIRQYELVVHTDIDAAKVYMGEMGRLKSYENQKPPFDAKNPFLAAVTTNRKLNQGTERHLMHLELDISDSKIRYESGDHVAVYPANDSALVNQLGKILGADLDVVMSLNNLDEESNKKHPFPCPTSYRTALTYYLDITNPPRTNVLYELAQYASEPSEQELLRKMASSSGEGKELYLSWVVEARRHILAILQDCPSLRPPIDHLCELLPRLQARYYSIASSSKVHPNSVHICAVVVEYETKAGRINKGVATNWLRAKEPAGENGGRALVPMFVRKSQFRLPFKATTPVIMVGPGTGVAPFIGFIQERAWLRQQGKEVGETLLYYGCRRSDEDYLYREELAQFHRDGALTQLNVAFSREQSHKVYVQHLLKQDREHLWKLIEGGAHIYVCGDARNMARDVQNTFYDIVAELGAMEHAQAVDYIKKLMTKGRYSLDVWS

SEQ ID NO: 824113 - protein, 579 aa, Homo sapiens
VAVLEDPRLDVNVVDRDEYDLADLSSLPEIDNALVVFCMATYGEGDPTDNAQDFYDWLQETDVDLSGVKFAVFGLGNKTYEHFNAMGKYVDKRLEQLGAQRIFELGLGDDDGNLEEDFITWREQFWPAVCEHFGVEATGEESSIRQYELVVHTDIDAAKVYMGEMGRLKSYENQKPPFDAKNPFLAAVTTNRKLNQGTERHLMHLELDISDSKIRYESGDHVAVYPANDSALVNQLGKILGADLDVVMSLNNLDEESNKKHPFPCPTSYRTALTYYLDITNPPRTNVLYELAQYASEPSEQELLRKMASSSGEGKELYLSWVVEARRHILAILQDCPSLRPPIDHLCELLPRLQARYYSIASSSKVHPNSVHICAVVVEYETKAGRINKGVATNWLRAKEPAGENGGRALVPMFVRKSQFRLPFKATTPVIMVGPGTGVAPFIGFIQERAWLRQQGKEVGETLLYYGCRRSDEDYLYREELAQFHRDGALTQLNVAFSREQSHKVYVQHLLKQDREHLWKLIEGGAHIYVCGDARNMARDVQNTFYDIVAELGAMEHAQAVDYIKKLMTKGRYSLDVWS

SEQ ID NO: 824114 - protein, 742 aa, Homo sapiens
QTRLVRGCVCIGRGPGCQRFMINMGDSHVDTSSTVSEAVAEEVSLFSMTDMILFSLIVGLLTYWFLFRKKKEEVPEFTKIQTLTSSVRESSFVEKMKKTGRNIIVFYGSQTGTAEEFANRLSKDAHRYGMRGMSADPEEYDLADLSSLPEIDNALVVFCMATYGEGDPTDNAQDFYDWLQETDVDLSGVKFAVFGLGNKTYEHFNAMGKYVDKRLEQLGAQRIFELGLGDDDGNLEEDFITWREQFWPAVCEHFGVEATGEESSIRQYELVVHTDIDAAKVYMGEMGRLKSYENQKPPFDAKNPFLAAVTTNRKLNQGTERHLMHLELDISDSKIRYESGDHVAVYPANDSALVNQLGKILGADLDVVMSLNNLDEESNKKHPFPCPTSYRTALTYYLDITNPPRTNVLYELAQYASEPSEQELLRKMASSSGEGKELYLSWVVEARRHILAILQDCPSLRPPIDHLCELLPRLQARYYSIASSSKVHPNSVHICAVVVEYETKAGRINKGVATNWLRAKEPAGENGGRALVPMFVRKSQFRLPFKATTPVIMVGPGTGVAPFIGFIQERAWLRQQGKEVGETLLYYGCRRSDEDYLYREELAQFHRDGALTQLNVAFSREQSHKVYVQHLLKQDREHLWKLIEGGAHIYVCGDARNMARDVQNTFYDIVAELGAMEHAQAVDYIKKLMTKGACRGERRPCAGAHVRAQVPVPPALGLGMGAGPVTKTPLGLGCILLSPQAR

SEQ ID NO: 824115 - protein, 694 aa, Homo sapiens
QTRLVRGCVCIGRGPGCQRFMINMGDSHVDTSSTVSEAVAEEVSLFSMTDMILFSLIVGLLTYWFLFRKKKEEVPEFTKIQTLTSSVRESSFVEKMKKTGRNIIVFYGSQTGTAEEFANRLSKDAHRYGMRGMSADPEEYDLADLSSLPEIDNALVVFCMATYGEGDPTDNAQDFYDWLQETDVDLSGVKFAVFGLGNKTYEHFNAMGKYVDKRLEQLGAQRIFELGLGDDDGNLEEDFITWREQFWPAVCEHFGVEATGEESSIRQYELVVHTDIDAAKVYMGEMGRLKSYENQKPPFDAKNPFLAAVTTNRKLNQGTERHLMHLELDISDSKIRYESGDHVAVYPANDSALVNQLGKILGADLDVVMSLNNLDEESNKKHPFPCPTSYRTALTYYLDITNPPRTNVLYELAQYASEPSEQELLRKMASSSGEGKELYLSWVVEARRHILAILQDCPSLRPPIDHLCELLPRLQARYYSIASSSKVHPNSVHICAVVVEYETKAGRINKGVATNWLRAKEPAGENGGRALVPMFVRKSQFRLPFKATTPVIMVGPGTGVAPFIGFIQERAWLRQQGKEVGETLLYYGCRRSDEDYLYREELAQFHRDGALTQLNVAFSREQSHKVYVQHLLKQDREHLWKLIEGGAHIYVCGDARNMARDVQNTFYDIVAELGAMEHAQAVDYIKKLMTKGST

SEQ ID NO: 824116 - protein, 457 aa, Homo sapiens
MSWVRGSVYFIRGRQLAMEFNIRQYELVVHTDIDAAKVYMGEMGRLKSYENQKPPFDAKNPFLAAVTTNRKLNQGTERHLMHLELDISDSKIRYESGDHVAVYPANDSALVNQLGKILGADLDVVMSLNNLDEESNKKHPFPCPTSYRTALTYYLDITNPPRTNVLYELAQYASEPSEQELLRKMASSSGEGKELYLSWVVEARRHILAILQDCPSLRPPIDHLCELLPRLQARYYSIASSSKVHPNSVHICAVVVEYETKAGRINKGVATNWLRAKEPAGENGGRALVPMFVRKSQFRLPFKATTPVIMVGPGTGVAPFIGFIQERAWLRQQGKEVGETLLYYGCRRSDEDYLYREELAQFHRDGALTQLNVAFSREQSHKVYVQHLLKQDREHLWKLIEGGAHIYVCGDARNMARDVQNTFYDIVAELGAMEHAQAVDYIKKLMTKGRYSLDVWS

SEQ ID NO: 824117 - protein, 474 aa, Homo sapiens
MEISEIPCALCNQKGPWRQRLRSKPRPLTVLLSSPPSPFDAKNPFLAAVTTNRKLNQGTERHLMHLELDISDSKIRYQLPLSPPETLTLGLLTWGRASLPPLPSLTSPSRYESGDHVAVYPANDSALVNQLGKILGADLDVVMSLNNLDEESNKKHPFPCPTSYRTALTYYLDITNPPRTNVLYELAQYASEPSEQELLRKMASSSGEGKELYLSWVVEARRHILAILQDCPSLRPPIDHLCELLPRLQARYYSIASSSKVHPNSVHICAVVVEYETKAGRINKGVATNWLRAKEPAGENGGRALVPMFVRKSQFRLPFKATTPVIMVGPGTGVAPFIGFIQERAWLRQQGKEVGETLLYYGCRRSDEDYLYREELAQFHRDGALTQLNVAFSREQSHKVYVQHLLKQDREHLWKLIEGGAHIYVCGDARNMARDVQNTFYDIVAELGAMEHAQAVDYIKKLMTKGRYSLDVWS

SEQ ID NO: 824118 - protein, 168 aa, Homo sapiens
PCPGARREQPGCQRFMINMGDSHVDTSSTVSEAVAEEVSLFSMTDMILFSLIVGLLTYWFLFRKKKEEVPEFTKIQTLTSSVRESSFVEKMKKTGRNIIVFYGSQTGTAEEFANRLSKDAHRYGMRGMSADPEEYDLADLSSLPEIDNALVACSSCRACELLTTGSTL

SEQ ID NO: 824119 - protein, 220 aa, Homo sapiens
PCPGARREQPGCQRFMINMGDSHVDTSSTVSEAVAEEVSLFSMTDMILFSLIVGLLTYWFLFRKKKEEVPEFTKIQTLTSSVRESSFVEKMKKTGRNIIVFYGSQTGTAEEFANRLSKDAHRYGMRGMSADPEEYDLADLSSLPEIDNALVVFCMATYGEGDPTDNAQDFYDWLQETDVDLSGVKFAVSHPETAMGSRWPAVPPWGLQIHVSERQPSRPP

SEQ ID NO: 824120 - protein, 700 aa, Homo sapiens; identical to SEQ ID NO: 824110

SEQ ID NO: 824121 - protein, 700 aa, Homo sapiens; identical to SEQ ID NO: 824110

SEQ ID NO: 824122 - protein, 732 aa, Homo sapiens
QTRLVRGCVCIGRGPGCQRFMINMGDSHVDTSSTVSEAVAEEVSLFSMTDMILFSLIVGLLTYWFLFRKKKEEVPEFTKIQTLTSSVRESSFVEKMKKTGRNIIVFYGSQTGTAEEFANRLSKDAHRYGMRGMSADPEEYDLADLSSLPEIDNALVVFCMATYGEGDPTDNAQDFYDWLQETDVDLSGVKFAVFGLGNKTYEHFNAMGKYVDKRLEQLGAQRIFELGLGDDDGNLEEDFITWREQFWPAVCEHFGVEATGEESSIRQYELVVHTDIDAAKVYMGEMGRLKSYENQKPPFDAKNPFLAAVTTNRKLNQGTERHLMHLELDISDSKIRYESGDHVAVYPANDSALVNQLGKILGADLDVVMSLNNLDEESNKKHPFPCPTSYRTALTYYLDITNPPRTNVLYELAQYASEPSEQELLRKMASSSGEGKELYLSWVVEARRHILAILQDCPSLRPPIDHLCELLPRLQARYYSIASSSKVHPNSVHICAVVVEYETKAGRINKGVATNWLRAKEPAGENGGRALVPMFVRKSQFRLPFKATTPVIMVGPGTGVAPFIGFIQERAWLRQQGKEVGETLLYYGCRRSDEDYLYREELAQFHRDGALTQLNVAFSREQSHKVYVQHLLKQDREHLWKLIEGGAHIYVCGLSEWGHWNRGQGGQGPACHSWPSPQHPLFLPRDARNMARDVQNTFYDIVAELGAMEHAQAVDYIKKLMTKGRYSLDVWS

SEQ ID NO: 824123 - protein, 605 aa, Homo sapiens
MKKTGRNIIVFYGSQTGTAEEFANRLSKDAHRYGMRGMSADPEEYDLADLSSLPEIDNALVVFCMATYGEGDPTDNAQDFYDWLQETDVDLSGVKFAVFGLGNKTYEHFNAMGKYVDKRLEQLGAQRIFELGLGDDDGNLEEDFITWREQFWPAVCEHFGVEATGEESSIRQYELVVHTDIDAAKVYMGEMGRLKSYENQKPPFDAKNPFLAAVTTNRKLNQGTERHLMHLELDISDSKIRYESGDHVAVYPANDSALVNQLGKILGADLDVVMSLNNLDEESNKKHPFPCPTSYRTALTYYLDITNPPRTNVLYELAQYASEPSEQELLRKMASSSGEGKELYLSWVVEARRHILAILQDCPSLRPPIDHLCELLPRLQARYYSIASSSKVHPNSVHICAVVVEYETKAGRINKGVATNWLRAKEPAGENGGRALVPMFVRKSQFRLPFKATTPVIMVGPGTGVAPFIGFIQERAWLRQQGKEVGETLLYYGCRRSDEDYLYREELAQFHRDGALTQLNVAFSREQSHKVYVQHLLKQDREHLWKLIEGGAHIYVCGDARNMARDVQNTFYDIVAELGAMEHAQAVDYIKKLMTKGRYSLDVWS

SEQ ID NO: 824124 - protein, 785 aa, Homo sapiens
QTRLVRGCVCIGRGPGCQRFMINMGDSHVDTSSTVSEAVAEEVSLFSMTDMILFSLIVGLLTYWFLFRKKKEEVPEFTKIQTLTSSVRESSFVEKMKKTGRNIIVFYGSQTGTAEEFANRLSKDAHRYGMRGMSADPEEYDLADLSSLPEIDNALVVFCMATYGEGDPTDNAQDFYDWLQETDVDLSGVKFAVFGLGNKTYEHFNAMGKYVDKRLEQLGAQRIFELGLGDDDGNLEEDFITWREQFWPAVCEHFGVEATGEESSIRQYELVVHTDIDAAKVYMGEMGRLKSYENQKPPFDAKNPFLAAVTTNRKLNQGTERHLMHLELDISDSKIRYESGDHVAVYPANDSALVNQLGKILGADLDVVMSLNNLDEESNKKHPFPCPTSYRTALTYYLDITNPPRTNVLYELAQYASEPSEQELLRKMASSSGEGKELYLSWVVEARRHILAILQDCPSLRPPIDHLCELLPRLQARYYSIASSSKVHPNSVHICAVVVEYETKAGRINKGVATNWLRAKEPAGENGGRALVPMFVRKSQFRLPFKATTPVIMVGPGTGVAPFIGFIQERAWLRQQGKEVGETLLYYGCRRSDEDYLYREELAQFHRDGALTQLNVAFSREQSHKVYVQHLLKQDREHLWKLIEGGAHIYVCGDARNMARDVQNTFYDIVAELGAMEHAQAVDYIKKLMTKGCNQLSWLPPVVSWVCLAWPWHGRRPSDKDSSGPGVHPPQPPGQVRSTGPWQHSPGPAWGHRAPCLWRPLALGGCTEGLFLSAELGPAPPRDFQ

SEQ ID NO: 824125 - protein, 736 aa, Homo sapiens
QTRLVRGCVCIGRGPGCQRFMINMGDSHVDTSSTVSEAVAEEVSLFSMTDMILFSLIVGLLTYWFLFRKKKEEVPEFTKIQTLTSSVRESSFVEKMKKTGRNIIVFYGSQTGTAEEFANRLSKDAHRYGMRGMSADPEEYDLADLSSLPEIDNALVVFCMATYGEGDPTDNAQDFYDWLQETDVDLSGVKFAVFGLGNKTYEHFNAMGKYVDKRLEQLGAQRIFELGLGDDDGNLEEDFITWREQFWPAVCEHFGVEATGEESSIRQYELVVHTDIDAAKVYMGEMGRLKSYENQKPPFDAKNPFLAAVTTNRKLNQGTERHLMHLELDISDSKIRYESGDHVAVYPANDSALVNQLGKILGADLDVVMSLNNLDEESNKKHPFPCPTSYRTALTYYLDITNPPRTNVLYELAQYASEPSEQELLRKMASSSGEGKELYLSWVVEARRHILAILQDCPSLRPPIDHLCELLPRLQARYYSIASSSKVHPNSVHICAVVVEYETKAGRINKGVATNWLRAKEPAGENGGRALVPMFVRKSQFRLPFKATTPVIMVGPGTGVAPFIGFIQERAWLRQQGKEVGETLLYYGCRRSDEDYLYREELAQFHRDGALTQLNVAFSREQSHKVYVQHLLKQDREHLWKLIEGGAHIYVCGDARNMARDVQNTFYDIVAELGAMEHAQAVDYIKKLMTKGWQHSPGPAWGHRAPCLWRPLALGGCTEGLFLSAELGPAPPRDFQ

SEQ ID NO: 824126 - protein, 440 aa, Homo sapiens
MEISEIPCALCNQKGPWRQRLRSKPRPLTVLLSSPPSPFDAKNPFLAAVTTNRKLNQGTERHLMHLELDISDSKIRYESGDHVAVYPANDSALVNQLGKILGADLDVVMSLNNLDEESNKKHPFPCPTSYRTALTYYLDITNPPRTNVLYELAQYASEPSEQELLRKMASSSGEGKELYLSWVVEARRHILAILQDCPSLRPPIDHLCELLPRLQARYYSIASSSKVHPNSVHICAVVVEYETKAGRINKGVATNWLRAKEPAGENGGRALVPMFVRKSQFRLPFKATTPVIMVGPGTGVAPFIGFIQERAWLRQQGKEVGETLLYYGCRRSDEDYLYREELAQFHRDGALTQLNVAFSREQSHKVYVQHLLKQDREHLWKLIEGGAHIYVCGDARNMARDVQNTFYDIVAELGAMEHAQAVDYIKKLMTKGRYSLDVWS

SEQ ID NO: 824127 - protein, 380 aa, Homo sapiens
PGGEFGTRDISDSKIRYESGDHVAVYPANDSALVNQLGKILGADLDVVMSLNNLDEESNKKHPFPCPTSYRTALTYYLDITNPPRTNVLYELAQYASEPSEQELLRKMASSSGEGKELYLSWVVEARRHILAILQDCPSLRPPIDHLCELLPRLQARYYSIASSSKVHPNSVHICAVVVEYETKAGRINKGVATNWLRAKEPAGENGGRALVPMFVRKSQFRLPFKATTPVIMVGPGTGVAPFIGFIQERAWLRQQGKEVGETLLYYGCRRSDEDYLYREELAQFHRDGALTQLNVAFSREQSHKVYVQHLLKQDREHLWKLIEGGAHIYVCGDARNMARDVQNTFYDIVAELGAMEHAQAVDYIKKLMTKGRYSLDVWS

SEQ ID NO: 824128 - protein, 78 aa, Homo sapiens
PCPGARREQPGCQRFMINMGDSHVDTSSTVSEAVAEEVSLFSMTDMILFSLIVGLLTYWFLFRKKKEEVPEFTKIQTL

SEQ ID NO: 824129 - protein, 171 aa, Homo sapiens
MSRLWYGKKGRRHQPINHKYTLITTREDINSKQVATVKADLESESFRPNLSDPSELLLPDQIEKLTKHLPPRTIGYPWTLVYGTGKHGTSLKTLYRTMTGLDTPVLMVIKDSDGQVFGALASEPLKVSDGFYGTGETFVFTFCPEFEVLSDGIICLSKGMIIVWGERELAW

SEQ ID NO: 824130 - protein, 571 aa, Homo sapiens
MTGSNTEEIDSRIRDAGNDSASTAPRSTEESLSEDVFTESELSPIREELVSSDELRQDKSSGASSESVQTVNQAEVESLTVKSESTGTPGHLRSDTEHSTNEVGTLCHKTDLNNLEMAIKEDQIADNFQGISGPKEDSTSIKGNSDQDSFLHENSLHQEESQKENMPCGETAEFKQKQSVNKGKQGKEQNQDSQTEAEELRKLWKTHTMQQTKQQRENIQQVSQKEAKHKITSADGHIESSALLKEKQRHRLHKFLCLRVGKPMRKTFVSQASATMQQYAQRDKKHEYWFAVPQERTDHLYAFFIQWSPEIYAEDTGEYTREPGFIVVKKIEESETIEDSSNQAAAREWEVVSVAEYHRRIDALNTEELRTLCRRLQITTREDINSKQVATVKADLESESFRPNLSDPSELLLPDQIEKLTKHLPPRTIGYPWTLVYGTGKHGTSLKTLYRTMTGLDTPVLMVIKDSDGQVFGALASEPLKVSDGFYGTGETFVFTFCPEFEVFKWTGDNMFFIKGDMDSLAFGGGGGEFALWLDGDLYHGRSHSCKTFGNRTLSKKEDFFIQDIEIWAFE

SEQ ID NO: 824131 - protein, 243 aa, Homo sapiens
MSRLWYGKKGRRHQPINHKYTLVVSVAEYHRRIDALNTEELRTLCRRLQITTREDINSKQVATVKADLESESFRPNLSDPSELLLPDQIEKLTKHLPPRTIGYPWTLVYGTGKHGTSLKTLYRTMTGLDTPVLMVIKDSDGQVFGALASEPLKVSDGFYGTGETFVFTFCPEFEVFKWTGDNMFFIKGDMDSLAFGGGGGEFALWLDGDLYHGRSHSCKTFGNRTLSKKEDFFIQDIEIWAFE

SEQ ID NO: 824132 - protein, 383 aa, Homo sapiens
MTGSNTEEIDSRIRDAGNDSASTAPRSTEESLSEDVFTESELSPIREELVSSDELRQDKSSGASSESVQTVNQAEVESLTVKSESTGTPGHLRSDTEHSTNEVGTLCHKTDLNNLEMAIKEDQIADNFQGISGPKEDSTSIKGNSDQDSFLHENSLHQEESQKENMPCGETAEFKQKQSVNKGKQGKEQNQDSQTEAEELRKLWKTHTMQQTKQQRENIQQVSQKEAKHKITSADGHIESSALLKEKQRHRLHKFLCLRVGKPMRKTFVSQASATMQQYAQRDKKHEYWFAVPQERTDHLYAFFIQWSPEIYAEDTGEYTREPGFIVVKKIEESETIEDSSNQAAAREWEVVSVAEYHRRIDALNTEELRTLCRRLQVPPSVV

SEQ ID NO: 824133 - protein, 544 aa, Homo sapiens
MTGSNTEEIDSRIRDAGNDSASTAPRSTEESLSEDVFTESELSPIREELVSSDELRQDKSSGASSESVQTVNQAEVESLTVKSESTGTPGHLRSDTEHSTNEVGTLCHKTDLNNLEMAIKEDQIADNFQGISGPKEDSTSIKGNSDQDSFLHENSLHQEESQKENMPCGETAEFKQKQSVNKGKQGKEQNQDSQTEAEELRKLWKTHTMQQTKQQRENIQQVSQKEAKHKITSADGHIESSALLKEKQRHRLHKFLCLRVGKPMRKTFVSQASATMQQYAQRDKKHEYWFAVPQERTDHLYAFFIQWSPEIYAEDTGEYTREPGFIVVKKIEESETIEDSSNQAAAREWEITTREDINSKQVATVKADLESESFRPNLSDPSELLLPDQIEKLTKHLPPRTIGYPWTLVYGTGKHGTSLKTLYRTMTGLDTPVLMVIKDSDGQVFGALASEPLKVSDGFYGTGETFVFTFCPEFEVFKWTGDNMFFIKGDMDSLAFGGGGGEFALWLDGDLYHGRSHSCKTFGNRTLSKKEDFFIQDIEIWAFE

SEQ ID NO: 824134 - protein, 216 aa, Homo sapiens
MSRLWYGKKGRRHQPINHKYTLITTREDINSKQVATVKADLESESFRPNLSDPSELLLPDQIEKLTKHLPPRTIGYPWTLVYGTGKHGTSLKTLYRTMTGLDTPVLMVIKDSDGQVFGALASEPLKVSDGFYGTGETFVFTFCPEFEVFKWTGDNMFFIKGDMDSLAFGGGGGEFALWLDGDLYHGRSHSCKTFGNRTLSKKEDFFIQDIEIWAFE

SEQ ID NO: 824135 - protein, 432 aa, Homo sapiens
MTGSNTEEIDSRIRDAGNDSASTAPRSTEESLSEDVFTESELSPIREELVSSDELRQDKSSGASSESVQTVNQAEVESLTVKSESTGTPGHLRSDTEHSTNEVGTLCHKTDLNNLEMAIKEDQIADNFQGISGPKEDSTSIKGNSDQDSFLHENSLHQEESQKENMPCGETAEFKQKQSVNKGKQGKEQNQDSQTEAEELRKLWKTHTMQQTKQQRENIQQVSQKEAKHKITSADGHIESSALLKEKQRHRLHKFLCLRVGKPMRKTFVSQASATMQQYAQRDKKHEYWFAVPQERTDHLYAFFIQWSPEIYAEDTGEYTREPGFIVVKKIEESETIEDSSNQAAAREWEITTREDINSKQVATVKADLESESFRPNLSDPSELLLPDQIEKLTKHLPPRTIGYPWTLVYGTGKHGTSLKTLYRTSFWCVSI

SEQ ID NO: 824136 - protein, 416 aa, Homo sapiens
SFSHTRREERKAMADKVLKEKRKLFIRSMGEGTINGLLDELLQTRVLNKEEMEKVKRENATVMDKTRALIDSVIPKGAQACQICITYICEEDSYLAGTLGLSADQTSGNYLNMQDSQGVLSSFPAPQAVQDNPAMPTSSGSEGNVKLCSLEEAQRIWKQKSAEIYPIMDKSSRTRLALIICNEEFDSIPRRTGAEVDITGMTMLLQNLGYSVDVKKNLTASDMTTELEAFAHRPEHKTSDSTFLVFMSHGIREGICGKKHSEQVPDILQLNAIFNMLNTKNCPSLKDKPKVIIIQACRGDSPGVVWFKDSVGVSGNLSLPTTEEFEDDAIKKAHIEKDFIAFCSSTPDNVSWRHPTMGSVFIGRLIEHMQEYACSCDVEEIFRKVRFSFEQPDGRAQMPTTERVTLTRCFYLFPGH

SEQ ID NO: 824137 - protein, 395 aa, Homo sapiens
SFSHTRREERKAMADKVLKEKRKLFIRSMGEGTINGLLDELLQTRVLNKEEMEKVKRENATVMDKTRALIDSVIPKGAQACQICITYICEEDSYLAGTLGLSAAPQAVQDNPAMPTSSGSEGNVKLCSLEEAQRIWKQKSAEIYPIMDKSSRTRLALIICNEEFDSIPRRTGAEVDITGMTMLLQNLGYSVDVKKNLTASDMTTELEAFAHRPEHKTSDSTFLVFMSHGIREGICGKKHSEQVPDILQLNAIFNMLNTKNCPSLKDKPKVIIIQACRGDSPGVVWFKDSVGVSGNLSLPTTEEFEDDAIKKAHIEKDFIAFCSSTPDNVSWRHPTMGSVFIGRLIEHMQEYACSCDVEEIFRKVRFSFEQPDGRAQMPTTERVTLTRCFYLFPGH

SEQ ID NO: 824138 - protein, 100 aa, Homo sapiens
SFSHTRREERKAMADKVLKEKRKLFIRSMGEDNVSWRHPTMGSVFIGRLIEHMQEYACSCDVEEIFRKVRFSFEQPDGRAQMPTTERVTLTRCFYLFPGH

SEQ ID NO: 824139 - protein, 395 aa, Homo sapiens; identical to SEQ ID NO: 824137

SEQ ID NO: 824140 - protein, 367 aa, Homo sapiens
MGEGTINGLLDELLQTRVLNKEEMEKVKRENATVMDKTRALIDSVIPKGAQACQICITYICEEDSYLAGTLGLSAAPQAVQDNPAMPTSSGSEGNVKLCSLEEAQRIWKQKSAEIYPIMDKSSRTRLALIICNEEFDSIPRRTGAEVDITGMTMLLQNLGYSVDVKKNLTASDMTTELEAFAHRPEHKTSDSTFLVFMSHGIREGICGKKHSEQVPDILQLNAIFNMLNTKNCPSLKDKPKVIIIQACRGDSPGVVWFKDSVGVSGNLSLPTTEEFEDDAIKKAHIEKDFIAFCSSTPDNVSWRHPTMGSVFIGRLIEHMQEYACSCDVEEIFRKVRFSFEQPDGRAQMPTTERVTLTRCFYLFPGH

SEQ ID NO: 824141 - protein, 342 aa, Homo sapiens
CRPSRRDCAAAGAAADADREEEGRRRAGELKSRQPLDRLPYLAGTLGLSAAPQAVQDNPAMPTSSGSEGNVKLCSLEEAQRIWKQKSAEIYPIMDKSSRTRLALIICNEEFDSIPRRTGAEVDITGMTMLLQNLGYSVDVKKNLTASDMTTELEAFAHRPEHKTSDSTFLVFMSHGIREGICGKKHSEQVPDILQLNAIFNMLNTKNCPSLKDKPKVIIIQACRGDSPGVVWFKDSVGVSGNLSLPTTEEFEDDAIKKAHIEKDFIAFCSSTPDNVSWRHPTMGSVFIGRLIEHMQEYACSCDVEEIFRKVRFSFEQPDGRAQMPTTERVTLTRCFYLFPGH

SEQ ID NO: 824142 - protein, 323 aa, Homo sapiens
SFSHTRREERKAMADKVLKEKRKLFIRSMGEAPQAVQDNPAMPTSSGSEGNVKLCSLEEAQRIWKQKSAEIYPIMDKSSRTRLALIICNEEFDSIPRRTGAEVDITGMTMLLQNLGYSVDVKKNLTASDMTTELEAFAHRPEHKTSDSTFLVFMSHGIREGICGKKHSEQVPDILQLNAIFNMLNTKNCPSLKDKPKVIIIQACRGDSPGVVWFKDSVGVSGNLSLPTTEEFEDDAIKKAHIEKDFIAFCSSTPDNVSWRHPTMGSVFIGRLIEHMQEYACSCDVEEIFRKVRFSFEQPDGRAQMPTTERVTLTRCFYLFPGH

SEQ ID NO: 824143 - protein, 275 aa, Homo sapiens
SFSHTRREERKAMADKVLKEKRKLFIRSMGEAPQAVQDNPAMPTSSGSEGNVKLCSLEEAQRIWKQKSAEIYPIMDKSSRTRLALIICNEEFDSIPRRTGAEVDITGMTMLLQNLGYSVDVKKNLTASDMTTELEAFAHRPEHKTSDSTFLVFMSHGIREGICGKKHSEQVPDILQLNAIFNMLNTKNCPSLKDKPKVIIIQACRGDNVSWRHPTMGSVFIGRLIEHMQEYACSCDVEEIFRKVRFSFEQPDGRAQMPTTERVTLTRCFYLFPGH

SEQ ID NO: 824144 - protein, 395 aa, Homo sapiens; identical to SEQ ID NO: 824137

SEQ ID NO: 824145 - protein, 375 aa, Homo sapiens
SFSHTRREERKAMADKVLKEKRKLFIRSMGEGTINGLLDELLQTRVLNKEEMEKVKRENATVMDKTRALIDSVIPKGAQACQICITYICEEDTMPTSSGSEGNVKLCSLEEAQRIWKQKSAEIYPIMDKSSRTRLALIICNEEFDSIPRRTGAEVDITGMTMLLQNLGYSVDVKKNLTASDMTTELEAFAHRPEHKTSDSTFLVFMSHGIREGICGKKHSEQVPDILQLNAIFNMLNTKNCPSLKDKPKVIIIQACRGDSPGVVWFKDSVGVSGNLSLPTTEEFEDDAIKKAHIEKDFIAFCSSTPDNVSWRHPTMGSVFIGRLIEHMQEYACSCDVEEIFRKVRFSFEQPDGRAQMPTTERVTLTRCFYLFPGH

SEQ ID NO: 824146 - protein, 89 aa, Homo sapiens
MGILKLQVFLIVLSVALNHLKATPIESHQVEKRKCNTATCATQRLANFLVHSSNNFGAILSSTNVGSNTYGKRNAVEVLKREPLNYLPL

SEQ ID NO: 824147 - protein, 89 aa, Homo sapiens; identical to SEQ ID NO: 824146

SEQ ID NO: 824148 - protein, 89 aa, Homo sapiens; identical to SEQ ID NO: 824146

SEQ ID NO: 824149 - protein, 106 aa, Homo sapiens
MAPEEIIMDRPFLFVVRHNPTGEPGTHHRSTSSHPFFLSGTSPDRCRHPSIPERALGREPITLPCFLSQEEATFYHPQTVPGPRSVTQAAATPDSSLICLDLSPST

SEQ ID NO: 824150 - protein, 89 aa, Homo sapiens
LHQPSFHCSRMQMSPALTCLVLGLALVFGEGSAVHHPPSYVAHLASDFGVRVFQQVAQASKDRNVVFSPYGVASVLAMLQLTTGRITQG

SEQ ID NO: 824151 - protein, 451 aa, Homo sapiens
GAQLCLAAGPRALSRRPTRPPPAAEFLQLSSRRQSRTNRQSQGTSENFRMQMSPALTCLVLGLALVFGEGSAVHHPPSYVAHLASDFGVRVFQQVAQASKDRNVVFSPYGVASVLAMLQLTTGGETQQQIQAAMGFKIDDKGMAPALRHLYKELMGPWNKDEISTTDAIFVQRDLKLVQGFMPHFFRLFRSTVKQVDFSEVERARFIINDWVKTHTKGMISNLLGKGAVDQLTRLVLVNALYFNGQWKTPFPDSSTHRRLFHKSDGSTVSVPMMAQTNKFNYTEFTTPDGHYYDILELPYHGDTLSMFIAAPYEKEVPLSALTNILSAQLISHWKGNMTRLPRLLVLPKFSLETEVDLRKPLENLGMTDMFRQFQADFTSLSDQEPLHVAQALQKVKIEVNESGTVASSSTAVIVSARMAPEEIIMDRPFLFVVRHNPTGTVLFMGQVMEP

SEQ ID NO: 824152 - protein, 451 aa, Homo sapiens; identical to SEQ ID NO: 824151

SEQ ID NO: 824153 - protein, 320 aa, Homo sapiens
RTRGRPRVDKGMAPALRHLYKELMGPWNKDEISTTDAIFVQRDLKLVQGFMPHFFRLFRSTVKQVDFSEVERARFIINDWVKTHTKGMISNLLGKGAVDQLTRLVLVNALYFNGQWKTPFPDSSTHRRLFHKSDGSTVSVPMMAQTNKFNYTEFTTPDGHYYDILELPYHGDTLSMFIAAPYEKEVPLSALTNILSAQLISHWKGNMTRLPRLLVLPKFSLETEVDLRKPLENLGMTDMFRQFQADFTSLSDQEPLHVAQALQKVKIEVNESGTVASSSTAVIVSARMAPEEIIMDRPFLFVVRHNPTGTVLFMGQVMEP

SEQ ID NO: 824154 - protein, 451 aa, Homo sapiens; identical to SEQ ID NO: 824151

SEQ ID NO: 824155 - protein, 269 aa, Homo sapiens
SVGTQADSSTVKQVDFSEVERARFIINDWVKTHTKGMISNLLGKGAVDQLTRLVLVNALYFNGQWKTPFPDSSTHRRLFHKSDGSTVSVPMMAQTNKFNYTEFTTPDGHYYDILELPYHGDTLSMFIAAPYEKEVPLSALTNILSAQLISHWKGNMTRLPRLLVLPKFSLETEVDLRKPLENLGMTDMFRQFQADFTSLSDQEPLHVAQALQKVKIEVNESGTVASSSTAVIVSARMAPEEIIMDRPFLFVVRHNPTGTVLFMGQVMEP

SEQ ID NO: 824156 - protein, 451 aa, Homo sapiens; identical to SEQ ID NO: 824151

SEQ ID NO: 824157 - protein, 316 aa, Homo sapiens
GAQLCLAAGPRALSRRPTRPPPAAEFLQLSSRRQSRTNRQSQGTSENFRMQMSPALTCLVLGLALVFGEGSAVHHPPSYVAHLASDFGVRVFQQVAQASKDRNVVFSPYGVASVLAMLQLTTGGETQQQIQAAMGFKIDDKGMAPALRHLYKELMGPWNKDEISTTDAIFVQRDLKLVQGFMPHFFRLFRSTVKQVDFSEVERARFIINDWVKTHTKGMISNLLGKGAVDQLTRLVLVNALYFNGQWKTPFPDSSTHRRLFHKSDGSTVSVPMMAQTNKFNYTEFTTPDGHYYDILELPYHGDTLSMFIACRPGSH

SEQ ID NO: 824158 - protein, 450 aa, Homo sapiens
GAQLCLAAGPRALSRRPTRPPPAAEFLQLSSRRQSRTNRQSQGTSENFRMQMSPALTCLVLGLALVFGEGSAVHHPPSYVAHLASDFGVRVFQQVAQASKDRNVVFSPYGVASVLAMLQLTTGGETQQQIQAAMGFKIDDKGMAPALRHLYKELMGPWNKDEISTTDAIFVQRDLKLVQGFMPHFFRLFRSTVKQVDFSEVERARFIINDWVKTHTKGMISNLLGKGAVDQLTRLVLVNALYFNGQWKTPFPDSSTHRRLFHKSDGSTVSVPMMAQTNKFNYTEFTTPDGHYYDILELPYHGDTLSMFIAAPYEKEVPLSALTNILSAQLISHWKGNMTRLPRLLVLPKFSLETEVDLRKPLENLGMTDMFRQFQADFTSLSDQEPLHVAQALQKVKIEVNESGTVASSSTAVIVSARMAPEEIIMDRPFLFVAWPSPSPETVCMGYFGV

SEQ ID NO: 824159 - protein, 451 aa, Homo sapiens; identical to SEQ ID NO: 824151

SEQ ID NO: 824160 - protein, 524 aa, Homo sapiens
GAQLCLAAGPRALSRRPTRPPPAAEFLQLSSRRQSRTNRQSQGTSENFRMQMSPALTCLVLGLALVFGEGSAVHHPPSYVAHLASDFGVRVFQQVAQASKDRNVVFSPYGVASVLAMLQLTTGGETQQQIQAAMGFKIDDKGMAPALRHLYKELMGPWNKDEISTTDAIFVQRDLKLVQGFMPHFFRLFRSTVKQVDFSEVERARFIINDWVKTHTKGMISNLLGKGAVDQLTRLVLVNALYFNGQWKTPFPDSSTHRRLFHKSDGSTVSVPMMAQTNKFNYTEFTTPDGHYYDILELPYHGDTLSMFIAAPYEKEVPLSALTNILSAQLISHWKGNMTRLPRLLVLPKFSLETEVDLRKPLENLGMTDMFRQFQADFTSLSDQEPLHVAQALQKVKIEVNESGTVASSSTAVIVSARMAPEEIIMDRPFLFVVRHNPTGEPGTHHRSTSSHPFFLSGTSPDRCRHPSIPERALGREPITLPCFLSQEEATFYHPQTVPGPRSVTQAAATPDSSLICLDLSPST

SEQ ID NO: 824161 - protein, 432 aa, Homo sapiens
GAQLCLAAGPRALSRRPTRPPPAAEFLQLSSRRQSRTNRQSQGTSENFRMQMSPALTCLVLGLALVFGEGSAVHHPPSYVAHLASDFGVRVFQQVAQASKDRNVVFSPYGVASVLAMLQLTTGGETQQQIQAAMGFKIDDKGMAPALRHLYKELMGPWNKDEISTTDAIFVQRDLKLVQGFMPHFFRLFRSTVKQVDFSEVERARFIINDWVKTHTKGMISNLLGKGAVDQLTRLVLVNALYFNGQWKTPFPDSSTHRRLFHKSDGSTVSVPMMAQTNKFNYTEFTTPDGHYYDILELPYHGDTLSMFIAAPYEKEVPLSALTNILSAQLISHWKGNMTRLPRLLVLPKFSLETEVDLRKPLENLGMTDMFRQFQADFTSLSDQEPLHVAQALQKVKIEVNESGTVASSSTAVIVSAPLPQRYFCTMGSSRT

SEQ ID NO: 824162 - protein, 489 aa, Homo sapiens
GAQLCLAAGPRALSRRPTRPPPAAEFLQLSSRRQSRTNRQSQGTSENFRMQMSPALTCLVLGLALVFGEGSAVHHPPSYVAHLASDFGVRVFQQVAQASKDRNVVFSPYGVASVLAMLQLTTGGETQQQIQAAMGFKIDDKGMAPALRHLYKELMGPWNKDEISTTDAIFVQRDLKLVQGFMPHFFRLFRSTVKQVDFSEVERARFIINDWVKTHTKGMISNLLGKGAVDQLTRLVLVNALYFNGQWKTPFPDSSTHRRLFHKSDGSTVSVPMMAQTNKFNYTEFTTPDGHYYDILELPYHGDTLSMFIAAPYEKEVPLSALTNILSAQLISHWKGNMTRLPRLLVLPKFSLETEVDLRKPLENLGMTDMFRQFQADFTSLSDQEPLHVAQALQKVKIEVNESGTVASSSTGESGSGEAPRVSPPSPFRITGPQTRKGPRSPLGTEQLCLCSAITHSPPVSQPGKRAWDHGTLFPRLMAPKFPDCEKAS

SEQ ID NO: 824163 - protein, 349 aa, Homo sapiens
GAQLCLAAGPRALSRRPTRPPPAAEFLQLSSRRQSRTNRQSQGTSENFRMQMSPALTCLVLGLALVFGEGSAVHHPPSYVAHLASDFGVRVFQQVAQASKDRNVVFSPYGVASVLAMLQLTTGGETQQQIQAAMGFKIDDKGMAPALRHLYKELMGPWNKDEISTTDAIFVQRDLKLVQGFMPHFFRLFRSTVKQVDFSEVERARFIINDWVKTHTKGMISNLLGKGAVDQLTRLVLVNALYFNGQWKTPFPDSSTHRRLFHKSDGSTVSVPMMAQTNKFNYTEFTTPDGHYYDILELPYHGDTLSMFIAAPYEKEVPLSALTNILSAQLISHWKGNMTRLPRLLVLPK

SEQ ID NO: 824164 - protein, 328 aa, Homo sapiens
GAQLCLAAGPRALSRRPTRPPPAAEFLQLSSRRQSRTNRQSQGTSENFRMQMSPALTCLVLGLALVFGEGSAVHHPPSYVAHLASDFGVRVFQQVAQASKDRNVVFSPYGVASVLAMLQLTTGGETQQQIQAAMGFKIDDKGMAPALRHLYKELMGPWNKDEISTTDAIFVQRDLKLVQGFMPHFFRLFRSTVKQVDFSEVERARFIINDWVKTHTKGMISNLLGKGAVDQLTRLVLVNALYFNGQWKTPFPDSSTHRRLFHKSDGSTVSVPMMAQTNKFNYSKSKSPFPTAHSNCISFLGSPKEYPKCHPLREEDHRECSPLREERP

SEQ ID NO: 824165 - protein, 142 aa, Homo sapiens
GHSCVWLQGQERCQEDPHAPLQQLNSCSSAAAARAGRTANRKAPLRTSGRRKANSLQPLTSGLRQRTRLPRISSLHDPPLFLYFLFLGPAALGRPCPRGDCRRAGRMVRRHQQPHHPVTRTLTLSVPLHQDTYPFPTSCLLT

SEQ ID NO: 824166 - protein, 160 aa, Homo sapiens [sequence omitted]

SEQ ID NO: 824167 - protein, 439 aa, Homo sapiens
PAAFLLLLPPAAEFLQLSSRRQSRTNRQSQGTSENFRMQMSPALTCLVLGLALVFGEGSAVHHPPSYVAHLASDFGVRVFQQVAQASKDRNVVFSPYGVASVLAMLQLTTGGETQQQIQAAMGFKIDDKGMAPALRHLYKELMGPWNKDEISTTDAIFVQRDLKLVQGFMPHFFRLFRSTVKQVDFSEVERARFIINDWVKTHTKGMISNLLGKGAVDQLTRLVLVNALYFNGQWKTPFPDSSTHRRLFHKSDGSTVSVPMMAQTNKFNYTEFTTPDGHYYDILELPYHGDTLSMFIAAPYEKEVPLSALTNILSAQLISHWKGNMTRLPRLLVLPKFSLETEVDLRKPLENLGMTDMFRQFQADFTSLSDQEPLHVAQALQKVKIEVNESGTVASSSTAVIVSARMAPEEIIMDRPFLFVVRHNPTGTVLFMGQVMEP

SEQ ID NO: 824168 - protein, 451 aa, Homo sapiens; identical to SEQ ID NO: 824151

SEQ ID NO: 824169 - protein, 321 aa, Homo sapiens
YIYDLSEYLNKGMAPALRHLYKELMGPWNKDEISTTDAIFVQRDLKLVQGFMPHFFRLFRSTVKQVDFSEVERARFIINDWVKTHTKGMISNLLGKGAVDQLTRLVLVNALYFNGQWKTPFPDSSTHRRLFHKSDGSTVSVPMMAQTNKFNYTEFTTPDGHYYDILELPYHGDTLSMFIAAPYEKEVPLSALTNILSAQLISHWKGNMTRLPRLLVLPKFSLETEVDLRKPLENLGMTDMFRQFQADFTSLSDQEPLHVAQALQKVKIEVNESGTVASSSTAVIVSARMAPEEIIMDRPFLFVVRHNPTGTVLFMGQVMEP

SEQ ID NO: 824170 - protein, 257 aa, Homo sapiens
KTTTTTTTKSSNFLIFLIIDFPIGMISNLLGKGAVDQLTRLVLVNALYFNGQWKTPFPDSSTHRRLFHKSDGSTVSVPMMAQTNKFNYTEFTTPDGHYYDILELPYHGDTLSMFIAAPYEKEVPLSALTNILSAQLISHWKGNMTRLPRLLVLPKFSLETEVDLRKPLENLGMTDMFRQFQADFTSLSDQEPLHVAQALQKVKIEVNESGTVASSSTAVIVSARMAPEEIIMDRPFLFVVRHNPTGTVLFMGQVMEP

SEQ ID NO: 824171 - protein, 235 aa, Homo sapiens
KTTTTTTTKSSNFLIFLIIDFPIGMISNLLGKGAVDQLTRLVLVNALYFNGQWKTPFPDSSTHRRLFHKSDGSTVSVPMMAQTNKFNYTEFTTPDGHYYDILELPYHGDTLSMFIAHWKGNMTRLPRLLVLPKFSLETEVDLRKPLENLGMTDMFRQFQADFTSLSDQEPLHVAQALQKVKIEVNESGTVASSSTAVIVSARMAPEEIIMDRPFLFVVRHNPTGTVLFMGQVMEP

SEQ ID NO: 824172 - protein, 100 aa, Homo sapiens
QKRREIEIKILNRGAVNRGYPKAKSEREPGFQKYVEKPGELGENPVLGCHQRELEPFPTNHLVVFTAEFTTPDGHYYDILELPYHGDTLSMFIACRPGSH

SEQ ID NO: 824173 - protein, 451 aa, Homo sapiens; identical to SEQ ID NO: 824151

SEQ ID NO: 824174 - protein, 457 aa, Homo sapiens
GAQLCLAAGPRALSRRPTRPPPAAEFLQLSSRRQSRTNRQSQGTSENFRMQMSPALTCLVLGLALVFGEGSAVHHPPSYVAHLASDFGVRVFQQVAQASKDRNVVFSPYGVASVLAMLQLTTGGETQQQIQAAMGFKIDDKGMAPALRHLYKELMGPWNKDEISTTDAIFVQRDLKLVQGFMPHFFRLFRSTVKQVDFSEVERARFIINDWVKTHTKGMISNLLGKGAVDQLTRLVLVNALYFNGQWKTPFPDSSTHRRLFHKSDGSTVSVPMMAQTNKFNYTEFTTPDGHYYDILELPYHGDTLSMFIAAPYEKEVPLSALTNILSAQLISHWKGNMTRLPRLLVLPKFSLETEVDLRKPLENLGMTDMFRQFQADFTSLSDQEPLHVAQALQKVKIEVNESGTVASSSTAVIVSARMAPEEIIMDRPFLFVVRHNPTGTVLFMGQVMDPRGILDR

SEQ ID NO: 824175 - protein, 328 aa, Homo sapiens; identical to SEQ ID NO: 824164

SEQ ID NO: 824176 - protein, 137 aa, Homo sapiens
MDPKGLLSLTFVLFLSLAFGASYGTGGRMMNCPKILRQLGSKVLLPLTYERINKSMNKSIHIVVTMAKSLENSVENKIVSLDPSEAGPPRYLGDRYKFYLENLTLGIRESRKEDEGWYLMTLEKNFTFWLSLLCSGS

SEQ ID NO: 824177 - protein, 335 aa, Homo sapiens
MDPKGLLSLTFVLFLSLAFGASYGTGGRMMNCPKILRQLGSKVLLPLTYERINKSMNKSIHIVVTMAKSLENSVENKIVSLDPSEAGPPRYLGDRYKFYLENLTLGIRESRKEDEGWYLMTLEKNVSVQRFCLQLRLYEQVSTPEIKVLNKTQENGTCTLILGCTVEKGDHVAYSWSEKAGTHPLNPANSSHLLSLTLGPQHADNIYICTVSNPISNNSQTFSPWPGCRTDPSETKPWAVYAGLLGGVIMILIMVVILQLRRRGKTNHYQTTVEKKSLTIYAQVQKPGPLQKKLDSFPAQDPCTTIYVAATEPVPESVQETNSITVYASVTLPES

SEQ ID NO: 824178 - protein, 153 aa, Homo sapiens
MAAVEHRHSSGLPYWPYLTAETLKNRMGHQPPPPTQQHSIIDNSLSLKTPSECVLYPLPPSADDNLKTPPECLLTPLPPSALPSADDNLKTPAECLLYPLPPSADDNLKTPPECLLTPLPPSAPPSADDNLKTPPECVCSLPFHPQRMIISRN

SEQ ID NO: 824179 - protein, 123 aa, Homo sapiens
KVIVIHREMFQRAQALRRRAEDYYRCKITPSARKPLCNRVSLLVFLAFGHSLPGQDMDTFFSLRLCAQALQREMAERKAAYKHHSPIPVGNCVAQKHLHPHPVGPPSNILSVRGSVFVIANGP

SEQ ID NO: 824180 - protein, 615 aa, Homo sapiens
GCGSAISHSTRSTGMILLVEALHSGVNSGVGFRADSHPDVPGSVPSATQTQSTPTSRQACDLRVSAPGRYLSEEPEPYLAVYLHSEPRPNERNCSASRRIRPESLQGADHRPYTFFISPGTRDPVGSYRLNLSSHFRWSALEVSVGLYTSLCQYFSEEDVVWRTEGLLPLEETSPRQAVCLTRHLTAFGTSLFVPPSHIRFVFPEPTADVNYIVMLTCAVCLVTYMVMAAILHKLDQLDASRGCAIPFCGQRGRFKYEILVKTGWGRGSGTTAHVGIMLYGVDSRSGHRHLDGDRAFHRNSLDIFQIATPHSLGSVWKIRVWHDNKGLYGPCQALPLCPCIGAPCEPDLPPAPLQGSALPGSCSTSSSGTCRRHAAPSSWSMTGFRWRRRPTGAWWRRRCWPRVRPRSVFPLRGRLGRVVLPRGLLQCGPPCLLGHAALLRFRRLLVAELQRGFFDKHIWLSIWDRPPRSCFTRIQRATCCVLLICLFLGANAVWYGAVGDSAYSTGRVSRLNPLSVDTVAVGLVSSVVVYPVYLAILFLFRMSRSKVAGSPSPTPAGQQVLDVDSCLDSSVLDSSFLTFSGLHAEVRALLGVLPPWRSLDSRPCAPLSRPLLDR

SEQ ID NO: 824181 - protein, 544 aa, Homo sapiens
GCGSAISHSTRSTGMILLVEALHSGVNSGVGFRADSHPDVPGSVPSATQTQSTPTSRQACDLRVSAPGRYLSEEPEPYLAVYLHSEPRPNERNCSASRRIRPESLQGADHRPYTFFISPGTRDPVGSYRLNLSSHFRWSALEVSVGLYTSLCQYFSEEDVVWRTEGLLPLEETSPRQAVCLTRHLTAFGTSLFVPPSHIRFVFPEPTADVNYIVMLTCAVCLVTYMVMAAILHKLDQLDASRGCAIPFCGQRGRFKYEILVKTGWGRGSGTTAHVGIMLYGVDSRSGHRHLDGDRAFHRNSLDIFQIATPHSLGSVWKIRVWHDNKGLYGPCQALPLCPCIGAPCEPDLPPAPLQGSALPGSCSTSSSGTCRRHAAPSSWSMTGFRWRRRPTGAWWRRRCWPRVRPRSVFPLRGRLGRVVLPRGLLQCGPPCLLGHAALLRFRRLLVAELQRGFFDKHIWLSIWDRPPRSCFTRIQRATCCVLLICLFLGANAVWYGAVGDSAYRWLGARAPHLPGSRCWTSTAAWTHPCWTAPSSRSQASTLR

SEQ ID NO: 824182 - protein, 130 aa, Homo sapiens
SPVPHGVGAQEETDEENAAGGPLVSSVVVYPVYLAILFLFRMSRSKVAGSPSPTPAGQQVLDVDSCLDSSVLDSSFLTFSGLHAEQAFAGQMKSDLFLDDSKRLSILWLTIVIVGLTLVEVLGYLSLLCF

SEQ ID NO: 824183 - protein, 615 aa, Homo sapiens; identical to SEQ ID NO: 824180

SEQ ID NO: 824184 - protein, 615 aa, Homo sapiens; identical to SEQ ID NO: 824180

SEQ ID NO: 824185 - protein, 615 aa, Homo sapiens; identical to SEQ ID NO: 824180

SEQ ID NO: 824186 - protein, 615 aa, Homo sapiens; identical to SEQ ID NO: 824180

SEQ ID NO: 824187 - protein, 615 aa, Homo sapiens; identical to SEQ ID NO: 824180

SEQ ID NO: 824188 - protein, 615 aa, Homo sapiens; identical to SEQ ID NO: 824180

SEQ ID NO: 824189 - protein, 615 aa, Homo sapiens; identical to SEQ ID NO: 824180

SEQ ID NO: 824190 - protein, 615 aa, Homo sapiens; identical to SEQ ID NO: 824180

SEQ ID NO: 824191 - protein, 615 aa, Homo sapiens; identical to SEQ ID NO: 824180

SEQ ID NO: 824192 - protein, 615 aa, Homo sapiens; identical to SEQ ID NO: 824180

SEQ ID NO: 824193 - protein, 615 aa, Homo sapiens; identical to SEQ ID NO: 824180

SEQ ID NO: 824194 - protein, 615 aa, Homo sapiens; identical to SEQ ID NO: 824180

SEQ ID NO: 824195 - protein, 593 aa, Homo sapiens
GCGSAISHSTRSTGMILLVEALHSGVNSGVGFRADSHPDVPGSVPSATQTQSTPTSRQACDLRVSAPGRYLSEEPEPYLAVYLHSEPRPNERNCSASRRIRPESLQGADHRPYTFFISPGTRDPVGSYRLNLSSHFRWSALEVSVGLYTSLCQYFSEEDVVWRTEGLLPLEETSPRQAVCLTRHLTAFGTSLFVPPSHIRFVFPEPTADVNYIVMLTCAVCLVTYMVMAAILHKLDQLDASRGCAIPFCGQRGRFKYEILVKTGWGRGSGTTAHVGIMLYGVDSRSGHRHLDGDRAFHRNSLDIFQIATPHSLGSVWKIRVWHDNKGLYGPCQALPLCPCIGAPCEPDLPPAPLQGSALPGSCSTSSSGTCRRHAAPSSWSMTGFRWRRRPTGAWWRRRCWPRVRPRSVFPLRGRLGRVVLPRGLLQCGPPCLLGHAALLRFRRLLVAELQRGFFDKHIWLSIWDRPPRSCFTRIQRATCCVLLICLFLGANAVWYGAVGDSAYSTGRVSRLNPLSVDTVAVGLVSSVVVYPVYLAILFLFRMSRSKVGWGWGPGSTGNGAWASAPCPGPPLSSAAARGKGVHQRLLGKGQHT

SEQ ID NO: 824196 - protein, 248 aa, Homo sapiens
MRATRCRACSWMEAGEPGWWERGLVEKEVLAASHAALLRFRRLLVAELQRGFFDKHIWLSIWDRPPRSCFTRIQRATCCVLLICLFLGANAVWYGAVGDSAYSTGHVSRLSPLSVDTVAVGLVSSVVVYPVYLAILFLFRMSRSKVAGSLSPTPAGQQVLDIDSCLDSSVLDSSFLTFSGLHAEQAFAGQVKSDLFLDDSKSDLEEPWELRKEGAPRSRDRELVGEDQKSVETGFHRVRQDSLHVLTS

SEQ ID NO: 824197 - protein, 132 aa, Homo sapiens
PPGSRFARKPRVSVRDWTGVGCVCDTSPGTLLTRATCSLVCWPSSEGTPSWPDLLSDPSIVGSNLRHDPHLLGLSFYNQHNRNLGLLLFFFFFLRQSLIPFCHPGWSAMVRSRLTATSASQVQGIVLPQPPE

SEQ ID NO: 824198 - protein, 615 aa, Homo sapiens; identical to SEQ ID NO: 824180

SEQ ID NO: 824199 - protein, 615 aa, Homo sapiens; identical to SEQ ID NO: 824180

SEQ ID NO: 824200 - protein, 615 aa, Homo sapiens; identical to SEQ ID NO: 824180

SEQ ID NO: 824201 - protein, 615 aa, Homo sapiens; identical to SEQ ID NO: 824180

SEQ ID NO: 824202 - protein, 615 aa, Homo sapiens; identical to SEQ ID NO: 824180

SEQ ID NO: 824203 - protein, 615 aa, Homo sapiens; identical to SEQ ID NO: 824180

SEQ ID NO: 824204 - protein, 615 aa, Homo sapiens; identical to SEQ ID NO: 824180

SEQ ID NO: 824205 - protein, 615 aa, Homo sapiens; identical to SEQ ID NO: 824180

SEQ ID NO: 824206 - protein, 615 aa, Homo sapiens; identical to SEQ ID NO: 824180

SEQ ID NO: 824207 - protein, 615 aa, Homo sapiens; identical to SEQ ID NO: 824180

SEQ ID NO: 824208 - protein, 615 aa, Homo sapiens; identical to SEQ ID NO: 824180

SEQ ID NO: 824209 - protein, 615 aa, Homo sapiens; identical to SEQ ID NO: 824180

SEQ ID NO: 824210 - protein, 250 aa, Homo sapiens
MRATRCRACSWMEAGEPGWWERGLVEKEVLAASHAALLRFRRLLVAELQRGFFDKHIWLSIWDRPPRSCFTRIQRATCCVLLICLFLGANAVWYGAVGDSAYSTGHVSRLSPLSVDTVAVGLVSSVVVYPVYLAILFLFRMSRSKVAGSLSPTPAGQQVLDIDSCLDSSVLDSSFLTFSGLHAEVINTLADHRHRGTDFGGSPWLLIITVFLRSYKFAISLCTSYLCVSILTFCRGILVITNKNKLYETI

SEQ ID NO: 824211 - protein, 98 aa, Homo sapiens
ITQHLARNCTPGVVGILLASCRPPALLTACCAPCLPQYERALDVAAEPKHERQRRAQIRKNITETLVSLRVHTVDDIQQIAAALAQCMVGWPHMLSPP

SEQ ID NO: 824212 - protein, 482 aa, Homo sapiens
LPTRVQTLFFWGVSLAAGAVFLSVIYLTYTGYIAPWSGRFYSLWDTGYAKIHIPIIASVSEHQPTTWVSFFFDLHILVCTFPAGLWFCIKNINDERVFVALYAISAVYFAGVMVRLMLTLTPVVCMLSAIAFSNVFEHYLGDDMKRENPPVEDSSDEDDKRNQGNLYDKAGKVRKHATEQEKTEEGLGPNIKSIVTMLMLMLLMMFAVHCTWVTSNAYSSPSVVLASYNHDGTRNILDDFREAYFWLRQNTDEHARVMSWWDYGYQIAGMANRTTLVDNNTWNNSHIALVGKAMSSNETAAYKIMRTLDVDYVLVIFGGVIGYSGDDINKFLWMVRIAEGEHPKDIRESDYFTPQGEFRVDKAGSPTLLNCLMYKMSYYRFGEMQLDFRTPPGFDRTRNAEIGNKDIKFKHLEEAFTSEHWLVRIYKVKAPDNRETLDHKPRVTNIFPKQKYLSKKTTKRKRGYIKNKLVFKKGKKISKKTV

SEQ ID NO: 824213 - protein, 482 aa, Homo sapiens; identical to SEQ ID NO: 824212

SEQ ID NO: 824214 - protein, 482 aa, Homo sapiens; identical to SEQ ID NO: 824212

SEQ ID NO: 824215 - protein, 326 aa, Homo sapiens
LPTRVQTLFFWGVSLAAGAVFLSVIYLTYTGYIAPWSGRFYSLWDTGYAKIHIPIIASVSEHQPTTWVSFFFDLHILVCTFPAGLWFCIKNINDERVFVALYAISAVYFAGVMVRLMLTLTPVVCMLSAIAFSNVFEHYLGDDMKRENPPVEDSSDEDDKRNQGNLYDKAGKVRKHATEQEKTEEGLGPNIKSIVTMLMLMLLMMFAVHCTWVTSNAYSSPSVVLASYNHDGTRNILDDFREAYFWLRQNTDEHARVMSWWDYGYQIAGMANRTTLVDNNTWNNSHIALTPLLLVEKCRIVCTFYEEKCNLQYSVRMLLLIFFSKV

SEQ ID NO: 824216 - protein, 482 aa, Homo sapiens; identical to SEQ ID NO: 824212

SEQ ID NO: 824217 - protein, 460 aa, Homo sapiens
LPTRVQTLFFWGVSLAAGAVFLSVIYLTYTGYIAPWSGRFYSLWDTGYAKIHIPIIASVSEHQPTTWVSFFFDLHILVCTFPAGLWFCIKNINDERVFVALYAISAVYFAGVMVRLMLTLTPVVCMLSAIAFSNVFEHYLGDDMKRENPPVEDSSDEDDKRNQGNLYDKAGKVRKHATEQEKTEEGLGPNIKSIVTMLMLMLLMMFAVHCTWVTSNAYSSPSVVLASYNHDGTRNILDDFREAYFWLRQNTDEHARVMSWWDYGYQIAGMANRTTLVDNNTWNNSHIALVGKAMSSNETAAYKIMRTLDVDYVLVIFGGVIGYSGDDINKFLWMVRIAEGEHPKDIRESDYFTPQGEFRVDKAGSPTLLNCLMYKMSYYRFGEMQLDFRTPPGFDRTRNAEIGNKDIKFKHLEEAFTSEHWLVRIYKVKAPDNRETLDHKPRVTNIFPKQKYLSKKVGAK

SEQ ID NO: 824218 - protein, 482 aa, Homo sapiens; identical to SEQ ID NO: 824212

SEQ ID NO: 824219 - protein, 488 aa, Homo sapiens
MENLTKHSIECSSFRGDWECKNQFERKQGSQEGHFSEMIFTPEDMPTFSIQHQRIHTDEKLLECKECGKDFSFVSVLVRHQRIHTGEKPYECKECGKAFGSGANLAYHQRIHTGEKPFECKECGKAFGSGSNLTHHQRIHTGEKPYECKECGKAFSFGSGLIRHQIIHSGEKPYECKECGKSFSFESALIRHHRIHTGEKPYECIDCGKAFGSGSNLTQHRRIHTGEKPYECKACGMAFSSGSALTRHQRIHTGEKPYICNECGKAFSFGSALTRHQRIHTGEKPYVCKECGKAFNSGSDLTQHQRIHTGEKPYECKECEKAFRSGSKLIQHQRMHTGEKPYECKECGKTFSSGSDLTQHHRIHTGEKPYECKECGKAFGSGSKLIQHQLIHTGERPYECKECGKSFSSGSALNRHQRIHTGEKPYECKECGKAFYSGSSLTQHQRIHTGEKLYECKNCGKAYGRDSEFQQHKKSHNGKKLCELETIN

SEQ ID NO: 824220 - protein, 119 aa, Homo sapiens
MAVEHPQGTCKTSNFTLELSRNMACLFPQISLGLQTKGWNFEPISRLLVTVPEERQSYGYPPQALPETQLCVSSSYSLWSSDCKAISMPRQGLSWRAMEEDRPAGCRFCSRACTMREIF

SEQ ID NO: 824221 - protein, 101 aa, Homo sapiens
MENLTKHSIECSSFRGDWECKNQFERKQGSQEGHFSEMIFTPEDMPTFSIQHQRIHTDEKLLECKECGKDFSFVSVLVRHQRIHTGEKPYECKECGKAFGS

SEQ ID NO: 824222 - protein, 488 aa, Homo sapiens; identical to SEQ ID NO: 824219

SEQ ID NO: 824223 - protein, 488 aa, Homo sapiens; identical to SEQ ID NO: 824219

SEQ ID NO: 824224 - protein, 488 aa, Homo sapiens; identical to SEQ ID NO: 824219

SEQ ID NO: 824225 - protein, 488 aa, Homo sapiens; identical to SEQ ID NO: 824219

SEQ ID NO: 824226 - protein, 544 aa, Homo sapiens
MIHVRRHETRRNSKSHVPEQKSRVDWRRTKRSSISQLLDSDEELDSEEFDSDEELDSDESFENDEELDSNKGPDCNKTPGSERELNLSKIQSEGNDSKCLINSGNGSTYEEETNKIKHRNIDLQDQEKHLSQEDNDLNKQTGQIIEDDQEKHLSQEDNDLNKQTGQIIEDDLEEEDIKRGKRKRLSSVMCDSDESDDSDILVRKVGVKRPRRVVEDEGSSVEMEQKTPEKTLAAQKREKLQKLKELSKQRSRQRRSSGRDFEDSEKESCPSSDEVDEEEEEDNYESDEDGDDYIIDDFVVQDEEGDEENKNQQGEKLTTSQLKLVKQNSLYSFSDHYTHFERVVKALLINALDESFLGTLYDGTRQKSYAKDMLTSLHYLDNRFVQPRLESLVSRSRWKEQYKERVENYSNVSIHLKNPENCSCQACGLHRYCKYSVHLSGELYNTRTMQIDNFMSHDKQVFTVGRICASRTRIYHKLKHFKFKLYQECCTIAMTEEVEDEQVKETVERIFRRSKENGWIKEKYGQLEEYLNFADYFQEEKFEL

SEQ ID NO: 824227 - protein, 544 aa, Homo sapiens; identical to SEQ ID NO: 824226

SEQ ID NO: 824228 - protein, 544 aa, Homo sapiens; identical to SEQ ID NO: 824226

SEQ ID NO: 824229 - protein, 544 aa, Homo sapiens; identical to SEQ ID NO: 824226

SEQ ID NO: 824230 - protein, 172 aa, Homo sapiens
MLTSLHYLDNRFVQPRLESLVSRSRWKEQYKERVENYSNVSIHLKNPENCSCQACGLHRYCKYSVHLSGELYNTRTMQIDNFMSHDKQVFTVGRICASRTRIYHKLKHFKFKLYQECCTIAMTEEVEDEQVKETVERIFRRSKENGWIKEKYGQLEEYLNFADYFQEEKFEL

SEQ ID NO: 824231 - protein, 544 aa, Homo sapiens; identical to SEQ ID NO: 824226

SEQ ID NO: 824232 - protein, 344 aa, Homo sapiens
MIHVRRHETRRNSKSHVPEQKSRVDWRRTKRSSISQLLDSDEELDSEEFDSDEELDSDESFENDEELDSNKGPDCNKTPGSERELNLSKIQSEGNDSKCLINSGNGSTYEEETNKIKHRNIDLQDQEKHLSQEDNDLNKQTGQIIEDDQEKHLSQEDNDLNKQTGQIIEDDLEEEDIKRGKRKRLSSVMCDSDESDDSDILVRKVGVKRPRRVVEDEGSSVEMEQKTPEKTLAAQKREKLQKLKELSKQRSRQRRSSGRDFEDSEKESCPSSDEVDEEEEEDNYESDEDGDDYIIDDFVVQDEEGDEENKNQQGEKLTTSQLKLVKQNSLCKFNIKKMFHELFS

SEQ ID NO: 824233 - protein, 110 aa, Homo sapiens
MVYERAGEAVPPRGLREKFPRALFGWAGERPSALCASNPPQLSCSGRGARYFRLGEVLGTDVGSSVGDFSGFWPFQTLVIVFSVQSSFGVWGFPSSCARHREAWPEGPVS

SEQ ID NO: 824234 - protein, 110 aa, Homo sapiens; identical to SEQ ID NO: 824233

SEQ ID NO: 824235 - protein, 544 aa, Homo sapiens; identical to SEQ ID NO: 824226

SEQ ID NO: 824236 - protein, 544 aa, Homo sapiens; identical to SEQ ID NO: 824226

SEQ ID NO: 824237 - protein, 235 aa, Homo sapiens
CPEAGCRGRGGGGGRGGGALKDSFSDHYTHFERVVKALLINALDESFLGTLYDGTRQKSYAKDMLTSLHYLDNRFVQPRLESLVSRSRWKEQYKERVENYSNVSIHLKNPENCSCQACGLHRYCKYSVHLSGELYNTRTMQIDNFMSHDKQVFTVGRICASRTRIYHKLKHFKFKLYQECCTIAMTEEVEDEQVKETVERIFRRSKENGWIKEKYGQLEEYLNFADYFQEEKFEL

SEQ ID NO: 824238 - protein, 526 aa, Homo sapiens
MIHVRRHETRRNSKSHVPEQKSRVDWRRTKRSSISQLLDSDEELDSEEFDSDEELDSDESFENDEELDSNKGPDCNKTPGSERELNLSKIQSEGNDSKCLINSGNGSTYEEETNKIKHRNIDLQDQEKHLSQEDNDLNKQTGQIIEDDQEKHLSQEDNDLNKQTGQIIEDDLEEEDIKRGKRKRLSSVMCDSDESDDSDILVRKVGVKRPRRVVEDEGSSVEMEQKTPEKTLAAQKREKLQKLKELSKQRSRQRRSSGRDFEDSEKESCPSSDEVDEEEEEDNYESDEDGDDYIIDDFVVQDEEGDEENKNQQGEKLTTSQLKLVKQNSLYSFSDHYTHFERVVKALLINALDESFLGTLYDGTRQKSYAKDMLTSLHYLDNRFVQPRLESLVSRSRWKEQYKERVENYSNVSIHLKNPENCSCQACGLHRYCKYSVHLSGELYNTRTMQIDNFMSHDKQVFTVGRICASRTRIYHKLKHFKFKLYQECCTIAMTEEVEDEQVKETVERIFRRSKADYFQEEKFEL

SEQ ID NO: 824239 - protein, 576 aa, Homo sapiens
MDVRFYPAAAGDPASLDFAQCLGYYGYSKFGNNNNYMNMAEANNAFFAASEQTFHTPSLGDEEFEIPPITPPPESDPALGMPDVLLPFQALSDPLPSQGSEFTPQFPPQSLDLPSITISRNLVEQDGVLHSSGLHMDQSHTQVSQYRQDPSLIMRSIVHMTDAARSGVMPPAQLTTINQSQLSAQLGLNLGGASMPHTSPSPPASKSATPSPSSSINEEDADEANRAIGEKRAAPDSGKKPKTPKKKKKKDPNEPQKPVSAYALFFRDTQAAIKGQNPNATFGEVSKIVASMWDSLGEEQKQVYKRKTEAAKKEYLKALAAYRASLVSKAAAESAEAQTIRSVQQTLASTNLTSSLLLNTPLSQHGTVSASPQTLQQSLPRSIAPKPLTMRLPMNQIVTSVTIAANMPSNIGAPLISSMGTTMVGSAPSTQVSPSVQTQQHQMQLQQQQQQQQQQMQQMQQQQLQQHQMHQQIQQQMQQQHFQHHMQQHLQQQQQHLQQQINQQQLQQQLQQRLQLQQLQHMQHQSQPSPRQHSPVASQITSPIPAIGSPQPASQQHQSQIQSQTQTQVLSQVSIF

SEQ ID NO: 824240 - protein, 576 aa, Homo sapiens; identical to SEQ ID NO: 824239

SEQ ID NO: 824241 - protein, 669 aa, Homo sapiens
GRGSRAPRALGPGAPPAASPTRHPRAPSTVDLAAARRRVPAPANPSPGPRPRAQLRHGCEVLPRGGRGPCQPGLRAVPGVLRLQQAFCLQARICVVHCSLCSATEGTYPQHPTPIHLGLYKKFGNNNNYMNMAEANNAFFAASEQTFHTPSLGDEEFEIPPITPPPESDPALGMPDVLLPFQALSDPLPSQGSEFTPQFPPQSLDLPSITISRNLVEQDGVLHSSGLHMDQSHTQVSQYRQDPSLIMRSIVHMTDAARSGVMPPAQLTTINQSQLSAQLGLNLGGASMPHTSPSPPASKSATPSPSSSINEEDADEANRAIGEKRAAPDSGKKPKTPKKKKKKDPNEPQKPVSAYALFFRDTQAAIKGQNPNATFGEVSKIVASMWDSLGEEQKQVYKRKTEAAKKEYLKALAAYRASLVSKAAAESAEAQTIRSVQQTLASTNLTSSLLLNTPLSQHGTVSASPQTLQQSLPRSIAPKPLTMRLPMNQIVTSVTIAANMPSNIGAPLISSMGTTMVGSAPSTQVSPSVQTQQHQMQLQQQQQQQQQQMQQMQQQQLQQHQMHQQIQQQMQQQHFQHHMQQHLQQQQQHLQQQINQQQLQQQLQQRLQLQQLQHMQHQSQPSPRQHSPVASQITSPIPAIGSPQPASQQHQSQIQSQTQTQVLSQVSIF

SEQ ID NO: 824242 - protein, 576 aa, Homo sapiens; identical to SEQ ID NO: 824239

SEQ ID NO: 824243 - protein, 114 aa, Homo sapiens
QRSELINMPADDLSPKSSPSRERQTNKNSRKEGGQAGWEGLSAARRRSAAGRGCGGLQGGRVRWRSGSGSGFVSAAGAGAGVALATASRSKPQPPPPPPPPEPTRRVQIPFVSS

SEQ ID NO: 824244 - protein, 536 aa, Homo sapiens
MDKVGKMWNNFKYRCQNLFGHEGGSRSENVDMNSNRCLSVKEKNISIGDSTPQQQSSPLRENIALQLGLSPSKNSSRRNQNCATEIPQIVEISIEKDNDSCVTPGTRLARRDSYSRHAPWGGKKKHSCSTKTQSSLDADKKFGRTRSGLQRRERRYGVSSVHDMDSVSSRTVGSRSLRQRLQDTVGLCFPMRTYSKQSKPLFSNKRKIHLSELMLEKCPFPAGSDLAQKWHLIKQHTAPVSPHSTFFDTFDPSLVSTEDEEDRLRERRRLSIEEGVDPPPNAQIHTFEATAQVNPLYKLGPKLAPGMTEISGDSSAIPQANCDSEEDTTTLCLQSRRQKQRQISGDSHTHVSRQGAWKVHTQIDYIHCLVPDLLQITGNPCYWGVMDRYEAEALLEGKPEGTFLLRDSAQEDYLFSVSFRRYNRSLHARIEQWNHNFSFDAHDPCVFHSSTVTGLLEHYKDPSSCMFFEPLLTISLNRTFPFSLQYICRAVICRCTTYDGIDGLPLPSMLQDFLKEYHYKQKVRVRWLEREPVKAK

SEQ ID NO: 824245 - protein, 536 aa, Homo sapiens; identical to SEQ ID NO: 824244

SEQ ID NO: 824246 - protein, 314 aa, Homo sapiens
MDKVGKMWNNFKYRCQNLFGHEGGSRSENVDMNSNRCLSVKEKNISIGDSTPQQQSSPLRENIALQLGLSPSKNSSRRNQNCATEIPQIVEISIEKDNDSCVTPGTRLARRDSYSRHAPWGGKKKHSCSTKTQSSLDADKKFGRTRSGLQRRERRYGVSSVHDMDSVSSRTVGSRSLRQRLQDTVGLCFPMRTYSKQSKPLFSNKRKIHLSELMLEKCPFPAGSDLAQKWHLIKQHTAPVSPHSTFFDTFDPSLVSTEDEEDRLRERRRPVVRDQPGQHGEIPSPQKKYKTSWAWWRVPPVPATREAEVRRQME

SEQ ID NO: 824247 - protein, 536 aa, Homo sapiens; identical to SEQ ID NO: 824244

SEQ ID NO: 824248 - protein, 536 aa, Homo sapiens; identical to SEQ ID NO: 824244

SEQ ID NO: 824249 - protein, 536 aa, Homo sapiens; identical to SEQ ID NO: 824244

SEQ ID NO: 824250 - protein, 858 aa, Homo sapiens
MFYHTSSWLKVLEDHMTLDMDAVLSDFVRSTGAEPGLARDLLEGKNWDVNAALSDFEQLRQVHAGNLPPSFSEGSGGSRTPEKGFSDREPTRPPRPILQRQDDIVQEKRLSRGISHASSSIVSLARSHVSSNGGGGGSNEHPLEMPICAFQLPDLTVYNEDFRSFIERDLIEQSMLVALEQAGRLNWWVSVDPTSQRLLPLATTGDGNCLLHAASLGMWGFHDRDLMLRKALYALMEKGVEKEALKRRWRWQQTQQNKESGLVYTEDEWQKEWNELIKLASSEPRMHLGTNGANCGGVESSEEPVYESLEEFHVFVLAHVLRRPIVVVADTMLRDSGGEAFAPIPFGGIYLPLEVPASQCHRSPLVLAYDQAHFSALVSMEQKENTKEQAVIPLTDSEYKLLPLHFAVDPGKGWEWGKDDSDNVRLASVILSLEVKLHLLHSYMNVKWIPLSSDAQAPLAQPESPTASAGDEPRSTPESGDSDKESVGSSSTSNEGGRRKEKSKRDREKDKKRADSVANKLGSFGKTLGSKLKKNMGGLMHSKGSKPGGVGTGLGGSSGTETLEKKKKNSLKSWKGGKEEAAGDGPVSEKPPAESVGNGGSKYSQEVMQSLSILRTAMQGEGKFIFVGTLKMGHRHQYQEEMIQRYLSDAEERFLAEQKQKEAERKIMNGGIGGGPPPAKKPEPDAREEQPTGPPAESRAMAFSTGYPGDFTIPRPSGGGVHCQEPRRQLAGGPCVGGLPPYATFPRQCPPGRPYPHQDSIPSLEPGSHSKDGLHRGALLPPPYRVADSYSNGYREPPEPDGWAGGLRGLPPTQTKCKQPNCSFYGHPETNNFCSCCYREELRRREREPDGELLVHRF

SEQ ID NO: 824251 - protein, 858 aa, Homo sapiens; identical to SEQ ID NO: 824250

SEQ ID NO: 824252 - protein, 760 aa, Homo sapiens
MFYHTSSWLKVLEDHMTLDMDAVLSDFVRSTGAEPGLARDLLEGKNWDVNAALSDFEQLRQVHAGNLPPSFSEGSGGSRTPEKGFSDREPTRPPRPILQRQDDIVQEKRLSRGISHASSSIVSLARSHVSSNGGGGGSNEHPLEMPICAFQLPDLTVYNEDFRSFIERDLIEQSMLVALEQAGRLNWWVSVDPTSQRLLPLATTGDGNCLLHAASLGMWGFHDRDLMLRKALYALMEKGVEKEALKRRWRWQQTQQNKESGLVYTEDEWQKEWNELIKLASSEPRMHLGTNGANCGGVESSEEPVYESLEEFHVFVLAHVLRRPIVVVADTMLRDSGGEAFAPIPFGGIYLPLEVPASQCHRSPLVLAYDQAHFSALVSMEQKENTKEQAVIPLTDSEYKLLPLHFAVDPGKGWEWGKDDSDNVRLASVILSLEVKLHLLHSYMNVKWIPLSSDAQAPLAQPESPTASAGDEPRSTPESGDSDKESVGSSSTSNEGGRRKEKSKRDREKDKKRADSVANKLGSFGKTLGSKLKKNMGGLMHSKGSKPGGVGTGLGGSSGTETLEKKKKNSLKSWKGGKEEAAGDGPVSEKPPAESVGNGGSKYSQEVMQSLSILRTAMQGEGKFIFVGTLKMGHRHQYQEEMIQRYLSDAEERFLAEQKQKEAERKIMNGGIGGGPPPAKKPEPDAREEQPTGPPAESRAMAFSTGYPGDFTIPRPSGGGVHCQEPRRQLAGGPCVGGLPPYATFPRSLGEEWAKEVLSQ

SEQ ID NO: 824253 - protein, 858 aa, Homo sapiens; identical to SEQ ID NO: 824250

SEQ ID NO: 824254 - protein, 858 aa, Homo sapiens; identical to SEQ ID NO: 824250

SEQ ID NO: 824255 - protein, 652 aa, Homo sapiens
GILPLCFFATGMWGFHDRDLMLRKALYALMEKGVEKEALKRRWRWQQTQQNKESGLVYTEDEWQKEWNELIKLASSEPRMHLGTNGANCGGVESSEEPVYESLEEFHVFVLAHVLRRPIVVVADTMLRDSGGEAFAPIPFGGIYLPLEVPASQCHRSPLVLAYDQAHFSALVSMEQKENTKEQAVIPLTDSEYKLLPLHFAVDPGKGWEWGKDDSDNVRLASVILSLEVKLHLLHSYMNVKWIPLSSDAQAPLAQPESPTASAGDEPRSTPESGDSDKESVGSSSTSNEGGRRKEKSKRDREKDKKRADSVANKLGSFGKTLGSKLKKNMGGLMHSKGSKPGGVGTGLGGSSGTETLEKKKKNSLKSWKGGKEEAAGDGPVSEKPPAESVGNGGSKYSQEVMQSLSILRTAMQGEGKFIFVGTLKMGHRHQYQEEMIQRYLSDAEERFLAEQKQKEAERKIMNGGIGGGPPPAKKPEPDAREEQPTGPPAESRAMAFSTGYPGDFTIPRPSGGGVHCQEPRRQLAGGPCVGGLPPYATFPRQCPPGRPYPHQDSIPSLEPGSHSKDGLHRGALLPPPYRVADSYSNGYREPPEPDGWAGGLRGLPPTQTKCKQPNCSFYGHPETNNFCSCCYREELRRREREPDGELLVHRF

SEQ ID NO: 824256 - protein, 858 aa, Homo sapiens; identical to SEQ ID NO: 824250

SEQ ID NO: 824257 - protein, 219 aa, Homo sapiens
MFYHTSSWLKVLEDHMTLDMDAVLSDFVRSTGAEPGLARDLLEGKNWDVNAALSDFEQLRQVHAGNLPPSFSEGSGGSRTPEKGFSDREPTRPPRPILQRQDDIVQEKRLSRGISHASSSIVSLARSHVSSNGGGGGSNEHPLEMPICAFQLPDLTVYNEDFRSFIERDLIEQSMLVALEQAGRLNWWVSVDPTSQRLLPLATTGDGNCLLHAASLGES

SEQ ID NO: 824258 - protein, 281 aa, Homo sapiens
MESYDVIANQPVVIDNGSGVIKAGFAGDQIPKYCFPNYVGRPKHVRVMAGALEGDIFIGPKAEEHRGLLSIRYPMEHGIVKDWNDMERIWQYVYSKDQLQTFSEEHPVLLTEAPLNPRKNRERAAEVFFETFNVPALFISMQAVLSLYATGRTTGVVLDSGDGVTHAVPIYEGFAMPHSIMRIDIAGRDVSRFLRLYLRKEGYDFHSSSEFEIVKAIKEELYYYKPKVRGKTEGRLRLWALMAPSAECLAIVEEDTPRWPKSGRYVRPAGGREHKMRVGLY

SEQ ID NO: 824259 - protein, 376 aa, Homo sapiens
MESYDVIANQPVVIDNGSGVIKAGFAGDQIPKYCFPNYVGRPKHVRVMAGALEGDIFIGPKAEEHRGLLSIRYPMEHGIVKDWNDMERIWQYVYSKDQLQTFSEEHPVLLTEAPLNPRKNRERAAEVFFETFNVPALFISMQAVLSLYATGRTTGVVLDSGDGVTHAVPIYEGFAMPHSIMRIDIAGRDVSRFLRLYLRKEGYDFHSSSEFEIVKAIKERACYLSINPQKDETLETEKAQYYLPDGSTIEIGPSRFRAPELLFRPDLIGEESEGIHEVLVFAIQKSDMDLRRTLFSNIVLSGGSTLFKGFGDRLLSEVKKLAPKDVKIRISAPQERLYSTWIGGSILASLDTFKKMWVSKKEYEEDGARSIHRKTF

SEQ ID NO: 824260 - protein, 376 aa, Homo sapiens; identical to SEQ ID NO: 824259

SEQ ID NO: 824261 - protein, 376 aa, Homo sapiens; identical to SEQ ID NO: 824259

SEQ ID NO: 824262 - protein, 376 aa, Homo sapiens; identical to SEQ ID NO: 824259

SEQ ID NO: 824263 - protein, 376 aa, Homo sapiens; identical to SEQ ID NO: 824259

SEQ ID NO: 824264 - protein, 376 aa, Homo sapiens; identical to SEQ ID NO: 824259

SEQ ID NO: 824265 - protein, 375 aa, Homo sapiens
MESTMRSQQPFVIDNGSGVIKAGFAGDQIPKYCFPNYVGRPKHVRVMAGALEGDIFIGPKAEEHRGLLSIRYPMEHGIVKDWNDMERIWQYVYSKDQLQTFSEEHPVLLTEAPLNPRKNRERAAEVFFETFNVPALFISMQAVLSLYATGRTTGVVLDSGDGVTHAVPIYEGFAMPHSIMRIDIAGRDVSRFLRLYLRKEGYDFHSSSEFEIVKAIKERACYLSINPQKDETLETEKAQYYLPDGSTIEIGPSRFRAPELLFRPDLIGEESEGIHEVLVFAIQKSDMDLRRTLFSNIVLSGGSTLFKGFGDRLLSEVKKLAPKDVKIRISAPQERLYSTWIGGSILASLDTFKKMWVSKKEYEEDGARSIHRKTF

SEQ ID NO: 824266 - protein, 244 aa, Homo sapiens
MESYDVIANQPVVIDNGSGVIKAGFAGDQIPKYCFPNYVGRPKHVRVMAGALEGDIFIGPKAEEHRGLLSIRYPMEHGIVKDWNDMERIWQYVYSKDQLQTFSEEHPVLLTEAPLNPRKNRERAAEVFFETFNVPALFISMQAVLSLYATGRTTGVVLDSGDGVTHAVPIYEGFAMPHSIMRIDIAGRDVSRFLRLYLRKEGYDFHSSSEFEIVKAIKERACYLSINPLVLPDSGPLSCSSGQI

SEQ ID NO: 824267 - protein, 376 aa, Homo sapiens; identical to SEQ ID NO: 824259

SEQ ID NO: 824268 - protein, 246 aa, Homo sapiens
LGEAGVIGRGSCSCFSLYATGRTTGVVLDSGDGVTHAVPIYEGFAMPHSIMRIDIAGRDVSRFLRLYLRKEGYDFHSSSEFEIVKAIKERACYLSINPQKDETLETEKAQYYLPDGSTIEIGPSRFRAPELLFRPDLIGEESEGIHEVLVFAIQKSDMDLRRTLFSNIVLSGGSTLFKGFGDRLLSEVKKLAPKDVKIRISAPQERLYSTWIGGSILASLDTFKKMWVSKKEYEEDGARSIHRKTF

SEQ ID NO: 824269 - protein, 376 aa, Homo sapiens; identical to SEQ ID NO: 824259

SEQ ID NO: 824270 - protein, 376 aa, Homo sapiens; identical to SEQ ID NO: 824259

SEQ ID NO: 824271 - protein, 311 aa, Homo sapiens
MESYDVIANQPVVIDNGSGVIKAGFAGDQIPKYCFPNYVGRPKHVRVMAGALEGDIFIGPKAEEHRGLLSIRYPMEHGIVKDWNDMERIWQYVYSKDQLQTFSEEHPVLLTEAPLNPRKNRERAAEVFFETFNVPALFISMQAVLSLYATGRTTGVVLDSGDGVTHAVPIYEGFAMPHSIMRIDIAGRDVSRFLRLYLRKEGYDFHSSSEFEIVKAIKERACYLSINPQKDETLETEKAQYYLPDGSTIEVGGLPSFFGPLRSTKALGPTRILHQGLESGRPVPLHQACPTPGPWAARGPGWLSVRPNTKS

SEQ ID NO: 824272 - protein, 226 aa, Homo sapiens
MESYDVIANQPVVIDNGSGVIKAGFAGDQIPKYCFPNYVGRPKHVRVMAGALEGDIFIGPKAEEHRGLLSIRYPMEHGIVKDWNDMERIWQYVYSKDQLQTFSEEHPVLLTEAPLNPRKNRERAAEVFFETFNVPALFISMQAVLSLYATGRTTGVVLDSGDGVTHAVPIYEGFAMPHSIMRIDIAGRDVSRFLRLYLRKEGYDFHSSSEFEIVKAIKEVSAAPWA

SEQ ID NO: 824273 - protein, 174 aa, Homo sapiens
MESYDVIANQPVVIDNGSGVIKAGFAGDQIPKYCFPNYVGRPKHVRVMAGALEGDIFIGPKAEEHRGLLSIRYPMEHGIVKDWNDMERIWQYVYSKDQLQTFSEEHPVLLTEAPLNPRKNRERAAEVFFETFNVPALFISMQAVLSLYATGRTTGCSSEKVCSWSLERHIAKCV

SEQ ID NO: 824274 - protein, 116 aa, Homo sapiens
KHQAVASHISRLPCPAEASHWPGMLWVGLFRFLTSVHEIIWEQVQSKSGQRSLWCKAGASLSSPAPSPVTPRPTPIPDFTQYSPPRRPMTKGPCQVWATAAGMCESNVAPRGLQCA

SEQ ID NO: 824275 - protein, 376 aa, Homo sapiens; identical to SEQ ID NO: 824259

SEQ ID NO: 824276 - protein, 376 aa, Homo sapiens; identical to SEQ ID NO: 824259

SEQ ID NO: 824277 - protein, 329 aa, Homo sapiens
MAGALEGDIFIGPKAEEHRGLLSIRYPMEHGIVKDWNDMERIWQYVYSKDQLQTFSEEHPVLLTEAPLNPRKNRERAAEVFFETFNVPALFISMQAVLSLYATGRTTGVVLDSGDGVTHAVPIYEGFAMPHSIMRIDIAGRDVSRFLRLYLRKEGYDFHSSSEFEIVKAIKERACYLSINPQKDETLETEKAQYYLPDGSTIEIGPSRFRAPELLFRPDLIGEESEGIHEVLVFAIQKSDMDLRRTLFSNIVLSGGSTLFKGFGDRLLSEVKKLAPKDVKIRISAPQERLYSTWIGGSILASLDTFKKMWVSKKEYEEDGARSIHRKTF

SEQ ID NO: 824278 - protein, 297 aa, Homo sapiens
MESYDVIANQPVVIDNGSGVIKAGFAGDQIPKYCFPNYVGRPKHVRVMAGALEGDIFIGPKAEEHRGLLSIRYPMEHGIVKDWNDMERIWQYVYSKDQLQTFSEEHPVLLTEAPLNPRKNRERAAEVFFETFNVPALFISMQAVLSLYATGRTTGVVLDSGDGVTHAVPIYEGFAMPHSIMRIDIAGRDVSRFLRLYLRKEGYDFHSSSEFEIVKAIKERACYLSINPQKDETLETEKAQYYLPDGSTIEISAPQERLYSTWIGGSILASLDTFKKMWVSKKEYEEDGARSIHRKTF

SEQ ID NO: 824279 - protein, 376 aa, Homo sapiens; identical to SEQ ID NO: 824259

SEQ ID NO: 824280 - protein, 132 aa, Homo sapiens
MGSTIEIGPSRFRAPELLFRPDLIGEESEGIHEVLVFAIQKSDMDLRRTLFSNIVLSGGSTLFKGFGDRLLSEVKKLAPKDVKIRISAPQERLYSTWIGGSILASLDTFKKMWVSKKEYEEDGARSIHRKTF

SEQ ID NO: 824281 - protein, 250 aa, Homo sapiens
MESYDVIANQPVVIDNEHRGLLSIRYPMEHGIVKDWNDMERIWQYVYSKDQLQTFSEEHPVLLTEAPLNPRKNRERAAEVFFETFNVPALFISMQAVLSLYATGRTTGVVLDSGDGVTHAVPIYEGFAMPHSIMRIDIAGRDVSRFLRLYLRKEGYDFHSSSEFEIVKAIKERACYLSINPQKDETLETEKAQYYLPDGSTIEISAPQERLYSTWIGGSILASLDTFKKMWVSKKEYEEDGARSIHRKTF

SEQ ID NO: 824282 - protein, 261 aa, Homo sapiens
MESYDVIANQPVVIDNGSGVIKAGFAGDQIPKYCFPNYVGRPKHVRVMAGALEGDIFIGPKAEEHRGLLSIRYPMEHGIVKDWNDMERIWQYVYSKDQLQTFSEEHPVLLTEAPLNPRKNRERAAEVFFETFNVPALFISMQAVLSLYATGRTTGVVLDSGDGVTHAVPIYEGFAMPHSIMRIDIAGRDVSRFLRLYLRKEGYDFHSSSEFEIVKAIKERACYLSINPQKDETLETEKAQYYCCGGPLGWAFRSGPGCFGH

SEQ ID NO: 824283 - protein, 219 aa, Homo sapiens
MESYDVIANQPVVIDNGSGVIKAGFAGDQIPKYCFPNYVGRPKHVRVMAGALEGDIFIGPKAEEHRGLLSIRYPMEHGIVKDWNDMERIWQYVYSKDQLQTFSEEHPVLLTEAPLNPRKNRERAAEVFFETFNVPALFISMQAVLSLYATGRTTGVVLDSGDGVTHAVPIYEGFAMPHSIMRLTSSPGPFYFLNSTWYEGFTSTIPYFKCTALNKPCPS

SEQ ID NO: 824284 - protein, 435 aa, Homo sapiens
MLCGFQEDATPPPPPRPRRLHRRLPRPEEVGMLSLPPGLLTVSGSAAAADAVPLRPGDWAGVSTADRGERAPLGPAFCDLAVSPTSPAWRGEEDEGAKASSGDIGSLDYQEFVVDIESRLRMEGVELKEEWQDEDFPIPLPEDDSIEADILAITGPEDQPGSLEVNGNKVRKKLMAPDISLTLDPSDGSVLSDDLDESGEIDLDGLDTPSENSNEFEWEDDLPKPKTTEVIRKGSITEYTAAEEKEDGRRWRMFRIGEQDHRVDMKAIEPYKKVISHGGYYGDGLNAIVVFAVCFMPESSQPNYRYLMDNLFKYVIGTLELLVAENYMIVYLNGATTRRKMPSLGWLRKCYQQIDRRLRKNLKSLIIVHPSWFIRTLLAVTRPFISSKFSQKIRYVFNLAELAELVPMEYVGIPECIKQVDQELNGKQDEPKNEQ

SEQ ID NO: 824285 - protein, 449 aa, Homo sapiens
GGMLCGFQEDATPPPPPRPRRLHRRLPRPEEVGMLSLPPGLLTVSGSAAAADAVPLRPGDWAGVSTADRGERAPLGPAFCDLAVSPTSPAWRGEEDEGAKASSGDIGSLDYQEFVVDIESRLRMEGVELKEEWQDEDFPIPLPEDDSIEADILAITGPEDQPGSLEVNGNKVRKKLMAPDISLTLDPSDGSVLSDDLDESGEIDLDGLDTPSENSNEFEWEDDLPKPKTTEVIRKGSITEYTAAEEKEDGRRWRMFRIGEQDHRVDMKAIEPYKKVISHGGYYGDGLNAIVVFAVCFMPESSQPNYRYLMDNLFKYVIGTLELLVAENYMIVYLNGATTRRKMPSLGWLRKCYQQIDRRLRKNLKSLIIVHPSWFIRTLLAVTRPFISSKFSQKIRYVFNLAELAELVPMEYVGIPECIKQYEEEKFKKKQKRVDQELNGKQDEPKNEQ

SEQ ID NO: 824286 - protein, 435 aa, Homo sapiens; identical to SEQ ID NO: 824284

SEQ ID NO: 824287 - protein, 397 aa, Homo sapiens
FVFGSLAPHPVAFPFLVVVLGMEPCPSSAPPPFYPGVGEVAGLRWFSIYDQRPSWYRTKKLGLLDIGSLDYQEFVVDIESRLRMEGVELKEEWQDEDFPIPLPEDDSIEADILAITGPEDQPGSLEVNGNKVRKKLMAPDISLTLDPSDGSVLSDDLDESGEIDLDGLDTPSENSNEFEWEDDLPKPKTTEVIRKGSITEYTAAEEKEDGRRWRMFRIGEQDHRVDMKAIEPYKKVISHGGYYGDGLNAIVVFAVCFMPESSQPNYRYLMDNLFKYVIGTLELLVAENYMIVYLNGATTRRKMPSLGWLRKCYQQIDRRLRKNLKSLIIVHPSWFIRTLLAVTRPFISSKFSQKIRYVFNLAELAELVPMEYVGIPECIKQVDQELNGKQDEPKNEQ

SEQ ID NO: 824288 - protein, 230 aa, Homo sapiens
GGMLCGFQEDATPPPPPRPRRLHRRLPRPEEVGMLSLPPGLLTVSGSAAAADAVPLRPGDWAGVSTADRGERAPLGPAFCDLAVSPTSPAWRGEEDEGAKASSGDIGSLDYQEFVVDIESRLRMEGVELKEEWQDEDFPIPLPEDDSIEADILAITGPEDQPGSLEVNGNKVRKKLMAPDISLTLDPSDGSVLSDDLDESGEIDLDGLDTPSENSNEFEWEVISWKDIFR

SEQ ID NO: 824289 - protein, 257 aa, Homo sapiens
FVFGSLAPHPVAFPFLVVVLGMEPCPSSAPPPFYPGVGEVAGLRWFSIYDQRPSWYRTKKLGLLDIGSLDYQEFVVDIESRLRMEGVELKEEWQDEDFPIPLPEDDSIEADILAITGPEDQPGSLEVNGNKVRKKLMAPDISLTLDPSDGSVLSDDLDESGEIDLDGLDTPSENSNEFEWEDDLPKPKTTEVIRKGSITEYTAAEEKEDGRRWRMFRIGEQDHRVDMKAIEPYKKVISHGGLLSVSCLKVVSLTIDT

SEQ ID NO: 824290 - protein, 126 aa, Homo sapiens
EETQRVTLGRGSHRTCSGGASWIPALLRSPPLAWVLFVFGSLAPHPVAFPFLVVVLGMEPCPSSAPPPFYPGVGEVAGLRWFSIYDQRPSWYRTKKLGLLVCLVTAGNRHGSSISNQGFNRSSLVR

SEQ ID NO: 824291 - protein, 435 aa, Homo sapiens; identical to SEQ ID NO: 824284

SEQ ID NO: 824292 - protein, 435 aa, Homo sapiens; identical to SEQ ID NO: 824284

SEQ ID NO: 824293 - protein, 230 aa, Homo sapiens; identical to SEQ ID NO: 824288

SEQ ID NO: 824294 - protein, 433 aa, Homo sapiens
GGMLCGFQEDATPPPPPRPRRLHRRLPRPEEVGMLSLPPGLLTVSGSAAAADAVPLRPGDWAGVSTADRGERAPLGPAFCDLAVSPTSPAWRGEEDEGAKASSGDIGSLDYQEFVVDIESRLRMEGVELKEEWQDEDFPIPLPEDDSIEADILAITGPEDQPGSLEVNGNKVRKKLMAPDISLTLDPSDGSVLSDDLDESGEIDLDGLDTPSENSNEFEWEDDLPKPKTTEVIRKGSITEYTAAEEKEDGRRWRMFRIGEQDHRVDMKAIEPYKKVISHGGYYGDGLNAIVVFAVCFMPESSQPNYRYLMDNLFKYVIGTLELLVAENYMIVYLNGATTRRKMPSLGWLRKCYQQIDRRLRKNLKSLIIVHPSWFIRTLLAVTRPFISSKFSQKIRYVFNLAELAELVPMEYVGIPECIKQYVLFYFLNCIGS

SEQ ID NO: 824295 - protein, 112 aa, Homo sapiens
MGTPKYPPNAGLTATPTRTHGHPVLRLQAQHMGSVSKPCFLLRPTASPVPLPVWSTLGFSAMPMQLAPSNPQAEWVNYALQSEGCHLPKPGTDWTCMLVNHLVLLSLGVSRL

SEQ ID NO: 824296 - protein, 126 aa, Homo sapiens
PRLARQARWSDDRPCVSKMAAAMDVDTPSGTNSGAGKKRFEVKKWNAVALWAWDIVVDNCAICRNHIMDLCIECQANQASATSEECTVAWGVCNHAFHFHCISRWLKTRQVCPLDNREWEFQKYGH

SEQ ID NO: 824297 - protein, 126 aa, Homo sapiens; identical to SEQ ID NO: 824296

SEQ ID NO: 824298 - protein, 114 aa, Homo sapiens
PRAAGFGTRAMDVDTPSGTNSGAGKKRFEVKKWNAVALWAWDIVVDNCAICRNHIMDLCIECQANQASATSEECTVAWGVCNHAFHFHCISRWLKTRQVCPLDNREWEFQKYGH

SEQ ID NO: 824299 - protein, 126 aa, Homo sapiens; identical to SEQ ID NO: 824296

SEQ ID NO: 824300 - protein, 126 aa, Homo sapiens; identical to SEQ ID NO: 824296

SEQ ID NO: 824301 - protein, 83 aa, Homo sapiens
PGCRIRHEAMDVDTPSGTNSGAGKKRFEVKKVGSRRAFLREAREARIWLAGPRMVEARSKGFHFRAFLGPVECSSPLGLGYCG

SEQ ID NO: 824302 - protein, 126 aa, Homo sapiens; identical to SEQ ID NO: 824296

SEQ ID NO: 824303 - protein, 126 aa, Homo sapiens; identical to SEQ ID NO: 824296

SEQ ID NO: 824304 - protein, 70 aa, Homo sapiens
PRLARQARWSDDRPCVSKMAAAMDVDTPSGTNSGAGKKRFEVKKWNAVALWAWDIVVDNCAICRNHIMDL

SEQ ID NO: 824305 - protein, 126 aa, Homo sapiens; identical to SEQ ID NO: 824296

SEQ ID NO: 824306 - protein, 106 aa, Homo sapiens
PRLARQARWSDDRPCVSKMAAAMDVDTPSGTNSGAGKKRFEVKKWNAVALWAWDIVVDNCAICRNHIMDLCIECQANQASATSEECTVAWGVCNVWALGKDFFHQA

SEQ ID NO: 824307 - protein, 336 aa, Homo sapiens
MLPAVAVSEPVVLRFMIFCRLLAKMANNDAVLKRLEQKGAEADQIIEYLKQQVSLLKEKAILQATLREEKKLRVENAKLKKEIEELKQELIQAEIQNGVKQIPFPSGTPLHANSMVSENVIQSTAVTTVSSGTKEQIKGGTGDEKKAKEKIEKKGEKKEKKQQSIAGSADSKPIDVSRLDLRIGCIITARKHPDADSLYVEEVDVGEIAPRTVVSGLVNHVPLEQMQNRMVILLCNLKPAKMRGVLSQAMVMCASSPEKIEILAPPNGSVPGDRITFDAFPGEPDKELNPKKKIWEQIQPDLHTNDECVATYKGVPFEVKGKGVCRAQTMSNSGIK

SEQ ID NO: 824308 - protein, 336 aa, Homo sapiens; identical to SEQ ID NO: 824307

SEQ ID NO: 824309 - protein, 203 aa, Homo sapiens
MANNDAVLKRLEQKGAEADQIIEYLKQQVSLLKEKAILQATLREEKKLRVENAKLKKEIEELKQELIQAEIQNGVKQIPFPSGTPLHANSMVSENVIQSTAVTTVSSGTKEQIKGGTGDEKKAKEKIEILAPPNGSVPGDRITFDAFPGEPDKELNPKKKIWEQIQPDLHTNDECVATYKGVPFEVKGKGVCRAQTMSNSGIK

SEQ ID NO: 824310 - protein, 336 aa, Homo sapiens; identical to SEQ ID NO: 824307

SEQ ID NO: 824311 - protein, 336 aa, Homo sapiens; identical to SEQ ID NO: 824307

SEQ ID NO: 824312 - protein, 312 aa, Homo sapiens
MANNDAVLKRLEQKGAEADQIIEYLKQQVSLLKEKAILQATLREEKKLRVENAKLKKEIEELKQELIQAEIQNGVKQIPFPSGTPLHANSMVSENVIQSTAVTTVSSGTKEQIKGGTGDEKKAKEKIEKKGEKKEKKQQSIAGSADSKPIDVSRLDLRIGCIITARKHPDADSLYVEEVDVGEIAPRTVVSGLVNHVPLEQMQNRMVILLCNLKPAKMRGVLSQAMVMCASSPEKIEILAPPNGSVPGDRITFDAFPGEPDKELNPKKKIWEQIQPDLHTNDECVATYKGVPFEVKGKGVCRAQTMSNSGIK

SEQ ID NO: 824313 - protein, 312 aa, Homo sapiens; identical to SEQ ID NO: 824312

SEQ ID NO: 824314 - protein, 107 aa, Homo sapiens
MNYHSKRFDWLHNGRQGAKINEIRQMSGAQIKIANPVEGSTDRQVTITGSAAREPDKELNPKKKIWEQIQPDLHTNDECVATYKGVPFEVKGKGVCRAQTMSNSGIK

SEQ ID NO: 824315 - protein, 84 aa, Homo sapiens
TLHHPTTHTTPPPPLLSPSPIHPKMLTYTRTQPPKFQVTLNFWEESHGSSHTPQNLITVKMEQAFARYLLEQTPEQQAAILSLV

SEQ ID NO: 824316 - protein, 393 aa, Homo sapiens
MASGRARCTRKLRNWVVEQVESGQFPGVCWDDTAKTMFRIPWKHAGKQDFREDQDAAFFKAWAIFKGKYKEGDTGGPAVWKTRLRCALNKSSEFKEVPERGRMDVAEPYKVYQLLPPGIVSGQPGTQKVPSKRQHSSVSSERKEEEDAMQNCTLSPSVLQDSLNNEEEGASGGAVHSDIGSSSSSSSPEPQEVTDTTEAPFQGDQRSLEFLLPPEPDYSLLLTFIYNGRVVGEAQVQSLDCRLVAEPSGSESSMEQVLFPKPGPLEPTQRLLSQLERGILVASNPRGLFVQRLCPIPISWNAPQAPPGPGPHLLPSNECVELFRTAYFCRDLVRYFQGLGPPPKFQVTLNFWEESHGSSHTPQNLITVKMEQAFARYLLEQTPEQQAAILSLV

SEQ ID NO: 824317 - protein, 221 aa, Homo sapiens
MASGRARCTRKLRNWVVEQVESGQFPGVCWDDTAKTMFRIPWKHAGKQDFREDQDAAFFKAWAIFKGKYKEGDTGGPAVWKTRLRCALNKSSEFKEVPERGRMDVAEPYKVYQLLPPGIVSGQPGTQKVPSKRQHSSVSSERKEEEDAMQNCTLSPSVLQDSLNNEEEGASGGAVHSDIGSSSSSSSPEPQEVTDTTEAPFQGDQRSLEFLLPPEPGTWHF

SEQ ID NO: 824318 - protein, 279 aa, Homo sapiens
MASGRARCTRKLRNWVVEQVESGQFPGVCWDDTAKTMFRIPWKHAGKQDFREDQDAAFFKAWAIFKGKYKEGDTGGPAVWKTRLRCALNKSSEFKEVPERGRMDVAEPYKVYQLLPPGIVSGQPGTQKVPSKRQHSSVSSERKEEEDAMQNCTLSPSVLQDSLNNEEEGASGGAVHSDIGSSSSSSSPEPQEVTDTTEAPFQGDQRSLEFLLPPEPDLVRYFQGLGPPPKFQVTLNFWEESHGSSHTPQNLITVKMEQAFARYLLEQTPEQQAAILSLV

SEQ ID NO: 824319 - protein, 291 aa, Homo sapiens [sequence omitted]

SEQ ID NO: 824320 - protein, 317 aa, Homo sapiens
IGSVPNLDSCALNKSSEFKEVPERGRMDVAEPYKVYQLLPPGIVSGQPGTQKVPSKRQHSSVSSERKEEEDAMQNCTLSPSVLQDSLNNEEEGASGGAVHSDIGSSSSSSSPEPQEVTDTTEAPFQGDQRSLEFLLPPEPDYSLLLTFIYNGRVVGEAQVQSLDCRLVAEPSGSESSMEQVLFPKPGPLEPTQRLLSQLERGILVASNPRGLFVQRLCPIPISWNAPQAPPGPGPHLLPSNECVELFRTAYFCRDLVRYFQGLGPPPKFQVTLNFWEESHGSSHTPQNLITVKMEQAFARYLLEQTPEQQAAILSLV

SEQ ID NO: 824321 - protein, 421 aa, Homo sapiens
AGTGPSRFDALRQPGQQLRMASGRARCTRKLRNWVVEQVESGQFPGVCWDDTAKTMFRIPWKHAGKQDFREDQDAAFFKAWAIFKGKYKEGDTGGPAVWKTRLRCALNKSSEFKEVPERGRMDVAEPYKVYQLLPPGIVSGQPGTQKVPSKRQHSSVSSERKEEEDAMQNCTLSPSVLQDSLNNEEEGASGGAVHSDIGSSSSSSSPEPQEVTDTTEAPFQGDQRSLEFLLPPEPAPGRAVLSPDYSLLLTFIYNGRVVGEAQVQSLDCRLVAEPSGSESSMEQVLFPKPGPLEPTQRLLSQLERGILVASNPRGLFVQRLCPIPISWNAPQAPPGPGPHLLPSNECVELFRTAYFCRDLVRYFQGLGPPPKFQVTLNFWEESHGSSHTPQNLITVKMEQAFARYLLEQTPEQQAAILSLV

SEQ ID NO: 824322 - protein, 221 aa, Homo sapiens; identical to SEQ ID NO: 824317

SEQ ID NO: 824323 - protein, 191 aa, Homo sapiens
MIPTQGELQLRSELHYSLLLTFIYNGRVVGEAQVQSLDCRLVAEPSGSESSMEQVLFPKPGPLEPTQRLLSQLERGILVASNPRGLFVQRLCPIPISWNAPQAPPGPGPHLLPSNECVELFRTAYFCRDLVRYFQGLGPPPKFQVTLNFWEESHGSSHTPQNLITVKMEQAFARYLLEQTPEQQAAILSLV

SEQ ID NO: 824324 - protein, 145 aa, Homo sapiens
MIESSRYQVLFPKPGPLEPTQRLLSQLERGILVASNPRGLFVQRLCPIPISWNAPQAPPGPGPHLLPSNECVELFRTAYFCRDLVRYFQGLGPPPKFQVTLNFWEESHGSSHTPQNLITVKMEQAFARYLLEQTPEQQAAILSLV

SEQ ID NO: 824325 - protein, 105 aa, Homo sapiens
MHGTPALVCCISCVAICPAWQLPGSSPPAKTMEEVVQVEPSTRVSYLGEHHHTEACSHYVKVHRRIGTEILSLMAFSYVHTFGRAGTHHTHWPWVHRLYHTPGMP

SEQ ID NO: 824326 - protein, 393 aa, Homo sapiens; identical to SEQ ID NO: 824316

SEQ ID NO: 824327 - protein, 291 aa, Homo sapiens [sequence omitted]

SEQ ID NO: 824328 - protein, 140 aa, Homo sapiens [sequence omitted]

SEQ ID NO: 824329 - protein, 177 aa, Homo sapiens
MDVAEPYKVYQLLPPGIVSGQPGTQKVPSKRQHSSVSSERKEEEDAMQNCTLSPSVLQDSLNNEEEGASGGAVHSDIGSSSSSSSPEPQEVTDTTEAPFQGDQRSLEFLLPPEPDLVRYFQGLGPPPKFQVTLNFWEESHGSSHTPQNLITVKMEQAFARYLLEQTPEQQAAILSLV

SEQ ID NO: 824330 - protein, 611 aa, Homo sapiens
QRRRRNTPGWSGFQGLTRAPALFPRLIFQSSSETRLLSGTLLWIPRAYSTRSKMAELNTHVNVKEKIYAVRSVVPNKSNNEIVLVLQQFDFNVDKAVQAFVDGSAIQVLKEWNMTGKKKNNKRKRSKSKQHQGNKDAKDKVERPEAGPLQPQPPQIQNGPMNGCEKDSSSTDSANEKPALIPREKKISILEEPSKALRGVTEGNRLLQQKLSLDGNPKPIHGTTERSDGLQWSAEQPCNPSKPKAKTSPVKSNTPAAHLEIKPDELAKKRGPNIEKSVKDLQRCTVSLTRYRVMIKEEVDSSVKKIKAAFAELHNCIIDKEVSLMAEMDKVKEEAMEILTARQKKAEELKRLTDLASQMAEMQLAELRAEIKHFVSERKYDEELGKAARFSCDIEQLKAQIMLCGEITHPKNNYSSRTPCSSLLPLLNAHAATSGKQSNFSRKSSTHNKPSEGKAANPKMVSSLPSTADPSHQTMPANKQNGSSNQRRRFNPQYHNNRLNGPAKSQGSGNEAEPLGKGNSRHEHRRQPHNGFRPKNKGGAKNQEASLGMKTPEAPAHSEKPRRRQHAADTSEARPFRGSVGRVSQCNLCPTRIEVSTDAAVLSVPAVTLVA

SEQ ID NO: 824331 - protein, 489 aa, Homo sapiens
MAELNTHVNVKEKIYAVRSVVPNKSNNEIVLVLQQFDFNVDKAVQAFVDGSAIQVLKEWNMTGKKKNNKRKRSKSKQHQGNKDAKDKVERPEAGPLQPQPPQIQNGPMNGCEKDSSSTDSANEKPALIPREKKISILEEPSKALRGVTGPNIEKSVKDLQRCTVSLTRYRVMIKEEVDSSVKKIKAAFAELHNCIIDKEVSLMAEMDKVKEEAMEILTARQKKAEELKRLTDLASQMAEMQLAELRAEIKHFVSERKYDEELGKAARFSCDIEQLKAQIMLCGEITHPKNNYSSRTPCSSLLPLLNAHAATSGKQSNFSRKSSTHNKPSEGKAANPKMVSSLPSTADPSHQTMPANKQNGSSNQRRRFNPQYHNNRLNGPAKSQGSGNEAEPLGKGNSRHEHRRQPHNGFRPKNKGGAKNQEASLGMKTPEAPAHSEKPRRRQHAADTSEARPFRGSVGRVSQCNLCPTRIEVSTDAAVLSVPAVTLVA

SEQ ID NO: 824332 - protein, 595 aa, Homo sapiens
WGGRAGVVSVKESSPGAELAAPSAASPAARGELRTARGPGSGSRSARPPSRRGRHRRGASPGDRAPGPRLRPGTEEPALDTESSSETRLLSGTLLWIPRAYSTRSKMAELNTHVNVKEKIYAVRSVVPNKSNNEIVLVLQQFDFNVDKAVQAFVDGSAIQVLKEWNMTGKKKNNKRKRSKSKQHQGNKDAKDKVERPEAGPLQPQPPQIQNGPMNGCEKDSSSTDSANEKPALIPREKKISILEEPSKALRGVTGPNIEKSVKDLQRCTVSLTRYRVMIKEEVDSSVKKIKAAFAELHNCIIDKEVSLMAEMDKVKEEAMEILTARQKKAEELKRLTDLASQMAEMQLAELRAEIKHFVSERKYDEELGKAARFSCDIEQLKAQIMLCGEITHPKNNYSSRTPCSSLLPLLNAHAATSGKQSNFSRKSSTHNKPSEGKAANPKMVSSLPSTADPSHQTMPANKQNGSSNQRRRFNPQYHNNRLNGPAKSQGSGNEAEPLGKGNSRHEHRRQPHNGFRPKNKGGAKNQEASLGMKTPEAPAHSEKPRRRQHAADTSEARPFRGSVGRVSQCNLCPTRIEVSTDAAVLSVPAVTLVA

SEQ ID NO: 824333 - protein, 504 aa, Homo sapiens
SRGLALDAAYSTRSKMAELNTHVNVKEKIYAVRSVVPNKSNNEIVLVLQQFDFNVDKAVQAFVDGSAIQVLKEWNMTGKKKNNKRKRSKSKQHQGNKDAKDKVERPEAGPLQPQPPQIQNGPMNGCEKDSSSTDSANEKPALIPREKKISILEEPSKALRGVTGPNIEKSVKDLQRCTVSLTRYRVMIKEEVDSSVKKIKAAFAELHNCIIDKEVSLMAEMDKVKEEAMEILTARQKKAEELKRLTDLASQMAEMQLAELRAEIKHFVSERKYDEELGKAARFSCDIEQLKAQIMLCGEITHPKNNYSSRTPCSSLLPLLNAHAATSGKQSNFSRKSSTHNKPSEGKAANPKMVSSLPSTADPSHQTMPANKQNGSSNQRRRFNPQYHNNRLNGPAKSQGSGNEAEPLGKGNSRHEHRRQPHNGFRPKNKGGAKNQEASLGMKTPEAPAHSEKPRRRQHAADTSEARPFRGSVGRVSQCNLCPTRIEVSTDAAVLSVPAVTLVA

SEQ ID NO: 824334 - protein, 584 aa, Homo sapiens
MLSVTIYLLQIGSFIVIANFWLKSLLRSIPEHKRTSDLFLLKGIQSKANKSNNEIVLVLQQFDFNVDKAVQAFVDGSAIQVLKEWNMTGKKKNNKRKRSKSKQHQGNKDAKDKVERPEAGPLQPQPPQIQNGPMNGCEKDSSSTDSANEKPALIPREKKISILEEPSKALRGVTEGNRLLQQKLSLDGNPKPIHGTTERSDGLQWSAEQPCNPSKPKAKTSPVKSNTPAAHLEIKPDELAKKRGPNIEKSVKDLQRCTVSLTRYRVMIKEEVDSSVKKIKAAFAELHNCIIDKEVSLMAEMDKVKEEAMEILTARQKKAEELKRLTDLASQMAEMQLAELRAEIKHFVSERKYDEELGKAARFSCDIEQLKAQIMLCGEITHPKNNYSSRTPCSSLLPLLNAHAATSGKQSNFSRKSSTHNKPSEGKAANPKMVSSLPSTADPSHQTMPANKQNGSSNQRRRFNPQYHNNRLNGPAKSQGSGNEAEPLGKGNSRHEHRRQPHNGFRPKNKGGAKNQEASLGMKTPEAPAHSEKPRRRQHAADTSEARPFRGSVGRVSQCNLCPTRIEVSTDAAVLSVPAVTLVA

SEQ ID NO: 824335 - protein, 510 aa, Homo sapiens
MTEMYDEEVNDHINELMQISEEMYARDEVVNACCVITGQRDCKNAKCAHDVVVDKDRSSSTTILTEAEMYSRLSLDGGKEISVLEEPAKGTSVLVCMNGKEGNRLLQQKLSLDGNPKPIHGTTERSDGLQWSAEQPCNPSKPKAKTSPVKSNTPAAHLEIKPDELAKKRGPNIEKSVKDLQRCTVSLTRYRVMIKEEVDSSVKKIKAAFAELHNCIIDKEVSLMAEMDKVKEEAMEILTARQKKAEELKRLTDLASQMAEMQLAELRAEIKHFVSERKYDEELGKAARFSCDIEQLKAQIMLCGEITHPKNNYSSRTPCSSLLPLLNAHAATSGKQSNFSRKSSTHNKPSEGKAANPKMVSSLPSTADPSHQTMPANKQNGSSNQRRRFNPQYHNNRLNGPAKSQGSGNEAEPLGKGNSRHEHRRQPHNGFRPKNKGGAKNQEASLGMKTPEAPAHSEKPRRRQHAADTSEARPFRGSVGRVSQCNLCPTRIEVSTDAAVLSVPAVTLVA

SEQ ID NO: 824336 - protein, 297 aa, Homo sapiens
LARSALRLSVEPPSNRAGKIPTRSALQWTPEEQSERIHGGALVISVIMGFLLFISFLQHFVSERKYDEELGKAARFSCDIEQLKAQIMLCGEITHPKNNYSSRTPCSSLLPLLNAHAATSGKQSNFSRKSSTHNKPSEGKAANPKMVSSLPSTADPSHQTMPANKQNGSSNQRRRFNPQYHNNRLNGPAKSQGSGNEAEPLGKGNSRHEHRRQPHNGFRPKNKGGAKNQEASLGMKTPEAPAHSEKPRRRQHAADTSEARPFRGSVGRVSQCNLCPTRIEVSTDAAVLSVPAVTLVA

SEQ ID NO: 824337 - protein, 558 aa, Homo sapiens
MAELNTHVNVKEKIYAVRSVVPNKSNNEIVLVLQQFDFNVDKAVQAFVDGSAIQVLKEWNMTGKKKNNKRKRSKSKQHQGNKDAKDKVERPEAGPLQPQPPQIQNGPMNGCEKDSSSTDSANEKPALIPREKKISILEEPSKALRGVTEGNRLLQQKLSLDGNPKPIHGTTERSDGLQWSAEQPCNPSKPKAKTSPVKSNTPAAHLEIKPDELAKKRGPNIEKSVKDLQRCTVSLTRYRVMIKEEVDSSVKKIKAAFAELHNCIIDKEVSLMAEMDKVKEEAMEILTARQKKAEELKRLTDLASQMAEMQLAELRAEIKHFVSERKYDEELGKAARFSCDIEQLKAQIMLCGEITHPKNNYSSRTPCSSLLPLLNAHAATSGKQSNFSRKSSTHNKPSEGKAANPKMVSSLPSTADPSHQTMPANKQNGSSNQRRRFNPQYHNNRLNGPAKSQGSGNEAEPLGKGNSRHEHRRQPHNGFRPKNKGGAKNQEASLGMKTPEAPAHSEKPRRRQHAADTSEARPFRGSVGRVSQCNLCPTRIEVSTDAAVLSVPAVTLVA

SEQ ID NO: 824338 - protein, 137 aa, Homo sapiens
MPANKQNGSSNQRRRFNPQYHNNRLNGPAKSQGSGNEAEPLGKGNSRHEHRRQPHNGFRPKNKGGAKNQEASLGMKTPEAPAHSEKPRRRQHAADTSEARPFRGSVGRVSQCNLCPTRIEVSTDAAVLSVPAVTLVA

SEQ ID NO: 824339 - protein, 447 aa, Homo sapiens
MAELNTHVNVKEKIYAVRSVVPNKSNNEIVLVLQQFDFNVDKAVQAFVDGSAIQVLKEWNMTGKKKNNKRKRSKSKQHQGNKDAKDKVERPEAGPLQPQPPQIQNGPMNGCEKDSSSTDSANEKPALIPREKKISILEEPSKALRGVTEGNRLLQQKLSLDGNPKPIHGTTERSDGLQWSAEQPCNPSKPKAKTSPVKSNTPAAHLEIKPDELAKKRGPNIEKSVKDLQRCTVSLTRYRVMIKEEVDSSVKKIKAAFAELHNCIIDKEVSLMAEMDKVKEEAMEILTARQKKAEELKRLTDLASQMAEMQLAELRAEIKHFVSERKYDEELGKAARFSCDIEQLKAQIMLCGEITHPKNNYSSRTPCSSLLPLLNAHAATSGKQSNFSRKSSTHNKPSEGKAANPKMVSSLPSTADPSHQTMPANKQNGSSNQRRRFNSTVEHVGIV

SEQ ID NO: 824340 - protein, 375 aa, Homo sapiens
MAELNTHVNVKEKIYAVRSVVPNKSNNEIVLVLQQFDFNVDKAVQAFVDGSAIQVLKEWNMTGKKKNNKRKRSKSKQHQGNKDAKDKVERPEAGPLQPQPPQIQNGPMNGCEKDSSSTDSANEKPALIPREKKISILEEPSKALRGVTEGNRLLQQKLSLDGNPKPIHGTTERSDGLQWSAEQPCNPSKPKAKTSPVKSNTPAAHLEIKPDELAKKRGPNIEKSVKDLQRCTVSLTRYRVMIKEEVDSSVKKIKAAFAELHNCIIDKEVSLMAEMDKVKEEAMEILTARQKKAEELKRLTDLASQMAEMQLAELRAEIKHFVSERKYDEELGKAARFSCDIEQLKAQIMLCGEITHPKNTIPQTPRPIGILYNAS

SEQ ID NO: 824341 - protein, 295 aa, Homo sapiens
MAELNTHVNVKEKIYAVRSVVPNKSNNEIVLVLQQFDFNVDKAVQAFVDGSAIQVLKEWNMTGKKKNNKRKRSKSKQHQGNKDAKDKVERPEAGPLQPQPPQIQNGPMNGCEKDSSSTDSANEKPALIPREKKISILEEPSKALRGVTGPNIEKSVKDLQRCTVSLTRYRVMIKEEVDSSVKKIKAAFAELHNCIIDKEVSLMAEMDKVKEEAMEILTARQKKAEELKRLTDLASQMAEMQLAELRAEIKHFVSERKYDEELGKAARFSCDIEQLKAQIMLCGEITHPKTISLSP

SEQ ID NO: 824342 - protein, 117 aa, Homo sapiens
AAAYYYKIRGRVDLGCVLLSSSETRLLSGTLLWIPRAYSTRSKMAELNTHVNVKEKIYAVRSVVPNKSNNEIVLVLQQFDFNVDKAVQAFVDGRYTCTLQLKMLDLNIPDIPYFFLK

SEQ ID NO: 824343 - protein, 64 aa, Homo sapiens
MAELNTHVNVKEKIYAVRSVVPNKSNNEIVLVLQQFDFNVDKAVQAFVDASAIPVPKKVISGRK

SEQ ID NO: 824344 - protein, 558 aa, Homo sapiens; identical to SEQ ID NO: 824337

SEQ ID NO: 824345 - protein, 104 aa, Homo sapiens
WGGRAGVVSVKESSPGAELAAPSAASAGSAGRAPDGARPRQRLPLGPPSEPQGPPPPRRLPWRPRPRAPAPARDGGAGARHRELFRNQAAFRNIAVDSQLSDNT

SEQ ID NO: 824346 - protein, 664 aa, Homo sapiens
WGGRAGVVSVKESSPGAELAAPSAASPAARGELRTARGPGSGSRSARPPSRRGRHRRGASPGDRAPGPRLRPGTEEPALDTESSSETRLLSGTLLWIPRAYSTRSKMAELNTHVNVKEKIYAVRSVVPNKSNNEIVLVLQQFDFNVDKAVQAFVDGSAIQVLKEWNMTGKKKNNKRKRSKSKQHQGNKDAKDKVERPEAGPLQPQPPQIQNGPMNGCEKDSSSTDSANEKPALIPREKKISILEEPSKALRGVTEGNRLLQQKLSLDGNPKPIHGTTERSDGLQWSAEQPCNPSKPKAKTSPVKSNTPAAHLEIKPDELAKKRGPNIEKSVKDLQRCTVSLTRYRVMIKEEVDSSVKKIKAAFAELHNCIIDKEVSLMAEMDKVKEEAMEILTARQKKAEELKRLTDLASQMAEMQLAELRAEIKHFVSERKYDEELGKAARFSCDIEQLKAQIMLCGEITHPKNNYSSRTPCSSLLPLLNAHAATSGKQSNFSRKSSTHNKPSEGKAANPKMVSSLPSTADPSHQTMPANKQNGSSNQRRRFNPQYHNNRLNGPAKSQGSGNEAEPLGKGNSRHEHRRQPHNGFRPKNKGGAKNQEASLGMKTPEAPAHSEKPRRRQHAADTSEARPFRGSVGRVSQCNLCPTRIEVSTDAAVLSVPAVTLVA

SEQ ID NO: 824347 - protein, 563 aa, Homo sapiens
ARIQASNDVRGHVNVKEEIYAVRSVVPNKSNNEIVLVLQQFDFNVDKAVQAFVDGSAIQVLKEWNMTGKKKNNKRKRSKSKQHQGNKDAKDKVERPEAGPLQPQPPQIQNGPMNGCEKDSSSTDSANEKPALIPREKKISILEEPSKALRGVTEGNRLLQQKLSLDGNPKPIHGTTERSDGLQWSAEQPCNPSKPKAKTSPVKSNTPAAHLEIKPDELAKKRGPNIEKSVKDLQRCTVSLTRYRVMIKEEVDSSVKKIKAAFAELHNCIIDKEVSLMAEMDKVKEEAMEILTARQKKAEELKRLTDLASQMAEMQLAELRAEIKHFVSERKYDEELGKAARFSCDIEQLKAQIMLCGEITHPKNNYSSRTPCSSLLPLLNAHAATSGKQSNFSRKSSTHNKPSEGKAANPKMVSSLPSTADPSHQTMPANKQNGSSNQRRRFNPQYHNNRLNGPAKSQGSGNEAEPLGKGNSRHEHRRQPHNGFRPKNKGGAKNQEASLGMKTPEAPAHSEKPRRRQHAADTSEARPFRGSVGRVSQCNLCPTRIEVSTDAAVLSVPAVTLVA

SEQ ID NO: 824348 - protein, 318 aa, Homo sapiens
MIKEEVDSSVKKIKAAFAELHNCIIDKEVSLMAEMDKVKEEAMEILTARQKKAEELKRLTDLASQMAEMQLAELRAEIKHFVSERKYDEELGKAARFSCDIEQLKAQIMLCGEITHPKNNYSSRTPCSSLLPLLNAHAATSGKQSNFSRKSSTHNKPSEGKAANPKMVSSLPSTADPSHQTMPANKQNGSSNQRRRFNPQYHNNRLNGPAKSQGSGNEAEPLGKGNSRHEHRRQPHNGFRPKNKGGAKNQEASLGMKTPEAPAHSEKPRRRQHAADTSEARPFRGSVGRVSQCNLCPTRIEVSTDAAVLSVPAVTLVA

SEQ ID NO: 824349 - protein, 281 aa, Homo sapiens
CLDDPWPCCTARWLILEELAIFTELDADMGQMYVVVVIAEIKHFVSERKYDEELGKAARFSCDIEQLKAQIMLCGEITHPKNNYSSRTPCSSLLPLLNAHAATSGKQSNFSRKSSTHNKPSEGKAANPKMVSSLPSTADPSHQTMPANKQNGSSNQRRRFNPQYHNNRLNGPAKSQGSGNEAEPLGKGNSRHEHRRQPHNGFRPKNKGGAKNQEASLGMKTPEAPAHSEKPRRRQHAADTSEARPFRGSVGRVSQCNLCPTRIEVSTDAAVLSVPAVTLVA

SEQ ID NO: 824350 - protein, 558 aa, Homo sapiens; identical to SEQ ID NO: 824337

SEQ ID NO: 824351 - protein, 370 aa, Homo sapiens
MAELNTHVNVKEKIYAVRSVVPNKSNNEIVLVLQQFDFNVDKAVQAFVDGSAIQVLKEWNMTGKKKNNKRKRSKSKQHQGNKDAKDKVERPEAGPLQPQPPQIQNGPMNGCEKDSSSTDSANEKPALIPREKKISILEEPSKALRGVTEGNRLLQQKLSLDGNPKPIHGTTERSDGLQWSAEQPCNPSKPKAKTSPVKSNTPAAHLEIKPDELAKKRGPNIEKSVKDLQRCTVSLTRYRVMIKEEVDSSVKKIKAAFAELHNCIIDKEVSLMAEMDKVKEEAMEILTARQKKAEELKRLTDLASQMAEMQLAELRAEIKHFVSERKYDEELGKAARFSCDIEQLKAQIMLCGEITHPKNNYSSRSRIAIS

SEQ ID NO: 824352 - protein, 137 aa, Homo sapiens; identical to SEQ ID NO: 824338

SEQ ID NO: 824353 - protein, 117 aa, Homo sapiens; identical to SEQ ID NO: 824342

SEQ ID NO: 824354 - protein, 105 aa, Homo sapiens
MGETEGKKDEADYKRLQTFPLVRHSDMPEEMRVETMELCVTACEKFSNNNESAAKMIKETMDKKFGSSWHVVIGEGFGFEITHEVKNLLYLYFGGTLAVCVWKCS

SEQ ID NO: 824355 - protein, 89 aa, Homo sapiens
GRTSLLVAKTLLFRSLTTLAGVRWLRPRLRPPQEQSAAKMIKETMDKKFGSSWHVVIGEGFGFEITHEVKNLLYLYFGGTLAVCVWKCS

SEQ ID NO: 824356 - protein, 107 aa, Homo sapiens [sequence omitted]

SEQ ID NO: 824357 - protein, 299 aa, Homo sapiens
MPGSASKRRIPVSQPGMADPHQLFDDTSSAQSRGYGAQRAPGGLSYPAASPTPHAAFLADPVSNMAMAYGSSLAAQGKELVDKNIDRFIPITKLKYYFAVDTMYVGRKLGLLFFPYLHQDWEVQYQQDTPVAPRFDVNAPDLYIPAMAFITYVLVAGLALGTQDRFSPDLLGLQASSALAWLTLEVLAILLSLYLVTVNTDLTTIDLVAFLGYKYVGMIGGVLMGLLFGKIGYYLVLGWCCVAIFVFMIRTLRLKILADAAAEGVPVRGARNQLRMYLTMAVAAAQPMLMYWLTFHLVR

SEQ ID NO: 824358 - protein, 283 aa, Homo sapiens
MADPHQLFDDTSSAQSRGYGAQRAPGGLSYPAASPTPHAAFLADPVSNMAMAYGSSLAAQGKELVDKNIDRFIPITKLKYYFAVDTMYVGRKLGLLFFPYLHQDWEVQYQQDTPVAPRFDVNAPDLYIPAMAFITYVLVAGLALGTQDRFSPDLLGLQASSALAWLTLEVLAILLSLYLVTVNTDLTTIDLVAFLGYKYVGMIGGVLMGLLFGKIGYYLVLGWCCVAIFVFMIRTLRLKILADAAAEGVPVRGARNQLRMYLTMAVAAAQPMLMYWLTFHLVR

SEQ ID NO: 824359 - protein, 283 aa, Homo sapiens; identical to SEQ ID NO: 824358

SEQ ID NO: 824360 - protein, 327 aa, Homo sapiens
PSLNPDVHWLSLRRRGVGTGAGRARSEPRLRWRRRRMHPAGLAAAAAGTPRLPSKRRIPVSQPGMADPHQLFDDTSSAQSRGYGAQRAPGGLSYPAASPTPHAAFLADPVSNMAMAYGSSLAAQGKELVDKNIDRFIPITKLKYYFAVDTMYVGRKLGLLFFPYLHQDWEVQYQQDTPVAPRFDVNAPDLYIPAMAFITYVLVAGLALGTQDRFSPDLLGLQASSALAWLTLEVLAILLSLYLVTVNTDLTTIDLVAFLGYKYVGMIGGVLMGLLFGKIGYYLVLGWCCVAIFVFMFPLLPGAVAHACNPSTLGGRGGRITRSGRCG

SEQ ID NO: 824361 - protein, 372 aa, Homo sapiens
PSLNPDVHWLSLRRRGVGTGAGRARSEPRLRWRRRRMHPAGLAAAAAGTPRLPSKRRIPVSQPGMADPHQLFDDTSSAQSRGYGAQRAPGGLSYPAASPTPHAAFLADPVSNMAMAYGSSLAAQGKELVDKNIDRFIPITKLKYYFAVDTMYVGRKLGLLFFPYLHQDWEVQYQQDTPVAPRFDVNAPDLYIPAMAFITYVLVAGLALGTQDRFSPDLLGLQASSALAWLTLEVLAILLSLYLVTVNTDLTTIDLVAFLGYKYVGGVPPPFTPAPALGPCPHTASSPSPRMIGGVLMGLLFGKIGYYLVLGWCCVAIFVFMIRTLRLKILADAAAEGVPVRGARNQLRMYLTMAVAAAQPMLMYWLTFHLVR

SEQ ID NO: 824362 - protein, 265 aa, Homo sapiens
PSLNPDVHWLSLRRRGVGTGAGRARSEPRLRWRRRRMHPAGLAAAAAGTPRLPSKRRIPVSQPGMADPHQLFDDTSSAQSRGYGAQRAPGGLSYPAASPTPHAAFLADPVSNMAMAYGSSLAAQGKELVDKNIDRFIPITKLKYYFAVDTMYVGRKLGLLFFPYLHQDWEVQYQQDTPVAPRFDVNAPDLYIPAMAFITYVLVAGLALGTQDRFSPDLLGLQASSALAWLTLEVLAILLSLYLVTVNTDLTTIDLVAFLGYKYVG

SEQ ID NO: 824363 - protein, 334 aa, Homo sapiens
PSLNPDVHWLSLRRRGVGTGAGRARSEPRLRWRRRRMHPAGLAAAAAGTPRLPSKRRIPVSQPGMADPHQLFDDTSSAQSRGYGAQRAPGGLSYPAASPTPHAAFLADPVSNMAMAYGSSLAAQGKELVDKNIDRFIPITKLKYYFAVDTMYVGRKLGLLFFPYLHQDWEVQYQQDTPVAPRFDVNAPDLYIPAMAFITYVLVAGLALGTQDRFSPDLLGLQASSALAWLTLEVLAILLSLYLVTVNTDLTTIDLVAFLGYKYVGMIGGVLMGLLFGKIGYYLVLGWCCVAIFVFMFPFCRAQLVPGPTHRDPLSCCVCQDLQSTGCPPSSSRR

SEQ ID NO: 824364 - protein, 175 aa, Homo sapiens
MADPHQLFDDTSSAQSRGYGAQRAPGGLSYPAASPTPHAAFLADPVSNMAMAYGSSLAAQGKELVDKNIDRFIPITKLKYYFAVDTMYVGRKLGLLFFPYLHQMECVQLTGGPPLTYAGPLSDGSASWGCRDRCSTLGWGPPFRGGLTMVTAQIGCNGGHPTLGASAFVSPHSFL

SEQ ID NO: 824365 - protein, 347 aa, Homo sapiens
PSLNPDVHWLSLRRRGVGTGAGRARSEPRLRWRRRRMHPAGLAAAAAGTPRLPSKRRIPVSQPGMADPHQLFDDTSSAQSRGYGAQRAPGGLSYPAASPTPHAAFLADPVSNMAMAYGSSLAAQGKELVDKNIDRFIPITKLKYYFAVDTMYVGRKLGLLFFPYLHQDWEVQYQQDTPVAPRFDVNAPDLYIPAMAFITYVLVAGLALGTQDRFSPDLLGLQASSALAWLTLEVLAILLSLYLVTVNTDLTTIDLVAFLGYKYVGMIGGVLMGLLFGKIGYYLVLGWCCVAIFVFMIRTLRLKILADAAAEGVPVRGARNQLRMYLTMAVAAAQPMLMYWLTFHLVR

SEQ ID NO: 824366 - protein, 330 aa, Homo sapiens
PSLNPDVHWLSLRRRGVGTGAGRARSEPRLRWRRRRMHPAGLAAAAAGTPRLPSKRRIPVSQPGMADPHQLFDDTSSAQSRGYGAQRAPGGLSYPAASPTPHAAFLADPVSNMAMAYGSSLAAQGKELVDKNIDRFIPITKLKYYFAVDTMYVGRKLGLLFFPYLHQDWEVQYQQDTPVAPRFDVNAPDLYIPAMAFITYVLVAGLALGTQDRFSPDLLGLQASSALAWLTLEVLAILLSLYLVTVNTDLTTIDLVAFLGYKYVGMIGGVLMGLLFGKIGYYLVLGWCCVAIFVFMFPLLPGAVAHACNPSTLGGRGGRITRSGDQDHPG

SEQ ID NO: 824367 - protein, 283 aa, Homo sapiens; identical to SEQ ID NO: 824358

SEQ ID NO: 824368 - protein, 347 aa, Homo sapiens; identical to SEQ ID NO: 824365

SEQ ID NO: 824369 - protein, 270 aa, Homo sapiens
PSLNPDVHWLSLRRRGVGTGAGRARSEPRLRWRRRRMHPAGLAAAAAGTPRLPSKRRIPVSQPGMADPHQLFDDTSSAQSRGYGAQRAPGGLSYPAASPTPHAAFLADPVSNMAMAYGSSLAAQGKELVDKNIDRFIPITKLKYYFAVDTMYVGRKLGLLFFPYLHQDWEVQYQQDTPVAPRFDVNAPDLYIPAMAFITYVLVAGLALGTQDRFSPDLLGLQASSALAWLTLEVLAILLSLYLVTVNTDLTTIDLVAFLGYKYVGSGRCG

SEQ ID NO: 824370 - protein, 248 aa, Homo sapiens
PSLNPDVHWLSLRRRGVGTGAGRARSEPRLRWRRRRMHPAGLAAAAAGTPRLPSKRRIPVSQPGMADPHQLFDDTSSAQSRGYGAQRAPGGLSYPAASPTPHAAFLADPVSNMAMAYGSSLAAQGKELVDKNIDRFIPITKLKYYFAVDTMYVGRKLGLLFFPYLHQDWEVQYQQDTPVAPRFDVNAPDLYIPAMAFITYVLVAGLALGTQDRFSPDLLGLQASSALAWLTLEVLPMLMYWLTFHLVR

SEQ ID NO: 824371 - protein, 141 aa, Homo sapiens
RDGSGLGGVGGGSARGDVRGGAARAVGGGGGSVSRSRVEVGRSELLGAVSPPAASARLYRRASEFPRVLGGAPPSFQSPRTGPSSFYLTAPVFRRLLALSVGPIPARFLLLPIEALEMNVSISSEMNQIMMHHYHRRNSCL

SEQ ID NO: 824372 - protein, 221 aa, Homo sapiens
MIPNGYLMFEDENFIESSVAKLNALRKSGQFCDVRLQVCGHEMLAHRAVLACCSPYLFEIFNSDSDPHGISHVKFDDLNPEAVEVLLNYAYTAQLKADKELVKDVYSAAKKLKMDRVKQVCGDYLLSRMDVTSCISYRNFASCMGDSRLLNKVDAYIQEHLLQISEEEEFLKLPRLKLEVMLEDNVCLPSNGKLYTKVINWVQRSIWENGDSLEELMEEVY

SEQ ID NO: 824373 - protein, 464 aa, Homo sapiens
CNQDMEEMMSEQENPDSVKQQSCPSSPKKNPLWAENDDDLMVQTLYYSADHKLLDGNLLDGQAEVFGSDDDHIQFVQKKPPRENGHKQISSSSTGCLSSPNATVQSPKHEWKIVASEKTSNNTYLCLAVLDGIFCVIFLHGRNSPQSSPTSTPKLSKSLSFEMQQDELIEKPMSPMQYARSGLGTAEMNGKLIAAGGYNREECLRTVECYNPHTDHWSFLAPMRTPRARFQMAVLMGQLYVVGGSNGHSDDLSCGEMYDSNIDDWIPVPELRTNRCNAGVCALNGKLYIVGGSDPYGQKGLKNCDVFDPVTKLWTSCAPLNIRRHQSAVCELGGYLYIIGGAESWNCLNTVERYNPENNTWTLIAPMNVARRGAGVAVLNGKLFVCGGFDGSHAISCVEMYDPTRNEWKMMGNMTSPRSNAGIATVGNTIYAVGGFDGNEFLNTVEVYNLESNEWSPYTKIFQF

SEQ ID NO: 824374 - protein, 642 aa, Homo sapiens
MIPNGYLMFEDENFIESSVAKLNALRKSGQFCDVRLQVCGHEMLAHRAVLACCSPYLFEIFNSDSDPHGISHVKFDDLNPEAVEVLLNYAYTAQLKADKELVKDVYSAAKKLKMDRVKQVCGDYLLSRMDVTSCISYRNFASCMGDSRLLNKVDAYIQEHLLQISEEEEFLKLPRLKLEVMLEDNVCLPSNGKLYTKVINWVQRSIWENGDSLEELMEEVQTLYYSADHKLLDGNLLDGQAEVFGSDDDHIQFVQKKPPRENGHKQISSSSTGCLSSPNATVQSPKHEWKIVASEKTSNNTYLCLAVLDGIFCVIFLHGRNSPQSSPTSTPKLSKSLSFEMQQDELIEKPMSPMQYARSGLGTAEMNGKLIAAGGYNREECLRTVECYNPHTDHWSFLAPMRTPRARFQMAVLMGQLYVVGGSNGHSDDLSCGEMYDSNIDDWIPVPELRTNRCNAGVCALNGKLYIVGGSDPYGQKGLKNCDVFDPVTKLWTSCAPLNIRRHQSAVCELGGYLYIIGGAESWNCLNTVERYNPENNTWTLIAPMNVARRGAGVAVLNGKLFVCGGFDGSHAISCVEMYDPTRNEWKMMGNMTSPRSNAGIATVGNTIYAVGGFDGNEFLNTVEVYNLESNEWSPYTKIFQF

SEQ ID NO: 824375 - protein, 302 aa, Homo sapiens [sequence omitted]

SEQ ID NO: 824376 - protein, 203 aa, Homo sapiens
TCSSLKIPELRTNRLNAGVCALNGKLYIVGGSDPYGQKGLKNCDVFDPVTKLWTSCAPLNIRRHQSAVCELGGYLYIIGGAESWNCLNTVERYNPENNTWTLIAPMNVARRGAGVAVLNGKLFVCGGFDGSHAISCVEMYDPTRNEWKMMGNMTSPRSNAGIATVGNTIYAVGGFDGNEFLNTVEVYNLESNEWSPYTKIFQF

SEQ ID NO: 824377 - protein, 642 aa, Homo sapiens; identical to SEQ ID NO: 824374

SEQ ID NO: 824378 - protein, 642 aa, Homo sapiens; identical to SEQ ID NO: 824374

SEQ ID NO: 824379 - protein, 564 aa, Homo sapiens
MIPNGYLMFEDENFIESSVAKLNALRKSGQFCDVRLQVCGHEMLAHRAVLACCSPYLFEIFNSDSDPHGISHVKFDDLNPEAVEVLLNYAYTAQLKADKELVKDVYSAAKKLKMDRVKQVCGDYLLSRMDVTSCISYRNFASCMGDSRLLNKVDAYIQEHLLQISEEEEFLKLPRLKLEVMLEDNVCLPSNGKLYTKVINWVQRSIWENGDSLEELMEEVQTLYYSADHKLLDGNLLDGQAEVFGSDDDHIQFVQKKPPRENGHKQISSSSTGCLSSPNATVQSPKHEWKIVASEKTSNNTYLCLAVLDGIFCVIFLHGRNSPQSSPTSTPKLSKSLSFEMQQDELIEKPMSPMQYARSGLGTAEMNGKLIAAGGYNREECLRTVECYNPHTDHWSFLAPMRTPRARFQMAVLMGQLYVVGGSNGHSDDLSCGEMYDSNIDDWIPVPELRTNRCNAGVCALNGKLYIVGGSDPYGQKGLKNCDVFDPVTKLWTSCAPLNIRRHQSAVCELGGYLYIIGGAESWNCLNTVERYNPENNTWTLIAPMNVARRGAGVAVLNENCLWR

SEQ ID NO: 824380 - protein, 221 aa, Homo sapiens; identical to SEQ ID NO: 824372

SEQ ID NO: 824381 - protein, 141 aa, Homo sapiens; identical to SEQ ID NO: 824371

SEQ ID NO: 824382 - protein, 642 aa, Homo sapiens; identical to SEQ ID NO: 824374

SEQ ID NO: 824383 - protein, 642 aa, Homo sapiens; identical to SEQ ID NO: 824374

SEQ ID NO: 824384 - protein, 424 aa, Homo sapiens
MVQTLYYSADHKLLDGNLLDGQAEVFGSDDDHIQFVQKKPPRENGHKQISSSSTGCLSSPNATVQSPKHEWKIVASEKTSNNTYLCLAVLDGIFCVIFLHGRNSPQSSPTSTPKLSKSLSFEMQQDELIEKPMSPMQYARSGLGTAEMNGKLIAAGGYNREECLRTVECYNPHTDHWSFLAPMRTPRARFQMAVLMGQLYVVGGSNGHSDDLSCGEMYDSNIDDWIPVPELRTNRCNAGVCALNGKLYIVGGSDPYGQKGLKNCDVFDPVTKLWTSCAPLNIRRHQSAVCELGGYLYIIGGAESWNCLNTVERYNPENNTWTLIAPMNVARRGAGVAVLNGKLFVCGGFDGSHAISCVEMYDPTRNEWKMMGNMTSPRSNAGIATVGNTIYAVGGFDGNEFLNTVEVYNLESNEWSPYTKIFQF

SEQ ID NO: 824385 - protein, 630 aa, Homo sapiens
MIPNGYLMFEDENFIESSVAKLNALRKSGQFCDVRLQVCGHEMLAHRAVLACCSPYLFEIFNSDSDPHGISHVKFDDLNPEAVEVLLNYAYTAQLKADKELVKDVYSAAKKLKMDRVKQVCGDYLLSRMDVTSCISYRNFASCMGDSRLLNKVDAYIQEHLLQISEEEEFLKLPRLKLEVMLEDNVCLPSNGKLYTKVINWVQRSIWENGDSLEELMEEVQTLYYSADHKLLDGNLLDGQAEVFGSDDDHIQFVQKKPPRENGHKQISSSSTGCLSSPNATVQSPKHEWKIVASEKTSNNTYLCLAVLDGIFCVIFLHGRNSPQSSPTSTPKLSKSLSFEMQQDELIEKPMSPMQYARSGLGTAEMNGKLIAAGGYNREECLRTVECYNPHTDHWSFLAPMRTPRARFQMAVLMGQLYVVGGSNGHSDDLSCGEMYDSNIDDWIPVPELRTNRCNAGGSDPYGQKGLKNCDVFDPVTKLWTSCAPLNIRRHQSAVCELGGYLYIIGGAESWNCLNTVERYNPENNTWTLIAPMNVARRGAGVAVLNGKLFVCGGFDGSHAISCVEMYDPTRNEWKMMGNMTSPRSNAGIATVGNTIYAVGGFDGNEFLNTVEVYNLESNEWSPYTKIFQF

SEQ ID NO: 824386 - protein, 561 aa, Homo sapiens
MIPNGYLMFEDENFIESSVAKLNALRKSGQFCDVRLQVCGHEMLAHRAVLACCSPYLFEIFNSDSDPHGISHVKFDDLNPEAVEVLLNYAYTAQLKADKELVKDVYSAAKKLKMDRVKQVCGDYLLSRMDVTSCISYRNFASCMGDSRLLNKVDAYIQEHLLQISEEEEFLKLPRLKLEVMLEDNVCLPSNGKLYTKVINWVQRSIWENGDSLEELMEEVQTLYYSADHKLLDGNLLDGQAEVFGSDDDHIQFVQKKPPRENGHKQISSSSTGCLSSPNATVQSPKHEWKIVASEKTSNNTYLCLAVLDGIFCVIFLHGRNSPQSSPTSTPKLSKSLSFEMQQDELIEKPMSPMQYARSGLGTAEMNGKLIAAGGYNREECLRTVECYNPHTDHWSFLAPMRTPRARFQMAVLMGQLYVVGGSNGHSDDLSCGEMYDSNIDDWIPVPELRTNRCNAGVCALNGKLYIVGGSDPYGQKGLKNCDVFDPVTKLWTSCAPLNIRRHQSAVCELGGYLYIIGGAESWNCLNTVERYNPENNTWTLIAPMNVARRGAGVAVLNGNV

SEQ ID NO: 824387 - protein, 302 aa, Homo sapiens [sequence omitted]

SEQ ID NO: 824388 - protein, 642 aa, Homo sapiens; identical to SEQ ID NO: 824374

SEQ ID NO: 824389 - protein, 625 aa, Homo sapiens
MIPNGYLMFEDENFIESSVAKLNALRKSGQFCDVRLQVCGHEMLAHRAVLACCSPYLFEIFNSDSDPHGISHVKFDDLNPEAVEVLLNYAYTAQLKADKELVKDVYSAAKKLKMDRVKQVCGDYLLSRMDVTSCISYRNFASCMGDSRLLNKVDAYIQEHLLQISEEEEFLKLPRLKLEVMLEDNVCLPSNGKLYTKVINWVQRSIWENGDSLEELMEEVQTLYYSADHKLLDGNLLDGQAEVFGSDDDHIQFVQKKPPRENGHKQISSSSTGCLSSPNATVQSPKHEWKIVASEKTSNNTYLCLAVLDGIFCVIFLHGRNSPQSSPTSTPKLSKSLSFEMQQDELIEKPMSPMQYARSGLGTAEMNGKLIAAGGYNREECLRTVECYNPHTDHWSFLAPMRTPRARFQMAVLMGQLYVVGGSNGHSDDLSCGEMYDSNIDDWIPVPELRTNRCNAGVCALNGKLYIVGGSDPYGQKGLKNCDVFDPVTKLWTSCAPLNIRRHQSAVCELGGYLYIIGGAESWNCLNTVERYNPENNTWTLIAPMNVARRGAGVAVLNGKLFVCGGFDGSHAISCVEMYDPTRNEWKMMGNMTSPRSNAGIATVGNTIYAVGGFDGNEFLNTVEV

SEQ ID NO: 824390 - protein, 378 aa, Homo sapiens
MIPNGYLMFEDENFIESSVAKLNALRKSGQFCDVRLQVCGHEMLAHRAVLACCSPYLFEIFNSDSDPHGISHVKFDDLNPEAVEVLLNYAYTAQLKADKELVKDVYSAAKKLKMDRVKQVCGDYLLSRMDVTSCISYRNFASCMGDSRLLNKVDAYIQEHLLQISEEEEFLKLPRLKLEVMLEDNVCLPSNGKLYTKVINWVQRSIWENGDSLEELMEEVQTLYYSADHKLLDGNLLDGQAEVFGSDDDHIQFVQKKPPRENGHKQISSSSTGCLSSPNATVQSPKHEWKIVASEKTSNNTYLCLAVLDGIFCVIFLHGRNSPQSSPTSTPKLSKSLSFEMQQDELIEKPMSPMQYARSGLGTAEMNGKLIAAGYTCE

SEQ ID NO: 824391 - protein, 506 aa, Homo sapiens
MKKAEMGRFSISPDEDSSSYSSNSDFNYSYPTKQAALKSHYADVDPENQNFLLESNLGKKKYETEFHPGTTSFGMSVFNLSNAIVGSGILGLSYAMANTGIALFIILLTFVSIFSLYSVHLLLKTANEGGSLLYEQLGYKAFGLVGKLAASGSITMQNIGAMSSYLFIVKYELPLVIQALTNIEDKTGLWYLNGNYLVLLVSLVVILPLSLFRNLGYLGYTSGLSLLCMVFFLIVVICKKFQVPCPVEAALIINETINTTLTQPTALVPALSHNVTENDSCRPHYFIFNSQTVYAVPILIFSFVCHPAVLPIYEELKDRSRRRMMNVSKISFFAMFLMYLLAALFGYLTFYEHVESELLHTYSSILGTDILLLIVRLAVLMAVTLTVPVVIFPIRSSVTHLLCASKDFSWWRHSLITVSILAFTNLLVIFVPTIRDIFGFIGASAASMLIFILPSAFYIKLVKKEPMKSVQKIGALFFLLSGVLVMTGSMALIVLDWVHNAPGGGH

SEQ ID NO: 824392 - protein, 506 aa, Homo sapiens; identical to SEQ ID NO: 824391

SEQ ID NO: 824393 - protein, 506 aa, Homo sapiens; identical to SEQ ID NO: 824391

SEQ ID NO: 824394 - protein, 406 aa, Homo sapiens
MKQNLILLTFVSIFSLYSVHLLLKTANEGGSLLYEQLGYKAFGLVGKLAASGSITMQNIGAMSSYLFIVKYELPLVIQALTNIEDKTGLWYLNGNYLVLLVSLVVILPLSLFRNLGYLGYTSGLSLLCMVFFLIVVICKKFQVPCPVEAALIINETINTTLTQPTALVPALSHNVTENDSCRPHYFIFNSQTVYAVPILIFSFVCHPAVLPIYEELKDRSRRRMMNVSKISFFAMFLMYLLAALFGYLTFYEHVESELLHTYSSILGTDILLLIVRLAVLMAVTLTVPVVIFPIRSSVTHLLCASKDFSWWRHSLITVSILAFTNLLVIFVPTIRDIFGFIGASAASMLIFILPSAFYIKLVKKEPMKSVQKIGALFFLLSGVLVMTGSMALIVLDWVHNAPGGGH

SEQ ID NO: 824395 - protein, 485 aa, Homo sapiens [sequence omitted]

SEQ ID NO: 824396 - protein, 415 aa, Homo sapiens [sequence omitted]

SEQ ID NO: 824397 - protein, 239 aa, Homo sapiens
MKKAEMGRFSISPDEDSSSYSSNSDFNYSYPTKQAALKSHYADVDPENQNFLLESNLGKKKYETEFHPGTTSFGMSVFNLSNAIVGSGILGLSYAMANTGIALFIILLTFVSIFSLYSVHLLLKTANEGGSLLYEQLGYKAFGLVGKLAASGSITMQNIGAMSSYLFIVKYELPLVIQALTNIEDKTGLWYLNGNYLVLLVSLVVILPLSLFRNLGYLGYTSGLSLLCHCLTWIFYDFT

SEQ ID NO: 824398 - protein, 506 aa, Homo sapiens; identical to SEQ ID NO: 824391

SEQ ID NO: 824399 - protein, 506 aa, Homo sapiens; identical to SEQ ID NO: 824391

SEQ ID NO: 824400 - protein, 506 aa, Homo sapiens; identical to SEQ ID NO: 824391

SEQ ID NO: 824401 - protein, 506 aa, Homo sapiens; identical to SEQ ID NO: 824391

SEQ ID NO: 824402 - protein, 506 aa, Homo sapiens; identical to SEQ ID NO: 824391

SEQ ID NO: 824403 - protein, 253 aa, Homo sapiens
MKKAEMGRFSISPDEDSSSYSSNSDFNYSYPTKQAALKSHYADVDPENQNFLLESNLGKKKYETEFHPGTTSFGMSVFNLSNAIVGSGILGLSYAMANTGIALFIILLTFVSIFSLYSVHLLLKTANEGGSLLYEQLGYKAFGLVGKLAASGSITMQNIGAMSSYLFIVKYELPLVIQALTNIEDKTGLWYLNGNYLVLLVSLVVILPLSLFRNLGYLGYTSGLSLLCMVFFLIVVGMIFFLEKIFYKPCHVT

SEQ ID NO: 824404 - protein, 506 aa, Homo sapiens; identical to SEQ ID NO: 824391

SEQ ID NO: 824405 - protein, 406 aa, Homo sapiens; identical to SEQ ID NO: 824394

SEQ ID NO: 824406 - protein, 506 aa, Homo sapiens; identical to SEQ ID NO: 824391

SEQ ID NO: 824407 - protein, 444 aa, Homo sapiens
MKKAEMGRFSISPDEDSSSYSSNSDFNYSYPTKQAALKSHYADVDPENQNFLLESNLGKKKYETEFHPGTTSFGMSVFNLSNAIVGSGILGLSYAMANTGIALFIILLTFVSIFSLYSVHLLLKTANEGGSLLYEQLGYKAFGLVGKLAASGSITMQNIGAMSSYLFIVKYELPLVIQALTNIEDKTGLWYLNGNYLVLLVSLVVILPLSLFRNLGYLGYTSGLSLLCMVFFLIVVICKKFQVPCPVEAALIINETINTTLTQPTALVPALSHNVTENDSCRPHYFIFNSQTVYAVPILIFSFVCHPAVLPIYEELKDRSRRRMMNVSKISFFAMFLMYLLAALFGYLTFYEHVESELLHTYSSILGTDILLLIVRLAVLMAVTLTVPVVIFPIRSSVTHLLCASKDFSWWRHSLITVSILAFTNLLVIFVPTIRDIFGFIGKF

SEQ ID NO: 824408 - protein, 506 aa, Homo sapiens; identical to SEQ ID NO: 824391

SEQ ID NO: 824409 - protein, 506 aa, Homo sapiens; identical to SEQ ID NO: 824391

SEQ ID NO: 824410 - protein, 506 aa, Homo sapiens; identical to SEQ ID NO: 824391

SEQ ID NO: 824411 - protein, 506 aa, Homo sapiens; identical to SEQ ID NO: 824391

SEQ ID NO: 824412 - protein, 506 aa, Homo sapiens; identical to SEQ ID NO: 824391

SEQ ID NO: 824413 - protein, 506 aa, Homo sapiens; identical to SEQ ID NO: 824391

SEQ ID NO: 824414 - protein, 444 aa, Homo sapiens; identical to SEQ ID NO: 824407

SEQ ID NO: 824415 - protein, 80 aa, Homo sapiens
SDIRNGIKFIREVTPYIKKPSLVSDLPWEGAAPQSPSFSGSEDSGSPKHQNSTKDRKIIPLKMCFAARNLSMPDLENRQN

SEQ ID NO: 824416 - protein, 525 aa, Homo sapiens [sequence omitted]

SEQ ID NO: 824417 - protein, 525 aa, Homo sapiens [sequence omitted]

SEQ ID NO: 824418 - protein, 1029 aa, Homo sapiens
MLSEERSRESSCLLDGSRVPRKNVSAVEGGGGCHFRWGRHRGRKEEKNTPVCKMSYLVSVRPDRWGGPMSRESSEVNIVTPLSSFTHKSVLLPHYSETNKYAEVGERCLFFPQLHIIVKVPKMNYLNCLKLEIKIKTRICLSRAFYVLKVHKPKIGSISDKFSFLFFFETESRSVSQAGVQWHDLGSLQPPPPEVQVILLSSWGYSYPPPHPANFCIFSRGRFSPCWLAGLELPTSSDPPALASQSAGIIGVSPRAWPTINFHFREGKKSLERPEMISGIRISICNDPQVGNLEPSMQGEHYYYEMLNDAFTDFSSKAIWLRFSVLMWKAKPLRFAGELLSHPACWLYEDVKEVELKCEQERQGMCAFSLILVKVKLTCIALRSVGFLISFESCCEMKVWEVSFVHEQPQEPEPFCCFSYIPNSSPVMMTKVVLQSNVLWDFQSANEVLSNEWDTMINMYLYLDAKVMANYFQMITTNGNFRYSTFFIEPAHFSFLFHFELRKLLRMWWVPVCGMERKLQNSVCSPFRGTASCAPQTRGFTASPHSTQMPRSSELVYEKSPTFSPKTSLLSLHKKKRKGTKEKHSVFLFLKKVSPFLKSSNEDIIWKLVSNVVYEEILKYKFLQYLLDSCNCKLTSLVDKSFRLNTGTYIGSQKYYFKCHSPILKPCFSTFQAKEGLIVPVFMFCTLTNFVTQNYCMAGEIGLFISYIFISKKIFLNNKYLTLLLIVFLIYPPKLNGNKAFPAEGMHLADKPELFFFFLLFFWRQVLTLSPRLECSGMIIADCSLNLLGSNDPFTSASWVAGTTGVCHHTWLIFMDFFSFFFFAMLPRLVLNSWHSSSPSASASQSAGITDVSHCTWPQKLCLKKKLSCVESGQGYVSPRNRFCCKWFLMGESVRKGYNRFFVFNFVRNSRSSCLTYMHVDIFVFKAMEESLFIYFNANYLVCCYANSIKRPTCLRIKQFLKLSGKTCRLKHFLCFFVSYLGHLCWIMFLLFSLVISYSLYIIFKLSKYPAYISMWLPSAVDAMNEMAG

SEQ ID NO: 824419 - protein, 1376 aa, Homo sapiens
MKPAIPHKRHVELFWAAQKQQDAASWLWPGPLWQQWHGQATANSRLTIGFTAHPTVSRVMRPWNSYLLLVKIARYHSGHSSSKNADFVVLENELSLFFLILKVVYICKHLKWLISYKMSKLAQSLDLKEEVILTWMFFMLSEERSRESSCLLDGSRVPRKNVSAVEGGGGCHFRWGRHRGRKEEKNTPVCKMSYLVSVRPDRWGGPMSRESSKVNIVTPLSSFTHKSVLLPHYSETNKYAEVGERCLFFPQLHIIVKVPKMNYLNCLKLEIKIKTRICLSRAFYVLKVHKPKIGSISDKFSFLFFFETESRSVSQAGVQWHDLGSLQPPPPEVQVILLSSWGYSYPPPHPANFCIFSRGRFSPCWLAGLELPTSSDPPALASQSAGIIGVSPRAWPTINFHFREGKKSLERPEMISGIRISICNTLRKAILNPLCSESIIEYEMLNDAFTDFSSKAIWLRFSVLMWKAKPLRFAGELLSHPACWLYEDVKEVELKCEQERQGMCAFSLILVKVKLTCIALRSVGFLISFESCCEMKVWEVSFVHEQPQEPEPFCCFSYIPNSSPVMMTKVVLQSNVLWDFQSANEVLSNEWDTMINMYLYLDAKVMANYFQMITTNGNFRYSTFFIEPAHFSFLFHFELRKLLRMWWVPVCGMERKLQNSVCSPFRGTASCAPQTRGFDASPHSTQMPRSSELVYEKSPTFSPKTSLLSLHKKKRKGTKEKHSVFLFLKKVSPFLKSSNEDIIWKLVSNVVYEEILKYKFLQYLLDSCNCKLTSLVDKSFRLNTGTYIGSQKYYFKCHSPILKPCFSTFQAKEGLIVPVFMFCTLTNFVTQNYCMAGEIGLFISYIFISKKIFLNNKYLTLLLIVFLIYPPKLNGNKAFPAEGMHLADKPEFVLFFPSFFLETGSHSVTEVGVQWYDHELTAASTFWAQMILSPQPPESAGTTGVCHHTWLIFMDFFFFFFFRHVAQAGLELLALKQSFCLSLPKCWDYRCEPLHLAPEIMLKKKIKLLWNLDKAMFLLETGFAVNGFDGRKCEKKVIIDSFFNFVRNSRSSCLTYMHVDIFVFKAMEESLFIYFNANYLVCCYANSIKRPTCLRIKHFGNFQGRPVDSSTFSAFLYLILDTYAEFMFLLFSLVISYSLYIIFKLSKYPAYISMWLPSAVDAMNEMAGEKAKGLLFSIPNEEVKCQISLVSKQIALIRSNIYVMKRDLLKFGILLKLYVEFDCSHSFFLYISVRYDIELPGGIILYFEFGHHFQLNFCCYCGFFFFLTPLKMEVEQSAISCCSFSVPPNCLVIKNYSDFPHTVFKNQIVAICPPPPFKLNLSLCWIHRHSINVDDSSKIIMLYIRVLYFGAISLFLCCDVKWNLFYTSNRLLKWLI

SEQ ID NO: 824420 - protein, 525 aa, Homo sapiens [sequence omitted]

SEQ ID NO: 824421 - protein, 252 aa, Homo sapiens
MAVWTRATKAGLVELLLRERWVRVVAELSGESLSLTGDAAAAELEPALGPAAAAFNGLPNGGGAGDSLPGSPSRGLGPPSPPAPPRGPAGEAGASPPVRRVRVVKQEAGGLGISIKGGRENRMPILISKIFPGLAADQSRALRLGDAILSVNGTDLRQATHDQAVQALKRAGKEVLLEVKFIREVTPYIKKPSLVSDLPWEGAAPQSPSFSGSEDSGSPKHQNSTKDRKIIPLKMCFAARNLSMPDLENRQN

SEQ ID NO: 824422 - protein, 246 aa, Homo sapiens [sequence omitted]

SEQ ID NO: 824423 - protein, 1292 aa, Homo sapiens
MADFVVLENELSLFFLILKVVYICKHLKWLISYKMSKLAQSLDLKELGNIDLDVLYALLKKGLGKVLVCLIDQECQRKNVSAVEGGGGCHFRWGRHRGRKEEKNTPVCKMSYLVSVRPDRWGGPMSRESSEVNIVTPLSSFTHKSVLLPHYSETNKYAEVGERCLFFPQLHIIVKVPKMNYLNCLKLEIKIYTRICLSRAFYVLKVHKPKIGSISDKFSFLFFFETESRSVSQAGVQWHDLGSLQPPPPEVQVILLSSWGYSYPPPHPANFCIFSRGRFSPCWLGWFELPTSSDPPALASQSAGIIGVSPRAWPTINFHFREGKKSLERPEMISGIRISICNTLRKAILNPLCSESIITYEMLNDAFTDFSSKAIVVEVFCVNVKSSATEICRGASEPPCLWLYEDVKEVELKCEQERQGMCAFSLILVKVKLTCIALRSVGFLISFESCCEMKVWEVSLSISSPKNQNPFAAFLTYLTALHHDDQGCSSIKCVCGIFSPQMKCSLMNGHHDKYVFIFRCQSMANYFQMITTNGNFRYSTFFIEPAHFSFLFHFELRKLLRMWWVPVCGMERKLQNSVCSPFRGTASCAPQTRGFDSFSTFHTDAWSSELVYEKSPTFSPKTSLLSLHKKKRKGTKEKHSVFLFLKKVSPFLKSSNEDIIWKLVSNVVYEEILKYKFLQYLLDSCNCKLTSLVDKSFRLNTGTYIGSQKYYFKCHSPILKPCFSTFQAKEGLIVPVFMFCTLTNFVTQNYCMAGEIGLFISYIFISKKIFLNNKYLTLLLIVFLIYPPKLNGNKAFPAEGMHLADKPELFFFFLLFFWRQVLTLSPRLECSGMIIADCSLNLLGSNDPFTSASWVAGTTGVCHHTWLIFMDFFSFFFSAMLPRLVLNSWHSSSPSASASQSAGITDVSHCTWPQKLCLKKKLSCVESGQGYVSPRNRFCCKWFLMGESVRKGYNRFFFYNFVRNSRSSCLTYMHVDIFVFKAMEESLFIYFNANYLVCCYANSIKRPTCLRIKHFGNFQGRPVDSSTFSAFLYLILDTYAEFMFLLFSLVISYSLYIIFKLSKYPAYISMWLPSAVDAMNEMAGEKAKGLLFSIPNEEVKCQISLVSKQIALIRSNIYVMKRDLLKFGILLKLYVEFDCSHSFFLYISVRYDIELPGGIILYFEFGHHFQLNFCCYCGFFFFLTPLKMEVEQSAISCCSFSVPPNCLVIYNYSDFPHTVFKNQIVAICPPPPFKLNLSLCWIHRHSKMCDDSSKIIMLYIRVLYFGAISLFLCCDVKWNLFYTSNRLLKWLI

SEQ ID NO: 824424 - protein, 1024 aa, Homo sapiens
MPRKNVSAVEGGGGCHFRWGRHRGRKEEKNTPVCKMSYLVSVRPDRWGGPMSRESSEVNIVTPLSSFTHKSVLLPHYSETNTYAEVGERCLFFPQLHIIVKVPKMNYLNCLKLEIKIYDKNMSFKSFLCFEEFINLRLAPSEINFLFFFFLRRSLVLSPRLECSGMISAHCNLHLLGSSDSPEYAGVIATHHHTQLIFVFLVEAGFHHVGKAGLELPTSSDPPALASQSAGIIGVSPRAWPTINFHFREGKKSLERPEMISGIRISICNTLRKAILNPLCSESIIEYEMLNDAFTDFSSKAIWLRFSVLMWKAKPLRFAGELLSHPACWLYEDVKYVELKCEQERQGMCAFSLILVKVKLTCIALRSVGFLISFESCCEMKVWEVSLSISSPKNQNPFAAFLTYLTALHHDDQGCSSIKCVCGIFSPQMKCSLMNGHHDKYVFIFRCQSMANYFQMITTNGNFRYSTFFIEPAHFSFLFHFELRKLLRMWWVPVCGMERKLQNSVCSPFRGTASCAPQTRGFTASPHSTQMPRSSELVYEKSPTFSPKTSLLSLHKKKRKGTKEKHSVFLFLKKVSPFLKSSNEDIIWKLVSNVVYEEILKYKFLQYLLDSCNCKLTSLVDKSFRLNTGTYIGSQKYYFKCHSPILKPCFSTFQAKEGLIVPVFMFCTLTNFVTQNYCMAGEIGLFISYIFISKKIFLNNKYLTLLLIVFLIYPPKLNGNKAFPAEGMHLADKPELFFFFLLFFWRQVLTLSPRLECSGMIIADCSLNLLGSNDPFTSASWVAGTTGVCHHTWLIFMDFFFFFFFRHVAQAGLELLALKQSFCLSLPKCWDYRCEPLHLAPEIMLKKKIKLLWNLDKAMFLLETGFAVNGFDGRKCEKKVIIDSFFNFVRNSRSSCLTYMHVDIFVFKAMEESLFIYFNANYLVCCYANSIKRPTCLRIKHFGNFQGRPVDSSTFSAFLYLILDTYAEFMFLLFSLVISYSLYIIFKLSKYPAYISMWLPSAVDAMNEMAGEKAKGLLFSIPNE

SEQ ID NO: 824425 - protein, 1317 aa, Homo sapiens
MRPWNSYLLLVKIARYHSGHSSSKNADFVVLENELSLFFLILKVVYICKHLKWYNIIENVKISTVPGSQRIGNIDLDVLYALLKKGLGKVLVCLIDQECQRKNVSAVEGGGGCHFRWGRHRGRKEEKNTPVCKMSYLVSVRPDRWGGPMSRESSEVNIVTPLSSFTHKSVLLPHYSETNKYAEVGERCLFFPQLHIIVKVPKMNYLNCLKLEIKIKTRICLSRAFYVLKVHKPKIGSISDKFSFLFFFETESRSVSQAGVQWHDLGSLQPPPPEVQVILLSSWGYSYPPPHPANFCIFSRGRFSPCWLAGLELPTSSDPPALASQSAGIIGVSPRAWPTINFHFREGKKSLERPEMISGIRISICNTLRKAILNPLCSESIIEYEMLNDAFTDFSSKAIWLRFSVLMWKAKPLRFAGELLSHPACWLYEDVKEVELKCEQERQGMCAFSLILVKVKLTCIALRSVGFLISFESCCEMKVWEVSFVHEQPQEPEPFCCFSYIPNSSPVMMTKVVLQSNVLWDFQSANEVLSNEWDTMINMYLYLDAKSMANYFQMITTNGNFRYSTFFIEPAHFSFLFHFELRKLLRMWWVPVCGMERKLQNSVCSPFRGTASCAPQTRGFDASPHSTQMPRSSELVYEKSPTFSPKTSLLSLHKKKRKGTKEKHSVFLFLKKVSPFLKSSNEDIIWKLVSNVVYEEILKYKFLQYLLDSCNCKLTSLVDKSFRLNTGTYIGSQKYYFKCHSPILKPCFSTFQAKEGLIVPVFMFCTLTNFVTQNYCMAGEIGLFISYIFISKKIFLNNKYLTLLLIVFLIYPPKLNGNKAFPAEGMHLADKPELFFFFLLFFWRQVLTLSPRLECSGMIIADCSLNLLGSNDPFTSASWVAGTTGVCHHTWLIFMDFFFFFFFRHVAQAGLELLALKQSFCLSLPKCWDYRCEPLHLAPEIMLKKKIKLLWNLDKAMFLLETGFAVNGFDGRKCEKKVIIDSFFNFVRNSRSSCLTYMHVDIFVFKAMEESLFIYFNANYLVCCYANSIKRPTCLRIKHFSNFQGRPVDSSTFSAFLYLILDTYAELCSYYFQLVISYSLYIIFKLSKYPAYISMWLPSAVDAMNEMAGEKAKGLLFSIPNEEVKCQISLVSKQIALIRSNIYVMKRDLLKFGILLKLYVEFDCSHSFFLYISVRYDIELPGGIILYFEFGHHFQLNFCCYCGFFFFLTPLKMEVEQSAISCCSFSVPPNCLVIKNYSDFPHTVFKNQIVAICPPPPFKLNLSLCWIHRHSINVDDSSKIIMLYIRVLYFGAISLFLCCDVKWNLFYTSNRLLKWLI

SEQ ID NO: 824426 - protein, 1138 aa, Homo sapiens
MAEVGERCLFFPQLHIIVKVPKMNYLNCLKLEIKIKTRICLSRAFYVLKVHKPKIGSISDKFSFLFFFETESRSVSQAGVQWHDLGSLQPPPPEVQVILLSSWGYSYPPPHPANFCIFSRGRFSPCWLAGLELPTSSDPPALASQSAGIIGVSPRAWPTINFHFREGKKSLERPEMISGIRISICNTLRKAILNPLCSESIIEYEMLNDAFTDFSSKAIWLRFSVLMWKAKPLRFAGELLSHPACWLYEDVKEVELKCEQERQGMCAFSLILVKVKLTCIALRSVGFLISFESCCEMKVWEVSFVHEQPQEPEPFCCFSYIPNSSPVMMTKVVLQSNVLWDFQSANEVLSNEWDTMINMYLYLDAKVMANYFQMITTNGNFRYSTFFIEPAHFSFLFHFELRKLLRMWWVPVCGMERKLQNSVCSPFRGTASCAPQTRGFDASPHSTQMPRSSELVYEKSPTFSPKTSLLSLHKKKRKGTKEKHSVFLFLKKVSPFLKSSNEDIIWKLVSNVVYEEILKYKFLQYLLDSCNCKLTSLVDKSFRLNTGTYIGSQKYYFKCHSPILKPCFSTFQAKEGLIVPVFMFCTLTNFVTQNYCMAGEIGLFISYIFISKKIFLNNKYLTLLLIVFLIYPPKLNGNKAFPAEGMHLADKPEFVLFFPSFFLETGSHSVTEVGVQWYDHELTAASTFWAQMILSPQPPESAGTTGVCHHTWLIFMDFFFFFFFRHVAQAGLELLALKQSFCLSLPKCWDYRCEPLHLAPEIMLKKKIKLLWNLDKAMFLLETGFAVNGFDGRKCEKKVIIDSFFNFVRNSRSSCLTYMHVDIFVFKAMEESLFIYFNANYLVCCYANSIKRPTCLRIKHFGNFQGRPVDSSTFSAFLYLILDTYAEFMFLLFSLVISYSLYIIFKLSKYPAYISMWLPSAVDAMNEMAGEKAKGLLFSIPNEEVKCQISLVSKQIALIRSNIYVMKRDLLKFGILLKLYVEFDCSHSFFLYISVRYDIELPGGIILYFEFGHHFQLNFCCYCGFFFFLTPLKMEVEQSAISCCSFSVPPNCLVIKNYSDFPHTVFKNQIVAICPPPPFKLNLSLCWIHRHSINVDDSSKIIMLYIRVLYFGAISLFLCCDVKWNLFYTSNRLLKWLI

SEQ ID NO: 824427 - protein, 985 aa, Homo sapiens
MLARLVLNSRPQVIHLPWLPKCWDYRCEPPCLAHNKFHFREGKKSLERPEMISGIRISICNTLRYAILNPLCSESIIEYEMLNDAFTDFSSKAIVVEVFCVNVKSKPLRFAGELLSHPACWLYEDVKEVELKCEQERQGMCAFSLILVKVKLTCIALRSVGFLISFESCCEMKVWEVSFVHEQPQEPEPFCCFSYIPNSSPVMMTKVVLQSNVLWDFQSANEVLSNEWDTMINMYLYLDAKVMANYFQMITTNGNFRYSTFFIEPAHFSFLFHFELRKLLRMWWVPVCGMERKLQNSVCSPFRGTASCAPQTRGFDSFSTFHTDAWSSELVYEKSPTFSPKTSLLSLHKKKRKGTKEKHSVFLFLKKVSPFLKSSNEDIIWKLVSNVVYEEILKYKFLQYLLDSCNCKLTSLVDKSFRLNTGTYIGSQKYYFKCHSPILKPCFSTFQAKEGLIVPVFMFCTLTNFVTQNYCMAGEIGLFISYIFISKKIFLNNKYLTLLLIVFLIYPPKLNGNKAFPAEGMHLADKPELFFFFLLFFWRQVLTLSPRLECSGMIIADCSLNLLGSNDPFTSASWVAGTTGVCHHTWLIFMDFFSFFFSAMLPRLVLNSWHSSSPSASASQSAGITDVSHCTWPQKLCLKKKLSCVESGQGYVSPRNRFCCKWFLMGESVRKGYNRFFVFNFVRNSRSSCLTYMHVDIFVFKAMEESLFIYFNANYLVCCYANSIKRPTCLRIKHFGNFQGRPVDSSTFSAFLYLILDTYAEFMFLLFSLVISYSLYIIFKLSKYPAYISMWLPSAVDAMNEMAGYKAKGLLFSIPNEEVKCQISLVSKQIALIRSNIYVMKRDLLKFGILLKLYVEFDCSHSFFLYISVRYDIELPGGIILYFEFGHHFQLNFCCYCGFFFFLTPLKMEVEQSAISCCSFSVPPNCLVIYNYSDFPHTVFKNQIVAICPPPPFKLNLSLCWIHRHSKMCDDSSKIIMLYIRVLYF

SEQ ID NO: 824428 - protein, 709 aa, Homo sapiens
MGPRIGPAGEVPQVPDKETKATMGTENTPGGKASPDPQDVRPSVFHNIKLFVLCHSLLQLAQLMISGYLKSSISTVEKRFGLSSQTSGLLASFNEVGNTALIVFVSYFGSRVHRPRMIGYGAILVALAGLLMTLPHFISEPYRYDNTSPEDMPQDFKASLCLPTTSAPASAPSNGNCSSYTETQHLSVVGIMFVAQTLLGVGGVPIQPFGISYIDDFAHNSNSPLYLGILFAVTMMGPGLAFGLGSLMLRLYVDINQMPEGGISLTIKDPRWVGAWWLGFLIAAGAVALAAIPYFFFPKEMPKEKRELQFRRKVLAVTDSPARKGKDSPSKQSPGESTKKQDGLVQIAPNLTVIQFIKVFPRVLLQTLRHPIFLLVVLSQVCLSSMAAGMATFLPKFLERQFSITASYANLLIGCLSFPSVIVGIVVGGVLVKRLHLGPVGCGALCLLGMLLCLFFSLPLFFIGCSSHQIAGITHQTSAHPGLELSPSCMEACSCPLDGFNPVCDPSTRVEYITPCHAGCSSWVVQDALDNSQVFYTNCSCVVEGNPVLAGSCDSTCSHLVVPFLLLVSLGSALACLTHTPSFMLILRGVKKEDKTLAVGIQFMFLRILAWMPSPVIHGSAIDTTCVHWALSCGRRAVCRYYNNDLLRNRFIGLQFFFKTGSVICFALVLAVLRQQDKEARTKESRSSPAVEQQLLVSGPGKKPEDSRV

SEQ ID NO: 824429 - protein, 482 aa, Homo sapiens
MIGYGAILVALAGLLMTLPHFISEPYRYDNTSPGGISLTIKDPRWVGAWWLGFLIAAGAVALAAIPYFFFPKEMPKEKRELQFRRKVLAVTDSPARKGKDSPSKQSPGESTKKQDGLVQIAPNLTVIQFIKVFPRVLLQTLRHPIFLLVVLSQVCLSSMAAGMATFLPKFLERQFSITASYANLLIGCLSFPSVIVGIVVGGVLVKRLHLGPVGCGALCLLGMLLCLFFSLPLFFIGCSSHQIAGITHQTSAHPGLELSPSCMEACSCPLDGFNPVCDPSTRVEYITPCHAGCSSWVVQDALDNSQVFYTNCSCVVEGNPVLAGSCDSTCSHLVVPFLLLVSLGSALACLTHTPSFMLILRGVKKEDKTLAVGIQFMFLRILAWMPSPVIHGSAIDTTCVHWALSCGRRAVCRYYNNDLLRNRFIGLQFFFKTGSVICFALVLAVLRQQDKEARTKESRSSPAVEQQLLVSGPGKKPEDSRV

SEQ ID NO: 824430 - protein, 709 aa, Homo sapiens; identical to SEQ ID NO: 824428

SEQ ID NO: 824431 - protein, 709 aa, Homo sapiens; identical to SEQ ID NO: 824428

SEQ ID NO: 824432 - protein, 709 aa, Homo sapiens; identical to SEQ ID NO: 824428

SEQ ID NO: 824433 - protein, 709 aa, Homo sapiens; identical to SEQ ID NO: 824428

SEQ ID NO: 824434 - protein, 233 aa, Homo sapiens
MGPRIGPAGEVPQVPDKETKATMGTENTPGGKASPDPQDVRPSVFHNIKLFVLCHSLLQLAQLMISGYLKSSISTVEKRFGLSSQTSGLLASFNEVGNTALIVFVSYFGSRVHRPRMIGYGAILVALAGLLMTLPHFISEPYRYDNTSPEDMPQDFKASLCLPTTSAPASAPSNGNCSSYTETQHLSVVGIMFVAQTLLGVGGVPIQHLGQRPTHYRTRSQRKPSSPPPLASG

SEQ ID NO: 824435 - protein, 687 aa, Homo sapiens
MGTENTPGGKASPDPQDVRPSVFHNIKLFVLCHSLLQLAQLMISGYLKSSISTVEKRFGLSSQTSGLLASFNEVGNTALIVFVSYFGSRVHRPRMIGYGAILVALAGLLMTLPHFISEPYRYDNTSPEDMPQDFKASLCLPTTSAPASAPSNGNCSSYTETQHLSVVGIMFVAQTLLGVGGVPIQPFGISYIDDFAHNSNSPLYLGILFAVTMMGPGLAFGLGSLMLRLYVDINQMPEGGISLTIKDPRWVGAWWLGFLIAAGAVALAAIPYFFFPKEMPKEKRELQFRRKVLAVTDSPARKGKDSPSKQSPGESTKKQDGLVQIAPNLTVIQFIKVFPRVLLQTLRHPIFLLVVLSQVCLSSMAAGMATFLPKFLERQFSITASYANLLIGCLSFPSVIVGIVVGGVLVKRLHLGPVGCGALCLLGMLLCLFFSLPLFFIGCSSHQIAGITHQTSAHPGLELSPSCMEACSCPLDGFNPVCDPSTRVEYITPCHAGCSSWVVQDALDNSQVFYTNCSCVVEGNPVLAGSCDSTCSHLVVPFLLLVSLGSALACLTHTPSFMLILRGVKKEDKTLAVGIQFMFLRILAWMPSPVIHGSAIDTTCVHWALSCGRRAVCRYYNNDLLRNRFIGLQFFFKTGSVICFALVLAVLRQQDKEARTKESRSSPAVEQQLLVSGPGKKPEDSRV

SEQ ID NO: 824436 - protein, 709 aa, Homo sapiens; identical to SEQ ID NO: 824428

SEQ ID NO: 824437 - protein, 406 aa, Homo sapiens
CAISSSLECLRPSRLPSPSFLNTGLGPTALGVLGGAGAGLMSNPSPQVPEEEASTSVCRPKSSMASTSRRQRRERRFRRYLSAGRLVRAQALLQRHPGLDVDAGQPPPLHRACARHDAPALCLLLRLGADPAHQDRHGDTALHAAARQGPDAYTDFFLPLLSRCPSAMGIKNKDGETPGQILGWGPPWDSAEEEEEDDASKEREWRQKLQGDASHETQEPESFSAWSDRLAREHAQKCQQQQREAEGSCRPPRAEGSSQSWRQQEEEQRLFRERARAKEEELRESRARRAQEALGDREPKPTRAGPREEHPRGAGRGSLWRFGDVPWPCPGGGDPEAMAAALVARGPPLEEQGALRRYLRVQQVRWHPDRFLQRFRSQIETWELGRVMGAVTALSQALNRHAEALK

SEQ ID NO: 824438 - protein, 450 aa, Homo sapiens
CAISSSLECLRPSRLPSPSFLNTGLGPTALGVLGGAGAGLMSNPSPQVPEEEASTSVCRPKSSMASTSRRQRRERRFRRYLSAGRLVRAQALLQRHPGLDVDAGQPPPLHRACARHDAPALCLLLRLGADPAHQDRHGDTALHAAARQGPDGQQSFGKSLLCRRPELLPVHLPTPLPSSPAYTDFFLPLLSRCPSAMGIKNKDGETPGQILGWGPPWDSAEEEEEDDASKEREWRQKLQGELEDEWQEVMGRFEGDASHETQEPESFSAWSDRLAREHAQKCQQQQREAEGSCRPPRAEGSSQSWRQQEEEQRLFRERARAKEEELRESRARRAQEALGDREPKPTRAGPREEHPRGAGRGSLWRFGDVPWPCPGGGDPEAMAAALVARGPPLEEQGALRRYLRVQQVRWHPDRFLQRFRSQIETWELGRVMGAVTALSQALNRHAEALK

SEQ ID NO: 824439 - protein, 49 aa, Homo sapiens
MPPMKPRNLSPSQPGQIAWPGNMPRSASSSSEKQRDPVDPHVLRAPARA

SEQ ID NO: 824440 - protein, 421 aa, Homo sapiens
CAISSSLECLRPSRLPSPSFLNTGLGPTALGVLGGAGAGLMSNPSPQVPEEEASTSVCRPKSSMASTSRRQRRERRFRRYLSAGRLVRAQALLQRHPGLDVDAGQPPPLHRACARHDAPALCLLLRLGADPAHQDRHGDTALHAAARQGPDAYTDFFLPLLSRCPSAMGIKNKDGETPGQILGWGPPWDSAEEEEEDDASKEREWRQKLQGELEDEWQEVMGRFEGDASHETQEPESFSAWSDRLAREHAQKCQQQQREAEGSCRPPRAEGSSQSWRQQEEEQRLFRERARAKEEELRESRARRAQEALGDREPKPTRAGPREEHPRGAGRGSLWRFGDVPWPCPGGGDPEAMAAALVARGPPLEEQGALRRYLRVQQVRWHPDRFLQRFRSQIETWELGRVMGAVTALSQALNRHAEALK

SEQ ID NO: 824441 - protein, 169 aa, Homo sapiens
CAISSSLECLRPSRLPSPSFLNTGLGPTALGVLGGAGAGLMSNPSPQVPEEEASTSVCRPKSSMASTSRRQRRERRFRRYLSAGRLVRAQALLQRHPGLDVDAGQPPPLHRACARHDAPALCLLLRLGADPAHQDRHGDTALHAAARQGPDAYTDFFLPLLSRCPSAME

SEQ ID NO: 824442 - protein, 903 aa, Homo sapiens
MEGYSEEASLLRHLEKVASEEEEVPLVVYLKENAALLTANGLHLSQNREAQQSSPAPPPAEVHSPAADVNQNLASPSATLTTPTSNSSHNPPATDVNQNPPATVVPQSLPLSSIQQNSSEAQLPSNGTGPASKPSTLCADGQPQAPAEEVRCSTLLIDKVSTPATTTSTFSREATLIPSSRPPASDFMSSSLLIDIQPNTLVVSADQEMSGRAAATTPTKVYSEVHFTLAKPPSVVNRTARPFGIQAPGGTSQMERSPMLERRHFGEKAPAPQPPSLPDRSPRPQRHIMSRSPMVERRMMGQRSPASERRPLGNFTAPPTYTETLSTAPLASWVRSPPSYSVLYPSSDPKSSHLKGQAVPASKTGILEESMARRGSRKSMFTFVEKPKVTPNPDLLDLVQTADEKRRQRDQGEVGVEEEPFALGAEASNFQQEPAPRDRASPAAAEEVVPEWASCLKSPRIQAKPKPKPNQNLSEASGKGAELYARRQSRMEKYVIESSSHTPELARCPSPTMSLPSSWKYPTNAPGAFRVASRSPARTPPASLYHGYLPENGVLRPEPTKQPPYQLRPSLFVLSPIKEPAKVSPRAASPAKPSSLDLVPNLPKGALPPSPALPRPSRSSPGLYTSPGQDSLQPTAVSPPYGGDISPVSPSRAWSPRAKQAPRPSFSTRNAGIEAQDRRESLPTSPPWTPGASRPPSSLDGWVSPGPWEPGRGSSMSSPPPLPPPPPMSPSWSERSVSPLRPETEARPPSRQLQALLARNIINAARRKSASPRSAGAENPRPFSPPRAPPPPPPPPPPPPRMRSPQPARPGSAAVPGAAFAPIPRSPLPAGPSSCTSPRSPLPAPPRPFLYRRSPTDSDVSLDSEDSGAKSPGILGYNICPRGWNGSLRLKRGSLPAEASCTT

SEQ ID NO: 824443 - protein, 681 aa, Homo sapiens
GGKNDYHNLMSRTHPSGERGFGIQAPGGTSQMERSPMLERRHFGEKAPAPQPPSLPDRSPRPQRHIMSRSPMVERRMMGQRSPASERRPLGNFTAPPTYTETLSTAPLASWVRSPPSYSVLYPSSDPKSSHLKGQAVPASKTGILEESMARRGSRKSMFTFVEKPKVTPNPDLLDLVQTADEKRRQRDQGEVGVEEEPFALGAEASNFQQEPAPRDRASPAAAEEVVPEWASCLKSPRIQAKPKPKPNQNLSEASGKGAELYARRQSRMEKYVIESSSHTPELARCPSPTMSLPSSWKYPTNAPGAFRVASRSPARTPPASLYHGYLPENGVLRPEPTKQPPYQLRPSLFVLSPIKEPAKVSPRAASPAKPSSLDLVPNLPKGALPPSPALPRPSRSSPGLYTSPGQDSLQPTAVSPPYGGDISPVSPSRAWSPRAKQAPRPSFSTRNAGIEAQDRRESLPTSPPWTPGASRPPSSLDGWVSPGPWEPGRGSSMSSPPPLPPPPPMSPSWSERSVSPLRPETEARPPSRQLQALLARNIINAARRKSASPRSAGAENPRPFSPPRAPPPPPPPPPPPPRMRSPQPARPGSAAVPGAAFAPIPRSPLPAGPSSCTSPRSPLPAPPRPFLYRRSPTDSDVSLDSEDSGAKSPGILGYNICPRGWNGSLRLKRGSLPAEASCTT

SEQ ID NO: 824444 - protein, 685 aa, Homo sapiens
MEGYSEEASLLRHLEKVASEEEEVPLVVYLKENAALLTANGLHLSQNREAQQSSPAPPPAEVHSPAADVNQNLASPSATLTTPTSNSSHNPPATDVNQNPPATVVPQSLPLSSIQQNSSEAQLPSNGTGPASKPSTLCADGQPQAPAEEVRCSTLLIDKVSTPATTTSTFSREATLIPSSRPPASDFMSSSLLIDIQPNTLVVSADQEMSGRAAATTPTKVYSEVHFTLAKPPSVVNRTARPFGIQAPGGTSQMERSPMLERRHFGEKAPAPQPPSLPDRSPRPQRHIMSRSPMVERRMMGQRSPASERRPLGNFTAPPTYTETLSTAPLASWVRSPPSYSVLYPSSDPKSSHLKGQAVPASKTGILEESMARRGSRKSMFTFVEKPKVTPNPDLLDLVQTADEKRRQRDQGEVGVEEEPFALGAEASNFQQEPAPRDRASPAAAEEVVPEWASCLKSPRIQAKPKPKPNQNLSEASGKGAELYARRQSRMEKYVIESSSHTPELARCPSPTMSLPSSWKYPTNAPGAFRVASRSPARTPPASLYHGYLPENGVLRPEPTKQPPYQLRPSLFVLSPIKEPAKVSPRAASPAKPSSLDLVPNLPKGALPPSPALPRPSRSSPGLYTSPGQDSLQPTAVSPPYGGDISPVSPSRAWSPRAKQAPRPSFSTRNAGIEAQVWKPSFCFK

SEQ ID NO: 824445 - protein, 903 aa, Homo sapiens; identical to SEQ ID NO: 824442

SEQ ID NO: 824446 - protein, 503 aa, Homo sapiens
MEGYSEEASLLRHLEKVASEEEEVPLVVYLKENAALLTANGLHLSQNREAQQSSPAPPPAEVHSPAADVNQNLASPSATLTTPTSNSSHNPPATDVNQNPPATVVPQSLPLSSIQQNSSEAQLPSNGTGPASKPSTLCADGQPQAPAEEVRCSTLLIDKVSTPATTTSTFSREATLIPSSRPPASDFMSSSLLIDIQPNTLVVSADQEMSGRAAATTPTKVYSEVHFTLAKPPSVVNRTARPFGIQAPGGTSQMERSPMLERRHFGEKAPAPQPPSLPDRSPRPQRHIMSRSPMVERRMMGQRSPASERRPLGNFTAPPTYTETLSTAPLASWVRSPPSYSVLYPSSDPKSSHLKGQAVPASKTGILEESMARRGSRKSMFTFVEKPKVTPNPDLLDLVQTADEKRRQRDQGEVGVEEEPFALGAEASNFQQEPAPRDRASPAAAEEVVPEWASCLKSPRIQAKPKPKPNQNLSEASGKGAELCPQLCFLSCSQYTLPQIRLA

SEQ ID NO: 824447 - protein, 903 aa, Homo sapiens; identical to SEQ ID NO: 824442

SEQ ID NO: 824448 - protein, 903 aa, Homo sapiens; identical to SEQ ID NO: 824442

SEQ ID NO: 824449 - protein, 1022 aa, Homo sapiens
TGLMSVPGALGRSTSLTEKDLKEAKARSQQIAAQLTTPPSSNSRGVQLFNRRRQRVNEFTLESHGQRGQKPSQESLRVLPSSLPGHAPGLSLSSTSLPEPGPPRHPSPQSPDRGVPGHSMEGYSEEASLLRHLEKVASEEEEVPLVVYLKENAALLTANGLHLSQNREAQQSSPAPPPAEVHSPAADVNQNLASPSATLTTPTSNSSHNPPATDVNQNPPATVVPQSLPLSSIQQNSSEAQLPSNGTGPASKPSTLCADGQPQAPAEEVRCSTLLIDKVSTPATTTSTFSREATLIPSSRPPASDFMSSSLLIDIQPNTLVVSADQEMSGRAAATTPTKVYSEVHFTLAKPPSVVNRTARPFGIQAPGGTSQMERSPMLERRHFGEKAPAPQPPSLPDRSPRPQRHIMSRSPMVERRMMGQRSPASERRPLGNFTAPPTYTETLSTAPLASWVRSPPSYSVLYPSSDPKSSHLKGQAVPASKTGILEESMARRGSRKSMFTFVEKPKVTPNPDLLDLVQTADEKRRQRDQGEVGVEEEPFALGAEASNFQQEPAPRDRASPAAAEEVVPEWASCLKSPRIQAKPKPKPNQNLSEASGKGAELYARRQSRMEKYVIESSSHTPELARCPSPTMSLPSSWKYPTNAPGAFRVASRSPARTPPASLYHGYLPENGVLRPEPTKQPPYQLRPSLFVLSPIKEPAKVSPRAASPAKPSSLDLVPNLPKGALPPSPALPRPSRSSPGLYTSPGQDSLQPTAVSPPYGGDISPVSPSRAWSPRAKQAPRPSFSTRNAGIEAQDRRESLPTSPPWTPGASRPPSSLDGWVSPGPWEPGRGSSMSSPPPLPPPPPMSPSWSERSVSPLRPETEARPPSRQLQALLARNIINAARRKSASPRSAGAENPRPFSPPRAPPPPPPPPPPPPRMRSPQPARPGSAAVPGAAFAPIPRSPLPAGPSSCTSPRSPLPAPPRPFLYRRSPTDSDVSLDSEDSGAKSPGILGYNICPRGWNGSLRLKRGSLPAEASCTT

SEQ ID NO: 824450 - protein, 903 aa, Homo sapiens; identical to SEQ ID NO: 824442

SEQ ID NO: 824451 - protein, 437 aa, Homo sapiens
MEGYSEEASLLRHLEKVASEEEEVPLVVYLKENAALLTANGLHLSQNREAQQSSPAPPPAEVHSPAADVNQNLASPSATLTTPTSNSSHNPPATDVNQNPPATVVPQSLPLSSIQQNSSEAQLPSNGTGPASKPSTLCADGQPQAPAEEVRCSTLLIDKVSTPATTTSTFSREATLIPSSRPPASDFMSSSLLIDIQPNTLVVSADQEMSGRAAATTPTKVYSEVHFTLAKPPSVVNRTARPFGIQAPGGTSQMERSPMLERRHFGEKAPAPQPPSLPDRSPRPQRHIMSRSPMVERRMMGQRSPASERRPLGNFTAPPTYTETLSTAPLASWVRSPPSYSLPPSTMATCLRTGSCAQSPPSSRHTSCAPRSLSSHLSRSLPRSHQELPRPPSPAPWTWCPTCPRGLSLHLLPCLGPRAPHRASTPPPARTACSPLP

SEQ ID NO: 824452 - protein, 477 aa, Homo sapiens
MSSWIRWHGPAMARLWGFCWLVVGFWRAAFACPTSCKCSASRIWCSDPSPGIVAFPRLEPNSVDPENITEIFIANQKRLEIINEDDVEAYVGLRNLTIVDSGLKFVAHKAFLKNSNLQHINFTRNKLTSLSRKHFRHLDLSELILVGNPFTCSCDIMWIKTLQEAKSSPDTQDLYCLNESSKNIPLANLQIPNCGLPSANLAAPNLTVEEGKSITLSCSVAGDPVPNMYWDVGNLVSKHMNETSHTQGSLRITNISSDDSGKQISCVAENLVGEDQDSVNLTVHFAPTITFLESPTSDHHWCIPFTVKGNPKPALQWFYNGAILNESKYICTKIHVTNHTEYHGCLQLDNPTHMNNGDYTLIAKNEYGKDEKQISAHFMGWPGIDDGANPNYPDVIYEDYGTAANDIGDTTNRSNEIPSTDVTDKTGREHLSVYAVVVIASVVGFCLLVMLFLLKLARHSKFGMKGFVLFHKIPLDG

SEQ ID NO: 824453 - protein, 477 aa, Homo sapiens; identical to SEQ ID NO: 824452

SEQ ID NO: 824454 - protein, 477 aa, Homo sapiens; identical to SEQ ID NO: 824452

SEQ ID NO: 824455 - protein, 101 aa, Homo sapiens
GVMDVRCFLSMDPDSNAVTVMTLIFVKRVSRPFLHYTRHTFGRINEPRLQLVSNTSYKSRPTRKNKSQHTLEIIDSGVFSPSLPAGTDFISDPLGFLSRNR

SEQ ID NO: 824456 - protein, 537 aa, Homo sapiens
MSSWIRWHGPAMARLWGFCWLVVGFWRAAFACPTSCKCSASRIWCSDPSPGIVAFPRLEPNSVDPENITEIFIANQKRLEIINEDDVEAYVGLRNLTIVDSGLKFVAHKAFLKNSNLQHINFTRNKLTSLSRKHFRHLDLSELILVGNPFTCSCDIMWIKTLQEAKSSPDTQDLYCLNESSKNIPLANLQIPNCGLPSANLAAPNLTVEEGKSITLSCSVAGDPVPNMYWDVGNLVSKHMNETSHTQGSLRITNISSDDSGKQISCVAENLVGEDQDSVNLTVHFAPTITFLESPTSDHHWCIPFTVKGNPKPALQWFYNGAILNESKYICTKIHVTNHTEYHGCLQLDNPTHMNNGDYTLIAKNEYGKDEKQISAHFMGWPGIDDGANPNYPDVIYEDYGTAANDIGDTTNRSNEIPSTDVTDKTGREHLSVYAVVVIASVVGFCLLVMLFLLKLARHSKFGMKGPASVISNDDDSASPLHHISNGSNTPSSSEGGPDAVIIGMTKIPVIENPQYFGITNSQLKPDTWPRGSPKTA

SEQ ID NO: 824457 - protein, 477 aa, Homo sapiens; identical to SEQ ID NO: 824452

SEQ ID NO: 824458 - protein, 477 aa, Homo sapiens; identical to SEQ ID NO: 824452

SEQ ID NO: 824459 - protein, 822 aa, Homo sapiens
MSSWIRWHGPAMARLWGFCWLVVGFWRAAFACPTSCKCSASRIWCSDPSPGIVAFPRLEPNSVDPENITEIFIANQKRLEIINEDDVEAYVGLRNLTIVDSGLKFVAHKAFLKNSNLQHINFTRNKLTSLSRKHFRHLDLSELILVGNPFTCSCDIMWIKTLQEAKSSPDTQDLYCLNESSKNIPLANLQIPNCGLPSANLAAPNLTVEEGKSITLSCSVAGDPVPNMYWDVGNLVSKHMNETSHTQGSLRITNISSDDSGKQISCVAENLVGEDQDSVNLTVHFAPTITFLESPTSDHHWCIPFTVKGNPKPALQWFYNGAILNESKYICTKIHVTNHTEYHGCLQLDNPTHMNNGDYTLIAKNEYGKDEKQISAHFMGWPGIDDGANPNYPDVIYEDYGTAANDIGDTTNRSNEIPSTDVTDKTGREHLSVYAVVVIASVVGFCLLVMLFLLKLARHSKFGMKGPASVISNDDDSASPLHHISNGSNTPSSSEGGPDAVIIGMTKIPVIENPQYFGITNSQLKPDTFVQHIKRHNIVLKRELGEGAFGKVFLAECYNLCPEQDKILVAVKTLKDASDNARKDFHREAELLTNLQHEHIVKFYGVCVEGDPLIMVFEYMKHGDLNKFLRAHGPDAVLMAEGNPPTELTQSQMLHIAQQIAAGMVYLASQHFVHRDLATRNCLVGENLLVKIGDFGMSRDVYSTDYYRVGGHTMLPIRWMPPESIMYRKFTTESDVWSLGVVLWEIFTYGKQPWYQLSNNEVIECITQGRVLQRPRTCPQEVYELMLGCWQREPHMRKNIKGIHTLLQNLAKASPVYLDILG

SEQ ID NO: 824460 - protein, 472 aa, Homo sapiens
MSSWIRWHGPAMARLWGFCWLVVGFWRAAFACPTSCKCSASRIWCSDPSPGIVAFPRLEPNSVDPENITEIFIANQKRLEIINEDDVEAYVGLRNLTIVDSGLKFVAHKAFLKNSNLQHINFTRNKLTSLSRKHFRHLDLSELILVGNPFTCSCDIMWIKTLQEAKSSPDTQDLYCLNESSKNIPLANLQIPNCGLPSANLAAPNLTVEEGKSITLSCSVAGDPVPNMYWDVGNLVSKHMNETSHTQGSLRITNISSDDSGKQISCVAENLVGEDQDSVNLTVHFAPTITFLESPTSDHHWCIPFTVKGNPKPALQWFYNGAILNESKYICTKIHVTNHTEYHGCLQLDNPTHMNNGDYTLIAKNEYGKDEKQISAHFMGWPGIDDGANPNYPDVIYEDYGTAANDIGDTTNRSNEIPSTDVTDKTGREHLSVYAVVVIASVVGFCLLVMLFLLKLARHSKFGMKALLEGIL

SEQ ID NO: 824461 - protein, 315 aa, Homo sapiens
MCWAGTGLVSPERRYSNRLYKYDHNFVKAINAIQKSWTATTYMEYETLTLGDMIRRSGGHSRKIPRPKPAPLTAEIQQKILHLPTSWDWRNVHGINFVSPVRNQASCGSCYSFASMGMLEARIRILTNNSQTPILSPQEVVSCSQYAQGCEGGFPYLIAGKYAQDFGLVEEACFPYTGTDSPCKMKEDCFRYYSSEYHYVGGFYGGCNEALMKLELVHHGPMAVAFEVYDDFLHYKKGIYHHTGLRDPFNPFELTNHAVLLVGYGTDSASGMDYWIVKNSWGTGWGENGYFRIRRGTDECAIESIAVAATPIPKL

SEQ ID NO: 824462 - protein, 435 aa, Homo sapiens
MPPSFKSTAASTIDPAKTASSSADEDAVFGPQEKKVVVYLQKLDTAYDDLGNSGHFTIIYNQGFEIVLNDYKWFAFFKYKEEGSKVTTYCNETMTGWVHDVLGRNWACFTGKKVGTASENVYVNTAHLKNSQEKYSNRLYKYDHNFVKAINAIQKSWTATTYMEYETLTLGDMIRRSGGHSRKIPRPKPAPLTAEIQQKILHLPTSWDWRNVHGINFVSPVRNQASCGSCYSFASMGMLEARIRILTNNSQTPILSPQEVVSCSQYAQGCEGGFPYLIAGKYAQDFGLVEEACFPYTGTDSPCKMKEDCFRYYSSEYHYVGGFYGGCNEALMKLELVHHGPMAVAFEVYDDFLHYKKGIYHHTGLRDPFNPFELTNHAVLLVGYGTDSASGMDYWIVKNSWGTGWGENGYFRIRRGTDECAIESIAVAATPIPKL

SEQ ID NO: 824463 - protein, 535 aa, Homo sapiens
LNSWDYRQCTTITSEFLKIIFVETGSHYVAQTSLEVLTSAPQSARITGVSHCFCLHYLKFLEPNFTVLPRSRNCLRQQDGASGFFTRQTVLKLGSMKGKQQQLKLKLGDSFPYGNPNNFPLLCFFFFSLGPQEKKVVVYLQKLDTAYDDLGNSGHFTIIYNQGFEIVLNDYKWFAFFKYKEEGSKVTTYCNETMTGWVHDVLGRNWACFTGKKVGTASENVYVNTAHLKNSQEKYSNRLYKYDHNFVKAINAIQKSWTATTYMEYETLTLGDMIRRSGGHSRKIPRPKPAPLTAEIQQKILHLPTSWDWRNVHGINFVSPVRNQASCGSCYSFASMGMLEARIRILTNNSQTPILSPQEVVSCSQYAQGCEGGFPYLIAGKYAQDFGLVEEACFPYTGTDSPCKMKEDCFRYYSSEYHYVGGFYGGCNEALMKLELVHHGPMAVAFEVYDDFLHYKKGIYHHTGLRDPFNPFELTNHAVLLVGYGTDSASGMDYWIVKNSWGTGWGENGYFRIRRGTDECAIESIAVAATPIPKL

SEQ ID NO: 824464 - protein, 233 aa, Homo sapiens
GGHSRKIPRPKPAPLTAEIRNQASCGSCYSFASMGMLEARIRILTNNSQTPILSPQEVVSCSQYAQGCEGGFPYLIAGKYAQDFGLVEEACFPYTGTDSPCKMKEDCFRYYSSEYHYVGGFYGGCNEALMKLELVHHGPMAVAFEVYDDFLHYKKGIYHHTGLRDPFNPFELTNHAVLLVGYGTDSASGMDYWIVKNSWGTGWGENGYFRIRRGTDECAIESIAVAATPIPKL

SEQ ID NO: 824465 - protein, 187 aa, Homo sapiens
DPHAITSALIRLRFVAQYAQGCEGGFPYLIAGKYAQDFGLVEEACFPYTGTDSPCKMKEDCFRYYSSEYHYVGGFYGGCNEALMKLELVHHGPMAVAFEVYDDFLHYKKGIYHHTGLRDPFNPFELTNHAVLLVGYGTDSASGMDYWIVKNSWGTGWGENGYFRIRRGTDECAIESIAVAATPIPKL

SEQ ID NO: 824466 - protein, 178 aa, Homo sapiens
IPYTVVLLQLFQGARLVVDSPLARSARLPGNSSPLFSAPCSMGAGPSLLLAALLLLLSGDGAVRCDTPANCTYLDLLGTWVFQVGSSGSQRDVNCSVMGPQEKKVVVYLQKLDTAYDDLGNSGHFTIIYNQGFEIVLNDYKWFAFFKDVTDFISHLFMQLGTVGIYDLPHLRNKLVIK

SEQ ID NO: 824467 - protein, 256 aa, Homo sapiens
IPYTVVLLQLFQGARLVVDSPLARSARLPGNSSPLFSAPCSMGAGPSLLLAALLLLLSGDGAVRCDTPANCTYLDLLGTWVFQVGSSGSQRDVNCSVMGPQEKKVVVYLQKLDTAYDDLGNSGHFTIIYNQGFEIVLNDYKWFAFFKYKEEGSKVTTYCNETMTGWVHDVLGRNWACFTGKKVGTASENVYVNTAHLKNSQEKYSNRLYKYDHNFVKAINAIQKSWTATTYMEYETLTLGDMIRRSGGHSRKIPRP

SEQ ID NO: 824468 - protein, 206 aa, Homo sapiens
IPYTVVLLQLFQGARLVVDSPLARSARLPGNSSPLFSAPCSMGAGPSLLLAALLLLLSGDGAVRCDTPANCTYLDLLGTWVFQVGSSGSQRDVNCSVMGPQEKKVVVYLQKLDTAYDDLGNSGHFTIIYNQGFEIVLNDYKWFAFFKDVTDFISHLFMQLGTVGIYDLPHLRNKLEGDWRDYGFLMNFLLEPACLLFLSCLHYFIY

SEQ ID NO: 824469 - protein, 124 aa, Homo sapiens
IPYTVVLLQLFQGARLVVDSPLARSARLPGNSSPLFSAPCSMGAGPSLLLAALLLLLSGDGAVRCDTPANCTYLDLLGTWVFQVGSSGSQRDVNCSVMGPQEKKVVVYLQNLQIDFHEDICLQN

SEQ ID NO: 824470 - protein, 504 aa, Homo sapiens
IPYTVVLLQLFQGARLVVDSPLARSARLPGNSSPLFSAPCSMGAGPSLLLAALLLLLSGDGAVRCDTPANCTYLDLLGTWVFQVGSSGSQRDVNCSVMGPQEKKVVVYLQKLDTAYDDLGNSGHFTIIYNQGFEIVLNDYKWFAFFKYKEEGSKVTTYCNETMTGWVHDVLGRNWACFTGKKVGTASENVYVNTAHLKNSQEKYSNRLYKYDHNFVKAINAIQKSWTATTYMEYETLTLGDMIRRSGGHSRKIPRPKPAPLTAEIQQKILHLPTSWDWRNVHGINFVSPVRNQASCGSCYSFASMGMLEARIRILTNNSQTPILSPQEVVSCSQYAQGCEGGFPYLIAGKYAQDFGLVEEACFPYTGTDSPCKMKEDCFRYYSSEYHYVGGFYGGCNEALMKLELVHHGPMAVAFEVYDDFLHYKKGIYHHTGLRDPFNPFELTNHAVLLVGYGTDSASGMDYWIVKNSWGTGWGENGYFRIRRGTDECAIESIAVAATPIPKL

SEQ ID NO: 824471 - protein, 435 aa, Homo sapiens
IPYTVVLLQLFQGARLVVDSPLARSARLPGPQEKKVVVYLQKLDTAYDDLGNSGHFTIIYNQGFEIVLNDYKWFAFFKYKEEGSKVTTYCNETMTGWVHDVLGRNWACFTGKKVGTASENVYVNTAHLKNSQEKYSNRLYKYDHNFVKAINAIQKSWTATTYMEYETLTLGDMIRRSGGHSRKIPRPKPAPLTAEIQQKILHLPTSWDWRNVHGINFVSPVRNQASCGSCYSFASMGMLEARIRILTNNSQTPILSPQEVVSCSQYAQGCEGGFPYLIAGKYAQDFGLVEEACFPYTGTDSPCKMKEDCFRYYSSEYHYVGGFYGGCNEALMKLELVHHGPMAVAFEVYDDFLHYKKGIYHHTGLRDPFNPFELTNHAVLLVGYGTDSASGMDYWIVKNSWGTGWGENGYFRIRRGTDECAIESIAVAATPIPKL

SEQ ID NO: 824472 - protein, 504 aa, Homo sapiens; identical to SEQ ID NO: 824470

SEQ ID NO: 824473 - protein, 504 aa, Homo sapiens; identical to SEQ ID NO: 824470

SEQ ID NO: 824474 - protein, 475 aa, Homo sapiens
IPYTVVLLQLFQGARLVVDSPLARSARLPGNSSPLFSAPCSMGAGPSLLLAALLLLLSGDGAVRCDTPANCTYLDLLGTWVFQVGSSGSQRDVNCSVMGPQEKKVVVYLQKLDTAYDDLGNSGHFTIIYNQGFEIVLNDYKWFAFFKYKEEGSKVTTYCNETMTGWVHDVLGRNWACFTGKKVGTASENVYVNTAHLKNSQEKYSNRLYKYDHNFVKAINAIQKSWTATTYMEYETLTLGDMIRRSGGHSRKIPRPKPAPLTAEIQQKILHLPTSWDWRNVHGINFVSPVRNQASCGSCYSFASMGMLEARIRILTNNSQTPILSPQEVVSCSQYAQGCEGGFPYLIAGKYAQDFGLVEEACFPYTGTDSPCKMKEDCFRYYSSEYHYVGGFYGGCNEALMKLELVHHGPMAVAFEVYDDFLHYKKGIYHHTGLRDPFNPFELTNHAVLLVGYGTDSASGMDYWIVKNSWGTGWW

SEQ ID NO: 824475 - protein, 113 aa, Homo sapiens
IPYTVVLLQLFQGARLVVDSPLARSARLPGNSSPLFSAPCSMGAGPSLLLAALLLLLSGDGAVRCDTPANCTYLDLLGTWVFQVGSSGSQRDVNCSVMAWQFWPFHHHLQPRL

SEQ ID NO: 824476 - protein, 158 aa, Homo sapiens
IPYTVVLLQLFQGARLVVDSPLARSARLPGNSSPLFSAPCSMGAGPSLLLAALLLLLSGDGAVRCDTPANCTYLDLLGTWVFQVGSSGSQRDVNCSVMGPQEKKVVVYLQKLDTAYDDLGNSGHFTIIYNQGFEIVLNDYKWFAFFKLLNRASVEGLF

SEQ ID NO: 824477 - protein, 107 aa, Homo sapiens
IPYTVVLLQLFQGARLVVDSPLARSARLPGNSSPLFSAPCSMGAGPSLLLAALLLLLSGDGAVRCDTPANCTYLDLLGTWVFQVGSSGSQRDVNCSVMGKPPARQSS

SEQ ID NO: 824478 - protein, 158 aa, Homo sapiens
MAPEVVEAFSEEASIYDKRCDLWSLGVILYILLSGYPPFVGRCGSDCGWDRGEACPACQNMLFESIQEGKYEFPDKDWAHISCAAKDLISKLLVRDAKQRLSAAQVLQHPWVQGCAPENTLPTPMVLQRWDSHFLLPPHPCRIHVRPGGLVRTVTVNE

SEQ ID NO: 824479 - protein, 533 aa, Homo sapiens
GRPPSGLPPGPRSPPPLAGPGQKMVQKKPAELQGFHRSFKGQNPFELAFSLDQPDHGDSDFGLQCSARPGEGPEGEEGTGQLLSLPWQWPAPAGGWGPAGQGHVLSPLGVPPGTDMPASQPIDIPDAKKRGKKKKRGRATDSFSGRFEDVYQLQEDVLGEGAHARVQTCINLITSQEYAVKIIEKQPGHIRSRVFREVEMLYQCQGHRNVLELIEFFEEEDRFYLVFEKMRGGSILSHIHKRRHFNELEASVVVQDVASALDFLHNKGIAHRDLKPENILCEHPNQVSPVKICDFDLGSGIKLNGDCSPISTPELLTPCGSAEYMAPEVVEAFSEEASIYDKRCDLWSLGVILYILLSGYPPFVGRCGSDCGWDRGEACPACQNMLFESIQEGKYEFPDKDWAHISCAAKDLISKLLVRDAKQRLSAAQVLQHPWVQGCAPENTLPTPMVLQRNSCAKDLTSFAAEAIAMNRQLAQHDEDLAEEEAAGQGQPVLVRATSRCLQLSPPSQSKLAQRRQRASLSSAPVVLVGDHA

SEQ ID NO: 824480 - protein, 495 aa, Homo sapiens
GRPPSGLPPGPRSPPPLAGPGQKMVQKKPAELQGFHRSFKGQNPFELAFSLDQPDHGDSDFGLQCSARPGEGPEGEEGTGQLLSLPWQWPAPAGGWGPAGQGHVLSPLGVPPGTDMPASQPIDIPDAKKRGKKKKRGRATDSFSGRFEDVYQLQEDVLGEGAHARVQTCINLITSQEYAVKIIEKQPGHIRSRVFREVEMLYQCQGHRNVLELIEFFEEEDRFYLVFEKMRGGSILSHIHKRRHFNELEASVVVQDVASALDFLHNKGIAHRDLKPENILCEHPNQVSPVKICDFDLGSGIKLNGDCSPISTPELLTPCGSAEYMAPEVVEAFSEEASIYDKRCDNMLFESIQEGKYEFPDKDWAHISCAAKDLISKLLVRDAKQRLSAAQVLQHPWVQGCAPENTLPTPMVLQRNSCAKDLTSFAAEAIAMNRQLAQHDEDLAEEEAAGQGQPVLVRATSRCLQLSPPSQSKLAQRRQRASLSSAPVVLVGDHA

SEQ ID NO: 824481 - protein, 522 aa, Homo sapiens
GRPPSGLPPGPRSPPPLAGPGQKMVQKKPAELQGFHRSFKGQNPFELAFSLDQPDHGDSDFGLQCSARPDMPASQPIDIPDAKKRGKKKKRGRATDSFSGRFEDVYQLQEDVLGEGAHARVQTCINLITSQEYAVKIIEKQPGHIRSRVFREVEMLYQCQGHRNVLELIEFFEEEDRFYLVFEKMRGGSILSHIHKRRHFNELEASVVVQDVASALDFLHNKGRWYPARSLLGPPAKDSWKTSRPSPRRGSVASPPGIAHRDLKPENILCEHPNQVSPVKICDFDLGSGIKLNGDCSPISTPELLTPCGSAEYMAPEVVEAFSEEASIYDKRCDLWSLGVILYILLSGYPPFVGRCGSDCGWDRGEACPACQNMLFESIQEGKYEFPDKDWAHISCAAKDLISKLLVRDAKQRLSAAQVLQHPWVQGCAPENTLPTPMVLQRNSCAKDLTSFAAEAIAMNRQLAQHDEDLAEEEAAGQGQPVLVRATSRCLQLSPPSQSKLAQRRQRASLSSAPVVLVGDHA

SEQ ID NO: 824482 - protein, 470 aa, Homo sapiens
GRPPSGLPPGPRSPPPLAGPGQKMVQKKPAELQGFHRSFKGQNPFELAFSLDQPDHGDSDFGLQCSARPDMPASQPIDIPDAKKRGKKKKRGRATDSFSGRFEDVYQLQEDVLGEGAHARVQTCINLITSQEYAVKIIEKQPGHIRSRVFREVEMLYQCQGHRNVLELIEFFEEEDRFYLVFEKMRGGSILSHIHKRRHFNELEASVVVQDVASALDFLHNKGIAHRDLKPFDLGSGIKLNGDCSPISTPELLTPCGSAEYMAPEVVEAFSEEASIYDKRCDLWSLGVILYILLSGYPPFVGRCGSDCGWDRGEACPACQNMLFESIQEGKYEFPDKDWAHISCAAKDLISKLLVRDAKQRLSAAQVLQHPWVQGCAPENTLPTPMVLQRNSCAKDLTSFAAEAIAMNRQLAQHDEDLAEEEAAGQGQPVLVRATSRCLQLSPPSQSKLAQRRQRASLSSAPVVLVGDHA

SEQ ID NO: 824483 - protein, 139 aa, Homo sapiens
  misc_feature (3)..(3): Xaa can be any naturally occurring amino acid
KIXTIQRRLAWPLRKDDTQIREAFHIDGLCFPVLEEYLNVGGPGGGGLGDRLPGPAAPPESRMMVTVRWPWGCSAFPGPHCPYLWTAPSKDPWGGWGIPPTPFPHHFSPVSDSMFRNGGFSAFLYQRTSKWTPARCRRP

SEQ ID NO: 824484 - protein, 491 aa, Homo sapiens
GRPPSGLPPGPRSPPPLAGPGQKMVQKKPAELQGFHRSFKGQNPFELAFSLDQPDHGDSDFGLQCSARPGEGPEGEEGTGQLLSLPWQWPAPAGGWGPAGQGHVLSPLGVPPGTDMPASQPIDIPDAKKRGKKKKRGRATDSFSGRFEDVYQLQEDVLGEGAHARVQTCINLITSQEYAVKIIEKQPGHIRSRVFREVEMLYQCQGHRNVLELIEFFEEEDRFYLVFEKMRGGSILSHIHKRRHFNELEASVVVQDVASALDFLHNKGIAHRDLKPENILCEHPNQVSPVKICDFDLGSGIKLNGDCSPISTPELLTPCGSAEYMAPEVVEAFSEEASIYDKRCDLWSLGVILYILLSGYPPFVGRCGSDCGWDRGEACPACQNMLFESIQEGKYEFPDKDWAHISCAAKDLISKLLVRDAKQRLSAAQVLQHPWVQGVSTSRTGGRRVRPGEHLAHSHGPAEVGQSLPPPSPPLSHPRATWRTGQNRYCE

SEQ ID NO: 824485 - protein, 401 aa, Homo sapiens
GRPPSGLPPGPRSPPPLAGPGQKMVQKKPAELQGFHRSFKGQNPFELAFSLDQPDHGDSDFGLQCSARPGEGPEGEEGTGQLLSLPWQWPAPAGGWGPAGQGHVLSPLGVPPGTDMPASQPIDIPDAKKRGKKKKRGRATDSFSGRFEDVYQLQEDVLGEGAHARVQTCINLITSQEYAVKIIEKQPGHIRSRVFREVEMLYQCQGHRNVLELIEFFEEEDRFYLVFEKMRGGSILSHIHKRRHFNELEASVVVQDVASALDFLHNKGIAHRDLKPENILCEHPNQVSPVKICDFDLGSGIKLNGDCSPISTPELLTPCGSAEYMAPEVVEAFSEEASIYDKRCDLWSLGVILYILLSGYPPFVGRCGSDCGWDRGEACPACQSTSVLPSTSVLPSTSVLP

SEQ ID NO: 824486 - protein, 225 aa, Homo sapiens
GRPPSGLPPGPRSPPPLAGPGQKMVQKKPAELQGFHRSFKGQNPFELAFSLDQPDHGDSDFGLQCSARPDMPASQPIDIPDAKKRGKKKKRGRATDSFSGRFEDVYQLQEDVLGEGAHARVQTCINLITSQEYAVKIIEKQPGHIRSRVFREVEMLYQCQGHRNVLELIEFFEEEDRFYLVFEKMRGGSILSHIHKRRHFNELEASVVVQDVASALDFLHNKGRW

SEQ ID NO: 824487 - protein, 437 aa, Homo sapiens
GRPPSGLPPGPRSPPPLAGPGQKMVQKKPAELQGFHRSFKGQNPFELAFSLDQPDHGDSDFGLQCSARPDMPASQPIDIPDAKKRGKKKKRGRATDSFSGRFEDVYQLQEDVLGEGAHARVQTCINLITSQEYAVKIIEKQPGHIRSRVFREVEMLYQCQGHRNVLELIEFFEEEDRFYLVFEKMRGGSILSHIHKRRHFNELEASVVVQDVASALDFLHNKGIAHRDLKPENILCEHPNQVSPVKICDFDLGSGIKLNGDCSPISTPELLTPCGSAEYMAPEVVEAFSEEASIYDKRCDLWSLGVILYILLSGYPPFVGRCGSDCGWDRGEACPACQNMLFESIQEGKYEFPDKDWAHISCAAKDLISKLLVRDAKQRLSAAQVLQHPWVQGCAPENTLPTPMVLQRWDSHFLLPPHPCRIHVRPGGLVRTVTVNE

SEQ ID NO: 824488 - protein, 488 aa, Homo sapiens
GRPPSGLPPGPRSPPPLAGPGQKMVQKKPAELQGFHRSFKGQNPFELAFSLDQPDHGDSDFGLQCSARPDMPASQPIDIPDAKKRGKKKKRGRATDSFSGRFEDVYQLQEDVLGEGAHARVQTCINLITSQEYAVKIIEKQPGHIRSRVFREVEMLYQCQGHRNVLELIEFFEEEDRFYLVFEKMRGGSILSHIHKRRHFNELEASVVVQDVASALDFLHNKGIAHRDLKPENILCEHPNQVSPVKICDFDLGSGIKLNGDCSPISTPELLTPCGSAEYMAPEVVEAFSEEASIYDKRCDLWSLGVILYILLSGYPPFVGRCGSDCGWDRGEACPACQNMLFESIQEGKYEFPDKDWAHISCAAKDLISKLLVRDAKQRLSAAQVLQHPWVQGCAPENTLPTPMVLQRNSCAKDLTSFAAEAIAMNRQLAQHDEDLAEEEAAGQGQPVLVRATSRCLQLSPPSQSKLAQRRQRASLSSAPVVLVGDHA

SEQ ID NO: 824489 - protein, 418 aa, Homo sapiens [sequence omitted]

SEQ ID NO: 824490 - protein, 348 aa, Homo sapiens
ALVDPPSQAFREVEMLYQCQGHRNVLELIEFFEEEDRFYLVFEKMRGGSILSHIHKRRHFNELEASVVVQDVASALDFLHNKGIAHRDLKPENILCEHPNQVSPVKICDFDLGSGIKLNGDCSPISTPELLTPCGSAEYMAPEVVEAFSEEASIYDKRCDLWSLGVILYILLSGYPPFVGRCGSDCGWDRGEACPACQNMLFESIQEGKYEFPDKDWAHISCAAKDLISKLLVRDAKQRLSAAQVLQHPWVQGCAPENTLPTPMVLQRNSCAKDLTSFAAEAIAMNRQLAQHDEDLAEEEAAGQGQPVLVRATSRCLQLSPPSQSKLAQRRQRASLSSAPVVLVGDHA

SEQ ID NO: 824491 - protein, 356 aa, Homo sapiens
DAWVDPRVRGGGDAVPVPGHRNVLELIEFFEEEDRFYLVFEKMRGGSILSHIHKRRHFNELEASVVVQDVASALDFLHNKGIAHRDLKPENILCEHPNQVSPVKICDFDLGSGIKLNGDCSPISTPELLTPCGSAEYMAPEVVEAFSEEASIYDKRCDLWSLGVILYILLSGYPPFVGRCGSDCGWDRGEACPACQNMLFESIQEGKYEFPDKDWAHISCAAKDLISKLLVRDAKQRLSAAQVLQHPWVQGVSTSRTGAGGCAPENTLPTPMVLQRNSCAKDLTSFAAEAIAMNRQLAQHDEDLAEEEAAGQGQPVLVRATSRCLQLSPPSQSKLAQRRQRASLSSAPVVLVGDHA

SEQ ID NO: 824492 - protein, 488 aa, Homo sapiens; identical to SEQ ID NO: 824488

SEQ ID NO: 824493 - protein, 488 aa, Homo sapiens; identical to SEQ ID NO: 824488

SEQ ID NO: 824494 - protein, 152 aa, Homo sapiens
GRPPSGLPPGPRSPPPLAGPGQKMVQKKPAELQGFHRSFKVRPGVGLGALRAGPPEWPAWGARGPPLRSAPGARAWPPPYTRGCPGRPCAEAGSVCEDGGSAGHSPLSSHGRRVLPPGPPSEAGSRSPLRVRAPGCVSPASPRRVCSGGSAG

SEQ ID NO: 824495 - protein, 598 aa, Homo sapiens
RWRGAGSRRPASGARAGPPSPLGGAERAGGGGPRLGATEAGSRDRPPSPPPLHWEPAGMEREALPWGLEPQDVQSSDEMRSPEGYLRGNMSENEEEEISQQEGSGDYEVEEIPFGLEPQSPGFEPQSPEFEPQSPRFEPESPGFESRSPGLVPPSPEFAPRSPESDSQSPEFESQSPRYEPQSPGYEPRSPGYEPRSPGYESESSRYESQNTELKTQSPEFEAQSSKFQEGAEMLLNPDEKSPLNISVGVHPLDSFTQGFGEQPTGDLPIGPPFEMPTGALLSTPQFEMLQNPLGLTGALRGPGRRGGRARGGQGPRPNICGICGKSFGRGSTLIQHQRIHTGEKPYKCEVCSKAFSQSSDLIKHQRTHTGERPYKCPRCGKAFADSSYLLRHQRTHSGQKPYKCPHCGKAFGDSSYLLRHQRTHSHERPYSCTECGKCYSQNSSLRSHQRVHTGQRPFSCGICGKSFSQRSALIPHARSHAREKPFKCPECGKRFGQSSVLAIHARTHLPGRTYSCPDCGKTFNRSSTLIQHQRSHTGERPYRCAVCGKGFCRSSTLLQHHRVHSGERPYKCDDCGKAFSQSSDLIRHQRTHAAGRR

SEQ ID NO: 824496 - protein, 598 aa, Homo sapiens; identical to SEQ ID NO: 824495

SEQ ID NO: 824497 - protein, 484 aa, Homo sapiens
RWRGAGSRRPASGARAGPPSPLGGAERAGGGGPRLGATEAGSRDRPPSPPPLHWEPAGMEREALPWGLEPQDVQSSDEMRSPEGYLRGNMSENEEEEISQQEGSGDYEVEEIPFGLEPQSPGFEPQSPEFEPQSPRFEPESPGFESRSPGLVPPSPEFAPRSPESDSQSPEFESQSPRYEPQSPGYEPRSPGYEPRSPGYESESSRYESQNTELKTQSPEFEAQSSKFQEGAEMLLNPDEKSPLNISVGVHPLDSFTQGFGEQPTGDLPIGPPFEMPTGALLSTPQFEMLQNPLGLTGALRGPGRRGGRARGGQGPRPNICGICGKSFGRGSTLIQHQRIHTGEKPYKCEVCSKAFSQSSDLIKHQRTHTGERPYKCPRCGKAFADSSYLLRHQRTHSGQKPYKCPHCGKAFGDSSYLLRHQRTHSHERPYSCTECGKCYSQNSSLRSHQRVHTGQRPFSCGICGLASGYGHGWPAPSSGQSRL

SEQ ID NO: 824498 - protein, 378 aa, Homo sapiens
RWRGAGSRRPASGARAGPPSPLGGAERAGGGGPRLGATEAGSRDRPPSPPPLHWEPAGMEREALPWGLEPQDVQSSDEMRSPEGYLRGNMSENEEEEISQQEGSGDYEVEEIPFGLEPQSPGFEPQSPEFEPQSPRFEPESPGFESRSPGLVPPSPEFAPRSPESDSQSPEFESQSPRYEPQSPGYEPRSPGYEPRSPGYESESSRYESQNTELKTQSPEFEAQSSKFQEGAEMLLNPDEKSPLNISVGVHPLDSFTQGFGEQPTGDLPIGPPFEMPTGALLSTPQFEMLQNPLGLTGALRGPGRRGGRARGGQGPRPNICGICGKSFGRGSTSHPAPALPHGRAALQVRRVRQGLLPLLHASAASPGPQWRAALQVR

SEQ ID NO: 824499 - protein, 598 aa, Homo sapiens; identical to SEQ ID NO: 824495

SEQ ID NO: 824500 - protein, 378 aa, Homo sapiens; identical to SEQ ID NO: 824498

SEQ ID NO: 824501 - protein, 227 aa, Homo sapiens
MGDAGSERSKAPSLPPRCPCGFWGSSKTMNLCSKCFADFQKKQPDDDSAPSTSNSQSDLFSEETTSDNNNTSITTPTLSPSQQPLPTELNVTSPSKEECGPCTDTAHVSLITPTKRSCGTDSQSENEASPVKRPRLLENTERSEETSRSKQKSRRRCFQCQTKLELVQQELGSCRCGYVFCMLHRLPEQHDCTFDHMGRGREEAIMKMVKLDRKVGRSCQRIGEGCS

SEQ ID NO: 824502 - protein, 205 aa, Homo sapiens
MGDAGSERSKAPSLPPRCPCGFWGSSKTMNLCSKCFADFQKKQPDDDSAPSTSNSQSDLFSEETTSDNNNTSITTPTLSPSQQPLPTELNVTSPSKEEYSQSENEASPVKRPRLLENTERSEETSRSKQKSRRRCFQCQTKLELVQQELGSCRCGYVFCMLHRLPEQHDCTFDHMGRGREEAIMKMVKLDRKVGRSCQRIGEGCS

SEQ ID NO: 824503 - protein, 227 aa, Homo sapiens; identical to SEQ ID NO: 824501

SEQ ID NO: 824504 - protein, 227 aa, Homo sapiens; identical to SEQ ID NO: 824501

SEQ ID NO: 824505 - protein, 227 aa, Homo sapiens; identical to SEQ ID NO: 824501

SEQ ID NO: 824506 - protein, 191 aa, Homo sapiens
MGDAGSERSKAPSLPPRCPCGFWGSSKTMNLCSKCFADFQKKQPDDDSAPSTSNSQSDLFSEETTSDNNNTSITTPTLSPSQQPLPTELNVTSPSKEECGPCTDTAHVSLITPTKRSCGTDSQSENEASPVKRPRLLENTERSEETSRSKQKSRRRCFQCQTKLELVQQELGSCRCVCVLYVTSSAAGVAS

SEQ ID NO: 824507 - protein, 223 aa, Homo sapiens
MGDAGSERSKAPSLPPRCPCGFWGSSKTMNLCSKCFADFQKKQPDDDSAPSTSNSQSDLFSEETTSDNNNTSITTPTLSPSQQPLPTELNVTSPSKEECGPCTDTAHVSLITPTKRSCGTDSQSENEASPVKRPRLLENTERSEETSRSKQKSRRRCFQCQTKLELVQQELGSCRCGKHLPQWRDGDYILNTLAQLWKFKWLKSFVLLLSTVSLLQECMRYRF

SEQ ID NO: 824508 - protein, 112 aa, Homo sapiens
MWRMAAQRGGWVCTLASAARFLYWEFFKKTFHSQQESVEVLGAAAGEAAAHGLCPFQLEPPVPPGAKRMMSWPPFSFLCSPIVQGHPVHIYHIASLVREGSIRPRDSGFGSV

SEQ ID NO: 824509 - protein, 227 aa, Homo sapiens; identical to SEQ ID NO: 824501

SEQ ID NO: 824510 - protein, 227 aa, Homo sapiens; identical to SEQ ID NO: 824501

SEQ ID NO: 824511 - protein, 187 aa, Homo sapiens
MGDAGSERSKAPSLPPRCPCGFWGSSKTMNLCSKCFADFQKKQPDDDSAPSTSNSQSDLFSEETTSDNNNTSITTPTLSPSQQPLPTELNVTSPSKEECGPCTDTAHVSLITPTKRSCGTDSQSENEASPVKRPRLLENTERSEETSRSKQKSRRRCFQCQTKLELVQQELGSCRCGVSLERDVWHL

SEQ ID NO: 824512 - protein, 675 aa, Homo sapiens
RLVLARGYGIWGWAEARWRIQCLESWRGGGGEGLVAGGGAGTRCDAKNPRHPPEPPQSWPRRMGALRPTLLPPSLPLLLLLMLGMGCWAREVLVPEGPLYRVAGTAVSISCNVTGYEGPAQQNFEWFLYRPEAPDTALGIVSTKDTQFSYAVFKSRVVAGEVQVQRLQGDAVVLKIARLQAQDAGIYECHTPSTDTRYLGSYSGKVELRVLPDVLQVSAAPPGPRGRQAPTSPPRMTVHEGQELALGCLARTSTQKHTHLAVSFGRSVPEAPVGRSTLQEVVGIRSDLAVEAGAPYAERLAAGELRLGKEGTDRYRMVVGGAQAGDAGTYHCTAAEWIQDPDGSWAQIAEKRAVLAHVDVQTLSSQLAVTVGPGERRIGPGEPLELLCNVSGALPPAGRHAAYSVGWEMAPAGAPGPGRLVAQLDTEGVGSLGPGYEGRHIAMEKVASRTYRLRLEAARPGDAGTYRCLAKAYVRGSGTRLREAASARSRPLPVHVREEGVVLEAVAWLAGGTVYRGETASLLCNISVRGGPPGLRLAASWWVERPEDGELSSVPAQLVGGVGQDGVAELGVRPGGGPVSVELVGPRSHRLRLHSLGPEDEGVYHCAPSAWVQHADYSWYQAGSARSGPVTVYPYMHALDTLFVPLLVGTGVALVTGATVLGTITCCFMKRLRKR

SEQ ID NO: 824513 - protein, 440 aa, Homo sapiens [sequence omitted]

SEQ ID NO: 824514 - protein, 746 aa, Homo sapiens
QREGRREGIRQLQFSSLGAPTPRCPASCPQPGHAPPTLPAPQNPRHPPEPPQSWPRRMGALRPTLLPPSLPLLLLLMLGMGCWAREVLVPEGPLYRVAGTAVSISCNVTGYEGPAQQNFEWFLYRPEAPDTALGIVSTKDTQFSYAVFKSRVVAGEVQVQRLQGDAVVLKIARLQAQDAGIYECHTPSTDTRYLGSYSGKVELRVLPDVLQVSAAPPGPRGRQAPTSPPRMTVHEGQELALGCLARTSTQKHTHLAVSFGRSVPEAPVGRSTLQEVVGIRSDLAVEAGAPYAERLAAGELRLGKEGTDRYRMVVGGAQAGDAGTYHCTAAEWIQDPDGSWAQIAEKRAVLAHVDVQTLSSQLAVTVGPGERRIGPGEPLELLCNVSGALPPAGRHAAYSVGWEMAPAGAPGPGRLVAQLDTEGVGSLGPGYEGRHIAMEKVASRTYRLRLEAARPGDAGTYRCLAKAYVRGSGTRLREAASARSRPLPVHVREEGERGLGPGRGSRIVNPFSFCFHDPSLSVSCLQATASRSSSTKIVGIPEFPGAVLGGSPNPMLPGPAPSDPMSFVLQGVVLEAVAWLAGGTVYRGETASLLCNISVRGGPPGLRLAASWWVERPEDGELSSVPAQLVGGVGQDGVAELGVRPGGGPVSVELVGPRSHRLRLHSLGPEDEGVYHCAPSAWVQHADYSWYQAGSARSGPVTVYPYMHALDTLFVPLLVGTGVALVTGATVLGTITCCFMKRLRKR

SEQ ID NO: 824515 - protein, 670 aa, Homo sapiens
QREGRREGIRQLQFSSLGAPTPRCPASCPQPGHAPPTLPAPQNPRHPPEPPQSWPRRMGALRPTLLPPSLPLLLLLMLGMGCWAREVLVPEGPLYRVAGTAVSISCNVTGYEGPAQQNFEWFLYRPEAPDTALGIVSTKDTQFSYAVFKSRVVAGEVQVQRLQGDAVVLKIARLQAQDAGIYECHTPSTDTRYLGSYSGKVELRVLPDVLQVSAAPPGPRGRQAPTSPPRMTVHEGQELALGCLARTSTQKHTHLAVSFGRSVPEAPVGRSTLQEVVGIRSDLAVEAGAPYAERLAAGELRLGKEGTDRYRMVVGGAQAGDAGTYHCTAAEWIQDPDGSWAQIAEKRAVLAHVDVQTLSSQLAVTVGPGERRIGPGEPLELLCNVSGALPPAGRHAAYSVGWEMAPAGAPGPGRLVAQLDTEGVGSLGPGYEGRHIAMEKVASRTYRLRLEAARPGDAGTYRCLAKAYVRGSGTRLREAASARSRPLPVHVREEGVVLEAVAWLAGGTVYRGETASLLCNISVRGGPPGLRLAASWWVERPEDGELSSVPAQLVGGVGQDGVAELGVRPGGGPVSVELVGPRSHRLRLHSLGPEDEGVYHCAPSAWVQHADYSWYQAGSARSGPVTVYPYMHALDTLFVPLLVGTGVALVTGATVLGTITCCFMKRLRKR

SEQ ID NO: 824516 - protein, 634 aa, Homo sapiens
QREGRREGIRQLQFSSLGAPTPRCPASCPQPGHAPPTLPAPQNPRHPPEPPQSWPRRMGALRPTLLPPSLPLLLLLMLGMGCWAREVLVPEGPLYRVAGTAVSISCNVTGYEGPAQQNFEWFLYRPEAPDTALGIVSTKDTQFSYAVFKSRVVAGEVQVQRLQGDAVVLKIARLQAQDAGIYECHTPSTDTRYLGSYSGKVELRVLPDVLQVSAAPPGPRGRQAPTSPPRMTVHEGQELALGCLARTSTQKHTHLAVSFGRSVPEAPVGRSTLQEVVGIRSDLAVEAGAPYAERLAAGELRLGKEGTDRYRMVVGGAQAGDAGTYHCTAAEWIQDPDGSWAQIAEKRAVLAHVDVQTLSSQLAVTVGPGERRIGPGEPLELLCNVSGALPPAGRHAAYSVGWEMAPAGAPGPGRLVAQLDTEGVGSLGPGYEGRHIAMEKVASRTYRLRLEAARPGDAGTYRCLAKAYVRGSGTRLREAASARSRPLPVHVREEGVVLEAVAWLAGGTVYRGETASLLCNISVRGGPPGLRLAASWWVERPEDGELSSVPAQLVGGVGQDGVAELGVRPGGGPVSVELVGPRSHRLRLHSLGPEDEGVYHCAPSAWVQHADYSWYQAGSARSGPVTVYPYMHGE

SEQ ID NO: 824517 - protein, 670 aa, Homo sapiens; identical to SEQ ID NO: 824515

SEQ ID NO: 824518 - protein, 634 aa, Homo sapiens; identical to SEQ ID NO: 824516

SEQ ID NO: 824519 - protein, 399 aa, Homo sapiens
QREGRREGIRQLQFSSLGAPTPRCPASCPQPGHAPPTLPAPQNPRHPPEPPQSWPRRMGALRPTLLPPSLPLLLLLMLGMGCWAREVLVPEGPLYRVAGTAVSISCNVTGYEGPAQQNFEWFLYRPEAPDTALGIVSTKDTQFSYAVFKSRVVAGEVQVQRLQGDAVVLKIARLQAQDAGIYECHTPSTDTRYLGSYSGKVELRVLPDVLQVSAAPPGPRGRQAPTSPPRMTVHEGQELALGCLARTSTQKHTHLAVSFGRSVPEAPVGRSTLQEVVGIRSDLAVEAGAPYAERLAAGELRLGKEGTDRYRMVVGGAQAGDAGTYHCTAAEWIQDPDGSWAQIAEKRAVLAHVDVQTLCKCHLYIPLWELGGTVSWWALWPQGVPDSHHLTPRNSSSTE

SEQ ID NO: 824520 - protein, 243 aa, Homo sapiens
QREGRREGIRQLQFSSLGAPTPRCPASCPQPGHAPPTLPAPQNPRHPPEPPQSWPRRMGALRPTLLPPSLPLLLLLMLGMGCWAREVLVPEGPLYRVAGTAVSISCNVTGYEGPAQQNFEWFLYRPEAPDTALGIVSTKDTQFSYAVFKSRVVAGEVQVQRLQGDAVVLKIARLQAQDAGIYECHTPSTDTRYLGSYSGKVELRGTGPWDGVEPHTLSRQKVKATSDLSSCPLGFVAKELEAQ

SEQ ID NO: 824521 - protein, 670 aa, Homo sapiens; identical to SEQ ID NO: 824515

SEQ ID NO: 824522 - protein, 591 aa, Homo sapiens
MGCWAREVLVPEGPLYRVAGTAVSISCNVTGYEGPAQQNFEWFLYRPEAPDTALGIVSTKDTQFSYAVFKSRVVAGEVQVQRLQGDAVVLKIARLQAQDAGIYECHTPSTDTRYLGSYSGKVELRVLPDVLQVSAAPPGPRGRQAPTSPPRMTVHEGQELALGCLARTSTQKHTHLAVSFGRSVPEAPVGRSTLQEVVGIRSDLAVEAGAPYAERLAAGELRLGKEGTDRYRMVVGGAQAGDAGTYHCTAAEWIQDPDGSWAQIAEKRAVLAHVDVQTLSSQLAVTVGPGERRIGPGEPLELLCNVSGALPPAGRHAAYSVGWEMAPAGAPGPGRLVAQLDTEGVGSLGPGYEGRHIAMEKVASRTYRLRLEAARPGDAGTYRCLAKAYVRGSGTRLREAASARSRPLPVHVREEGVVLEAVAWLAGGTVYRGETASLLCNISVRGGPPGLRLAASWWVERPEDGELSSVPAQLVGGVGQDGVAELGVRPGGGPVSVELVGPRSHRLRLHSLGPEDEGVYHCAPSAWVQHADYSWYQAGSARSGPVTVYPYMHALDTLFVPLLVGTGVALVTGATVLGTITCCFMKRLRKR

SEQ ID NO: 824523 - protein, 440 aa, Homo sapiens [sequence omitted]

SEQ ID NO: 824524 - protein, 670 aa, Homo sapiens; identical to SEQ ID NO: 824515

SEQ ID NO: 824525 - protein, 391 aa, Homo sapiens
QREGRREGIRQLQFSSLGAPTPRCPASCPQPGHAPPTLPAPQNPRHPPEPPQSWPRRMGALRPTLLPPSLPLLLLLMLGMGCWAREVLVPEGPLYRVAGTAVSISCNVTGYEGPAQQNFEWFLYRPEAPDTALGIVSTKDTQFSYAVFKSRVVAGEVQVQRLQGDAVVLKIARLQAQDAGIYECHTPSTDTRYLGSYSGKVELRVLPDVLQVSAAPPGPRGRQAPTSPPRMTVHEGQELALGCLARTSTQKHTHLAVSFGRSVPEAPVGRSTLQEVVGIRSDLAVEAGAPYAERLAAGELRLGKEGTDRYRMVVGGAQAGDAGTYHCTAAEWIQDPDGSWAQIAEKRAVLAHVDVQTLSSWTQRVWAAWALAMRADTLPWRRWHPEHTGYG

SEQ ID NO: 824526 - protein, 670 aa, Homo sapiens; identical to SEQ ID NO: 824515

SEQ ID NO: 824527 - protein, 670 aa, Homo sapiens; identical to SEQ ID NO: 824515

SEQ ID NO: 824528 - protein, 142 aa, Homo sapiens
GRSNIRGGPSHWCHCPWYHHLLLHEEASKTVIPYSPGLAGVDCLSSVPAQLVGGVGQDGVAELGVRPGGGPVSVELVGPRSHRLRLHSLGPEDEGVYHCAPSAWVQHADYSWYQAGSARSGPVTVYPYMHGLDTLSLCPLFL

SEQ ID NO: 824529 - protein, 4356 aa, Homo sapiens
MSEFLLALLTLSGLLPIARVLTVGADRDQQLCDPGEFLCHDHVTCVSQSWLCDGDPDCPDDSDESLDTCPEEVEIKCPLNHIACLGTNKCVHLSQLCNGVLDCPDGYDEGVHCQELLSNCQQLNCQYKCTMVRNSTRCYCEDGFEITEDGRSCKDQDECAVYGTCSQTCRNTHGSYTCSCVEGYLMQPDNRSCKAKIEPTDRPPILLIANFETIEVFYLNGSKMATLSSVNGNEIHTLDFIYNEDMICWIESRESSNQLKCIQITKAGGLTDEWTINILQSFHNVQQMAIDWLTRNLYFVDHVGDRIFVCNSNGSVCVTLIDLELHNPKAIAVDPIAGKLFFTDYGNVAKVERCDMDGMNRTRIIDSKTEQPAALALDLVNKLVYWVDLYLDYVGVVDYQGKNRHTVIQGRQVRHLYGITVFEDYLYATNSDNYNIVRINRFNGTDIHSLIKIENAWGIRIYQKRTQPTVRSHACEVDPYGMPGGCSHICLLSSSYKTRTCRCRTGFNLGSDGRSCKRPKNELFLFYGKGRPGIVRGMDLNTKIADEYMIPIENLVNPRALDFHAETNYIYFADTTSFLIGRQKIDGTERETILKDDLDNVEGIAVDWIGNNLYWTNDGHRKTINVARLEKASQSRKTLLEGEMSHPRGIVVDPVNGWMYWTDWEEDEIDDSVGRIEKAWMDGFNRQIFVTSKMLWPNGLTLDFHTNTLYWCDAYYDHIEKVFLNGTHRKIVYSGRELNHPFGLSHHGNYVFWTDYMNGSIFQLDLITSEVTLLRHERPPLFGLQIYDPRKQQGDNMCRVNNGGCSTLCLAIPGGRVCACADNQLLDENGTTCTFNPGEALPHICKAGEFRCKNRHCIQARWKCDGDDDCLDGSDEDSVNCFNHSCPDDQFKCQNNRCIPKRWLCDGANDCGSNEDESNQTCTARTCQVDQFSCGNGRCIPRAWLCDREDDCGDQTDEMASCEFPTCEPLTQFVCKSGRCISSKWHCDSDDDCGDGSDEVGCVHSCFDNQFRCSSGRCIPGHWACDGDNDCGDFSDEAQINCTKEEIHSPAGCNGNEFQCHPDGNCVPDLWRCDGEKDCEDGSDEKGCNGTIRLCDHKTKFSCWSTGRCINKAWVCDGDIDCEDQSDEDDCDSFLCGPPKHPCANDTSVCLQPEKLCNGKKDCPDGSDEGYLCDECSLNNGGCSNHCSVVPGRGIVCSCPEGLQLNKDNKTCEIVDYCSNHLKCSQVCEQHKHTVKCSCYEGWKLDVDGESCTSVDPFEAFIIFSIRHEIRRIDLHKRDYSLLVPGLRNTIALDFHFNQSLLYWTDVVEDRIYRGKLSESGGVSAIEVVVEHGLATPEGLTVDWIAGNIYWIDSNLDQIEVAKLDGSLRTTLIAGAMEHPRAIALDPRYGILFWTDWDANFPRIESASMSGAGRKTIYKDMKTGAWPNGLTVDHFEKRIVWTDARSDAIYSALYDGTNMIEIIRGHEYLSHPFAVSLYGSEVYWTDWRTNTLSKANKWTGQNVSVIQKTSAQPFDLQIYHPSRQPQAPNPCAANDGKGPCSHMCLINHNRSAACACPHLMKLSSDKKTCYEMKKFLLYARRSEIRGVDIDNPYFNFITAFTVPDIDDVTVIDFDASEERLYWTDIKTQTIKRAFINGTGLETVISRDIQSIRGLAVDWVSRNLYWISSEFDETQINVARLDGSLKTSIIHGIDKPQCLAAHPVRGKLYWTDGNTINMANMDGSNSKILFQNQKEPVGLSIDYVENKLYWISSGNGTINRCNLDGGNLEVIESMKEELTKATALTIMDKKLWWADQNLAQLGTCSKRDGRNPTILRNKTSGVVHMKVYDKEAQQGSNSCQLNNGGCSQLCLPTSETTRTCMCTVGYYLQKNRMSCQGIESFLMYSVHEGIRGIPLEPSDKMDALMPISGTSFAVGIDFHAENDTIYWTDMGFNKISRAKRDQTWKEDIITNGLGRVEGIAVDWIAGNIYWTDHGFNLIEVARLNGSFRYVIISQGLDQPRSIAVHPEKGLLFWTEWGQMPCIGKARLDGSEKVVLVSMGIAWPNGISIDYEENKLYWCDARTDKIERIDLETGGNREMVLSGSNVDMFSVAVFGAYIYWSDRAHANGSVRRGHKNDATETITMRTGLGVNLKEVKIFNRVREKGTNVCARDNGGCKQLCLYRGNSRRTCACAHGYLAEDGVTCLRHEGYLLYSGRTILKSIHLSDETNLNSPIRPYENPRYFKNVIALAFDYNQRRKGTNRIFYSDAHFGNIQLIKDNWEDRQVIVENVGSVEGLAYHRAWDTLYWTSSTTSSITRHTVDQTRPGAFDREAVITMSEDDHPHVLALDECQNLMFWTNWNEQHPSIMRSTLTGKNAQVVVSTDILTPNGLTIDYRAEKLYFSDGSLGKIERCEYDGSQRHVIVKSGPGTFLSLAVYDNYIFWSDWGRRAILRSNKYTGGDTKILRSDIPHQPMGIIAVANDTNSCELSPCALLNGGCHDLCLLTPNGRVNCSCRGDRILLEDNRCVTKNSSCNAYSEFECGNGECIDYQLTCDGIPHCKDKSDEKLLYCENRSCRRGFKPCYNRRCIPHGKLCDGENDCGDNSDELDCKVSTCATVEFRCADGTCIPRSARCNQNIDCADASDEKNCNNTDCTHFYKLGVKTTGFIRCNSTSLCVLPTWICDGSNDCGDYSDELKCPVQNKHKCEENYFSCPSGRCILNTWICDGQKDCEDGRDEFHCDSSCSWNQFACSAQKCISKHWICDGEDDCGDGLDESDSICGAITCAADMFSCQGSRACVPRHWLCDGERDCPDGSDELSTAGCAPNNTCDENAFMCHNKVCIPKQFVCDHDDDCGDGSDESPQCGYRQCGTEEFSCADGRCLLNTQWQCDGDFDCPDHSDEAPLNPKCKSAEQSCNSSFFMCKNGRCIPSGGLCDNKDDCGDGSDERNCHINECLSKKVSGCSQDCQDLPVSYKCKCWPGFQLKDDGKTCVDIDECSSGFPCSQQCINTYGTYKCLCTDGYEIQPDNPNGCKSLSDEEPFLILADHHEIRKISTDGSNYTLLKQGLNNVIAIDFDYREEFIYWIDSSRPNGSRINRMCLNGSDIKVVHNTAVPNALAVDWIGKNLYWSDTEKRIIEVSKLNGLYPTILVSKRLKFPRDLSLDPQAGYLYWIDCCEYPHIGRVGMDGTNQSVVIETKISRPMALTIDYVNRRLYWADENHIEFSNMDGSHRHKVPNQDIPGVIALTLFEDYIYWTDGKTKSLSRAHKTSGADRLSLIYSWHAITDIQVYHSYRQPDVSKHLCMINNGGCSHLCLLAPGKTHTCACPTNFYLAADNRTCLSNCTASQFRCKTDKCIPFWWKCDTVDDCGDGSDEPDDCPEFRCQPGRFQCGTGLCALPAFICDGENDCGDNSDELNCDTHVCLSGQFKCTKNQKCIPVNLRCNGQDDCGDEEDERDCPENSCSPDYFQCKTTKHCISKLWVCDEDPDCADASDEANCDKKTCGPHEFQCKNNNCIPDHWRCDSQNDCSDNSDEENCKPQTCTLKDFLCANGDCVSSRFWCDGDFDCADGSDERNCETSCSKDQFRCSNGQCIPAKWKCDGHEDCKYGEDEKSCEPASPTCSSREYICASDGCISASLKCNGEYDCADGSDEMDCVTECKEDQFRCKNKAHCIPIRWLCDGIHDCVDGSDEENCERGGNICRADEFLCNNSLCKLHFWVCDGEDDCGDNSDEAPDMCVKFLCPSTRPHRCRNNRICLQSEQMCNGIDECGDNSDEDHCGGKLTYKARPCKKDEFACSNKKCIPMDLQCDRLDDCGDGSDEQGCRIAPTEYTCEDNVNPCGDDAYCNQIKTSVFCRCKPGFQRNMKNRQCEDLNECLVFGTCSHQCINVEGSYKCVCDQNFQERNNTCIAEGSEDQVLYIANDTDILGFIYPFNYSGDHQQISHIEHNSRITGMDVYYQRDMIIWSTQFNPGGIFYKRIHGREKRQANSGLICPEFKRPRDIAVDWVAGNIYWTDHSRMHWFSYYTTHWTSLRYSINVGQLNGPNCTRLLTNMAGEPYAIAVNPKRGMMYWTVVGDHSHIEEAAMDGTLRRILVQKNLQRPTGLAVDYFSERIYWADFELSIIGSVLYDGSNSVVSVSSKQGLLHPHRIDIFEDYIYGAGPKNGVFRVQKFGHGSVEYLALNIDKTKGVLISHRYKQLDLPNPCLDLACEFLCLLNPSGATCVCPEGKYLINGTCNDDSLLDDSCKLTCENGGRCILNEKGDLRCHCWPSYSGERCEVNHCSNYCQNGGTCVPSVLGRPTCSCALGFTGPNCGKTVCEDFCQNGGTCIVTAGNQPYCHCQPEYTGDRCQYYVCHHYCVNSESCTIGDDGSVECVCPTRYEETKM

SEQ ID NO: 824530 - protein, 4356 aa, Homo sapiens
MSEFLLALLTLSGLLPIARVLTVGADRDQQLCDPGEFLCHDHVTCVSQSWLCDGDPDCPDDSDESLDTCPEEVEIKCPLNHIACLGTNKCVHLSQLCNGVLDCPDGYDEGVHCQELLSNCQQLNCQYKCTMVRNSTRCYCEDGFEITEDGRSCKDQDECAVYGTCSQTCRNTHGSYTCSCVEGYLMQPDNRSCKAKIEPTDRPPILLIANFETIEVFYLNGSKMATLSSVNGNEIHTLDFIYNEDMICWIESRESSNQLKCIQITKAGGLTDEWTINILQSFHNVQQMAIDWLTRNLYFVDHVGDRIFVCNSNGSVCVTLIDLELHNPKAIAVDPIAGKLFFTDYGNVAKVERCDMDGMNRTRIIDSKTEQPAALALDLVNKLVYWVDLYLDYVGVVDYQGKNRHTVIQGRQVRHLYGITVFEDYLYATNSDNYNIVRINRFNGTDIHSLIKIENAWGIRIYQKRTQPTVRSHACEVDPYGMPGGCSHICLLSSSYKTRTCRCRTGFNLGSDGRSCKRPKNELFLFYGKGRPGIVRGMDLNTKIADEYMIPIENLVNPRALDFHAETNYIYFADTTSFLIGRQKIDGTERETILKDDLDNVEGIAVDWIGNNLYWTNDGHRKTINVARLEKASQSRKTLLEGEMSHPRGIVVDPVNGWMYWTDWEEDEIDDSVGRIEKAWMDGFNRQIFVTSKMLWPNGLTLDFHTNTLYWCDAYYDHIEKVFLNGTHRKIVYSGRELNHPFGLSHHGNYVFWTDYMNGSIFQLDLITSEVTLLRHERPPLFGLQIYDPRKQQGDNMCRVNNGGCSTLCLAIPGGRVCACADNQLLDENGTTCTFNPGEALPHICKAGEFRCKNRHCIQARWKCDGDDDCLDGSDEDSVNCFNHSCPDDQFKCQNNRCIPKRWLCDGANDCGSNEDESNQTCTARTCQVDQFSCGNGRCIPRAWLCDREDDCGDQTDEMASCEFPTCEPLTQFVCKSGRCISSKWHCDSDDDCGDGSDEVGCVHSCFDNQFRCSSGRCIPGHWACDGDNDCGDFSDEAQINCTKEEIHSPAGCNGNEFQCHPDGNCVPDLWRCDGEKDCEDGSDEKGCNGTIRLCDHKTKFSCWSTGRCINKAWVCDGDIDCEDQSDEDDCDSFLCGPPKHPCANDTSVCLQPEKLCNGKKDCPDGSDEGYLCDECSLNNGGCSNHCSVVPGRGIVCSCPEGLQLNKDNKTCEIVDYCSNHLKCSQVCEQHKHTVKCSCYEGWKLDVDGESCTSVDPFEAFIIFSIRHEIRRIDLHKRDYSLLVPGLRNTIALDFHFNQSLLYWTDVVEDRIYRGKLSESGGVSAIEVVVEHGLATPEGLTVDWIAGNIYWIDSNLDQIEVAKLDGSLRTTLIAGAMEHPRAIALDPRYGILFWTDWDANFPRIESASMSGAGRKTIYKDMKTGAWPNGLTVDHFEKRIVWTDARSDAIYSALYDGTNMIEIIRGHEYLSHPFAVSLYGSEVYWTDWRTNTLSKANKWTGQNVSVIQKTSAQPFDLQIYHPSRQPQAPNPCAANDGKGPCSHMCLINHNRSAACACPHLMKLSSDKKTCYEMKKFLLYARRSEIRGVDIDNPYFNFITAFTVPDIDDVTVIDFDASEERLYWTDIKTQTIKRAFINGTGLETVISRDIQSIRGLAVDWVSRNLYWISSEFDETQINVARLDGSLKTSIIHGIDKPQCLAAHPVRGKLYWTDGNTINMANMDGSNSKILFQNQKEPVGLSIDYVENKLYWISSGNGTINRCNLDGGNLEVIESMKEELTKATALTIMDKKLWWADQNLAQLGTCSKRDGRNPTILRNKTSGVVHMKVYDKEAQQGSNSCQLNNGGCSQLCLPTSETTRTCMCTVGYYLQKNRMSCQGIESFLMYSVHEGIRGIPLEPSDKMDALMPISGTSFAVGIDFHAENDTIYWTDMGFNKISRAKRDQTWKEDIITNGLGRVEGIAVDWIAGNIYWTDHGFNLIEVARLNGSFRYVIISQGLDQPRSIAVHPEKGLLFWTEWGQMPCIGKARLDGSEKVVLVSMGIAWPNGISIDYEENKLYWCDARTDKIERIDLETGGNREMVLSGSNVDMFSVAVFGAYIYWSDRAHANGSVRRGHKNDATETITMRTGLGVNLKEVKIFNRVREKGTNVCARDNGGCKQLCLYRGNSRRTCACAHGYLAEDGVTCLRHEGYLLYSGRTILKSIHLSDETNLNSPIRPYENPRYFKNVIALAFDYNQRRKGTNRIFYSDAHFGNIQLIKDNWEDRQVIVENVGSVEGLAYHRAWDTLYWTSSTTSSITRHTVDQTRPGAFDREAVITMSEDDHPHVLALDECQNLMFWTNWNEQHPSIMRSTLTGKNAQVVVSTDILTPNGLTIDYRAEKLYFSDGSLGKIERCEYDGSQRHVIVKSGPGTFLSLAVYDNYIFWSDWGRRAILRSNKYTGGDTKILRSDIPHQPMGIIAVANDTNSCELSPCALLNGGCHDLCLLTPNGRVNCSCRGDRILLEDNRCVTKNSSCNAYSEFECGNGECIDYQLTCDGIPHCKDKSDEKLLYCENRSCRRGFKPCYNRRCIPHGKLCDGENDCGDNSDELDCKVSTCATVEFRCADGTCIPRSARCNQNIDCADASDEKNCNNTDCTHFYKLGVKTTGFIRCNSTSLCVLPTWICDGSNDCGDYSDELKCPVQNKHKCEENYFSCPSGRCILNTWICDGQKDCEDGRDEFHCDSSCSWNQFACSAQKCISKHWICDGEDDCGDGLDESDSICGAITCAADMFSCQGSRACVPRHWLCDGERDCPDGSDELSTAGCAPNNTCDENAFMCHNKVCIPKQFVCDHDDDCGDGSDESPQCGYRQCGTEEFSCADGRCLLNTQWQCDGDFDCPDHSDEAPLNPKCKSAEQSCNSSFFMCKNGRCIPSGGLCDNKDDCGDGSDERNCHINECLSKKVSGCSQDCQDLPVSYKCKCWPGFQLKDDGKTCVDIDECSSGFPCSQQCINTYGTYKCLCTDGYEIQPDNPNGCKSLSDEEPFLILADHHEIRKISTDGSNYTLLKQGLNNVIAIDFDYREEFIYWIDSSRPNGSRINRMCLNGSDIKVVHNTAVPNALAVDWIGKNLYWSDTEKRIIEVSKLNGLYPTILVSKRLKFPRDLSLDPQAGYLYWIDCCEYPHIGRVGMDGTNQSVVIETKISRPMALTIDYVNRRLYWADENHIEFSNMDGSHRHKVPNQDIPGVIALTLFEDYIYWTDGKTKSLSRAHKTSGADRLSLIYSWHAITDIQVYHSYRQPDVSKHLCMINNGGCSHLCLLAPGKTHTCACPTNFYLAADNRTCLSNCTASQFRCKTDKCIPFWWKCDTVDDCGDGSDEPDDCPEFRCQPGRFQCGTGLCALPAFICDGENDCGDNSDELNCDTHVCLSGQFKCTKNQKCIPVNLRCNGQDDCGDEEDERDCPENSCSPDYFQCKTTKHCISKLWVCDEDPDCADASDEANCDKKTCGPHEFQCKNNNCIPDHWRCDSQNDCSDNSDEENCKPQTCTLKDFLCANGDCVSSRFWCDGDFDCADGSDERNCETSCSKDQFRCSNGQCIPAKWKCDGHEDCKYGEDEKSCEPASPTCSSREYICASDGCISASLKCNGEYDCADGSDEMDCVTECKEDQFRCKNKAHCIPIRWLCDGIHDCVDGSDEENCERGGNICRADEFLCNNSLCKLHFWVCDGEDDCGDNSDEAPDMCVKFLCPSTRPHRCRNNRICLQSEQMCNGIDECGDNSDEDHCGGKLTYKARPCKKDEFACSNKKCIPMDLQCDRLDDCGDGSDEQGCRIAPTEYTCEDNVNPCGDDAYCNQIKTSVFCRCKPGFQRNMKNRQCEDLNECLVFGTCSHQCINVEGSYKCVCDQNFQERNNTCIAEGSEDQVLYIANDTDILGFIYPFNYSGDHQQISHIEHNSRITGMDVYYQRDMIIWSTQFNPGGIFYKRIHGREKRQANSGLICPEFKRPRDIAVDWVAGNIYWTDHSRMHWFSYYTTHWTSLRYSINVGQLNGPNCTRLLTNMAGEPYAIAVNPKRGMMYWTVVGDHSHIEEAAMDGTLRRILVQKNLQRPTGLAVDYFSERIYWADFELSIIGSVLYDGSNSVVSVSSKQGLLHPHRIDIFEDYIYGAGPKNGVFRVQKFGHGSVEYLALNIDKTKGVLISHRYKQLDLPNPCLDLACEFLCLLNPSGATCVCPEGKYLINGTCNDDSLLDDSCKLTCENGGRCILNEKGDLRCHCWPSYSGERCEVNHCSNYCQNGGTCVPSVLGRPTCSCALGFTGPNCGKTVCEDFCQNGGTCIVTAGNQPYCHCQPEYTGDRCQYYVCHHYCVNSESCTIGDDGSVECVCPTRYEGPKC

SEQ ID NO: 824531 - protein, 4356 aa, Homo sapiens; identical to SEQ ID NO: 824529

SEQ ID NO: 824532 - protein, 439 aa, Homo sapiens
MFSKLAHLQRFAVLSRGVHSSVASATSVATKKTVQGPPTSDDIFEREYKYGAHNYHPLPVALERGKGIYLWDVEGRKYFDFLSSYSAVNQGHCHPKIVNALKSQVDKLTLTSRAFYNNVLGEYEEYITKLFNYHKVLPMNTGVEAGETACKLARKWGYTVKGIQKYKAKIVFAAGNFWGRTLSAISSSTDPTSYDGFGPFMPGFDIIPYNDLPALERALQDPNVAAFMVEPIQGEAGVVVPDPGYLMGVRELCTRHQVLFIADEIQTGLARTGRWLAVDYENVRPDIVLLGKALSGGLYPVSAVLCDDDIMLTIKPGEHGSTYGGNPLGCRVAIAALEVLEEENLAENADKLGIILRNELMKLPSDVVTAVRGKGLLNAIVIKETKDWDAWKVCLRLRDNGLLAKPTHGDIIRFAPPLVIKEDELRESIEIINKTILSF

SEQ ID NO: 824533 - protein, 439 aa, Homo sapiens; identical to SEQ ID NO: 824532

SEQ ID NO: 824534 - protein, 405 aa, Homo sapiens
MFSKLAHLQRFAVLSRGVHSSVASATSVATKKTVQGPPTSDDIFEREYKYGAHNYHPLPVALERGKGIYLWDVEGRKYFDFLSSYSAVNQGHCHPKIVNALKSQVDKLTLTSRAFYNNVLGEYEEYITKLFNYHKVLPMNTGVEAGETACKLARKWGYTVKGIQKYKAKIVFAAGNFWGRTLSAISSSTDPTSYDGFGPFMPGFDIIPYNDLPALERALQDPNVAAFMVEPIQGEAGVVVPDPGYLMGVRELCTRHQVLFIADEIQTGLARTGRWLAVDYENVRPDIVLLGKALSGGLYPVSAVLCDDDIMLTIKPGEHGSTYGGNPLGCRVAIAALEVLEEENLAENADKLGIILRNELMKLPSDVVTAVRGIGMLGRCVYDFEIMDFWPSQPMATLSGLRLRW

SEQ ID NO: 824535 - protein, 439 aa, Homo sapiens; identical to SEQ ID NO: 824532

SEQ ID NO: 824536 - protein, 439 aa, Homo sapiens; identical to SEQ ID NO: 824532

SEQ ID NO: 824537 - protein, 439 aa, Homo sapiens; identical to SEQ ID NO: 824532

SEQ ID NO: 824538 - protein, 439 aa, Homo sapiens; identical to SEQ ID NO: 824532

SEQ ID NO: 824539 - protein, 421 aa, Homo sapiens
MFSKLAHLQRFAVLSRGVHSSVASATSVATKKTVQGPPTSDDIFEREYKYGAHNYHPLPVALERGKGIYLWDVEGRPKIVNALKSQVDKLTLTSRAFYNNVLGEYEEYITKLFNYHKVLPMNTGVEAGETACKLARKWGYTVKGIQKYKAKIVFAAGNFWGRTLSAISSSTDPTSYDGFGPFMPGFDIIPYNDLPALERALQDPNVAAFMVEPIQGEAGVVVPDPGYLMGVRELCTRHQVLFIADEIQTGLARTGRWLAVDYENVRPDIVLLGKALSGGLYPVSAVLCDDDIMLTIKPGEHGSTYGGNPLGCRVAIAALEVLEEENLAENADKLGIILRNELMKLPSDVVTAVRGKGLLNAIVIKETKDWDAWKVCLRLRDNGLLAKPTHGDIIRFAPPLVIKEDELRESIEIINKTILSF

SEQ ID NO: 824540 - protein, 437 aa, Homo sapiens
KARPGGPAAPASQPGRARSRAHLRGSAHRGAQNVQALHLDDIRPGSLYGAHNYHPLPVALERGKGIYLWDVEGRKYFDFLSSYSAVNQGHCHPKIVNALKSQVDKLTLTSRAFYNNVLGEYEEYITKLFNYHKVLPMNTGVEAGETACKLARKWGYTVKGIQKYKAKIVFAAGNFWGRTLSAISSSTDPTSYDGFGPFMPGFDIIPYNDLPALERALQDPNVAAFMVEPIQGEAGVVVPDPGYLMGVRELCTRHQVLFIADEIQTGLARTGRWLAVDYENVRPDIVLLGKALSGGLYPVSAVLCDDDIMLTIKPGEHGSTYGGNPLGCRVAIAALEVLEEENLAENADKLGIILRNELMKLPSDVVTAVRGKGLLNAIVIKETKDWDAWKVCLRLRDNGLLAKPTHGDIIRFAPPLVIKEDELRESIEIINKTILSF

SEQ ID NO: 824541 - protein, 239 aa, Homo sapiens
MPGFDIIPYNDLPALERALQDPNVAAFMVEPIQGEAGVVVPDPGYLMGVRELCTRHQVLFIADEIQTGLARTGRWLAVDYENVRPDIVLLGKALSGGLYPVSAVLCDDDIMLTIKPGEHGSTYGGNPLGCRVAIAALEVLEEENLAENADKLGIILRNELMKLPSDVVTAVRGKGLLNAIVIKETKDWDAWKVCLRLRDNGLLAKPTHGDIIRFAPPLVIKEDELRESIEIINKTILSF

SEQ ID NO: 824542 - protein, 180 aa, Homo sapiens
MFSKLAHLQRFAVLSRGVHSSVASATSVATKKTVQGPPTSDDIFEREYKYGAHNYHPLPVALERGKGIYLWDVEGRKYFDFLSSYSAVNQGHCHPKIVNALKSQVDKLTLTSRAFYNNVLGEYEEYITKLFNYHKVLPMNTGVEAGETACKLARKWGYTVKGIQKYKAKIVFADCVQSLS

SEQ ID NO: 824543 - protein, 439 aa, Homo sapiens; identical to SEQ ID NO: 824532

SEQ ID NO: 824544 - protein, 439 aa, Homo sapiens; identical to SEQ ID NO: 824532

SEQ ID NO: 824545 - protein, 439 aa, Homo sapiens; identical to SEQ ID NO: 824532

SEQ ID NO: 824546 - protein, 438 aa, Homo sapiens
MFSKLAHLQRFAVLSRGVHSSVASATSVATKKTVQGPPTSDDIFEREYKYGAHNYHPLPVALERGKGIYLWDVEGRKYFDFLSSYSAVNQGHCHPKIVNALKSQVDKLTLTSRAFYNNVLGEYEEYITKLFNYHKVLPMNTGVEAGETACKLARKWGYTVKGIQKYKAKIVFAAGNFWGRTLSAISSSTDPTSYDGFGPFMPGFDIIPYNDLPALERALQDPNVAAFMVEPIQGEAGVVVPDPGYLMGVRELCTRHQVLFIADEIQTGLARTGRWLAVDYENVRPDIVLLGKALSGGLYPVSAVLCDDDIMLTIKPGEHGSTYGGNPLGCRVAIAALEVLEEENLAENADKLGIILRNELMKLPSDVVTAVRGKGLLNAIVIKETKDWDAWKVCLRLRDNGLLAKPTHGDIIRFAPPLVIKEDELRESIETSWRQVVL

SEQ ID NO: 824547 - protein, 439 aa, Homo sapiens; identical to SEQ ID NO: 824532

SEQ ID NO: 824548 - protein, 439 aa, Homo sapiens; identical to SEQ ID NO: 824532

SEQ ID NO: 824549 - protein, 301 aa, Homo sapiens
MNTGVEAGETACKLARKWGYTVKGIQKYKAKIVFAAGNFWGRTLSAISSSTDPTSYDGFGPFMPGFDIIPYNDLPALERALQDPNVAAFMVEPIQGEAGVVVPDPGYLMGVRELCTRHQVLFIADEIQTGLARTGRWLAVDYENVRPDIVLLGKALSGGLYPVSAVLCDDDIMLTIKPGEHGSTYGGNPLGCRVAIAALEVLEEENLAENADKLGIILRNELMKLPSDVVTAVRGKGLLNAIVIKETKDWDAWKVCLRLRDNGLLAKPTHGDIIRFAPPLVIKEDELRESIEIINKTILSF

SEQ ID NO: 824550 - protein, 129 aa, Homo sapiens [sequence omitted]

SEQ ID NO: 824551 - protein, 158 aa, Homo sapiens
MAAQGVGPGPGSAAPPGLEAARQKLALRRKKVLSTEEMELYELAQAAGGGIDPDVFKILVDLLKLNVAPLAVFQMLKSMCAGQRLASEPQDPAAVSLPTSSVPETRGRDKGSAALGGVLALAERSNHEGSSQRMPRQPSATRLPKGGGPGKSPTQGST

SEQ ID NO: 824552 - protein, 158 aa, Homo sapiens; identical to SEQ ID NO: 824551

SEQ ID NO: 824553 - protein, 158 aa, Homo sapiens; identical to SEQ ID NO: 824551

SEQ ID NO: 824554 - protein, 213 aa, Homo sapiens
MAAQGVGPGPGSAAPPGLEAARQKLALRRKKVLSTEEMELYELAQAAGGGIDPDVFKILVDLLKLNVAPLAVFQMLKSMCAGQRLASEPQDPAAVSLPTSSVPETRGLSDNFEDKAAPQQDFTQQLRGPEKQHRMVWQEKEDMHKQLVEASETLKSQAKELKDAHQQQKLALQEFLELNELMAELYSQKQKVWDKEEEMEVAMQKADMMWQEI

SEQ ID NO: 824555 - protein, 158 aa, Homo sapiens; identical to SEQ ID NO: 824551

SEQ ID NO: 824556 - protein, 158 aa, Homo sapiens; identical to SEQ ID NO: 824551

SEQ ID NO: 824557 - protein, 274 aa, Homo sapiens
MAAQGVGPGPGSAAPPGLEAARQKLALRRKKVLSTEEMELYELAQAAGGGIDPDVFKLSGAGGGRMLARHPRPLLSGYARPAGREEPPLPPPPSLSGLQGGGRAGRRGLTGPASVPARILVDLLKLNVAPLAVFQMLKSMCAGQRLASEPQDPAAVSLPTSSVPETRGLSDNFEDKAAPQQDFTQQLRGPEKQHRMVWQEKEDMHKQLVEASETLKSQAKELKDAHQQQKLALQEFLELNELMAELYSQKQKVWDKEEEMEVAMQKADMMWQEI

SEQ ID NO: 824558 - protein, 103 aa, Homo sapiens
MWRTAATSWRRRRKARRLKQAKEEAQMEVEQYRREREHEFQSKQQAAMGSQGNLSAEVEQATRRQVQGMQSSQQRNRERVLAQLLGMVCDVRPQVHPNYRISA

SEQ ID NO: 824559 - protein, 252 aa, Homo sapiens
MAENDVDNELLDYEDDEVETAAGGDGAEAPAKKDVKGSYVSIHSSGFRDFLLKPELLRAIVDCGFEHPSEVQHECIPQAILGMDVLCQAKSGMGKTAVFVLATLQQLEPVTGQVSVLVMCHTRELAFQISKEYERFSKYMPNVKVAVFFGGLSIKKDEEVLKKNCPHIVVGTPGRILALARNKSLNLKHIKHFILDECDKMLEQLDMRRDVQEIFRMTPHEKQVMMFSATLSKEIRPVCRKFMQDANGDLRG

SEQ ID NO: 824560 - protein, 252 aa, Homo sapiens; identical to SEQ ID NO: 824559

SEQ ID NO: 824561 - protein, 252 aa, Homo sapiens; identical to SEQ ID NO: 824559

SEQ ID NO: 824562 - protein, 252 aa, Homo sapiens; identical to SEQ ID NO: 824559

SEQ ID NO: 824563 - protein, 290 aa, Homo sapiens
MAENDVDNELLDYEDDEVETAAGGDGAEAPAKKDVKGSYVSIHSSGFRDFLLKPELLRAIVDCGFEHPSEVQHECIPQAILGMDVLCQAKSGMGKTAVFVLATLQQLEPVTGQVSVLVMCHTRELAFQISKEYERFSKYMPNVKVAVFFGGLSIKKDEEVLKKNCPHIVVGTPGRILALARNKSLNLKHIKHFILDECDKMLEQLDMRRDVQEIFRMTPHEKQVMMFSATLSKEIRPVCRKFMQDVNTLLPSLPPLPARCLLPFLALFLRLPCHSSAKKAACAQLGVMTP

SEQ ID NO: 824564 - protein, 252 aa, Homo sapiens; identical to SEQ ID NO: 824559

SEQ ID NO: 824565 - protein, 290 aa, Homo sapiens; identical to SEQ ID NO: 824563

SEQ ID NO: 824566 - protein, 149 aa, Homo sapiens
MPMEIFVDDETKLTLHGLQQYYVKLKDNEKNRKLFDLLDVLEFNQVVIFVKSVQRCIALAQLLVEQNFPAIAIHRGMPQEERLSRYQQFKDFQRRILVATNLFGRGMDIERVNIAFNYDMPEDSDTYLHRVARAGRFGTQGLGYHICVR

SEQ ID NO: 824567 - protein, 252 aa, Homo sapiens; identical to SEQ ID NO: 824559

SEQ ID NO: 824568 - protein, 252 aa, Homo sapiens; identical to SEQ ID NO: 824559

SEQ ID NO: 824569 - protein, 252 aa, Homo sapiens; identical to SEQ ID NO: 824559

SEQ ID NO: 824570 - protein, 249 aa, Homo sapiens
MAENDVDNELLDYEDDEVETAAGGDGAEAPAKKDVKGSYVSIHSSGFRDFLLKPELLRAIVDCGFEHPSEVQHECIPQAILGMDVLCQAKSGMGKTAVFVLATLQQLEPVTGQVSVLVMCHTRELAFQISKEYERFSKYMPNVKVAVFFGGLSIKKDEEVLKKNCPHIVVGTPGRILALARNKSLNLKHIKHFILDECDKMLEQLDMRRDVQEIFRMTPHEKQVMMFSATLSKEIRPVCRKFMQDALSH

SEQ ID NO: 824571 - protein, 151 aa, Homo sapiens
MAENDVDNELLDYEDDEVETAAGGDGAEAPAKKDVKGSYVSIHSSGFRDFLLKPELLRAIVDCGFEHPSEVQHECIPQAILGMDVLCQAKSGMGKTAVFVLATLQQLEPVTGQVSVLVMCHTRELAFQISKEYERFSKYMPNVKVSQGKET

SEQ ID NO: 824572 - protein, 124 aa, Homo sapiens
SAITTEMASQSQGIQQLLQAEKRAAEKVADARKRKARRLKQAKEEAQMEVEQYRREREHEFQSKQQAAMGSQGNLSAEVEQATRRQVQGMQSSQQRNRERVLAQLLGMVCDVRPQVHPNYRISA

SEQ ID NO: 824573 - protein, 290 aa, Homo sapiens
MVSSAPLCSFCSLLPMGSSHIGGLSINERRCSASLGLVMAENDVDNELLDYEDDEVETAAGGDGAEAPAKKDVKGSYVSIHSSGFRDFLLKPELLRAIVDCGFEHPSEVQHECIPQAILGMDVLCQAKSGMGKTAVFVLATLQQLEPVTGQVSVLVMCHTRELAFQISKEYERFSKYMPNVKVAVFFGGLSIKKDEEVLKKNCPHIVVGTPGRILALARNKSLNLKHIKHFILDECDKMLEQLDMRRDVQEIFRMTPHEKQVMMFSATLSKEIRPVCRKFMQDANGDLRG

SEQ ID NO: 824574 - protein, 252 aa, Homo sapiens; identical to SEQ ID NO: 824559

SEQ ID NO: 824575 - protein, 290 aa, Homo sapiens; identical to SEQ ID NO: 824563

SEQ ID NO: 824576 - protein, 290 aa, Homo sapiens; identical to SEQ ID NO: 824563

SEQ ID NO: 824577 - protein, 149 aa, Homo sapiens; identical to SEQ ID NO: 824566

SEQ ID NO: 824578 - protein, 252 aa, Homo sapiens; identical to SEQ ID NO: 824559

SEQ ID NO: 824579 - protein, 252 aa, Homo sapiens; identical to SEQ ID NO: 824559

SEQ ID NO: 824580 - protein, 105 aa, Homo sapiens
SAITTEMASQSQGIQQLLQAEKRAAEKVADARKRKARRLKQAKEEAQMEVEQYRREREHEFQSKQQATGIFQRQAWSARICITAEGPVSGPLRLRSCSQEGGRLE

SEQ ID NO: 824581 - protein, 311 aa, Homo sapiens
MAENDVDNELLDYEDDEVETAAGGDGAEAPAKKDVKGSYVSIHSSGFRDFLLKPELLRAIVDCGFEHPSEVQHECIPQAILGMDVLCQAKSGMGKTAVFVLATLQQLEPVTGQVSVLVMCHTRELAFQISKEYERFSKYMPNVKCCNKRVWSIKNAMNEGACRKNGTRISGRGEDSKGRKSVSPRSSETRSRQAAKNNKTRKRPDLCHRTAEPALDQWDEGMCTKGTIKSDKRTTPDRRERRGHGKCTRCKTRGKQRKQAVKDGRARDHWQGTANERTLSGAVTGEAKTASQHTGRRRQRRGRHSERHTKR

SEQ ID NO: 824582 - protein, 275 aa, Homo sapiens
MLNLLLLALPVLASRAYAAPAPGQALQRVGIVGGQEAPRSKWPWQVSLRVHGPYWMHFCGGSLIHPQWVLTAAHCVGPDVKDLAALRVQLREQHLYYQDQLLPVSRIIVHPQFYTAQIGADIALLELEEPVNVSSHVHTVTLPPASETFPPGMPCWVTGWGDVDNDERLPPPFPLKQVKVPIMENHICDAKYHLGAYTGDDVRIVRDDMLCAGNTRRDSCQGDSGGPLVCKVNGTWLQAGVVSWGEGCAQPNRPGIYTRVTYYLDWIHHYVPKKP

SEQ ID NO: 824583 - protein, 317 aa, Homo sapiens
MLNLLLLALPVLASRAYAAPAPGQALQRVGIVGGQEAPRSKWPWQVSLRVHGPYWMHFCGGSLIHPQWVLTAAHCVGPDVKDLAALRVQLREQHLYYQDQLLPVSRIIVHPQFYTAQIGADIALLELEEPVNVSSHVHTVTLPPASETFPPGMPCWVTGWGDVDNDGGSGDSGGGARVLATAQPLGSLWAPGGGCPAPPEAAPSSPPAERLPPPFPLKQVKVPIMENHICDAKYHLGAYTGDDVRIVRDDMLCAGNTRRDSCQGDSGGPLVCKVNGTWLQAGVVSWGEGCAQPNRPGIYTRVTYYLDWIHHYVPKKP

SEQ ID NO: 824584 - protein, 275 aa, Homo sapiens; identical to SEQ ID NO: 824582

SEQ ID NO: 824585 - protein, 211 aa, Homo sapiens
MLLLAPQMLNLLLLALPVLASRAYAAPAPGQALQRVGIVGGQEAPRSKWPWQVSLRVRDRYWMHFCGGSLIHPQWVLTAAHCVGPDVKDLAALRVQLREQHLYYQDQLLPVSRIIVHPQFYTAQIGADIALLELEEPVNVSSHVHTVTLPPASETFPPGMPCWVTGWGDVDNDERLPPPFPLKQVKVPIMENNICDAERDISGDLRVDQQN

SEQ ID NO: 824586 - protein, 275 aa, Homo sapiens; identical to SEQ ID NO: 824582

SEQ ID NO: 824587 - protein, 266 aa, Homo sapiens
MLNLLLLALPVLASRAYAAPAPGQALQRVGIVGGQEAPRSKWPWQVSLRVHGPYWMHFCGGSLIHPQWVLTAAHCVGPVQLREQHLYYQDQLLPVSRIIVHPQFYTAQIGADIALLELEEPVNVSSHVHTVTLPPASETFPPGMPCWVTGWGDVDNDERLPPPFPLKQVKVPIMENHICDAKYHLGAYTGDDVRIVRDDMLCAGNTRRDSCQGDSGGPLVCKVNGTWLQAGVVSWGEGCAQPNRPGIYTRVTYYLDWIHHYVPKKP

SEQ ID NO: 824588 - protein, 266 aa, Homo sapiens; identical to SEQ ID NO: 824587

SEQ ID NO: 824589 - protein, 523 aa, Homo sapiens
MANVGLQFQASAGDSDPQSRPLLLLGQLHHLHRVPWSHVRGKLQPRVTEELWQAALSTLNPNPTDSCPLYLNYATVAALPCRVSRHNSPSAAHFITRLVRTCLPPGAHRCIVMVCEQPEVFASACALARAFPLFTHRSGASRRLEKKTVTVEFFLVGQDNGPVEVSTLQCLANATDGVRLAARIVDTPCNEMNTDTFLEEINKVGKELGIIPTIIRDEELKTRGFGGIYGVGKAALHPPALAVLSHTPDGATQTIAWVGKGIVYDTGGLSIKGKTTMPGMKRDCGGAAAVLGAFRAAIKQGFKDNLHAVFCLAENSVGPNATRPDDIHLLYSGKTVEINNTDAEGRLVLADGVSYACKDLGADIILDMATLTGAQGIATGKYHAAVLTNSAEWEAACVKAGRKCGDLVHPLVYCPELHFSEFTSAVADMKNSVADRDNSPSSCAGLFIASHIGFDWPGVWVHLDIAAPVHAGERATGFGVALLLALFGRASEDPLLNLVSPLGCEVDVEEGDLGRDSKRRRLV

SEQ ID NO: 824590 - protein, 657 aa, Homo sapiens
RAQPPGQSSPAEAQPQAPSPVRRGGPPVSPALRPARPRHLRTAGGETWPLPGPRVGPAWRQALASRSSHGSVPSCLSLGTPGPCPLSGGSRLSPIRVLEAKQPPAWPFQAWWLHPTRGMRASLETVSSAERRHISLRMGKRWPGAAQCPSRTAGVVVAVAAGQGLLARGRCLKPLCLVFSLLIYLWQAALSTLNPNPTDSCPLYLNYATVAALPCRVSRHNSPSAAHFITRLVRTCLPPGAHRCIVMVCEQPEVFASACALARAFPLFTHRSGASRRLEKKTVTVEFFLVGQDNGPVEVSTLQCLANATDGVRLAARIVDTPCNEMNTDTFLEEINKVGKELGIIPTIIRDEELKTRGFGGIYGVGKAALHPPALAVLSHTPDGATQTIAWVGKGIVYDTGGLSIKGKTTMPGMKRDCGGAAAVLGAFRAAIKQGFKDNLHAVFCLAENSVGPNATRPDDIHLLYSGKTVEINNTDAEGRLVLADGVSYACKDLGADIILDMATLTGAQGIATGKYHAAVLTNSAEWEAACVKAGRKCGDLVHPLVYCPELHFSEFTSAVADMKNSVADRDNSPSSCAGLFIASHIGFDWPGVWVHLDIAAPVHAGERATGFGVALLLALFGRASEDPLLNLVSPLGCEVDVEEGDLGRDSKRRRLV

SEQ ID NO: 824591 - protein, 274 aa, Homo sapiens
MANVGLQFQASAGDSDPQSRPLLLLGQLHHLHRVPWSHVRGKLQPRVTEELWQAALSTLNPNPTDSCPLYLNYATVAALPCRVSRHNSPSAAHFITRLVRTCLPPGAHRCIVMVCEQPEVFASACALARAFPLFTHRSGASRRLEKKTVTVEFFLVGQDNGPVEVSTLQCLANATDGVRLAARIVDTPCNEMNTDTFLEEINKVGKELGIIPTIIRDEELKTRGFGGIYGVGKAALHPPALAVLSHTPDGATQTIAWVGKGIVYDTGGLSIKGK

SEQ ID NO: 824592 - protein, 176 aa, Homo sapiens
VCLPVPLLPWVFLSCRPVHTLPGFLPAQGIATGKYHAAVLTNSAEWEAACVKAGRKCGDLVHPLVYCPELHFSEFTSAVADMKNSVADRDNSPSSCAGLFIASHIGFDWPGVWVHLDIAAPVHAGERATGFGVALLLALFGRASEDPLLNLVSPLGCEVDVEEGDLGRDSKRRRLV

SEQ ID NO: 824593 - protein, 388 aa, Homo sapiens
MANVGLQFQASAGDSDPQSRPLLLLGQLHHLHRVPWSHVRGKLQPRVTEELWQAALSTLNPNPTDSCPLYLNYATVAALPCRVSRHNSPSAAHFITRLVRTCLPPGAHRCIVMVCEQPEVFASACALARAFPLFTHRSGASRRLEKKTVTVEFFLVGQDNGPVEVSTLQCLANATDGVRLAARIVDTPCNEMNTDTFLEEINKVGKELGIIPTIIRDEELKTRGFGGIYGVGKAALHPPALAVLSHTPDGATQTIAWVGKGIVYDTGGLSIKGKTTMPGMKRDCGGAAAVLGAFRAAIKQGFKDNLHAVFCLAENSVGPNATRPDDIHLLYSGKYVWPSHSFLPTVGTRDPSRPAMQGRPRAPGPGTAREPSTFIAPSPSARRTELAI

SEQ ID NO: 824594 - protein, 41 aa, Homo sapiens
DPGGEGSPGTPPVLQPHAQSLCPALCLQGERATGFGVALLL

SEQ ID NO: 824595 - protein, 523 aa, Homo sapiens; identical to SEQ ID NO: 824589

SEQ ID NO: 824596 - protein, 324 aa, Homo sapiens
MANVGLQFQASAGDSDPQSRPLLLLGQLHHLHRVPWSHVRGKLQPRVTEELWQAALSTLNPNPTDSCPLYLNYATVAALPCRVSRHNSPSAAHFITRLVRTCLPPGAHRCIVMVCEQPEVFASACALARAFPLFTHRSGASRRLEKKTVTVEFFLVGQDNGPVEVSTLQCLANATDGVRLAARIVDTPCNEMNTDTFLEEINKVGKELGIIPTIIRDEELKTRGFGGIYGVGKAALHPPALAVLSHTPDGATQTIAWVGKGIVYDTGGLSIKGKMSAEQKHFGHSNSKCSHGMREVKERRFRVFVLTIPHSRVLFWVLCFDTGR

SEQ ID NO: 824597 - protein, 324 aa, Homo sapiens; identical to SEQ ID NO: 824596

SEQ ID NO: 824598 - protein, 373 aa, Homo sapiens
MANVGLQFQASAGDSDPQSRPLLLLGQLHHLHRVPWSHVRGKLQPRVTEELWQAALSTLNPNPTDSCPLYLNYATVAALPCRVSRHNSPSAAHFITRLVRTCLPPGAHRCIVMVCEQPEVFASACALARAFPLFTHRSGASRRLEKKTVTVEFFLVGQDNGPVEVSTLQCLANATDGVRLAARIVDTPCNEMNTDTFLEEINKVGKELGIIPTIIRDEELKTRGFGGIYGVGKAALHPPALAVLSHTPDGATQTIAWVGKGIVYDTGGLSIKGKTTMPGMKRDCGGAAAVLGAFRAAIKQGFKDNLHAVFCLAENSVGPNATRPDDIHLLYSGKTVEINNTDAEGRLVRAPAWLTARLLLQPGLPAHPASPAL

SEQ ID NO: 824599 - protein, 562 aa, Homo sapiens
CWHEGESNPEQGPIRAWTGGRMFSWMGRQAGGRERAGGADAVQTVTGGLRSLYLRKVLPLEEAYRFHEFHSPALEDADFENKPMILLVGQYSTGKTTFIRYLLEQDFPGMRIGPEPTTDSFIAVMYGETEGSTPGNALVVDPKKPFRKLSRFGNAFLNRFMCSQLPNQVLKSISVIDSPGILSGEKQRISRGYDFCQVLQWFAERVDRIILLFDAHKLDISDEFSEAIKAFRGQDDKIRVVLNKADQVDTQQLMRVYGALMWSLGKVINTPEVLRVYIGSFWAQPLQNTDNRRLFEAEAQDLFRDIQSLPQKAAVRKLNDLIKRARLAKVHAYIISYLKKEMPSVFGKENKKRELISRLPEIYIQLQREYQISAGDFPEVKAMQEQLENYDFTKFHSLKPKLIEAVDNMLSNKISPLMNLISQEETSTPTQLVQGGAFDGTTEGPFNQGYGEGAKEGADEEEWVVAKDKPVYDELFYTLSPINGKISGVNAKKEMVTSKLPNSVLGKIWKLADCDCDGMLDEEEFALAKHLIKIKLDGYELPSSLPPHLVPPSHRKSLPKAD

SEQ ID NO: 824600 - protein, 562 aa, Homo sapiens; identical to SEQ ID NO: 824599

SEQ ID NO: 824601 - protein, 102 aa, Homo sapiens
  misc_feature (80)..(80): Xaa can be any naturally occurring amino acid
MCQNPGPFLPPYCRLVPLLPRKVLISPGAFNICCGLVSHCCSPPPELWGLPLPEGPPDARLFPPARRRCGLRRGPRGLGXFCNSPSPLLGAALVCPKNRGYP

SEQ ID NO: 824602 - protein, 562 aa, Homo sapiens; identical to SEQ ID NO: 824599

SEQ ID NO: 824603 - protein, 562 aa, Homo sapiens; identical to SEQ ID NO: 824599

SEQ ID NO: 824604 - protein, 562 aa, Homo sapiens; identical to SEQ ID NO: 824599

SEQ ID NO: 824605 - protein, 128 aa, Homo sapiens
CWHEGESNPEQGPIRAWTGGRMFSWMGRQAGGRERAGGADAVQTVTGGLRSLYLRKVLPLEEAYRFHEFHSPALEDADFENKPLLHSVAHQWQDIRCQRQEGDGDLQAAQQRPGQDLEAGRLRLRRHA

SEQ ID NO: 824606 - protein, 562 aa, Homo sapiens; identical to SEQ ID NO: 824599

SEQ ID NO: 824607 - protein, 292 aa, Homo sapiens
CWHEGESNPEQGPIRAWTGGRMFSWMGRQAGGRERAGGADAVQTVRKLNDLIKRARLAKVHAYIISYLKKEMPSVFGKENKKRELISRLPEIYIQLQREYQISAGDFPEVKAMQEQLENYDFTKFHSLKPKLIEAVDNMLSNKISPLMNLISQEETSTPTQLVQGGAFDGTTEGPFNQGYGEGAKEGADEEEWVVAKDKPVYDELFYTLSPINGKISGVNAKKEMVTSKLPNSVLGKIWKLADCDCDGMLDEEEFALAKHLIKIKLDGYELPSSLPPHLVPPSHRKSLPKAD

SEQ ID NO: 824608 - protein, 562 aa, Homo sapiens; identical to SEQ ID NO: 824599

SEQ ID NO: 824609 - protein, 562 aa, Homo sapiens; identical to SEQ ID NO: 824599

SEQ ID NO: 824610 - protein, 450 aa, Homo sapiens
MPSIDYFIDSDCIDILDCADTPGNAYFLIGKTLPGKLSRFGNAFLNRFMCSQLPNQVLKSISVIDSPGILSGEKQRISRGYDFCQVLQWFAERVDRIILLFDAHKLDISDEFSEAIKAFRGQDDKIRVVLNKADQVDTQQLMRVYGALMWSLGKVINTPEVLRVYIGSFWAQPLQNTDNRRLFEAEAQDLFRDIQSLPQKAAVRKLNDLIKRARLAKVHAYIISYLKKEMPSVFGKENKKRELISRLPEIYIQLQREYQISAGDFPEVKAMQEQLENYDFTKFHSLKPKLIEAVDNMLSNKISPLMNLISQEETSTPTQLVQGGAFDGTTEGPFNQGYGEGAKEGADEEEWVVAKDKPVYDELFYTLSPINGKISGVNAKKEMVTSKLPNSVLGKIWKLADCDCDGMLDEEEFALAKHLIKIKLDGYELPSSLPPHLVPPSHRKSLPKAD

SEQ ID NO: 824611 - protein, 236 aa, Homo sapiens
CWHEGESNPEQGPIRAWTGGRMFSWMGRQAGGRERAGGADAVQTVTGGLRSLYLRKVLPLEEAYRFHEFHSPALEDADFENKPMILLVGQYSTGKTTFIRYLLEQDFPGMRIGPEPTTDSFIAVMYGETEGSTPGNALVVDPKKPFRKLSRFGNAFLNRFMCSQLPNQVLKSISVIDSPGILSGEKQRISRGYDFCQVLQWFAERVDRIILLFDAHKLVSPPNLPSRGLTSKAIFG

SEQ ID NO: 824612 - protein, 493 aa, Homo sapiens
CWHEGESNPEQGPIRAWTGGRMFSWMGRQAGGRERAGGADAVQTVTGGLRSLYLRKVLPLEEAYRFHEFHSPALEDADFENKPMILLVGQYSTGKTTFIRYLLEQDFPGMRIGPEPTTDSFIAVMYGETEGSTPGNALVVDPKKPFRKLSRFGNAFLNRFMCSQLPNQVLKSISVIDSPGILSGEKQRISRGYDFCQVLQWFAERVDRIILLFDAHKLDISDEFSEAIKAFRGQDDKIRVVLNKADQVDTQQLMRVYGALMWSLGKVINTPEVLRVYIGSFWAQPLQNTDNRRLFEAEAQDLFRDIQSLPQKAAVRKLNDLIKRARLAKVHAYIISYLKKEMPSVFGKENKKRELISRLPEIYIQLQREYQISAGDFPEVKAMQEQLENYDFTKFHSLKPKLIEAVDNMLSNKISPLMNLISQEETSTPTQLVQGGAFDGTTEGPFNQGYGEGAKEGADEEEWVVAKDKPVYDELFYTLSPINGKISGVNAKG

SEQ ID NO: 824613 - protein, 760 aa, Homo sapiens
MAGQQFQYDDSGNTFFYFLTSFVGLIVIPATYYLWPRDQNAEQIRLKNIRKVYGRCMWYRLRLLKPQPNIIPTVKKIVLLAGWALFLFLAYKVSKTDREYQEYNPYEVLNLDPGATVAEIKKQYRLLSLKYHPDKGGDEVMFMRIAKAYAALTDEESRKNWEEFGNPDGPQATSFGIALPAWIVDQKNSILVLLVYGLAFMVILPVVVGSWWYRSIRYSGDQILIRTTQIYTYFVYKTRNMDMKRLIMVLAGASEFDPQYNKDATSRPTDNILIPQLIREIGSINLKKNEPPLTCPYSLKARVLLLSHLARMKIPETLEEDQQFMLKKCPALLQEMVNVICQLIVMARNREEREFRAPTLASLENCMKLSQMAVQGLQQFKSPLLQLPHIEEDNLRRVSNHKKYKIKTIQDLVSLKESDRHTLLHFLEDEKYEEVMAVLGSFPYVTMDIKSQVLDDEDSNNITVGSLVTVLVKLTRQTMAEVFEKEQSICAAEEQPAEDGQGETNKNRTKGGWQQKSKGPKKTAKSKKKKPLKKKPTPVLLPQSKQQKQKQANGVVGNEAAVKEDEEEVSDKGSDSEEEETNRDSQSEKDDGSDRDSDREQDEKQNKDDEAEWQELQQSIQRKERALLETKSKITHPVYSLYFPEEKQEWWWLYIADRKEQTLISMPYHVCTLKDTEEVELKFPAPGKPGNYQYTVFLRSDSYMGLDQIKPLKLEVHEAKPVPENHPQWDTAIEGDEDQEDSEGFEDSFEEEEEEEEDDD

SEQ ID NO: 824614 - protein, 89 aa, Homo sapiens
AGDGGGSGRGGGGVSVRVAWGRGGEAAAAVSKLRHSGWGVGSGSAERGRGGGGEKSEAEEGVPWPGSSSSTMTVGTPSSTSSPPSWGSS

SEQ ID NO: 824615 - protein, 89 aa, Homo sapiens; identical to SEQ ID NO: 824614

SEQ ID NO: 824616 - protein, 760 aa, Homo sapiens; identical to SEQ ID NO: 824613

SEQ ID NO: 824617 - protein, 760 aa, Homo sapiens; identical to SEQ ID NO: 824613

SEQ ID NO: 824618 - protein, 727 aa, Homo sapiens
MAGQQFQYDDSGNTFFYFLTSFVGLIVIPATYYLWPRDQNAEQIRLKNIRKVYGRCMWYRLRLLKPQPNIIPTVKKIVLLAGWALFLFLAYKVSKTDREYQEYNPYEVLNLDPGATVAEIKKQYRLLSLKYHPDKGGDEVMFMRIAKAYAALTDEESRKNWEEFGNPDGPQATSFGIALPAWIVDQKNSILVLLVYGLAFMVILPVVVGSWWYRSIRYSGDQILIRTTQIYTYFVYKTRNMDMKRLIMVLAGASEFDPQYNKDATSRPTDNILIPQLIREIGSINLKKNEPPLTCPYSLKARVLLLSHLARMKIPETLEEDQQFMLKKCPALLQEMVNVICQLIVMARNREEREFRAPTLASLENCMKLSQMAVQGLQQFKSPLLQLPHIEEDNLRRVSNHKKYKIKTIQDLVSLKESDRHTLLHFLEDEKYEEVMAVLGSFPYVTMDIKSQVLDDEDSNNITVGSLVTVLVKLTRQTMAEVFEKEQSICAAEEQPAEDGQGETNKNRTKGGWQQKSKGPKKTAKSKKKKPLKKKPTPVLLPQSKQQKQKQANGVVGNEAAVKEDEEEVSDKGSDSEEEETNRDSQSEKDDGSDRDSDREQDEKQNKDDEAEWQELQQSIQRKERALLETKSKITHPVYSLYFPEVELKFPAPGKPGNYQYTVFLRSDSYMGLDQIKPLKLEVHEAKPVPENHPQWDTAIEGDEDQEDSEGFEDSFEEEEEEEEDDD

SEQ ID NO: 824619 - protein, 689 aa, Homo sapiens
MAGQQFQYDDSGNTFFYFLTSFVGLIVIPATYYLWPRDQNAEQIRLKNIRKVYGRCMWYRLRLLKPQPNIIPTVKKIVLLAGWALFLFLAYKVSKTDREYQEYNPYEVLNLDPGATVAEIKKQYRLLSLKYHPDKGGDEVMFMRIAKAYAALTDEESRKNWEEFGNPDGPQATSFGIALPAWIVDQKNSILVLLVYGLAFMVILPVVVGSWWYRSIRYSGDQILIRTTQIYTYFVYKTRNMDMKRLIMVLAGASEFDPQYNKDATSRPTDNILIPQLIREIGSINLKKNEPPLTCPYSLKARVLLLSHLARMKIPETLEEDQQFMLKKCPALLQEMVNVICQLIVMARNREEREFRAPTLASLENCMKLSQMAVQGLQQFKSPLLQLPHIEEDNLRRVSNHKKYKIKTIQDLVSLKESDRHTLLHFLEDEKYEEVMAVLGSFPYVTMDIKSQVLDDEDSNNITVGSLVTVLVKLTRQTMAEVFEKEQSICAAEEQPAEDGQGETNKNRTKGGWQQKSKGPKKTAKSKKKKPLKKKPTPVLLPQSKQQKQKQANGVVGNEAAVKEDEEEVSDKGSDSEEEETNRDSQSEKDDGSDRDSDREQDEKQNKDDEAEWQELQQSIQRKERALLETKSKITHPVYSLYFPEEKQEWWWLYIADRKEQTLISMPYHVWKFMRLSLCQKITHSGIQQ

SEQ ID NO: 824620 - protein, 520 aa, Homo sapiens [sequence omitted]

SEQ ID NO: 824621 - protein, 127 aa, Homo sapiens
PLFFFFFFFCFQEKQEWWWLYIADRKEQTLISMPYHVCTLKDTEEVELKFPAPGKPGNYQYTVFLRSDSYMGLDQIKPLKLEVHEAKPVPENHPQWDTAIEGDEDQEDSEGFEDSFEEEEEEEEDDD

SEQ ID NO: 824622 - protein, 545 aa, Homo sapiens
MAGQQFQYDDSGNTFFYFLTSFVGLIVIPATYYLWPRDQNAEQIRLKNIRKVYGRCMWYRLRLLKPQPNIIPTVKKIVLLAGWALFLFLAYKVSKTDREYQEYNPYEVLNLDPGATVAEIKKQYRLLSLKYHPDKGGDEVMFMRIAKAYAALTDEESRKNWEEFGNPDGPQATSFGIALPAWIVDQKNSILVLLVYGLAFMVILPVVVGSWWYRSIRYSGDQILIRTTQIYTYFVYKTRNMDMKRLIMVLAGASEFDPQYNKDATSRPTDNILIPQLIREIGSINLKKNEPPLTCPYSLKARVLLLSHLARMKIPETLEEDQQFMLKKCPALLQEMVNVICQLIVMARNREEREFRAPTLASLENCMKLSQMAVQGLQQFKSPLLQLPHIEEDNLRRVSNHKKYKIKTIQDLVSLKESDRHTLLHFLEDEKYEEVMAVLGSFPYVTMDIKSQVLDDEDSNNITVGSLVTVLVKLTRQTMAEVFEKEQSICAAEEQPAEDGVKTWVSEPIFPSERNILFTFPIDLYCSGRVIQFSYFHLKITTTFN

SEQ ID NO: 824623 - protein, 215 aa, Homo sapiens
MAGQQFQYDDSGNTFFYFLTSFVGLIVIPATYYLWPRDQNAEQIRLKNIRKVYGRCMWYRLRLLKPQPNIIPTVKKIVLLAGWALFLFLAYKVSKTDREYQEYNPYEVLNLDPGATVAEIKKQYRLLSLKYHPDKGGDEVMFMRIAKAYAALTDEESRKNWEEFGNPDGPQATSFGIALPAWIVDQKNSILVLLVYGLAFMVILPVVVVSFSFLS

SEQ ID NO: 824624 - protein, 760 aa, Homo sapiens; identical to SEQ ID NO: 824613

SEQ ID NO: 824625 - protein, 760 aa, Homo sapiens; identical to SEQ ID NO: 824613

SEQ ID NO: 824626 - protein, 620 aa, Homo sapiens
MFMRIAKAYAALTDEESRKNWEEFGNPDGPQATSFGIALPAWIVDQKNSILVLLVYGLAFMVILPVVVGSWWYRSIRYSGDQILIRTTQIYTYFVYKTRNMDMKRLIMVLAGASEFDPQYNKDATSRPTDNILIPQLIREIGSINLKKNEPPLTCPYSLKARVLLLSHLARMKIPETLEEDQQFMLKKCPALLQEMVNVICQLIVMARNREEREFRAPTLASLENCMKLSQMAVQGLQQFKSPLLQLPHIEEDNLRRVSNHKKYKIKTIQDLVSLKESDRHTLLHFLEDEKYEEVMAVLGSFPYVTMDIKSQVLDDEDSNNITVGSLVTVLVKLTRQTMAEVFEKEQSICAAEEQPAEDGQGETNKNRTKGGWQQKSKGPKKTAKSKKKKPLKKKPTPVLLPQSKQQKQKQANGVVGNEAAVKEDEEEVSDKGSDSEEEETNRDSQSEKDDGSDRDSDREQDEKQNKDDEAEWQELQQSIQRKERALLETKSKITHPVYSLYFPEEKQEWWWLYIADRKEQTLISMPYHVCTLKDTEEVELKFPAPGKPGNYQYTVFLRSDSYMGLDQIKPLKLEVHEAKPVPENHPQWDTAIEGDEDQEDSEGFEDSFEEEEEEEEDDD

SEQ ID NO: 824627 - protein, 760 aa, Homo sapiens; identical to SEQ ID NO: 824613

SEQ ID NO: 824628 - protein, 262 aa, Homo sapiens
ATGEEKKEKDRKKKKFQKSRSKHKKHKSSSSSSSSSSSSSSTETSESSSESESNNKEKKIQRKKRKKNKCSGHKGSDSEEEETNRDSQSEKDDGSDRDSDREQDEKQNKDDEAEWQELQQSIQRKERALLETKSKITHPVYSLYFPEEKQEWWWLYIADRKEQTLISMPYHVCTLKDTEEVELKFPAPGKPGNYQYTVFLRSDSYMGLDQIKPLKLEVHEAKPVPENHPQWDTAIEGDEDQEDSEGFEDSFEEEEEEEEDDD

SEQ ID NO: 824629 - protein, 767 aa, Homo sapiens
MAGQQFQYDDSGNTFFYFLTSFVGLIVIPATYYLWPRDQNAEQIRLKNIRKVYGRCMWYRLRLLKPQPNIIPTVKKIVLLAGWALFLFLAYKVSKTDREYQEYNPYEVLNLDPGATVAEIKKQYRLLSLKYHPDKGGDEVMFMRIAKAYAALTDEESRKNWEEFGNPDGPQATSFGIALPAWIVDQKNSILVLLVYGLAFMVILPVVVGSWWYRSIRYSGDQILIRTTQIYTYFVYKTRNMDMKRLIMVLAGASEFDPQYNKDATSRPTDNILIPQLIREIGSINLKKNEPPLTCPYSLKARVLLLSHLARMKIPETLEEDQQFMLKKCPALLQEMVNVICQLIVMARNREEREFRAPTLASLENCMKLSQMAVQGLQQFKSPLLQLPHIEEDNLRRVSNHKKYKIKTIQDLVSLKESDRHTLLHFLEDEKYEEVMAVLGSFPYVTMDIKSQVLDDEDSNNITVGSLVTVLVKLTRQTMAEVFEKEQSICAAEEQPAEDGQGETNKNRTKGGWQQKSKGPKKTAKSKKKKPLKKKPTPVLLPQSKQQKQKQANGVVGNEAAVKEDEEEVSDKGSDSEEEETNRDSQSEKDDGSDRDSDREQDEKQNKDDEAEWQELQQSIQRKERALLETKSKITHPVYSLYFPEEKQEWWWLYIADRKEQTLISMPYHVCTLKDTEEVELKFPAPGKPGNYQYTVFLRSDSYMGLDQIKPLKDVLIDDRPVTSLSRCARSTLEASGIARRGQQHQEDSKGLDDSMKENEKGEYEEV

SEQ ID NO: 824630 - protein, 520 aa, Homo sapiens
MAGQQFQYDDSGNTFFYFLTSFVGLIVIPATYYLWPRDQNAEQIRLKNIRKVYGRCMWYRLRLLKPQPNIIPTVKKIVLLAGWALFLFLAYKVSKTDREYQEYNPYEVLNLDPGATVAEIKKQYRLLSLKYHPDKGGDEVMFMRIAKAYAALTDEESRKNWEEFGNPDGPQATSFGIALPAWIVDQKNSILVLLVYGLAFMVILPVVVGSWWYRSIRYSGDQILIRTTQIYTYFVYKTRNMDMKRLIMVLAGASEFDPQYNKDATSRPTDNILIPQLIREIGSINLKKNEPPLTCPYSLKARVLLLSHLARMKIPETLEEDQQFMLKKCPALLQEMVNVICQLIVMARNREEREFRAPTLASLENCMKLSQMAVQGLQQFKSPLLQLPHIEEDNLRRVSNHKKYKIKTIQDLVSLKESDRHTLLHFLEDEKYEEVMAVLGSFPYVTMDIKSQVLDDEDSNNITVGSLVTVLVKLTRQTMAEVFEKEQSICAAEEQPAEDGQGETNKNRSRAEDQRLRGRE

SEQ ID NO: 824631 - protein, 95 aa, Homo sapiens
ILNEINPPPPFAAAAAAMSMLRLQKRLASSVLRCGKKKVWLDPNETNEIANANSRQQIRKLIKDGLIIRKPVTVHSRARCRKNTLARRKGHGTWA

SEQ ID NO: 824632 - protein, 95 aa, Homo sapiens; identical to SEQ ID NO: 824631

SEQ ID NO: 824633 - protein, 98 aa, Homo sapiens
RILNKLIPPPRFPFAAAAAAMSMLRLQKRLASSVLRCGKKKVWLDPNETNEIANANSRQQIRKLIKDGLIIRKPVTVHSRARCRKNTLARRKGHGTWA

SEQ ID NO: 824634 - protein, 116 aa, Homo sapiens
  misc_feature (2)..(2): Xaa can be any naturally occurring amino acid
  misc_feature (6)..(6): Xaa can be any naturally occurring amino acid
  misc_feature (12)..(13): Xaa can be any naturally occurring amino acid
RXTLEXPSGCIXXLRGSFATCITACTLKVNGECVQKQADSHGTHPQAEGRQGPAKKLPGLTRLRPCRSKTKECTQGAVKSAFQAKERREIIKTLFQGEEETTEIKPPTLSVHTWPL

SEQ ID NO: 824635 - protein, 97 aa, Homo sapiens
GRLLLLLLLEFKLLTMYGEDSHGTHPQAEGRQGPAKKLPGLTRLRPCRSKTKECTQGAVKSAFQANERREIIKTLFQGEEETTEIKPPTLSVHTWPL

SEQ ID NO: 824636 - protein, 107 aa, Homo sapiens
KYPVPLPSSRGLHGNCEEGRFSVVGDSAAMSMLRLQKRLASSVLRCGKKKVWLDPNETNEIANANSRQQIRKLIKDGLIIRKPVTVHSRARCRKNTLARRKGHGTWA

SEQ ID NO: 824637 - protein, 73 aa, Homo sapiens
RSSSAHVQIGPQEAPGLTRLRPCRSKTKECTQGAVKSAFQAKERREIIKTLFQGEEETTEIKPPTLSVHTWPL

SEQ ID NO: 824638 - protein, 107 aa, Homo sapiens; identical to SEQ ID NO: 824636

SEQ ID NO: 824639 - protein, 102 aa, Homo sapiens
MERTDLCITACTLKVNGECVQKQADSHGTHPQAEGRQGPAKKLPGLTRLRPCRSKTKECTQGAVKSAFQAKERREIIKTLFQGEEETTEIKPPTLSVHTWPL

SEQ ID NO: 824640 - protein, 173 aa, Homo sapiens
MPADYGSSWLHGDLMTHSQMFGLHQSLVTGQELSQEESSYLQKMAGLCSKILEASTVIHLWGPAKGSKGHPYLRGKEGPQEAPGLTRLRPCRSKTKECTQGAVKSAFQAKERREIIKTLFQGEEETGLAIVAQAELTTPESQDDPPHLQPLKIAGITALVLPRSHVAPLKHHM

SEQ ID NO: 824641 - protein, 127 aa, Homo sapiens
  misc_feature (51)..(51): Xaa can be any naturally occurring amino acid
  misc_feature (82)..(82): Xaa can be any naturally occurring amino acid
AGGLALRCCCRCRDVVLMVVSIRRTSLVIGVPHAMVGNRSNGSGLAPHYMXIADDRYVTLATSFRLGHALRVTAASIHVLRXCIAVTGNATVARDRTCRVDCAVRSDHEHALCPRHGKMVRGSAADE

SEQ ID NO: 824642 - protein, 86 aa, Homo sapiens
SNHVFCVCMSMLRLQKRLASSVLRCGKKKVWLDPNETNEIANANSRQQIRKLIKDGLIIRKPVTVHSRARCRKNTLARRKGHGTWA

SEQ ID NO: 824643 - protein, 67 aa, Homo sapiens
VTRPTIRLDYDLARGLTEIHQCQLPSADPEAHQRWADHPQACDGPFPGSMPEKHLGPPEGARHMGIG

SEQ ID NO: 824644 - protein, 100 aa, Homo sapiens
SRPGEVVTKKKKKKKKKKAAAAMSMLRLQKRLASSVLRCGKKKVWLDPNETNEIANANSRQQIRKLIKDGLIIRKPVTVHSRARCRKNTLARRKGHGTWA

SEQ ID NO: 824645 - protein, 92 aa, Homo sapiens
  misc_feature (4)..(4): Xaa can be any naturally occurring amino acid
PPFXLKPFAAAAAAMSMLRLQKRLASSVLRCGKKKVWLDPNETNEIANANSRQQIRKLIKDGLIIRKPVTVHSRARCRKNTLARRKGHGTWA

SEQ ID NO: 824646 - protein, 135 aa, Homo sapiens
  misc_feature (12)..(12): Xaa can be any naturally occurring amino acid
NPVNEASYDGKXSFLLIGHSESGYNEYVSCSTISSDEFANTMPVRPPTVKTLDPLSGSVMLRLQKRLASSVLRCGKKKVWLDPNETNEIANANSRQQIRKLIKDGLIIRKPVTVHSRARCRKNTLARRKGQGTWA

SEQ ID NO: 824647 - protein, 76 aa, Homo sapiens
SLVSLGSNQTFFLPTPEDTRGEPLLKPEHTHGCGRSQQIRKLIKDGLIIRKPVTVHSRARCRKNTLARRKGHGTWA

SEQ ID NO: 824648 - protein, 135 aa, Homo sapiens
MAKDRGDFIASWAFHIHEVGIGALHQAFLLVFPVLLFWRGMKEILCQRHVLVCVGRSCRIRQSFAAAAAAMSMLRLQKRLASSVLRCGKKKVWLDPNETNEIANANSRQQIRKLIKDGLIIRKPVTVHSRARCRR

SEQ ID NO: 824649 - protein, 95 aa, Homo sapiens; identical to SEQ ID NO: 824631

SEQ ID NO: 824650 - protein, 98 aa, Homo sapiens; identical to SEQ ID NO: 824633

SEQ ID NO: 824651 - protein, 98 aa, Homo sapiens; identical to SEQ ID NO: 824633

SEQ ID NO: 824652 - protein, 90 aa, Homo sapiens
SRGWVCIGRGAAMSMLRLQKRLASSVLRCGKKKVWLDPNETNEIANANSRQQIRKLIKDGLIIRKPVTVHSRARCRKNTLARRKGHGTWA

SEQ ID NO: 824653 - protein, 90 aa, Homo sapiens; identical to SEQ ID NO: 824652

SEQ ID NO: 824654 - protein, 98 aa, Homo sapiens; identical to SEQ ID NO: 824633

SEQ ID NO: 824655 - protein, 98 aa, Homo sapiens; identical to SEQ ID NO: 824633

SEQ ID NO: 824656 - protein, 98 aa, Homo sapiens; identical to SEQ ID NO: 824633

SEQ ID NO: 824657 - protein, 98 aa, Homo sapiens; identical to SEQ ID NO: 824633

SEQ ID NO: 824658 - protein, 110 aa, Homo sapiens
SVPRRLGLRRSIATCITACTLKVNGECVQKQADSHGTHPQAEGRQGPAKKLPGLTRLRPCRSKTKECTQGAVKSAFQAKERREIIKTLFQGEEETTEIKPPTLSVHTWPL

SEQ ID NO: 824659 - protein, 95 aa, Homo sapiens; identical to SEQ ID NO: 824631

SEQ ID NO: 824660 - protein, 95 aa, Homo sapiens; identical to SEQ ID NO: 824631

SEQ ID NO: 824661 - protein, 97 aa, Homo sapiens; identical to SEQ ID NO: 824635

SEQ ID NO: 824662 - protein, 31 aa, Homo sapiens
MILHTYSLQDSWDYSAGITSKSRCSIKTSYA

SEQ ID NO: 824663 - protein, 98 aa, Homo sapiens; identical to SEQ ID NO: 824633

SEQ ID NO: 824664 - protein, 94 aa, Homo sapiens
VSVVRAGWCNSAEAQPGGMLRLQKRLASSVLRCGKKKVWLDPNETNEIANANSRQQIRKLIKDGLIIRKPVTVHSRARCRKNTLARRKGQGTWA

SEQ ID NO: 824665 - protein, 90 aa, Homo sapiens; identical to SEQ ID NO: 824652

SEQ ID NO: 824666 - protein, 88 aa, Homo sapiens
LAEMRAEPAAMSMLRLQKRLASSVLRCGKKKVWLDPNETNEIANANSRQQIRKLIKDGLIIRKPVTVHSRARCRKNTLARRKGHGTWA

SEQ ID NO: 824667 - protein, 99 aa, Homo sapiens
AAAYYYYIRGRVDGECVQKQADSHGTHPQAEGRQGPAKKLPGLTRLRPCRSKTKECTQGAVKSAFQAKERREIIKTLFQGEEETTEIKPPTLSVHTWPL

SEQ ID NO: 824668 - protein, 96 aa, Homo sapiens
SGLTYRSPQWQSPCVSRVPKQDQPASCPSRLLRQPRWVCYVLTCSIHMQIANANSRQQIRKLIKDGLIIRKPVTVHSRARCRKNTLARRKGHGTWA

SEQ ID NO: 824669 - protein, 85 aa, Homo sapiens
CSARFPQLSLAEPALLASLPNTALEAPGLTRLRPCRSKTKECTQGAVKSAFQAKERREIIKTLFQGEEETTEIKPPTLSVHTWPL

SEQ ID NO: 824670 - protein, 103 aa, Homo sapiens
  misc_feature (64)..(64): Xaa can be any naturally occurring amino acid
  misc_feature (66)..(66): Xaa can be any naturally occurring amino acid
RAAGNSARGLFGILKCNKNFPITHLAEKEMVVTGISKHFYLELLFNEHCSLQLYKPKVVTGISXTXPRIRHEDHQDFIQGGRDQEIKPPSWPGGALHGACVLP

SEQ ID NO: 824671 - protein, 124 aa, Homo sapiens
GTTSLFIGTSVVSRERKHRLKVGSEVRFGVHSIVAIHRHLAIHRHPDSHGTHPQAEGRQGPAKKLPGLTRLRPCRSKTKECTQGAVKSAFQAKERREIIKTLFQGEEETTEIKPPTLSVHTWPL

SEQ ID NO: 824672 - protein, 86 aa, Homo sapiens
GRVGRPTRPAMLRLQKRLASSVLRCGKKKVWLDPNETNEIANANSRQQIRKLIKDGLIIRKPVTVHSRARCRKNTLARRKGHGTWA

SEQ ID NO: 824673 - protein, 85 aa, Homo sapiens
RPARDDRDSHGTHPQAEGRQGPAKKLPGLTRLRPCRSKTKECTQGAVKSAFQAKERREIIKTLFQGEEETTEIKPPTLSVHTWPL

SEQ ID NO: 824674 - protein, 148 aa, Homo sapiens
MAKDRGDFIASWAFHIHEVGIGALHQAFLLVFPVLLFWRGMKEILCQRHVLVCVGRSCRIRQSFAAAAAAMSMLRLQKRLASSVLRCGKKKVWLDPNETNEIANANSRQQIRKLIKDGLIIRKPVTVHSRARCRKNTLARRKGHGTWA

SEQ ID NO: 824675 - protein, 107 aa, Homo sapiens; identical to SEQ ID NO: 824636

SEQ ID NO: 824676 - protein, 96 aa, Homo sapiens; identical to SEQ ID NO: 824668

SEQ ID NO: 824677 - protein, 95 aa, Homo sapiens; identical to SEQ ID NO: 824631

SEQ ID NO: 824678 - protein, 98 aa, Homo sapiens; identical to SEQ ID NO: 824633

SEQ ID NO: 824679 - protein, 98 aa, Homo sapiens; identical to SEQ ID NO: 824633

SEQ ID NO: 824680 - protein, 98 aa, Homo sapiens; identical to SEQ ID NO: 824633

SEQ ID NO: 824681 - protein, 90 aa, Homo sapiens; identical to SEQ ID NO: 824652

SEQ ID NO: 824682 - protein, 98 aa, Homo sapiens; identical to SEQ ID NO: 824633

SEQ ID NO: 824683 - protein, 98 aa, Homo sapiens; identical to SEQ ID NO: 824633

SEQ ID NO: 824684 - protein, 98 aa, Homo sapiens; identical to SEQ ID NO: 824633

SEQ ID NO: 824685 - protein, 95 aa, Homo sapiens; identical to SEQ ID NO: 824631

SEQ ID NO: 824686 - protein, 148 aa, Homo sapiens; identical to SEQ ID NO: 824674

SEQ ID NO: 824687 - protein, 73 aa, Homo sapiens; identical to SEQ ID NO: 824637

SEQ ID NO: 824688 - protein, 586 aa, Homo sapiens
PLHCLWHLGQPRPRSFPPGADGCCARGSPVPRVPRGPREREWDPAPRQNPGAAPGTPAERATPAHVPFRPSRPESPWPDLTMSYPGYPPPPGGYPPAAPGGGPWGGAAYPPPPSMPPIGLDNVATYAGQFNQDYLSGMAANMSGTFGGANMPNLYPGAPGAGYPPVPPGGFGQPPSAQQPVPPYGMYPPPGGNPPSRMPSYPPYPGAPVPGQPMPPPGQQPPGAYPGQPPVTYPGQPPVPLPGQQQPVPSYPGYPGSGTVTPAVPPTQFGSRGTITDAPGFDPLRDAEVLRKAMKGFGTDEQAIIDCLGSRSNKQRQQILLSFKTAYGKDLIKDLKSELSGNFEKTILALMKTPVLFDIYEIKEAIKGVGTDEACLIEILASRSNEHIRELNRAYKAEFKKTLEEAIRSDTSGHFQRLLISLSQGNRDESTNVDMSLAQRDAQELYAAGENRLGTDESKFNAVLCSRSRAHLVAVFNEYQRMTGRDIEKSICREMSGDLEEGMLAVVKCLKNTPAFFAERLNKAMRGAGTKDRTLIRIMVSRSETDLLDIRSEYKRMYGKSLYHDISGDTSGDYRKILLKICGGND

SEQ ID NO: 824689 - protein, 256 aa, Homo sapiens
PLHCLWHLGQPRPRSFPPGADGCCARGSPVPRVPRGPREREWDPAPRQNPGAAPGTPAERATPAHVPFRPSRPESPWPDLTMSYPGYPPPPGGYPPAAPGGGPWGGAAYPPPPSMPPIGLDNVATYAGQFNQDYLSGMAGQTLSRDGLEGGQTVPRPCIPGGPCGAWLTLAYLPPVAWLLAHVPTVMVRKLCPSIRPLVGIGNPMRRKAMGKAASPCPRELAPSNKYLPISPNWGPSLGEPWGLIDPMPMPTLVQM

SEQ ID NO: 824690 - protein, 505 aa, Homo sapiens
MSYPGYPPPPGGYPPAAPGGGPWGGAAYPPPPSMPPIGLDNVATYAGQFNQDYLSGMAANMSGTFGGANMPNLYPGAPGAGYPPVPPGGFGQPPSAQQPVPPYGMYPPPGGNPPSRMPSYPPYPGAPVPGQPMPPPGQQPPGAYPGQPPVTYPGQPPVPLPGQQQPVPSYPGYPGSGTVTPAVPPTQFGSRGTITDAPGFDPLRDAEVLRKAMKGFGTDEQAIIDCLGSRSNKQRQQILLSFKTAYGKDLIKDLKSELSGNFEKTILALMKTPVLFDIYEIKEAIKGVGTDEACLIEILASRSNEHIRELNRAYKAEFKKTLEEAIRSDTSGHFQRLLISLSQGNRDESTNVDMSLAQRDAQELYAAGENRLGTDESKFNAVLCSRSRAHLVAVFNEYQRMTGRDIEKSICREMSGDLEEGMLAVVKCLKNTPAFFAERLNKAMRGAGTKDRTLIRIMVSRSETDLLDIRSEYKRMYGKSLYHDISGDTSGDYRKILLKICGGND

SEQ ID NO: 824691 - protein, 505 aa, Homo sapiens; identical to SEQ ID NO: 824690

SEQ ID NO: 824692 - protein, 505 aa, Homo sapiens; identical to SEQ ID NO: 824690

SEQ ID NO: 824693 - protein, 505 aa, Homo sapiens; identical to SEQ ID NO: 824690

SEQ ID NO: 824694 - protein, 505 aa, Homo sapiens; identical to SEQ ID NO: 824690

SEQ ID NO: 824695 - protein, 558 aa, Homo sapiens
VNWSATSRADAAVSSAGSQLWWWLPFQEAGSHGPAGALRQSLNVLSSSLPDLTMSYPGYPPPPGGYPPAAPGGGPWGGAAYPPPPSMPPIGLDNVATYAGQFNQDYLSGMAANMSGTFGGANMPNLYPGAPGAGYPPVPPGGFGQPPSAQQPVPPYGMYPPPGGNPPSRMPSYPPYPGAPVPGQPMPPPGQQPPGAYPGQPPVTYPGQPPVPLPGQQQPVPSYPGYPGSGTVTPAVPPTQFGSRGTITDAPGFDPLRDAEVLRKAMKGFGTDEQAIIDCLGSRSNKQRQQILLSFKTAYGKDLIKDLKSELSGNFEKTILALMKTPVLFDIYEIKEAIKGVGTDEACLIEILASRSNEHIRELNRAYKAEFKKTLEEAIRSDTSGHFQRLLISLSQGNRDESTNVDMSLAQRDAQELYAAGENRLGTDESKFNAVLCSRSRAHLVAVFNEYQRMTGRDIEKSICREMSGDLEEGMLAVVKCLKNTPAFFAERLNKAMRGAGTKDRTLIRIMVSRSETDLLDIRSEYKRMYGKSLYHDISGDTSGDYRKILLKICGGND

SEQ ID NO: 824696 - protein, 401 aa, Homo sapiens
MYPPPGGNPPSRMPSYPPYPGAPVPGQPMPPPGQQPPGAYPGQPPVTYPGQPPVPLPGQQQPVPSYPGYPGSGTVTPAVPPTQFGSRGTITDAPGFDPLRDAEVLRKAMKGFGTDEQAIIDCLGSRSNKQRQQILLSFKTAYGKDLIKDLKSELSGNFEKTILALMKTPVLFDIYEIKEAIKGVGTDEACLIEILASRSNEHIRELNRAYKAEFKKTLEEAIRSDTSGHFQRLLISLSQGNRDESTNVDMSLAQRDAQELYAAGENRLGTDESKFNAVLCSRSRAHLVAVFNEYQRMTGRDIEKSICREMSGDLEEGMLAVVKCLKNTPAFFAERLNKAMRGAGTKDRTLIRIMVSRSETDLLDIRSEYKRMYGKSLYHDISGDTSGDYRKILLKICGGND

SEQ ID NO: 824697 - protein, 544 aa, Homo sapiens
MCSLSAGSEDLKSAGFISYQPRMTGVPVISSNLKEDWGLHQSQDRLSSDSFTDSSDFSIFDLNQLPNPSLKESRIYYHCLLERLPQEVNDGLLIRPEASHGPSAGPSGIIRQGVKDRETSVVVAIGFQTGLRGTSGVTVPDPGYPGQLGTAAPSRMPSYPPYPGAPVPGQPMPPPGQQPPGAYPGQPPVTYPGQPPVPLPGQQQPVPSYPGYPGSGTVTPAVPPTQFGSRGTITDAPGFDPLRDAEVLRKAMKGFGTDEQAIIDCLGSRSNKQRQQILLSFKTAYGKDLIKDLKSELSGNFEKTILALMKTPVLFDIYEIKEAIKGVGTDEACLIEILASRSNEHIRELNRAYKAEFKKTLEEAIRSDTSGHFQRLLISLSQGNRDESTNVDMSLAQRDAQELYAAGENRLGTDESKFNAVLCSRSRAHLVAVFNEYQRMTGRDIEKSICREMSGDLEEGMLAVVKCLKNTPAFFAERLNKAMRGAGTKDRTLIRIMVSRSETDLLDIRSEYKRMYGKSLYHDISGDTSGDYRKILLKICGGND

SEQ ID NO: 824698 - protein, 373 aa, Homo sapiens [sequence omitted]

SEQ ID NO: 824699 - protein, 342 aa, Homo sapiens
CIRTRTRPSPSPSGPFGKEDEAGLFGSRGTITDAPGFDPLRDAEVLRKAMKGFGTDEQAIIDCLGSRSNKQRQQILLSFKTAYGKDLIKDLKSELSGNFEKTILALMKTPVLFDIYEIKEAIKGVGTDEACLIEILASRSNEHIRELNRAYKAEFKKTLEEAIRSDTSGHFQRLLISLSQGNRDESTNVDMSLAQRDAQELYAAGENRLGTDESKFNAVLCSRSRAHLVAVFNEYQRMTGRDIEKSICREMSGDLEEGMLAVVKCLKNTPAFFAERLNKAMRGAGTKDRTLIRIMVSRSETDLLDIRSEYKRMYGKSLYHDISGDTSGDYRKILLKICGGND

SEQ ID NO: 824700 - protein, 338 aa, Homo sapiens
  misc_feature (8)..(9): Xaa can be any naturally occurring amino acid
KGRGSDEXXCKDKANFVLDKFGSRGTITDAPGFDPLRDAEVLRKAMKGFGTDEQAIIDCLGSRSNKQRQQILLSFKTAYGKDLIKDLKSELSGNFEKTILALMKTPVLFDIYEIKEAIKGVGTDEACLIEILASRSNEHIRELNRAYKAEFKKTLEEAIRSDTSGHFQRLLISLSQGNRDESTNVDMSLAQRDAQELYAAGENRLGTDESKFNAVLCSRSRAHLVAVFNEYQRMTGRDIEKSICREMSGDLEEGMLAVVKCLKNTPAFFAERLNKAMRGAGTKDRTLIRIMVSRSETDLLDIRSEYKRMYGKSLYHDISGDTSGDYRKILLKICGGND

SEQ ID NO: 824701 - protein, 505 aa, Homo sapiens; identical to SEQ ID NO: 824690

SEQ ID NO: 824702 - protein, 505 aa, Homo sapiens; identical to SEQ ID NO: 824690

SEQ ID NO: 824703 - protein, 297 aa, Homo sapiens
PCTASGTWGSRARGVFRPALTAAAPAAPQCPECPAGPASGSGTQPLGRTQAPRPGRPRREPLPPTSHFAPRVRSPRGQGVGTDEACLIEILASRSNEHIRELNRAYKAEFKKTLEEAIRSDTSGHFQRLLISLSQGNRDESTNVDMSLAQRDAQELYAAGENRLGTDESKFNAVLCSRSRAHLVAVFNEYQRMTGRDIEKSICREMSGDLEEGMLAVVKCLKNTPAFFAERLNKAMRGAGTKDRTLIRIMVSRSETDLLDIRSEYKRMYGKSLYHDISGDTSGDYRKILLKICGGND

SEQ ID NO: 824704 - protein, 161 aa, Homo sapiens
GRVGRPTRPMSLAQRDAQELYAAGENRLGTDESKFNAVLCSRSRAHLVAVFNEYQRMTGRDIEKSICREMSGDLEEGMLAVVKCLKNTPAFFAERLNKAMRGAGTKDRTLIRIMVSRSETDLLDIRSEYKRMYGKSLYHDISGDTSGDYRKILLKICGGND

SEQ ID NO: 824705 - protein, 464 aa, Homo sapiens
MSYPGYPPPPGGYPPAAPGGGPWGGAAYPPPPSMPPIGLDNVATYAGQFNQDYLSGMAANMSGTFGGANMPNLYPGAPGAGYPPVPPGGFGQPPSAQQPVPPYGMYPPPGGNPPSRMPSYPPYPGAPVPGQPMPPPGQQPPGAYPGQPPVTYPGQPPVPLPGQQQPVPSYPGYPGSGTVTPAVPPTQFGSRGTITDAPGFDPLRDAEVLRKAMKGFGTDEQAIIDCLGSRSNKQRQQILLSFKTAYGKDLIKDLKSELSGNFEKTILALMKTPVLFDIYEIKEAIKGVGTDEACLIEILASRSNEHIRELNRAYKAEFKKTLEEAIRSDTSGHFQRLLISLSQGNRDESTNVDMSLAQRDAQELYAAGENRLGTDESKFNAVLCSRSRAHLVAVFNEYQRMTGRDIEKSICREMSGDLEEGMLAVVKCLKNTPAFFAERLNKAMRGDTSGDYRKILLKICGGND

SEQ ID NO: 824706 - protein, 505 aa, Homo sapiens; identical to SEQ ID NO: 824690

SEQ ID NO: 824707 - protein, 415 aa, Homo sapiens
MSYPGYPPPPGGYPPAAPGGGPWGGAAYPPPPSMPPIGLDNVATYAGQFNQDYLSGMAANMSGTFGGANMPNLYPGAPGAGYPPVPPGGFGQPPSAQQPVPPYGMYPPPGGNPPSRMPSYPPYPGAPVPGQPMPPPGQQPPGAYPGQPPVTYPGQPPVPLPGQQQPVPSYPGYPGSGTVTPAVPPTQFGSRGTITDAPGFDPLRDAEVLRKAMKGFGTDEQAIIDCLGSRSNKQRQQILLSFKTAYGKDLIKDLKSELSGNFEKTILALMKTPVLFDIYEIKEAIKGVGTDEACLIEILASRSNEHIRELNRAYKAEFKKTLEEAIRSDTSGHFQRLLISLSQGNRDESTNVDMSLAQRDAQELYAAGENRLGTDESKFNAVLCSRSRAHLVAVFNEYQRMTGREILQGITGRFC

SEQ ID NO: 824708 - protein, 542 aa, Homo sapiens
MSYPGYPPPPGGYPPAAPGGGPWGGAAYPPPPSMPPIGLDNVATYAGQFNQDYLSGMAANMSGTFGGANMPNLYPGAPGAGYPPVPPGGFGQPPSAQQPVPPYGMYPPPGGNPPSRMPSYPPYPGAPVPGQPMPPPGQQPPGAYPGQPPVTYPGQPPVPLPGQQQPVPSYPGYPGSGTVTPAVPPTQFGSRGTITDAPGFDPLRDAEVLRKAMKGFGTDEQAIIDCLGSRSNKQRQQILLSFKTAYGKDLIKDLKSELSGNFEKTILALMKTPVLFDIYEIKEAIKGVGTDEACLIEILASRSNEHIRELNRAYKAEFKKTLEEAIRSDTSGHFQRLLISLSQGNRDESTNVDMSLAQRDAQELYAAGENRLGTDESKFNAVLCSRSRAHLVAVFNEYQRMTGRDIEKSICREMSGDLEEGMLAVVKCLKNTPAFFAERLNKAMRGAGTKDRTLIRIMVSRSETDLLDIRSEYKRMYGKSLYHDISVRACCRPTGLPFGISVTCGTSLLGVAICLASVLCVGILIMDLGLVHPLALKQIINF

SEQ ID NO: 824709 - protein, 349 aa, Homo sapiens
MSYPGYPPPPGGYPPAAPGGGPWGGAAYPPPPSMPPIGLDNVATYAGQFNQDYLSGMAANMSGTFGGANMPNLYPGAPGAGYPPVPPGGFGQPPSAQQPVPPYGMYPPPGGNPPSRMPSYPPYPGAPVPGQPMPPPGQQPPGAYPGQPPVTYPGQPPVPLPGQQQPVPSYPGYPGSGTVTPAVPPTQFGSRGTITDAPGFDPLRDAEVLRKAMKGFGTDEQAIIDCLGSRSNKQRQQILLSFKTAYGKDLIKDLKSELSGNFEKTILALMKTPVLFDIYEIKEAIKGVGTDEACLIEILASRSNEHIRELNRAYKAGARKRPKECLFLTNPQIAPRFTVLELRPVFHPS

SEQ ID NO: 824710 - protein, 284 aa, Homo sapiens
MSYPGYPPPPGGYPPAAPGGGPWGGAAYPPPPSMPPIGLDNVATYAGQFNQDYLSGMAANMSGTFGGANMPNLYPGAPGAGYPPVPPGGFGQPPSAQQPVPPYGMYPPPGGNPPSRMPSYPPYPGAPVPGQPMPPPGQQPPGAYPGQPPVTYPGQPPVPLPGQQQPVPSYPGYPGSGTVTPAVPPTQFGSRGTITDAPGFDPLRDAEVLRKAMKGFGTDEQAIIDCLGSRSNKQRQQILLSFKTAYGKASCGVGARDSEACPGLSTALLSPAFPWVGPDLPDGQ

SEQ ID NO: 824711 - protein, 106 aa, Homo sapiens
QQICVPPHNLTGRGHCQGIRVQRDFVRAGVSPGTCPGCSSSLTDRSANHLLLLISSLYCRNRVMLPHLPWFFTLHQMNLLRALFASRNDDSIPYQVPLPDEPEVGE

SEQ ID NO: 824712 - protein, 231 aa, Homo sapiens
MSYPGYPPPPGGYPPAAPGGGPWGGAAYPPPPSMPPIGLDNVATYAGQFNQDYLSGMAANMSGTFGGANMPNLYPGAPGAGYPPVPPGGFGQPPSAQQPVPPYGMYPPPGGNPPSRMPSYPPYPGAPVPGQPMPPPGQQPPGAYPGQPPVTYPGQPPVPLPGQQQPVPSYPGYPGSGTVTPAVPPTQSWKRGHHLFSRALTPSKFRGLGSAKASTDKQAHLRRGAPKGRGL

SEQ ID NO: 824713 - protein, 505 aa, Homo sapiens; identical to SEQ ID NO: 824690

SEQ ID NO: 824714 - protein, 505 aa, Homo sapiens; identical to SEQ ID NO: 824690

SEQ ID NO: 824715 - protein, 508 aa, Homo sapiens
AGCTGRKVYDPPPGGYPPAAPGGGPWGGAAYPPPPSMPPIGLDNVATYAGQFNQDYLSGMAANMSGTFGGANMPNLYPGAPGAGYPPVPPGGFGQPPSAQQPVPPYGMYPPPGGNPPSRMPSYPPYPGAPVPGQPMPPPGQQPPGAYPGQPPVTYPGQPPVPLPGQQQPVPSYPGYPGSGTVTPAVPPTQFGSRGTITDAPGFDPLRDAEVLRKAMKGFGTDEQAIIDCLGSRSNKQRQQILLSFKTAYGKDLIKDLKSELSGNFEKTILALMKTPVLFDIYEIKEAIKGVGTDEACLIEILASRSNEHIRELNRAYKAEFKKTLEEAIRSDTSGHFQRLLISLSQGNRDESTNVDMSLAQRDAQELYAAGENRLGTDESKFNAVLCSRSRAHLVAVFNEYQRMTGRDIEKSICREMSGDLEEGMLAVVKCLKNTPAFFAERLNKAMRGAGTKDRTLIRIMVSRSETDLLDIRSEYKRMYGKSLYHDISGDTSGDYRKILLKICGGND

SEQ ID NO: 824716 - protein, 389 aa, Homo sapiens
MPSYPPYPGAPVPGQPMPPPGQQPPGAYPGQPPVTYPGQPPVPLPGQQQPVPSYPGYPGSGTVTPAVPPTQFGSRGTITDAPGFDPLRDAEVLRKAMKGFGTDEQAIIDCLGSRSNKQRQQILLSFKTAYGKDLIKDLKSELSGNFEKTILALMKTPVLFDIYEIKEAIKGVGTDEACLIEILASRSNEHIRELNRAYKAEFKKTLEEAIRSDTSGHFQRLLISLSQGNRDESTNVDMSLAQRDAQELYAAGENRLGTDESKFNAVLCSRSRAHLVAVFNEYQRMTGRDIEKSICREMSGDLEEGMLAVVKCLKNTPAFFAERLNKAMRGAGTKDRTLIRIMVSRSETDLLDIRSEYKRMYGKSLYHDISGDTSGDYRKILLKICGGND

SEQ ID NO: 824717 - protein, 455 aa, Homo sapiens
MSYPGYPPPPGGYPPAAPGGGPWGGAAYPPPPSMPPIGLDNVATYAGQFNQDYLSGMAANMSGTFGGANMPNLYPAPVPGQPMPPPGQQPPGAYPGQPPVTYPGQPPVPLPGQQQPVPSYPGYPGSGTVTPAVPPTQFGSRGTITDAPGFDPLRDAEVLRKAMKGFGTDEQAIIDCLGSRSNKQRQQILLSFKTAYGKDLIKDLKSELSGNFEKTILALMKTPVLFDIYEIKEAIKGVGTDEACLIEILASRSNEHIRELNRAYKAEFKKTLEEAIRSDTSGHFQRLLISLSQGNRDESTNVDMSLAQRDAQELYAAGENRLGTDESKFNAVLCSRSRAHLVAVFNEYQRMTGRDIEKSICREMSGDLEEGMLAVVKCLKNTPAFFAERLNKAMRGAGTKDRTLIRIMVSRSETDLLDIRSEYKRMYGKSLYHDISGDTSGDYRKILLKICGGND

SEQ ID NO: 824718 - protein, 336 aa, Homo sapiens
QRATRDKCTHPKNRWLRTFGSRGTITDAPGFDPLRDAEVLRKAMKGFGTDEQAIIDCLGSRSNKQRQQILLSFKTAYGKDLIKDLKSELSGNFEKTILALMKTPVLFDIYEIKEAIKGVGTDEACLIEILASRSNEHIRELNRAYKAEFKKTLEEAIRSDTSGHFQRLLISLSQGNRDESTNVDMSLAQRDAQELYAAGENRLGTDESKFNAVLCSRSRAHLVAVFNEYQRMTGRDIEKSICREMSGDLEEGMLAVVKCLKNTPAFFAERLNKAMRGAGTKDRTLIRIMVSRSETDLLDIRSEYKRMYGKSLYHDISGDTSGDYRKILLKICGGND

SEQ ID NO: 824719 - protein, 236 aa, Homo sapiens
MKTPVLFDIYEIKEAIKGVGTDEACLIEILASRSNEHIRELNRAYKAEFKKTLEEAIRSDTSGHFQRLLISLSQGNRDESTNVDMSLAQRDAQELYAAGENRLGTDESKFNAVLCSRSRAHLVAVFNEYQRMTGRDIEKSICREMSGDLEEGMLAVVKCLKNTPAFFAERLNKAMRGAGTKDRTLIRIMVSRSETDLLDIRSEYKRMYGKSLYHDISGDTSGDYRKILLKICGGND

SEQ ID NO: 824720 - protein, 505 aa, Homo sapiens; identical to SEQ ID NO: 824690

SEQ ID NO: 824721 - protein, 203 aa, Homo sapiens
MCSLLRELNRAYKAEFKKTLEEAIRSDTSGHFQRLLISLSQGNRDESTNVDMSLAQRDAQELYAAGENRLGTDESKFNAVLCSRSRAHLVAVFNEYQRMTGRDIEKSICREMSGDLEEGMLAVVKCLKNTPAFFAERLNKAMRGAGTKDRTLIRIMVSRSETDLLDIRSEYKRMYGKSLYHDISGDTSGDYRKILLKICGGND

SEQ ID NO: 824722 - protein, 515 aa, Homo sapiens
MSYPGYPPPPGGYPPAAPGGGPWGGAAYPPPPSMPPIGLDNVATYAGQFNQDYLSGMAANMSGTFGGANMPNLYPGAPGAGYPPVPPGGFGQPPSAQQPVPPYGMYPPPGGNPPSRMPSYPPYPGAPVPGQPMPPPGQQPPGAYPGQPPVTYPGQPPVPLPGQQQPVPSYPGYPGSGTVTPAVPPTQFGSRGTITDAPGFDPLRDAEVLRKAMKGFGTDEQAIIDCLGSRSNKQRQQILLSFKTAYGKDLIKDLKSELSGNFEKTILALMKTPVLFDIYEIKEAIKGVGTDEACLIEILASRSNEHIRELNRAYKAEFKKTLEEAIRSDTSGHFQRLLISLSQGNRDESTNVDMSLAQRDAQELYAAGENRLGTDESKFNAVLCSRSRAHLVAVFNEYQRMTGRDIEKSICREMSGDLEEGMLAVVKCLKNTPAFFAERLNKAMRGAGTKDRTLIRIMVSRSETDLLDIRSEYKRMYGKSLYHDISSISCMPASYGHLEEATCLALKLLRVEGND

SEQ ID NO: 824723 - protein, 129 aa, Homo sapiens
HEVFFLKRSEFGSNKARDTLTRCTGYPLRHASLSLLSEDTVLHPPSRPHLKCLKNTPAFFAERLNKAMRGAGTKDRTLIRIMVSRSETDLLDIRSEYKRMYGKSLYHDISGDTSGDYRKILLKICGGND

SEQ ID NO: 824724 - protein, 542 aa, Homo sapiens; identical to SEQ ID NO: 824708

SEQ ID NO: 824725 - protein, 457 aa, Homo sapiens
MSYPGYPPPPGGYPPAAPGGGPWGGAAYPPPPSMPPIGLDNVATYAGQFNQDYLSGMAANMSGTFGGANMPNLYPGAPGAGYPPVPPGGFGQPPSAQQPVPPYGMYPPPGGNPPSRMPSYPPYPGAPVPGQPMPPPGQQPPGAYPGQPPVTYPGQPPVPLPGQQQPVPSYPGYPGSGTVTPAVPPTQFGSRGTITDAPGFDPLRDAEVLRKAMKGFGTDEQAIIDCLGSRSNKQRQQILLSFKTAYGKDLIKDLKSELSGNFEKTILALMKTPVLFDIYEIKEAIKGVGTDEACLIEILASRSNEHIRELNRAYKAEFKKTLEEAIRSDTSGHFQRLLISLSQGNRDESTNVDMSLAQRDAQELYAAGENRLGTDESKFNAVLCSRSRAHLVAVFNEYQRMTGRDIEKSICREMSGDLEEGMLAVVKCLKNTPAFFAERLNKAMRVCNFHVQVAMEP

SEQ ID NO: 824726 - protein, 312 aa, Homo sapiens
PLHCLWHLGQPRPRSFPPGADGCCARGSPVPRVPRGPREREWDPAPRQNPGAAPGTPAERATPAHVPFRPSRPESPWPDLTMSYPGYPPPPGGYPPAAPGGGPWGGAAYPPPPSMPPIGLDNVATYAGQFNQDYLSGMAANMSGTFGGANMPNLYPGAPGAGYPPVPPGGFGQPPSAQQPVPPYGMYPPPGGNPPSRMPSYPPYPGAPVPGQPMPPPGQQPPGAYPGQPPVTYPGQPPVPLPGQQQPVPSYPGYPGSGTVTPAVPPTQSWKRGHHLFSRVVTPSKFRGLGSAKASTDKQAHLRRGAPKGRGL

SEQ ID NO: 824727 - protein, 140 aa, Homo sapiens
RAAGNGAERGCAGASRGEAAAAMDVFLMIRRHKTTIFTDAKESSTVFELKRIVEGILKRPPDEQRLYKDDQLLDDGKTLGECGFTSQTARPQAPATVGLAFRADDTFEALCIEPFSSPPELPDVMKPQDSGSSANEQAVQ

SEQ ID NO: 824728 - protein, 140 aa, Homo sapiens; identical to SEQ ID NO: 824727

SEQ ID NO: 824729 - protein, 139 aa, Homo sapiens
GGGRLGRAGGPGFVLTPARRPQDVFLMIRRHKTTIFTDAKESSTVFELKRIVEGILKRPPDEQRLYKDDQLLDDGKTLGECGFTSQTARPQAPATVGLAFRADDTFEALCIEPFSSPPELPDVMKPQDSGSSANEQAVQ

SEQ ID NO: 824730 - protein, 139 aa, Homo sapiens; identical to SEQ ID NO: 824729

SEQ ID NO: 824731 - protein, 161 aa, Homo sapiens
MDVFLMIRRHKTTIFTDAKESSTVFELKRIVEGILKRPPDEQRLYKDDQLLDDGKTLGECGFTSQTARPQAPATVGLAFRADDTFEALCIEPFSSPPELPDVMKPQDSGSSANEQAVHLHVHSQTMAKSRNTSWSQCPGLTACSTREPQDGPTQVHPRWGL

SEQ ID NO: 824732 - protein, 140 aa, Homo sapiens; identical to SEQ ID NO: 824727

SEQ ID NO: 824733 - protein, 183 aa, Homo sapiens
RAAGNGAERGCAGASRGEAAAAMDVFLMIRRHKTTIFTDAKESSTVFELKRIVEGILKRPPDEQRLYKDDQLLDDGKTLGECGFTSQTARPQAPATVGLAFRADDTFEALCIEPFSSPPELPDVMKPQDSGSSANEQAVHLHVHSQTMAKSRNTSWSQCPGLTACSTREPQDGPTQVHPRWGL

SEQ ID NO: 824734 - protein, 85 aa, Homo sapiens
QRYRPRRAVDEIEDDQLLDDGKTLGECGFTSQTARPQAPATVGLAFRADDTFEALCIEPFSSPPELPDVMKPQDSGSSANEQAVQ

SEQ ID NO: 824735 - protein, 112 aa, Homo sapiens
RAAGNGAERGCAGASRGEAAAAMDVFLMIRRHKTTIFTDAKESSTVFELKRIVEGILKRPPDEQRLYKDDQLLDDGKTLGECGFTSQTARPQAPATVGLAFRAGERPTTHWA

SEQ ID NO: 824736 - protein, 88 aa, Homo sapiens
RAAGNGAERGCAGASRGEAAAAMDVFLMIRRHKTTIFTDAKESSTVFELKRIVEGILKRPPDEQRLYKMTPLRPCASSRFPARQSCPM

SEQ ID NO: 824737 - protein, 140 aa, Homo sapiens; identical to SEQ ID NO: 824727

SEQ ID NO: 824738 - protein, 140 aa, Homo sapiens; identical to SEQ ID NO: 824727

SEQ ID NO: 824739 - protein, 140 aa, Homo sapiens; identical to SEQ ID NO: 824727

SEQ ID NO: 824740 - protein, 161 aa, Homo sapiens; identical to SEQ ID NO: 824731

SEQ ID NO: 824741 - protein, 118 aa, Homo sapiens
MDVFLMIRRHKTTIFTDAKESSTVFELKRIVEGILKRPPDEQRLYKDDQLLDDGKTLGECGFTSQTARPQAPATVGLAFRADDTFEALCIEPFSSPPELPDVMKPQDSGSSANEQAVQ

SEQ ID NO: 824742 - protein, 139 aa, Homo sapiens; identical to SEQ ID NO: 824729

SEQ ID NO: 824743 - protein, 183 aa, Homo sapiens; identical to SEQ ID NO: 824733

SEQ ID NO: 824744 - protein, 163 aa, Homo sapiens
RAAGNGAERGCAGASRGEAAAAMDVFLMIRRHKTTIFTDAKESSTVFELKRIVEGILKRPPDEQRLYKLLVRSLWDLPHVGPLPRSCFSPQDDQLLDDGKTLGECGFTSQTARPQAPATVGLAFRADDTFEALCIEPFSSPPELPDVMKPQDSGSSANEQAVQ

SEQ ID NO: 824745 - protein, 163 aa, Homo sapiens; identical to SEQ ID NO: 824744

SEQ ID NO: 824746 - protein, 129 aa, Homo sapiens
GGGRLGRAGGPGFVLTPARRPQDVFLMIRRHKTTIFTDAKESSTVFELKRIVEGILKRPPDEQRLYKDDQLLDDGKTLGECGFTSQTARPQAPATVGLAFRAALLLPPQMTPLRPCASSRFPARQSCPM

SEQ ID NO: 824747 - protein, 317 aa, Homo sapiens
MSEGVGTFRMVPEEEQELRAQLEQLTTKDHGPVFGPCSQLPRHTLQKAKDELNEREETREEAVRELQEMVQAQAASGEELAVAVAERVQEKDSGFFLRFIRARKFNVGRAYELLRGYVNFRLQYPELFDSLSPEAVRCTIEAGYPGVLSSRDKYGRVVMLFNIENWQSQEITFDEILQAYCFILEKLLENEETQINGFCIIENFKGFTMQQAASLRTSDLRKMVDMLQDSFPARFKAIHFIHQPWYFTTTYNVVKPFLKSKLLERVFVHGDDLSGFYQEIDENILPSDFGGTLPKYDGKAVAEQLFGPQAQAENTAF

SEQ ID NO: 824748 - protein, 170 aa, Homo sapiens
DISNKYNFGKKRKEEPRRQLTLFLTSATILQAYCFILEKLLENEETQINGFCIIENFKGFTMQQAASLRTSDLRKMVDMLQDSFPARFKAIHFIHQPWYFTTTYNVVKPFLKSKLLERVFVHGDDLSGFYQEIDENILPSDFGGTLPKYDGKAVAEQLFGPQAQAENTAF

SEQ ID NO: 824749 - protein, 317 aa, Homo sapiens; identical to SEQ ID NO: 824747

SEQ ID NO: 824750 - protein, 345 aa, Homo sapiens
  misc_feature (12)..(12): Xaa can be any naturally occurring amino acid
  misc_feature (21)..(21): Xaa can be any naturally occurring amino acid
WKTQILGKKKGXAFSVLASPXGPFPRQHVKKEVGTFRMVPEEEQELRAQLEQLTTKDHGPVFGPCSQLPRHTLQKAKDELNEREETREEAVRELQEMVQAQAASGEELAVAVAERVQEKDSGFFLRFIRARKFNVGRAYELLRGYVNFRLQYPELFDSLSPEAVRCTIEAGYPGVLSSRDKYGRVVMLFNIENWQSQEITFDEILQAYCFILEKLLENEETQINGFCIIENFKGFTMQQAASLRTSDLRKMVDMLQDSFPARFKAIHFIHQPWYFTTTYNVVKPFLKSKLLERVFVHGDDLSGFYQEIDENILPSDFGGTLPKYDGKAVAEQLFGPQAQAENTAF

SEQ ID NO: 824751 - protein, 475 aa, Homo sapiens
SGARGRALHSDVTGTVRWVKVQPRPRFPLAVSLGLCRRRRRLWARLRSVCFATFSPSTARPAAMANVADTKLYDILGVPPGASENELKKAYRKLAKEYHPDKNPNAGDKFKEISFAYEVLSNPEKRELYDRYGEQGLREGSGGGGGMDDIFSHIFGGGLFGFMGNQSRSRNGRRRGEDMMHPLKVSLEDLYNGKTTKLQLSKNVLCSACSGQGGKSGAVQKCSACRGRGVRIMIRQLAPGMVQQMQSVCSDCNGEGEVINEKDRCKKCEGKKVIKEVKILEVHVDKGMKHGQRITFTGEADQAPGVEPGDIVLLLQEKEHEVFQRDGNDLHMTYKIGLVEALCGFQFTFKHLDGRQIVVKYPPGKVIEPGCVRVVRGEGMPQYRNPFEKGDLYIKFDVQFPENNWINPDKLSELEDLLPSRPEVPNIIGETEEVELQEFDSTRGSGGGQRREAYNDSSDEESSSHHGPGVQCAHQ

SEQ ID NO: 824752 - protein, 475 aa, Homo sapiens; identical to SEQ ID NO: 824751

SEQ ID NO: 824753 - protein, 144 aa, Homo sapiens
SGARGRALHSDVTAHRALGQSSAPPPLPPRCLPRPVPPPQMQQIKLTPAQTRWEPFLPPSLNERRGLVSPGRQQLARSFASRSPPRKNRLDRGAQRIPAPREKLSAPRPSAPGLVLRGEERRGGRGRPHRAPRADGVVSWVPRP

SEQ ID NO: 824754 - protein, 475 aa, Homo sapiens; identical to SEQ ID NO: 824751

SEQ ID NO: 824755 - protein, 475 aa, Homo sapiens; identical to SEQ ID NO: 824751

SEQ ID NO: 824756 - protein, 329 aa, Homo sapiens [sequence omitted]

SEQ ID NO: 824757 - protein, 475 aa, Homo sapiens; identical to SEQ ID NO: 824751

SEQ ID NO: 824758 - protein, 329 aa, Homo sapiens [sequence omitted]

SEQ ID NO: 824759 - protein, 475 aa, Homo sapiens; identical to SEQ ID NO: 824751

SEQ ID NO: 824760 - protein, 465 aa, Homo sapiens
SGARGRALHSDVTGTVRWVKVQPRPRFPLAVSLGLCRRRRRLWARLRSVCFATFSPSTARPAAMANVADTKLYDILGVPPGASENELKKAYRKLAKEYHPDKNPNAGDKFKEISFAYEVLSNPEKRELYDRYGEQGLREGSGGGGGMDDIFSHIFGGGLFGFMGNQSRSRNGRRRGEDMMHPLKVSLEDLYNGKTTKLQLSKNVLCSACSGQGGKSGAVQKCSACRGRGVRIMIRQLAPGMVQQMQSVCSDCNGEGEVINEKDRCKKCEGKKVIKEVKILEVHVDKGMKHGQRITFTGEADQAPGVEPGDIVLLLQEKEHEVFQRDGNDLHMTYKIGLVEALCGFQFTFKHLDGRQIVVKYPPGKVIEPGCVRVVRGEGMPQYRNPFEKGDLYIKFDVQFPENNWINPDKLSELEDFCIKAEGPTIGQQGGKSGLCLGPGGKGAKMREKGGPGGGPDAKSGFLVS

SEQ ID NO: 824761 - protein, 291 aa, Homo sapiens
SGARGRALHSDVTGTVRWVKVQPRPRFPLAVSLGLCRRRRRLWARLRSVCFATFSPSTARPAAMANVADTKLYDILGVPPGASENELKKAYRKLAKEYHPDKNPNAGDKFKEISFAYEVLSNPEKRELYDRYGEQGLREGSGGGGGMDDIFSHIFGGGLFGFMGNQSRSRNGRRRGEDMMHPLKVSLEDLYNGKTTKLQLSKNVLCSACSGQGGKSGAVQKCSACRGRGVRIMIRQLAPGMVQQMQSVCSDCNGEGMCASTSLLLCWNGLGMQILERFTIFYFKGYLYTSY

SEQ ID NO: 824762 - protein, 191 aa, Homo sapiens
SGARGRALHSDVTGTVRWVKVQPRPRFPLAVSLGLCRRRRRLWARLRSVCFATFSPSTARPAAMANVADTKLYDILGVPPGASENELKKAYRKLAKEYHPDKNPNAGDKFKEISFAYEVLSNPEKRELYDRYGEQGLREGSGGGGGMDDIFSHIFGGGLFGFMGNQSRSRWHTEHSRMPHSLAPTSRPPTP

SEQ ID NO: 824763 - protein, 104 aa, Homo sapiens
MQQIKLTPAQTRWEPFLPPSLNERRGLVSPGRQQLARSFASRSPPRKNRLDRGAQRIPAPREKLSAPRPSAPGLVLRGEERRGGRGRPHRAPRADGVVSWVPRP

SEQ ID NO: 824764 - protein, 412 aa, Homo sapiens
MANVADTKLYDILGVPPGASENELKKAYRKLAKEYHPDKNPNAGDKFKEISFAYEVLSNPEKRELYDRYGEQGLREGSGGGGGMDDIFSHIFGGGLFGFMGNQSRSRNGRRRGEDMMHPLKVSLEDLYNGKTTKLQLSKNVLCSACSGQGGKSGAVQKCSACRGRGVRIMIRQLAPGMVQQMQSVCSDCNGEGEVINEKDRCKKCEGKKVIKEVKILEVHVDKGMKHGQRITFTGEADQAPGVEPGDIVLLLQEKEHEVFQRDGNDLHMTYKIGLVEALCGFQFTFKHLDGRQIVVKYPPGKVIEPGCVRVVRGEGMPQYRNPFEKGDLYIKFDVQFPENNWINPDKLSELEDLLPSRPEVPNIIGETEEVELQEFDSTRGSGGGQRREAYNDSSDEESSSHHGPGVQCAHQ

SEQ ID NO: 824765 - protein, 475 aa, Homo sapiens; identical to SEQ ID NO: 824751

SEQ ID NO: 824766 - protein, 329 aa, Homo sapiens [sequence omitted]

SEQ ID NO: 824767 - protein, 252 aa, Homo sapiens
GTSSFSITIRAHRLHLLYHPWSQLSDHDCNGEGEVINEKDRCKKCEGKKVIKEVKILEVHVDKGMKHGQRITFTGEADQAPGVEPGDIVLLLQEKEHEVFQRDGNDLHMTYKIGLVEALCGFQFTFKHLDGRQIVVKYPPGKVIEPGCVRVVRGEGMPQYRNPFEKGDLYIKFDVQFPENNWINPDKLSELEDLLPSRPEVPNIIGETEEVELQEFDSTRGSGGGQRREAYNDSSDEESSSHHGPGVQCAHQ

SEQ ID NO: 824768 - protein, 450 aa, Homo sapiens
SGARGRALHSDVTGTVRWVKVQPRPRFPLAVSLGLCRRRRRLWARLRSVCFATFSPSTARPAAMANVADTKLYDILGVPPGASENELKKAYRKLAKEYHPDKNPNAGDKFKEISFAYEVLSNPEKRELYDRYGEQGLREGSGGGGGMDDIFSHIFGGGLFGFMGNQSRSRNGRRRGEDMMHPLKVSLEDLYNGKTTKLQLSKNVLCSACSGQGGKSGAVQKCSACRGRGVRIMIRQLAPGMVQQMQSVCSDCNGEGEVINEKDRCKKCEGKKVIKEVKILEVHVDKGMKHGQRITFTGEADQAPGVEPGDIVLLLQEKEHEVFQRDGNDLHMTYKIGLVEALCGFQFTFKHLDGRQIVVKYPPGKVIEPGCVRVVRGEGMPQYRNPFEKGDLYIKFDVQFPENNWINPDKLSELEDLLPSRPEVPNIIGETEEVELQEFDGCCFLHQSYH

SEQ ID NO: 824769 - protein, 435 aa, Homo sapiens
SGARGRALHSDVTGTVRWVKVQPRPRFPLAVSLGLCRRRRRLWARLRSVCFATFSPSTARPAAMANVADTKLYDILGVPPGASENELKKAYRKLAKEYHPDKNPNAGDKFKEISFAYEVLSNPEKRELYDRYGEQGLREGSGGGGGMDDIFSHIFGGGLFGFMGNQSRSRNGRRRGEDMMHPLKVSLEDLYNGKTTKLQLSKNVLCSACSGQGGKSGAVQKCSACRGRGVRIMIRQLAPGMVQQMQSVCSDCNGEGEVINEKDRCKKCEGKKVIKEVKILEVHVDKGMKHGQRITFTGEADQAPGVEPGDIVLLLQEKEHEVFQRDGNDLHMTYKIGLVEALCGFQFTFKHLDGRQIVVKYPPGKVIEPGCVRVVRGEGMPQYRNPFEKGDLYIKFDVQFPENNWINPDKLSEPEEEEEDMMHPLKVSLEDLYNG

SEQ ID NO: 824770 - protein, 1091 aa, Homo sapiens
MAKRKEENFSSPKNAKRPRQEELEDFDKDGDEDECKGTTLTAAEVGIIESIHLKNFMCHSMLGPFKFGSNVNFVVGNNGSGKSAVLTALIVGLGGRAVATNRGSSLKGFVKDGQNSADISITLRNRGDDAFKASVYGNSILIQQHISIDGSRSYKLKSATGSVVSTRKEELIAILDHFNIQVDNPVSVLTQEMSKQFLQSKNEGDKYKFFMKATQLEQMKEDYSYIMETKERTKEQIHQGEERLTELKRQCVEKEERFQSIAGLSTMKTNLESLKHEMAWAVVNEIEKQLNAIRDNIKIGEDRAARLDRKMEEQQVRLNEAEQKYKDIQDKLEKISEETNARAPECMALKADVVAKKRAYNEAEVLYNRSLNEYKALKKDDEQLCKRIEELKKSTDQSLEPERLERQKKISWLKERVKAFQNQENSVNQEIEQFQQAIEKDKEEHGKIKREELDVKHALSYNQRQLKELKDSKTDRLKRFGPNVPALLEAIDDAYRQGHFTYKPVGPLGACIHLRDPELALAIESCLKGLLQAYCCHNHADERVLQALMKRFYLPGTSRPPIIVSEFRNEIYDVRHRAAYHPDFPTVLTALEIDNAVVANSLIDMRGIETVLLIKNNSVARAVMQSQKPPKNCREAFTADGDQVFAGRYYSSENTRPKFLSRDVDSEISDLENEVENKTAQILNLQQHLSALEKDIKHNEELLKRCQLHYKELKMKIRKNISEIRELENIEEHQSVDIATLEDEAQENKSKMKMVEEHMEQQKENMEHLKSLKIEAENKYDAIKFKINQLSELADPLKDELNLADSEVDNQKRGKRHYEEKQKEHLDTLNKKKRELDMKEKELEEKMSQARQICPERIEVEKSASILDKEINRLRQKIQAEHASHGDREEIMRQYQEARETYLDLDSKVRTLKKFIKLLGEIMEHRFKTYQQFRRCLTLRCKLYFDNLLSQRAYCGKMNFDHKNETLSISVQPGEGNKAAFNDMRALSGGERSFSTVCFILSLWSIAESPFRCLDEFDVYMDMVNRRIAMDLILKMADSQRFRQFILLTPQSMSSLPSSKLIRILRMSDPERGQTTLPFRPVTQEEDDDQR

SEQ ID NO: 824771 - protein, 1091 aa, Homo sapiens; identical to SEQ ID NO: 824770

SEQ ID NO: 824772 - protein, 1091 aa, Homo sapiens; identical to SEQ ID NO: 824770

SEQ ID NO: 824773 - protein, 374 aa, Homo sapiens
MQSEGGGEERGLAGTTLLILHRYSEDEAQENKSKMKMVEEHMEQQKENMEHLKSLKIEAENKYDAIKFKINQLSELADPLKDELNLADSEVDNQKRGKRHYEEKQKEHLDTLNKKKRELDMKEKELEEKMSQARQICPERIEVEKSASILDKEINRLRQKIQAEHASHGDREEIMRQYQEARETYLDLDSKVRTLKKFIKLLGEIMEHRFKTYQQFRRCLTLRCKLYFDNLLSQRAYCGKMNFDHKNETLSISVQPGEGNKAAFNDMRALSGGERSFSTVCFILSLWSIAESPFRCLDEFDVYMDMVNRRIAMDLILKMADSQRFRQFILLTPQSMSSLPSSKLIRILRMSDPERGQTTLPFRPVTQEEDDDQR

SEQ ID NO: 824774 - protein, 216 aa, Homo sapiens
RIPHRFAGLPGDREEIMRQYQEARETYLDLDSKVRTLKKFIKLLGEIMEHRFKTYQQFRRCLTLRCKLYFDNLLSQRAYCGKMNFDHKNETLSISVQPGEGNKAAFNDMRALSGGERSFSTVCFILSLWSIAESPFRCLDEFDVYMDMVNRRIAMDLILKMADSQRFRQFILLTPQSMSSLPSSKLIRILRMSDPERGQTTLPFRPVTQEEDDDQR

SEQ ID NO: 824775 - protein, 1091 aa, Homo sapiens; identical to SEQ ID NO: 824770

SEQ ID NO: 824776 - protein, 1091 aa, Homo sapiens; identical to SEQ ID NO: 824770

SEQ ID NO: 824777 - protein, 561 aa, Homo sapiens
MAKRKEENFSSPKNAKRPRQEELEDFDKDGDEDECKGTTLTAAEVGIIESIHLKNFMCHSMLGPFKFGSNVNFVVGNNGSGKSAVLTALIVGLGGRAVATNRGSSLKGFVKDGQNSADISITLRNRGDDAFKASVYGNSILIQQHISIDGSRSYKLKSATGSVVSTRKEELIAILDHFNIQVDNPVSVLTQEMSKQFLQSKNEGDKYKFFMKATQLEQMKEDYSYIMETKERTKEQIHQGEERLTELKRQCVEKEERFQSIAGLSTMKTNLESLKHEMAWAVVNEIEKQLNAIRDNIKIGEDRAARLDRKMEEQQVRLNEAEQKYKDIQDKLEKISEETNARAPECMALKADVVAKKRAYNEAEVLYNRSLNEYKALKKDDEQLCKRIEELKKSTDQSLEPERLERQKKISWLKERVKAFQNQENSVNQEIEQFQQAIEKDKEEHGKIKREELDVKHALSYNQRQLKELKDSKTDRLKRFGPNVPALLEAIDDAYRQGHFTYKPVGPLGACIHLRDPELALAIESCLKGLLQAYCCHNHADERVLQALMKRFYLPGPHGHR

SEQ ID NO: 824778 - protein, 394 aa, Homo sapiens
MAKRKEENFSSPKNAKRPRQEELEDFDKDGDEDECKGTTLTAAEVGIIESIHLKNFMCHSMLGPFKFGSNVNFVVGNNGSGKSAVLTALIVGLGGRAVATNRGSSLKGFVKDGQNSADISITLRNRGDDAFKASVYGNSILIQQHISIDGSRSYKLKSATGSVVSTRKEELIAILDHFNIQVDNPVSVLTQEMSKQFLQSKNEGDKYKFFMKATQLEQMKEDYSYIMETKERTKEQIHQGEERLTELKRQCVEKEERFQSIAGLSTMKTNLESLKHEMAWAVVNEIEKQLNAIRDNIKIGEDRAARLDRKMEEQQVRLNEAEQKYKDIQDKLEKISEETNARAPECMALKADVVAKKRAYNEAEVLYNRSLNEYKALKKDDEQLCKRIEELKKR

SEQ ID NO: 824779 - protein, 178 aa, Homo sapiens
MSGGKYVDSEGHLYTVPIREQGNIYKPNNKAMADELSEKQVYDAHTKEIDLVNRDPKHLNDDVVKIDFEDVIAEPEGTHSFDGIWKASFTTFTVTKYWFYRLLSALFGIPMALIWGIYFAILSFLHIWAVVPCIKSFLIEIQCISRVYSIYVHTVCDPLFEAVGKIFSNVRINLQKEI

SEQ ID NO: 824780 - protein, 108 aa, Homo sapiens
MADELSEKQVYDAHTKEIDLVNRDPKHLNDDVVKIDFEDVIAEPEGTHSFDGIWKASFTTFTCWTENLLWEFYTPALAGLALLWHPDGHFIPGGAILTFRPISSSFPG

SEQ ID NO: 824781 - protein, 147 aa, Homo sapiens
MADELSEKQVYDAHTKEIDLVNRDPKHLNDDVVKIDFEDVIAEPEGTHSFDGIWKASFTTFTVTKYWFYRLLSALFGIPMALIWGIYFAILSFLHIWAVVPCIKSFLIEIQCISRVYSIYVHTVCDPLFEAVGKIFSNVRINLQKEI

SEQ ID NO: 824782 - protein, 178 aa, Homo sapiens; identical to SEQ ID NO: 824779

SEQ ID NO: 824783 - protein, 178 aa, Homo sapiens; identical to SEQ ID NO: 824779

SEQ ID NO: 824784 - protein, 178 aa, Homo sapiens; identical to SEQ ID NO: 824779

SEQ ID NO: 824785 - protein, 178 aa, Homo sapiens; identical to SEQ ID NO: 824779

SEQ ID NO: 824786 - protein, 147 aa, Homo sapiens; identical to SEQ ID NO: 824781

SEQ ID NO: 824787 - protein, 147 aa, Homo sapiens; identical to SEQ ID NO: 824781

SEQ ID NO: 824788 - protein, 178 aa, Homo sapiens; identical to SEQ ID NO: 824779

SEQ ID NO: 824789 - protein, 178 aa, Homo sapiens; identical to SEQ ID NO: 824779

SEQ ID NO: 824790 - protein, 185 aa, Homo sapiens
TIIYKPPLIKYCVLIYNFPMSQTVSHGAPAHIARFWYDTTTNKPSSEMFNIFILLVSLLNIFSIGEVCSPTMCHPHRLSIVVPLHHQVSHRLDTVFARLQPPCCYPPRPRSPLVFIILDRPSSMWAPPFTTKRLRSPRVNVGAPSGVIFAPPPFFFFFFFFFFSFYLHVDQPSLYWLRYEHIVER

SEQ ID NO: 824791 - protein, 85 aa, Homo sapiens
  misc_feature (68)..(68): Xaa can be any naturally occurring amino acid
  misc_feature (74)..(74): Xaa can be any naturally occurring amino acid
MSGGKYVDSEGHLYTVPIREQGNIYKPNNKAMADELSEKQVYDAHTKEIDLVNRDPKHLNDDVVKNLXFEDVDXQNPEGGQQKFF

SEQ ID NO: 824792 - protein, 695 aa, Homo sapiens
MLPGLALLLLAAWTARALEVPTDGNAGLLAEPQIAMFCGRLNMHMNVQNGKWDSDPSGTKTCIDTKEGILQYCQEVYPELQITNVVEANQPVTIQNWCKRGRKQCKTHPHFVIPYRCLVGEFVSDALLVPDKCKFLHQERMDVCETHLHWHTVAKETCSEKSTNLHDYGMLLPCGIDKFRGVEFVCCPLAEESDNVDSADAEEDDSDVWWGGADTDYADGSEDKVVEVAEEEEVAEVEEEEADDDEDDEDGDEVEEEAEEPYEEATERTTSIATTTTTTTESVEEVVRVPTTAASTPDAVDKYLETPGDENEHAHFQKAKERLEAKHRERMSQVMREWEEAERQAKNLPKADKKAVIQHFQEKVESLEQEAANERQQLVETHMARVEAMLNDRRRLALENYITALQAVPPRPRHVFNMLKKYVRAEQKDRQHTLKHFEHVRMVDPKKAAQIRSQVMTHLRVIYERMNQSLSLLYNVPAVAEEIQDEVDELLQKEQNYSDDVLANMISEPRISYGNDALMPSLTETKTTVELLPVNGEFSLDDLQPWHSFGADSVPANTENEVEPVDARPAADRGLTTRPGSGLTNIKTEEISEVKMDAEFRHDSGYEVHHQKLVFFAEDVGSNKGAIIGLMVGGVVIATVIVITLVMLKKKQYTSIHHGVVEVDAAVTPEERHLSKMQQNGYENPTYKFFEQMQN

SEQ ID NO: 824793 - protein, 770 aa, Homo sapiens
MLPGLALLLLAAWTARALEVPTDGNAGLLAEPQIAMFCGRLNMHMNVQNGKWDSDPSGTKTCIDTKEGILQYCQEVYPELQITNVVEANQPVTIQNWCKRGRKQCKTHPHFVIPYRCLVGEFVSDALLVPDKCKFLHQERMDVCETHLHWHTVAKETCSEKSTNLHDYGMLLPCGIDKFRGVEFVCCPLAEESDNVDSADAEEDDSDVWWGGADTDYADGSEDKVVEVAEEEEVAEVEEEEADDDEDDEDGDEVEEEAEEPYEEATERTTSIATTTTTTTESVEEVVREVCSEQAETGPCRAMISRWYFDVTEGKCAPFFYGGCGGNRNNFDTEEYCMAVCGSAMSQSLLKTTQEPLARDPVKLPTTAASTPDAVDKYLETPGDENEHAHFQKAKERLEAKHRERMSQVMREWEEAERQAKNLPKADKKAVIQHFQEKVESLEQEAANERQQLVETHMARVEAMLNDRRRLALENYITALQAVPPRPRHVFNMLKKYVRAEQKDRQHTLKHFEHVRMVDPKKAAQIRSQVMTHLRVIYERMNQSLSLLYNVPAVAEEIQDEVDELLQKEQNYSDDVLANMISEPRISYGNDALMPSLTETKTTVELLPVNGEFSLDDLQPWHSFGADSVPANTENEVEPVDARPAADRGLTTRPGSGLTNIKTEEISEVKMDAEFRHDSGYEVHHQKLVFFAEDVGSNKGAIIGLMVGGVVIATVIVITLVMLKKKQYTSIHHGVVEVDAAVTPEERHLSKMQQNGYENPTYKFFEQMQN

SEQ ID NO: 824794 - protein, 137 aa, Homo sapiens
AGSADSPGSEPRRRARAPSVSSAAVGESTRRSVRGGPGRRRRWRRGQSKDAADPTRTAAHSVPRAGSRCCPVWHCSCWPPGRLGRWRWRFALVTWAGVQWCDLGSPQPPPPGFKRFSCLSLLSSWDYGWPLTIFTSM

SEQ ID NO: 824795 - protein, 717 aa, Homo sapiens
MKYKALSSTLYTSQNGKWDSDPSGTKTCIDTKEGILQYCQEVYPELQITNVVEANQPVTIQNWCKRGRKQCKTHPHFVIPYRCLVGEFVSDALLVPDKCKFLHQERMDVCETHLHWHTVAKETCSEKSTNLHDYGMLLPCGIDKFRGVEFVCCPLAEESDNVDSADAEEDDSDVWWGGADTDYADGSEDKVVEVAEEEEVAEVEEEEADDDEDDEDGDEVEEEAEEPYEEATERTTSIATTTTTTTESVEEVVREVCSEQAETGPCRAMISRWYFDVTEGKCAPFFYGGCGGNRNNFDTEEYCMAVCGSAIPTTAASTPDAVDKYLETPGDENEHAHFQKAKERLEAKHRERMSQVMREWEEAERQAKNLPKADKKAVIQHFQEKVESLEQEAANERQQLVETHMARVEAMLNDRRRLALENYITALQAVPPRPRHVFNMLKKYVRAEQKDRQHTLKHFEHVRMVDPKKAAQIRSQVMTHLRVIYERMNQSLSLLYNVPAVAEEIQDEVDELLQKEQNYSDDVLANMISEPRISYGNDALMPSLTETKTTVELLPVNGEFSLDDLQPWHSFGADSVPANTENEVEPVDARPAADRGLTTRPGSGLTNIKTEEISEVKMDAEFRHDSGYEVHHQKLVFFAEDVGSNKGAIIGLMVGGVVIATVIVITLVMLKKKQYTSIHHGVVEVDAAVTPEERHLSKMQQNGYENPTYKFFEQMQN

SEQ ID NO: 824796 - protein, 736 aa, Homo sapiens
MKYKALSSTLYTSQNGKWDSDPSGTKTCIDTKEGILQYCQEVYPELQITNVVEANQPVTIQNWCKRGRKQCKTHPHFVIPYRCLVGEFVSDALLVPDKCKFLHQERMDVCETHLHWHTVAKETCSEKSTNLHDYGMLLPCGIDKFRGVEFVCCPLAEESDNVDSADAEEDDSDVWWGGADTDYADGSEDKVVEVAEEEEVAEVEEEEADDDEDDEDGDEVEEEAEEPYEEATERTTSIATTTTTTTESVEEVVREVCSEQAETGPCRAMISRWYFDVTEGKCAPFFYGGCGGNRNNFDTEEYCMAVCGSAMSQSLLKTTQEPLARDPVKLPTTAASTPDAVDKYLETPGDENEHAHFQKAKERLEAKHRERMSQVMREWEEAERQAKNLPKADKKAVIQHFQEKVESLEQEAANERQQLVETHMARVEAMLNDRRRLALENYITALQAVPPRPRHVFNMLKKYVRAEQKDRQHTLKHFEHVRMVDPKKAAQIRSQVMTHLRVIYERMNQSLSLLYNVPAVAEEIQDEVDELLQKEQNYSDDVLANMISEPRISYGNDALMPSLTETKTTVELLPVNGEFSLDDLQPWHSFGADSVPANTENEVEPVDARPAADRGLTTRPGSGLTNIKTEEISEVKMDAEFRHDSGYEVHHQKLVFFAEDVGSNKGAIIGLMVGGVVIATVIVITLVMLKKKQYTSIHHGVVEVDAAVTPEERHLSKMQQNGYENPTYKFFEQMQN

SEQ ID NO: 824797 - protein, 686 aa, Homo sapiens
MFPELQNCAKVYPELQITNVVEANQPVTIQNWCKRGRKQCKTHPHFVIPYRCLVGEFVSDALLVPDKCKFLHQERMDVCETHLHWHTVAKETCSEKSTNLHDYGMLLPCGIDKFRGVEFVCCPLAEESDNVDSADAEEDDSDVWWGGADTDYADGSEDKVVEVAEEEEVAEVEEEEADDDEDDEDGDEVEEEAEEPYEEATERTTSIATTTTTTTESVEEVVREVCSEQAETGPCRAMISRWYFDVTEGKCAPFFYGGCGGNRNNFDTEEYCMAVCGSAIPTTAASTPDAVDKYLETPGDENEHAHFQKAKERLEAKHRERMSQVMREWEEAERQAKNLPKADKKAVIQHFQEKVESLEQEAANERQQLVETHMARVEAMLNDRRRLALENYITALQAVPPRPRHVFNMLKKYVRAEQKDRQHTLKHFEHVRMVDPKKAAQIRSQVMTHLRVIYERMNQSLSLLYNVPAVAEEIQDEVDELLQKEQNYSDDVLANMISEPRISYGNDALMPSLTETKTTVELLPVNGEFSLDDLQPWHSFGADSVPANTENEVEPVDARPAADRGLTTRPGSGLTNIKTEEISEVKMDAEFRHDSGYEVHHQKLVFFAEDVGSNKGAIIGLMVGGVVIATVIVITLVMLKKKQYTSIHHGVVEVDAAVTPEERHLSKMQQNGYENPTYKFFEQMQN

SEQ ID NO: 824798 - protein, 717 aa, Homo sapiens; identical to SEQ ID NO: 824795

SEQ ID NO: 824799 - protein, 381 aa, Homo sapiens
GSRGSLAYGKGQARERMSQVMREWEEAERQAKNLPKADKKAVIQHFQEKVESLEQEAANERQQLVETHMARVEAMLNDRRRLALENYITALQAVPPRPRHVFNMLKKYVRAEQKDRQHTLKHFEHVRMVDPKKAAQIRSQVMTHLRVIYERMNQSLSLLYNVPAVAEEIQDEVDELLQKEQNYSDDVLANMISEPRISYGNDALMPSLTETKTTVELLPVNGEFSLDDLQPWHSFGADSVPANTENEVEPVDARPAADRGLTTRPGSGLTNIKTEEISEVKMDAEFRHDSGYEVHHQKLVFFAEDVGSNKGAIIGLMVGGVVIATVIVITLVMLKKKQYTSIHHGVVEVDAAVTPEERHLSKMQQNGYENPTYKFFEQMQN

SEQ ID NO: 824800 - protein, 717 aa, Homo sapiens; identical to SEQ ID NO: 824795

SEQ ID NO: 824801 - protein, 699 aa, Homo sapiens
MKYKALSSTLYTSQNGKWDSDPSGTKTCIDTKEGILQYCQEVYPELQITNVVEANQPVTIQNWCKRGRKQCKTHPHFVIPYRCLVGEFVSDALLVPDKCKFLHQERMDVCETHLHWHTVAKETCSEKSTNLHDYGMLLPCGIDKFRGVEFVCCPLAEESDNVDSADAEEDDSDVWWGGADTDYADGSEDKVVEVAEEEEVAEVEEEEADDDEDDEDGDEVEEEAEEPYEEATERTTSIATTTTTTTESVEEVVREVCSEQAETGPCRAMISRWYFDVTEGKCAPFFYGGCGGNRNNFDTEEYCMAVCGSAIPTTAASTPDAVDKYLETPGDENEHAHFQKAKERLEAKHRERMSQVMREWEEAERQAKNLPKADKKAVIQHFQEKVESLEQEAANERQQLVETHMARVEAMLNDRRRLALENYITALQAVPPRPRHVFNMLKKYVRAEQKDRQHTLKHFEHVRMVDPKKAAQIRSQVMTHLRVIYERMNQSLSLLYNVPAVAEEIQDEVDELLQKEQNYSDDVLANMISEPRISYGNDALMPSLTETKTTVELLPVNGEFSLDDLQPWHSFGADSVPANTENEGSGLTNIKTEEISEVKMDAEFRHDSGYEVHHQKLVFFAEDVGSNKGAIIGLMVGGVVIATVIVITLVMLKKKQYTSIHHGVVEVDAAVTPEERHLSKMQQNGYENPTYKFFEQMQN

SEQ ID NO: 824802 - protein, 248 aa, Homo sapiens
MRSDRSQVMTHLRVIYERMNQSLSLLYNVPAVAEEIQDEVDELLQKEQNYSDDVLANMISEPRISYGNDALMPSLTETKTTVELLPVNGEFSLDDLQPWHSFGADSVPANTENEVEPVDARPAADRGLTTRPGSGLTNIKTEEISEVKMDAEFRHDSGYEVHHQKLVFFAEDVGSNKGAIIGLMVGGVVIATVIVITLVMLKKKQYTSIHHGVVEVDAAVTPEERHLSKMQQNGYENPTYKFFEQMQN

SEQ ID NO: 824803 - protein, 668 aa, Homo sapiens
MKYKALSSTLYTSQNGKWDSDPSGTKTCIDTKEGILQYCQEVYPELQITNVVEANQPVTIQNWCKRGRKQCKTHPHFVIPYRCLVGEFVSDALLVPDKCKFLHQERMDVCETHLHWHTVAKETCSEKSTNLHDYGMLLPCGIDKFRGVEFVCCPLAEESDNVDSADAEEDDSDVWWGGADTDYADGSEDKVVEVAEEEEVAEVEEEEADDDEDDEDGDEVEEEAEEPYEEATERTTSIATTTTTTTESVEEVVREVCSEQAETGPCRAMISRWYFDVTEGKCAPFFYGGCGGNRNNFDTEEYCMAVCGSAIPTTAASTPDAVDKYLETPGDENEHAHFQKAKERLEAKHRERMSQVMREWEEAERQAKNLPKADKKAVIQHFQEKVESLEQEAANERQQLVETHMARVEAMLNDRRRLALENYITALQAVPPRPRHVFNMLKKYVRAEQKDRQHTLKHFEHVRMVDPKKAAQIRSQVMTHLRVIYERMNQSLSLLYNVPAVAEEIQDEVDELLQKEQNYSDDVLANMISEPRISYGNDALMPSLTETKTTVELLPVNGEFSLDDLQPWHSFGADSVPANTENEVEPVDARPAADRGLTTRPGSGLTNIKTEEISEVKMDAEFRHDSGYEVHHQKLHGGRCCHSDSDRHHLGDAEEETVHIHSSWCGGG

SEQ ID NO: 824804 - protein, 731 aa, Homo sapiens
MKYKALSSTLYTSQNGKWDSDPSGTKTCIDTKEGILQYCQEVYPELQITNVVEANQPVTIQNWCKRGRKQCKTHPHFVIPYRCLVGEFVSDALLVPDKCKFLHQERMDVCETHLHWHTVAKETCSEKSTNLHDYGMLLPCGIDKFRGVEFVCCPLAEESDNVDSADAEEDDSDVWWGGADTDYADGSEDKVVEVAEEEEVAEVEEEEADDDEDDEDGDEVEEEAEEPYEEATERTTSIATTTTTTTESVEEVVREVCSEQAETGPCRAMISRWYFDVTEGKCAPFFYGGCGGNRNNFDTEEYCMAVCGSAIPTTAASTPDAVDKYLETPGDENEHAHFQKAKERLEAKHRERMSQVMREWEEAERQAKNLPKADKKAVIQHFQEKVESLEQEAANERQQLVETHMARVEAMLNDRRRLALENYITALQAVPPRPRHVFNMLKKYVRAEQKDRQHTLKHFEHVRMVDPKKAAQIRSQVMTHLRVIYERMNQSLSLLYNVPAVAEEIQDEVDELLQKEQNYSDDVLANMISEPRISYGNDALMPSLTETKTTVELLPVNGEFSLDDLQPWHSFGADSVPANTENEVEPVDARPAADRGLTTRPGSGLTNIKTEEISEVKMDAEFRHDSGYEVHHQKLVFFAEDVGSNKGAIIGLMVGGVVIATVIVITLVMLKKKQYTSIHHGVVEVDAAVTPEERHLSKMQQNGYENPTYKLASEVGQQNHCFTTHRCPFIE

SEQ ID NO: 824805 - protein, 332 aa, Homo sapiens
MKYKALSSTLYTSQNGKWDSDPSGTKTCIDTKEGILQYCQEVYPELQITNVVEANQPVTIQNWCKRGRKQCKTHPHFVIPYRCLVGEFVSDALLVPDKCKFLHQERMDVCETHLHWHTVAKETCSEKSTNLHDYGMLLPCGIDKFRGVEFVCCPLAEESDNVDSADAEEDDSDVWWGGADTDYADGSEDKVVEVAEEEEVAEVEEEEADRGLTTRPGSGLTNIKTEEISEVKMDAEFRHDSGYEVHHQKLVFFAEDVGSNKGAIIGLMVGGVVIATVIVITLVMLKKKQYTSIHHGVVEVDAAVTPEERHLSKMQQNGYENPTYKFFEQMQN

SEQ ID NO: 824806 - protein, 717 aa, Homo sapiens; identical to SEQ ID NO: 824795

SEQ ID NO: 824807 - protein, 717 aa, Homo sapiens; identical to SEQ ID NO: 824795

SEQ ID NO: 824808 - protein, 717 aa, Homo sapiens; identical to SEQ ID NO: 824795

SEQ ID NO: 824809 - protein, 717 aa, Homo sapiens; identical to SEQ ID NO: 824795

SEQ ID NO: 824810 - protein, 717 aa, Homo sapiens
MKYKALSSTLYTSQNGKWDSDPSGTKTCIDTKEGILQYCQEVYPELQITNVVEANQPVTIQNWCKRGRKQCKTHPHFVIPYRCLVGEFVSDALLVPDKCKFLHQERMDVCETHLHWHTVAKETCSEKSTNLHDYGMLLPCGIDKFRGVEFVCCPLAEESDNVDSADAEEDDSDVWWGGADTDYADGSEDKVVEVAEEEEVAEVEEEEADDDEDDEDGDEVEEEAEEPYEEATERTTSIATTTTTTTESVEEVVREVCSEQAETGPCRAMISRWYFDVTEGKCAPFFYGGCGGNRNNFDTEEYCMAVCGSAIPTTAASTPDAVDKYLETPGDENEHAHFQKAKERLEAKHRERMSQVMREWEEAERQAKNLPKADKKAVIQHFQEKVESLEQEAANERQQLVETHMARVEAMLNDRRRLALENYITALQAVPPRPRHVFNMLKKYVRAEQKDRQHTLKHFEHVRMVDPKKAAQIRSQVMTHLRVIYERMNQSLSLLYNVPAVAEEIQDEVDELLQKEQNYSDDVLANMISEPRISYGNDALMPSLTETKTTVELLPVNGEFSLDDLQPWHSFGADSVPANTENEVEPVDARPAADRGLTTRPGSGLTNIKTEEISEVKMDAEFRHDSGYEVHHQKLVFFAEDVGSNKGAIIGLMVGGVVIATVIVITLVMLKKKQYTSIHHGVVEVDAAVTPEERHLSKMQQNGYENPTYKFGIFIGR

SEQ ID NO: 824811 - protein, 765 aa, Homo sapiens
MKYKALSSTLYTSQNGKWDSDPSGTKTCIDTKEGILQYCQEVYPELQITNVVEANQPVTIQNWCKRGRKQCKTHPHFVIPYRCLVGEFVSDALLVPDKCKFLHQERMDVCETHLHWHTVAKETCSEKSTNLHDYGMLLPCGIDKFRGVEFVCCPLAEESDNVDSADAEEDDSDVWWGGADTDYADGSEDKVVEVAEEEEVAEVEEEEADDDEDDEDGDEVEEEAEEPYEEATERTTSIATTTTTTTESVEEVVREVCSEQAETGPCRAMISRWYFDVTEGKCAPFFYGGCGGNRNNFDTEEYCMAVCGSAIPTTAASTPDAVDKYLETPGDENEHAHFQKAKERLEAKHRERMSQVMREWEEAERQAKNLPKADKKAVIQHFQEKVESLEQEAANERQQLVETHMARVEAMLNDRRRLALENYITALQAVPPRPRHVFNMLKKYVRAEQKDRQHTLKHFEHVRMVDPKKAAQIRSQVMTHLRVIYERMNQSLSLLYNVPAVAEEIQDEVDELLQKEQNYSDDVLANMISEPRISYGNDALMPSLTETKTTVELLPVNGEFSLDDLQPWHSFGADSVPANTENEVEPVDARPAADRGLTTRPGSGLTNIKTEEISEVKMDAEFRHDSGYEVHHQKLVFFAEDVGSNKGAIIGLMVGGVVIATVIVITLVMLKKKQYTSIHHGVVEVDAAVTPEERHLSKMQQNGYENPTYKLSSFENAYAHAINDAGDVVGSYKDQLGNAHAYLSSAQGTIIEIGPQPGVTNYRGL

SEQ ID NO: 824812 - protein, 693 aa, Homo sapiens
MKYKALSSTLYTSQNGKWDSDPSGTKTCIDTKEGILQYCQEVYPELQITNVVEANQPVTIQNWCKRGRKQCKTHPHFVIPYRCLVGEFVSDALLVPDKCKFLHQERMDVCETHLHWHTVAKETCSEKSTNLHDYGMLLPCGIDKFRGVEFVCCPLAEESDNVDSADAEEDDSDVWWGGADTDYADGSEDKVVEVAEEEEVAEVEEEEADDDEDDEDGDEVEEEAEEPYEEATERTTSIATTTTTTTESVEEVVREVCSEQAETGPCRAMISRWYFDVTEGKCAPFFYGGCGGNRNNFDTEEYCMAVCGSAIPTTAASTPDAVDKYLETPGDENEHAHFQKAKERLEAKHRERMSQVMREWEEAERQAKNLPKADKKAVIQHFQEKVESLEQEAANERQQLVETHMARVEAMLNDRRRLALENYITALQAVPPRPRHVFNMLKKYVRAEQKDRQHTLKHFEHVRMVDPKKAAQIRSQVMTHLRVIYERMNQSLSLLYNVPAVAEEIQDEVDELLQKEQNYSDDVLANMISEPRISYGNDALMPSLTETKTTVELLPVNGEFSLDDLQPWHSFGADSVPANTENEVEPVDARPAADRGLTTRPGSGLTNIKTEEISEVKMDAEFRHDSGYEVHHQKLVFFAEDVGSNKGAIIGLMVGGVVIATVIVITLVMLKKKRGSEPGETWLLSREKPGSEP

SEQ ID NO: 824813 - protein, 660 aa, Homo sapiens
MKYKALSSTLYTSQNGKWDSDPSGTKTCIDTKEGILQYCQEVYPELQITNVVEANQPVTIQNWCKRGRKQCKTHPHFVIPYRCLVGEFVSDALLVPDKCKFLHQERMDVCETHLHWHTVAKETCSEKSTNLHDYGMLLPCGIDKFRGVEFVCCPLAEESDNVDSADAEEDDSDVWWGGADTDYADGSEDKVVEVAEEEEVAEVEEEEADDDEDDEDGDEVEEEAEEPYEEATERTTSIATTTTTTTESVEEVVREVCSEQAETGPCRAMISRWYFDVTEGKCAPFFYGGCGGNRNNFDTEEYCMAVCGSAIPTTAASTPDAVDKYLETPGDENEHAHFQKAKERLEAKHRERMSQVMREWEEAERQAKNLPKADKKAVIQHFQEKVESLEQEAANERQQLVETHMARVEAMLNDRRRLALENYITALQAVPPRPRHVFNMLKKYVRAEQKDRQHTLKHFEHVRMVDPKKAAQIRSQVMTHLRVIYERMNQSLSLLYNVPAVAEEIQDEVDELLQKEQNYSDDVLANMISEPRISYGNDALMPSLTETKTTVELLPVNGEFSLDDLQPWHSFGADSVPANTENEVEPVDARPAADRGLTTRPGSGLTNIKTEEISEVKMDAEFRHDSGYEVHHQKLVFFAEDVGSNKGAIIGLVTPPESCK

SEQ ID NO: 824814 - protein, 668 aa, Homo sapiens
MKYKALSSTLYTSQNGKWDSDPSGTKTCIDTKEGILQYCQEVYPELQITNVVEANQPVTIQNWCKRGRKQCKTHPHFVIPYRCLVGEFVSDALLVPDKCKFLHQERMDVCETHLHWHTVAKETCSEKSTNLHDYGMLLPCGIDKFRGVEFVCCPLAEESDNVDSADAEEDDSDVWWGGADTDYADGSEDKVVEVAEEEEVAEVEEEEADDDEDDEDGDEVEEEAEEPYEEATERTTSIATTTTTTTESVEEVVREVCSEQAETGPCRAMISRWYFDVTEGKCAPFFYGGCGGNRNNFDTEEYCMAVCGSAIPTTAASTPDAVDKYLETPGDENEHAHFQKAKERLEAKHRERMSQVMREWEEAERQAKNLPKADKKAVIQHFQEKVESLEQEAANERQQLVETHMARVEAMLNDRRRLALENYITALQAVPPRPRHVFNMLKKYVRAEQKDRQHTLKHFEHVRMVDPKKAAQIRSQVMTHLRVIYERMNQSLSLLYNVPAVAEEIQDEVDELLQKEQNYSDDVLANMISEPRISYGNDALMPSLTETKTTVELLPVNGEFSLDDLQPWHSFGADSVPANTENEVEPVDARPAADRGLTTRPGSGLTNIKTEEISEVKMDAEFRHDSGYEVHHQKLLNLLFVTEMRVSNKTQSLDFDGVFHSSSPGVTS

SEQ ID NO: 824815 - protein, 646 aa, Homo sapiens
MKYKALSSTLYTSQNGKWDSDPSGTKTCIDTKEGILQYCQEVYPELQITNVVEANQPVTIQNWCKRGRKQCKTHPHFVIPYRCLVGEFVSDALLVPDKCKFLHQERMDVCETHLHWHTVAKETCSEKSTNLHDYGMLLPCGIDKFRGVEFVCCPLAEESDNVDSADAEEDDSDVWWGGADTDYADGSEDKVVEVAEEEEVAEVEEEEADDDEDDEDGDEVEEEAEEPYEEATERTTSIATTTTTTTESVEEVVREVCSEQAETGPCRAMISRWYFDVTEGKCAPFFYGGCGGNRNNFDTEEYCMAVCGSAIPTTAASTPDAVDKYLETPGDENEHAHFQKAKERLEAKHRERMSQVMREWEEAERQAKNLPKADKKAVIQHFQEKVESLEQEAANERQQLVETHMARVEAMLNDRRRLALENYITALQAVPPRPRHVFNMLKKYVRAEQKDRQHTLKHFEHVRMVDPKKAAQIRSQVMTHLRVIYERMNQSLSLLYNVPAVAEEIQDEVDELLQKEQNYSDDVLANMISEPRISYGNDALMPSLTETKTTVELLPVNGEFSLDDLQPWHSFGADSVPANTENEVEPVDARPAADRGLTTRPGSGLTNIKTEEISEVKMFWGKKFNHQGKEMTKQKKVCSAAHDGEY

SEQ ID NO: 824816 - protein, 610 aa, Homo sapiens
MKYKALSSTLYTSQNGKWDSDPSGTKTCIDTKEGILQYCQEVYPELQITNVVEANQPVTIQNWCKRGRKQCKTHPHFVIPYRCLVGEFVSDALLVPDKCKFLHQERMDVCETHLHWHTVAKETCSEKSTNLHDYGMLLPCGIDKFRGVEFVCCPLAEESDNVDSADAEEDDSDVWWGGADTDYADGSEDKVVEVAEEEEVAEVEEEEADDDEDDEDGDEVEEEAEEPYEEATERTTSIATTTTTTTESVEEVVREVCSEQAETGPCRAMISRWYFDVTEGKCAPFFYGGCGGNRNNFDTEEYCMAVCGSAIPTTAASTPDAVDKYLETPGDENEHAHFQKAKERLEAKHRERMSQVMREWEEAERQAKNLPKADKKAVIQHFQEKVESLEQEAANERQQLVETHMARVEAMLNDRRRLALENYITALQAVPPRPRHVFNMLKKYVRAEQKDRQHTLKHFEHVRMVDPKKAAQIRSQVMTHLRVIYERMNQSLSLLYNVPAVAEEIQDEVDELLQKEQNYSDDVLANMISEPRISYGNDALMPSLTETKTTVELLPVNGEFSLDDLQPWHSFGADSVPANTENEVEPVDARPAADRGLTTRPVWVVIAFRL

SEQ ID NO: 824817 - protein, 529 aa, Homo sapiens
MKYKALSSTLYTSQNGKWDSDPSGTKTCIDTKEGILQYCQEVYPELQITNVVEANQPVTIQNWCKRGRKQCKTHPHFVIPYRCLVGEFVSDALLVPDKCKFLHQERMDVCETHLHWHTVAKETCSEKSTNLHDYGMLLPCGIDKFRGVEFVCCPLAEESDNVDSADAEEDDSDVWWGGADTDYADGSEDKVVEVAEEEEVAEVEEEEADDDEDDEDGDEVEEEAEEPYEEATERTTSIATTTTTTTESVEEVVREVCSEQAETGPCRAMISRWYFDVTEGKCAPFFYGGCGGNRNNFDTEEYCMAVCGSAIPTTAASTPDAVDKYLETPGDENEHAHFQKAKERLEAKHRERMSQVMREWEEAERQAKNLPKADKKAVIQHFQEKVESLEQEAANERQQLVETHMARVEAMLNDRRRLALENYITALQAVPPRPRHVFNMLKKYVRAEQKDRQHTLKHFEHVRMVDPKKAAQIRSQVMTHLRVIYERMNQSLSLLYNVPAVAEEIQDEVGAVAHACNSSILGGQGGQMT

SEQ ID NO: 824818 - protein, 465 aa, Homo sapiens
MKYKALSSTLYTSQNGKWDSDPSGTKTCIDTKEGILQYCQEVYPELQITNVVEANQPVTIQNWCKRGRKQCKTHPHFVIPYRCLVGEFVSDALLVPDKCKFLHQERMDVCETHLHWHTVAKETCSEKSTNLHDYGMLLPCGIDKFRGVEFVCCPLAEESDNVDSADAEEDDSDVWWGGADTDYADGSEDKVVEVAEEEEVAEVEEEEADDDEDDEDGDEVEEEAEEPYEEATERTTSIATTTTTTTESVEEVVREVCSEQAETGPCRAMISRWYFDVTEGKCAPFFYGGCGGNRNNFDTEEYCMAVCGSAIPTTAASTPDAVDKYLETPGDENEHAHFQKAKERLEAKHRERMSQVMREWEEAERQAKNLPKADKKAVIQHFQEKVESLEQEAANERQQLVETHMARVEAMLNDRRRLALENYITALQAVPPRPRHVFNMLKKYVMSEEVDSGATEAQKEAVSLP

SEQ ID NO: 824819 - protein, 370 aa, Homo sapiens
MKYKALSSTLYTSQNGKWDSDPSGTKTCIDTKEGILQYCQEVYPELQITNVVEANQPVTIQNWCKRGRKQCKTHPHFVIPYRCLVGEFVSDALLVPDKCKFLHQERMDVCETHLHWHTVAKETCSEKSTNLHDYGMLLPCGIDKFRGVEFVCCPLAEESDNVDSADAEEDDSDVWWGGADTDYADGSEDKVVEVAEEEEVAEVEEEEADDDEDDEDGDEVEEEAEEPYEEATERTTSIATTTTTTTESVEEVVREVCSEQAETGPCRAMISRWYFDVTEGKCAPFFYGGCGGNRNNFDTEEYCMAVCGSAIPTTAASTPDAVDKYLETPGDENEHAHFQKAKERLEAKHRERMSQHERMGRGRTPDASLV

SEQ ID NO: 824820 - protein, 335 aa, Homo sapiens
MKYKALSSTLYTSQNGKWDSDPSGTKTCIDTKEGILQYCQEVYPELQITNVVEANQPVTIQNWCKRGRKQCKTHPHFVIPYRCLVGEFVSDALLVPDKCKFLHQERMDVCETHLHWHTVAKETCSEKSTNLHDYGMLLPCGIDKFRGVEFVCCPLAEESDNVDSADAEEDDSDVWWGGADTDYADGSEDKVVEVAEEEEVAEVEEEEADDDEDDEDGDEVEEEAEEPYEEATERTTSIATTTTTTTESVEEVVREVCSEQAETGPCRAMISRWYFDVTEGKCAPFFYGGCGGNRNNFDTEEYCMAVCGSAMSQSLLKTTQEPLARDPVKRTLSFT

SEQ ID NO: 824821 - protein, 266 aa, Homo sapiens
MKYKALSSTLYTSQNGKWDSDPSGTKTCIDTKEGILQYCQEVYPELQITNVVEANQPVTIQNWCKRGRKQCKTHPHFVIPYRCLVGEFVSDALLVPDKCKFLHQERMDVCETHLHWHTVAKETCSEKSTNLHDYGMLLPCGIDKFRGVEFVCCPLAEESDNVDSADAEEDDSDVWWGGADTDYADGSEDKVVEVAEEEEVAEVEEEEADDDEDDEDGDEVEEEAEEPYEEATERTTSIATTTTTTTESVEEVVRGGNAGGSLCASS

SEQ ID NO: 824822 - protein, 200 aa, Homo sapiens
MKYKALSSTLYTSQNGKWDSDPSGTKTCIDTKEGILQYCQEVYPELQITNVVEANQPVTIQNWCKRGRKQCKTHPHFVIPYRCLVGEFVSDALLVPDKCKFLHQERMDVCETHLHWHTVAKETCSEKSTNLHDYGMLLPCGIDKFRGVEFVCCPLAEESDNVDSADAEEDDSDVWWGGADTDYADGRQIQFSLTSLKFHL

SEQ ID NO: 824823 - protein, 109 aa, Homo sapiens
MKYKALSSTLYTSQNGKWDSDPSGTKTCIDTKEGILQYCQEVYPELQITNVVEANQPVTIQNWCKRGRKQCKTHPHFVIPYRCLGEPAGRGAGVDWGPGLEGRKRGCSC

SEQ ID NO: 824824 - protein, 135 aa, Homo sapiens
MKYKALSSTLYTSQNGKWDSDPSGTKTCIDTKEGILQYCQEVYPELQITNVVEANQPVTIQNWCKRGRKQCKTHPHFVIPYRCLVGEFVSDALLVPDKCKFLHPQRFILPQRFILPQRFILSQRFILPQRFILPY

SEQ ID NO: 824825 - protein, 190 aa, Homo sapiens
MKYKALSSTLYTSQNGKWDSDPSGTKTCIDTKEGILQYCQEVYPELQITNVVEANQPVTIQNWCKRGRKQCKTHPHFVIPYRCLVGEFVSDALLVPDKCKFLHQERMDVCETHLHWHTVAKETCSEKSTNLHDYGMLLPCGIDKFRGVEFVCCPLAEESDNVDSADAEEDDSDVWWGGADTDYADGSEDK

SEQ ID NO: 824826 - protein, 305 aa, Homo sapiens
MLPGLALLLLAAWTARALEVPTDGNAGLLAEPQIAMFCGRLNMHMNVQNGKWDSDPSGTKTCIDTKEGILQYCQEVYPELQITNVVEANQPVTIQNWCKRGRKQCKTHPHFVIPYRCLVGEFVSDALLVPDKCKFLHQERMDVCETHLHWHTVAKETCSEKSTNLHDYGMLLPCGIDKFRGVEFVCCPLAEESDNVDSADAEEDDSDVWWGGADTDYADGSEDKVVEVAEEEEVAEVEEEEADDDEDDEDGDEVEEEAEEPYEEATERTTSIATTTTTTTESVEEVVREKWYKEVHSGQARWLML

SEQ ID NO: 824827 - protein, 661 aa, Homo sapiens
MKYKALSSTLYTSQNGKWDSDPSGTKTCIDTKEGILQYCQEVYPELQITNVVEANQPVTIQNWCKRGRKQCKTHPHFVIPYRCLVGEFVSDALLVPDKCKFLHQERMDVCETHLHWHTVAKETCSEKSTNLHDYGMLLPCGIDKFRGVEFVCCPLAEESDNVDSADAEEDDSDVWWGGADTDYADGSEDKVVEVAEEEEVAEVEEEEADDDEDDEDGDEVEEEAEEPYEEATERTTSIATTTTTTTESVEEVVRVPTTAASTPDAVDKYLETPGDENEHAHFQKAKERLEAKHRERMSQVMREWEEAERQAKNLPKADKKAVIQHFQEKVESLEQEAANERQQLVETHMARVEAMLNDRRRLALENYITALQAVPPRPRHVFNMLKKYVRAEQKDRQHTLKHFEHVRMVDPKKAAQIRSQVMTHLRVIYERMNQSLSLLYNVPAVAEEIQDEVDELLQKEQNYSDDVLANMISEPRISYGNDALMPSLTETKTTVELLPVNGEFSLDDLQPWHSFGADSVPANTENEVEPVDARPAADRGLTTRPGSGLTNIKTEEISEVKMDAEFRHDSGYEVHHQKLVFFAEDVGSNKGAIIGLMVGGVVIATVIVITLVMLKKKQYTSIHHGVVEVDAAVTPEERHLSKMQQNGYENPTYKFFEQMQN

SEQ ID NO: 824828 - protein, 650 aa, Homo sapiens
HLEDPVSSPFVIPYRCLVGEFVSDALLVPDKCKFLHQERMDVCETHLHWHTVAKETCSEKSTNLHDYGMLLPCGIDKFRGVEFVCCPLAEESDNVDSADAEEDDSDVWWGGADTDYADGSEDKVVEVAEEEEVAEVEEEEADDDEDDEDGDEVEEEAEEPYEEATERTTSIATTTTTTTESVEEVVREVCSEQAETGPCRAMISRWYFDVTEGKCAPFFYGGCGGNRNNFDTEEYCMAVCGSAIPTTAASTPDAVDKYLETPGDENEHAHFQKAKERLEAKHRERMSQVMREWEEAERQAKNLPKADKKAVIQHFQEKVESLEQEAANERQQLVETHMARVEAMLNDRRRLALENYITALQAVPPRPRHVFNMLKKYVRAEQKDRQHTLKHFEHVRMVDPKKAAQIRSQVMTHLRVIYERMNQSLSLLYNVPAVAEEIQDEVDELLQKEQNYSDDVLANMISEPRISYGNDALMPSLTETKTTVELLPVNGEFSLDDLQPWHSFGADSVPANTENEVEPVDARPAADRGLTTRPGSGLTNIKTEEISEVKMDAEFRHDSGYEVHHQKLVFFAEDVGSNKGAIIGLMVGGVVIATVIVITLVMLKKKQYTSIHHGVVEVDAAVTPEERHLSKMQQNGYENPTYKFFEQMQN

SEQ ID NO: 824829 - protein, 467 aa, Homo sapiens
TGLGNPSLPATYTRAQVEEGDPTVIATTTTTTTESVEEVVRVSQSLLKTTQEPLARDPVKLPTTAASTPDAVDKYLETPGDENEHAHFQKAKERLEAKHRERMSQVMREWEEAERQAKNLPKADKKAVIQHFQEKVESLEQEAANERQQLVETHMARVEAMLNDRRRLALENYITALQAVPPRPRHVFNMLKKYVRAEQKDRQHTLKHFEHVRMVDPKKAAQIRSQVMTHLRVIYERMNQSLSLLYNVPAVAEEIQDEVDELLQKEQNYSDDVLANMISEPRISYGNDALMPSLTETKTTVELLPVNGEFSLDDLQPWHSFGADSVPANTENEVEPVDARPAADRGLTTRPGSGLTNIKTEEISEVKMDAEFRHDSGYEVHHQKLVFFAEDVGSNKGAIIGLMVGGVVIATVIVITLVMLKKKQYTSIHHGVVEVDAAVTPEERHLSKMQQNGYENPTYKFFEQMQN

SEQ ID NO: 824830 - protein, 717 aa, Homo sapiens; identical to SEQ ID NO: 824795

SEQ ID NO: 824831 - protein, 289 aa, Homo sapiens
RGSPGVSCIVGSPELCVHAEQKDRQHTLKHFEHVRMVDPKKAAQIRSQVMTHLRVIYERMNQSLSLLYNVPAVAEEIQDEVDELLQKEQNYSDDVLANMISEPRISYGNDALMPSLTETKTTVELLPVNGEFSLDDLQPWHSFGADSVPANTENEVEPVDARPAADRGLTTRPGSGLTNIKTEEISEVKMDAEFRHDSGYEVHHQKLVFFAEDVGSNKGAIIGLMVGGVVIATVIVITLVMLKKKQYTSIHHGVVEVDAAVTPEERHLSKMQQNGYENPTYKFFEQMQN

SEQ ID NO: 824832 - protein, 717 aa, Homo sapiens; identical to SEQ ID NO: 824795

SEQ ID NO: 824833 - protein, 377 aa, Homo sapiens
MKYKALSSTLYTSQNGKWDSDPSGTKTCIDTKEGILQYCQEVYPELQITNVVEANQPVTIQNWCKRGRKQCKTHPHFVIPYRCLVGEFVSDALLVPDKCKFLHQERMDVCETHLHWHTVAKETCSEKSTNLHDYGMLLPCGIDKFRGVEFVCCPLAEESDNVDSADAEEDDSDVWWGGADTDYADGSEDKVVEVAEEEEVAEVEEEEADDDEDDEDGDEVEEEAEEPYEEATERTTSIATTTTTTTESVEEVVREVCSEQAETGPCRAMISRWYFDVTEGKCAPFFYGGCGGNRNNFDTEEYCMAVCGSAMSQSLLKTTQEPLARDPVKLPTTAASTPDAVDKYLETPGDENEHAHFQKAKERLEAKHRERMSQVLG

SEQ ID NO: 824834 - protein, 191 aa, Homo sapiens
MISEPRISYGNDALMPSLTETKTTVELLPVNGEFSLDDLQPWHSFGADSVPANTENEVEPVDARPAADRGLTTRPGSGLTNIKTEEISEVKMDAEFRHDSGYEVHHQKLVFFAEDVGSNKGAIIGLMVGGVVIATVIVITLVMLKKKQYTSIHHGVVEVDAAVTPEERHLSKMQQNGYENPTYKFFEQMQN

SEQ ID NO: 824835 - protein, 717 aa, Homo sapiens; identical to SEQ ID NO: 824795

SEQ ID NO: 824836 - protein, 717 aa, Homo sapiens; identical to SEQ ID NO: 824795

SEQ ID NO: 824837 - protein, 717 aa, Homo sapiens; identical to SEQ ID NO: 824795

SEQ ID NO: 824838 - protein, 75 aa, Homo sapiens
GTQIPLSIPHPFIMVWWRLTPLSPQRSATCPRCSRTATKIQPTSSLSRCRTRPPPQQPLKLDSKTIASLPIGVHL

SEQ ID NO: 824839 - protein, 712 aa, Homo sapiens
MKYKALSSTLYTSQNGKWDSDPSGTKTCIDTKEGILQYCQEVYPELQITNVVEANQPVTIQNWCKRGRKQCKTHPHFVIPYRCLVGEFVSDALLVPDKCKFLHQERMDVCETHLHWHTVAKETCSEKSTNLHDYGMLLPCGIDKFRGVEFVCCPLAEESDNVDSADAEEDDSDVWWGGADTDYADGSEDKVVEVAEEEEVAEVEEEEADDDEDDEDGDEVEEEAEEPYEEATERTTSIATTTTTTTESVEEVVREVCSEQAETGPCRAMISRWYFDVTEGKCAPFFYGGCGGNRNNFDTEEYCMAVCGSAIPTTAASTPDAVDKYLETPGDENEHAHFQKAKERLEAKHRERMSQVMREWEEAERQAKNLPKADKKAVIQHFQEKVESLEQEAANERQQLVETHMARVEAMLNDRRRLALENYITALQAVPPRPRHVFNMLKKYVRAEQKDRQHTLKHFEHVRMVDPKKAAQIRSQVMTHLRVIYERMNQSLSLLYNVPAVAEEIQDEVDELLQKEQNYSDDVLANMISEPRISYGNDALMPSLTETKTTVELLPVNGEFSLDDLQPWHSFGADSVPANTENEVEPVDARPAADRGLTTRPGSGLTNIKTEEISEVKMDAEFRHDSGYEVHHQKLVFFAEDVGSNKGAIIGLMVGGVVIATVIVITLVMLKKKQYTSIHHGVVEVDAAVTPEERHLSKMQQNGYENPTYKLK

SEQ ID NO: 824840 - protein, 701 aa, Homo sapiens
MKYKALSSTLYTSQNGKWDSDPSGTKTCIDTKEGILQYCQEVYPELQITNVVEANQPVTIQNWCKRGRKQCKTHPHFVIPYRCLVGEFVSDALLVPDKCKFLHQERMDVCETHLHWHTVAKETCSEKSTNLHDYGMLLPCGIDKFRGVEFVCCPLAEESDNVDSADAEEDDSDVWWGGADTDYADGSEDKVVEVAEEEEVAEVEEEEADDDEDDEDGDEVEEEAEEPYEEATERTTSIATTTTTTTESVEEVVREVCSEQAETGPCRAMISRWYFDVTEGKCAPFFYGGCGGNRNNFDTEEYCMAVCGSAIPTTAASTPDAVDKYLETPGDENEHAHFQKAKERLEAKHRERMSQVMREWEEAERQAKNLPKADKKAVIQHFQEKVESLEQEAANERQQLVETHMARVEAMLNDRRRLALENYITALQAVPPRPRHVFNMLKKYVRAEQKDRQHTLKHFEHVRMVDPKKAAQIRSQVMTHLRVIYERMNQSLSLLYNVPAVAEEIQDEVDELLQKEQNYSDDVLANMISEPRISYGNDALMPSLTETKTTVELLPVNGEFSLDDLQPWHSFGADSVPANTENEVEPVDARPAADRGLTTRPGSGLTNIKTEEISEVKMDAEFRHDSGYEVHHQKLVFFAEDVGSNKGAIIGLMVGGVVIATVIVITLVMLKKKQYTSIHHGVVELRRCDPRGAHIVTGELI

SEQ ID NO: 824841 - protein, 654 aa, Homo sapiens
MKYKALSSTLYTSQNGKWDSDPSGTKTCIDTKEGILQYCQEVYPELQITNVVEANQPVTIQNWCKRGRKQCKTHPHFVIPYRCLVGEFVSDALLVPDKCKFLHQERMDVCETHLHWHTVAKETCSEKSTNLHDYGMLLPCGIDKFRGVEFVCCPLAEESDNVDSADAEEDDSDVWWGGADTDYADGSEDKVVEVAEEEEVAEVEEEEADDDEDDEDGDEVEEEAEEPYEEATERTTSIATTTTTTTESVEEVVREVCSEQAETGPCRAMISRWYFDVTEGKCAPFFYGGCGGNRNNFDTEEYCMAVCGSAIPTTAASTPDAVDKYLETPGDENEHAHFQKAKERLEAKHRERMSQVMREWEEAERQAKNLPKADKKAVIQHFQEKVESLEQEAANERQQLVETHMARVEAMLNDRRRLALENYITALQAVPPRPRHVFNMLKKYVRAEQKDRQHTLKHFEHVRMVDPKKAAQIRSQVMTHLRVIYERMNQSLSLLYNVPAVAEEIQDEVDELLQKEQNYSDDVLANMISEPRISYGNDALMPSLTETKTTVELLPVNGEFSLDDLQPWHSFGADSVPANTENEVEPVDARPAADRGLTTRPGSGLTNIKTEEISEVKMDAEFRHDSGYEVHHQKLVFFAEDVGSNKGAIIGLVI

SEQ ID NO: 824842 - protein, 655 aa, Homo sapiens
MKYKALSSTLYTSQNGKWDSDPSGTKTCIDTKEGILQYCQEVYPELQITNVVEANQPVTIQNWCKRGRKQCKTHPHFVIPYRCLVGEFVSDALLVPDKCKFLHQERMDVCETHLHWHTVAKETCSEKSTNLHDYGMLLPCGIDKFRGVEFVCCPLAEESDNVDSADAEEDDSDVWWGGADTDYADGSEDKVVEVAEEEEVAEVEEEEADDDEDDEDGDEVEEEAEEPYEEATERTTSIATTTTTTTESVEEVVREVCSEQAETGPCRAMISRWYFDVTEGKCAPFFYGGCGGNRNNFDTEEYCMAVCGSAIPTTAASTPDAVDKYLETPGDENEHAHFQKAKERLEAKHRERMSQVMREWEEAERQAKNLPKADKKAVIQHFQEKVESLEQEAANERQQLVETHMARVEAMLNDRRRLALENYITALQAVPPRPRHVFNMLKKYVRAEQKDRQHTLKHFEHVRMVDPKKAAQIRSQVMTHLRVIYERMNQSLSLLYNVPAVAEEIQDEVDELLQKEQNYSDDVLANMISEPRISYGNDALMPSLTETKTTVELLPVNGEFSLDDLQPWHSFGADSVPANTENEVEPVDARPAADRGLTTRPGSGLTNIKTEEISEVKMDAEFRHDSGYEVHHQKLVLCRRCGSSASSVYPQERAM

SEQ ID NO: 824843 - protein, 597 aa, Homo sapiens
MKYKALSSTLYTSQNGKWDSDPSGTKTCIDTKEGILQYCQEVYPELQITNVVEANQPVTIQNWCKRGRKQCKTHPHFVIPYRCLVGEFVSDALLVPDKCKFLHQERMDVCETHLHWHTVAKETCSEKSTNLHDYGMLLPCGIDKFRGVEFVCCPLAEESDNVDSADAEEDDSDVWWGGADTDYADGSEDKVVEVAEEEEVAEVEEEEADDDEDDEDGDEVEEEAEEPYEEATERTTSIATTTTTTTESVEEVVREVCSEQAETGPCRAMISRWYFDVTEGKCAPFFYGGCGGNRNNFDTEEYCMAVCGSAIPTTAASTPDAVDKYLETPGDENEHAHFQKAKERLEAKHRERMSQVMREWEEAERQAKNLPKADKKAVIQHFQEKVESLEQEAANERQQLVETHMARVEAMLNDRRRLALENYITALQAVPPRPRHVFNMLKKYVRAEQKDRQHTLKHFEHVRMVDPKKAAQIRSQVMTHLRVIYERMNQSLSLLYNVPAVAEEIQDEVDELLQKEQNYSDDVLANMISEPRISYGNDALMPSLTETKTTVELLPVNGEFSLDDLQPWHSFGADSVPANTENEGKSPLSECQRNPGR

SEQ ID NO: 824844 - protein, 511 aa, Homo sapiens
MKYKALSSTLYTSQNGKWDSDPSGTKTCIDTKEGILQYCQEVYPELQITNVVEANQPVTIQNWCKRGRKQCKTHPHFVIPYRCLVGEFVSDALLVPDKCKFLHQERMDVCETHLHWHTVAKETCSEKSTNLHDYGMLLPCGIDKFRGVEFVCCPLAEESDNVDSADAEEDDSDVWWGGADTDYADGSEDKVVEVAEEEEVAEVEEEEADDDEDDEDGDEVEEEAEEPYEEATERTTSIATTTTTTTESVEEVVREVCSEQAETGPCRAMISRWYFDVTEGKCAPFFYGGCGGNRNNFDTEEYCMAVCGSAIPTTAASTPDAVDKYLETPGDENEHAHFQKAKERLEAKHRERMSQVMREWEEAERQAKNLPKADKKAVIQHFQEKVESLEQEAANERQQLVETHMARVEAMLNDRRRLALENYITALQAVPPRPRHVFNMLKKYVRAEQKDRQHTLKHFEHVRMVDPKKAAQIRSQVMTHLRVIYERMNQSLSLLYNVPAVAEEIQDEVGK

SEQ ID NO: 824845 - protein, 377 aa, Homo sapiens
MKYKALSSTLYTSQNGKWDSDPSGTKTCIDTKEGILQYCQEVYPELQITNVVEANQPVTIQNWCKRGRKQCKTHPHFVIPYRCLVGEFVSDALLVPDKCKFLHQERMDVCETHLHWHTVAKETCSEKSTNLHDYGMLLPCGIDKFRGVEFVCCPLAEESDNVDSADAEEDDSDVWWGGADTDYADGSEDKVVEVAEEEEVAEVEEEEADDDEDDEDGDEVEEEAEEPYEEATERTTSIATTTTTTTESVEEVVREVCSEQAETGPCRAMISRWYFDVTEGKCAPFFYGGCGGNRNNFDTEEYCMAVCGSAIPTTAASTPDAVDKYLETPGDENEHAHFQKAKERLEAKHRERMSQHENKRKKMKIKSLFICFSFSLV

SEQ ID NO: 824846 - protein, 376 aa, Homo sapiens
MKYKALSSTLYTSQNGKWDSDPSGTKTCIDTKEGILQYCQEVYPELQITNVVEANQPVTIQNWCKRGRKQCKTHPHFVIPYRCLVGEFVSDALLVPDKCKFLHQERMDVCETHLHWHTVAKETCSEKSTNLHDYGMLLPCGIDKFRGVEFVCCPLAEESDNVDSADAEEDDSDVWWGGADTDYADGSEDKVVEVAEEEEVAEVEEEEADDDEDDEDGDEVEEEAEEPYEEATERTTSIATTTTTTTESVEEVVREVCSEQAETGPCRAMISRWYFDVTEGKCAPFFYGGCGGNRNNFDTEEYCMAVCGSAMSQSLLKTDTSVILLAEVKGPLISSATWGSFSEQHVQLSSLLVQLEGFCLLGHLLSLGSGSGPYGK

SEQ ID NO: 824847 - protein, 190 aa, Homo sapiens; identical to SEQ ID NO: 824825

SEQ ID NO: 824848 - protein, 209 aa, Homo sapiens
MKYKALSSTLYTSQNGKWDSDPSGTKTCIDTKEGILQYCQEVYPELQITNVVEANQPVTIQNWCKRGRKQCKTHPHFVIPYRCLVGEFVSDALLVPDKCKFLHQERMDVCETHLHWHTVAKETCSEKSTNLHDYGMLLPCGIDKFRGVEFVCCPLAEESDNVDSADAEEDDSDVWWGGADTDYADGRVRWPLCSASEMLKHLVWSICIL

SEQ ID NO: 824849 - protein, 128 aa, Homo sapiens
MKYKALSSTLYTSQNGKWDSDPSGTKTCIDTKEGILQYCQEVYPELQITNVVEANQPVTIQNWCKRGRKQCKTHPHFVIPYRCLVGEFVSDAILVSQGCLFCHGAHSGCWRLFCSSEPRRMGYVMCGY

SEQ ID NO: 824850 - protein, 112 aa, Homo sapiens
DSGCQGGTFRSSRNSEPLYTIMSLFTYLHRARGCTGPDLTMTPPSCCPANPRCLSPATPKCLSPASPRFQSPASPRCLSPALQRSLQHQPSRRPSRSNVVHSHALEELATGY

SEQ ID NO: 824851 - protein, 72 aa, Homo sapiens
RYPSRDRRLYLNMEPCIPKTKEPCQPKVPEPCHPKVPEPCQPKIPEPCQPKVPEPCPSTVTPAPAQQKTKQK

SEQ ID NO: 824852 - protein, 177 aa, Homo sapiens
  misc_feature (6)..(6): Xaa can be any naturally occurring amino acid
  misc_feature (12)..(12): Xaa can be any naturally occurring amino acid
ARSPGXKSWFFXSHRVKQETQRLLAEPVPGIKAEPDESNARYFHVVIAGPQDSPFEGGTFKLELFLPEEYPMAAPKVRFMTKIYHPNVDKLGRICLDILKDKWSPALQIRTVLLSIQALLSAPNPDDPLANDVAEQWKTNEAQAIETASLTLFRRCRWTSLIVGTKMGTLNKHHSPH

SEQ ID NO: 824853 - protein, 118 aa, Homo sapiens [sequence omitted]

SEQ ID NO: 824854 - protein, 152 aa, Homo sapiens
MAGLPRRIIKETQRLLAEPVPGIKAEPDESNARYFHVVIAGPQDSPFEGGTFKLELFLPEEYPMAAPKVRFMTKIYHPNVDKLGRICLDILKDKWSPALQIRTVLLSIQALLSAPNPDDPLANDVAEQWKTNEAQAIETARAWTRLYAMNNI

SEQ ID NO: 824855 - protein, 152 aa, Homo sapiens; identical to SEQ ID NO: 824854

SEQ ID NO: 824856 - protein, 180 aa, Homo sapiens
RLVRGWCGSAEGERSRRRDQRPNSGSDKMAGLPRRIIKETQRLLAEPVPGIKAEPDESNARYFHVVIAGPQDSPFEGGTFKLELFLPEEYPMAAPKVRFMTKIYHPNVDKLGRICLDILKDKWSPALQIRTVLLSIQALLSAPNPDDPLANDVAEQWKTNEAQAIETARAWTRLYAMNNI

SEQ ID NO: 824857 - protein, 152 aa, Homo sapiens; identical to SEQ ID NO: 824854

SEQ ID NO: 824858 - protein, 312 aa, Homo sapiens
TVKRDARAVARGSCRTTVAGRLGHERQSPAPPLAACPKSLPRNRASLPPSPAAVGAGRTGEGARSEGSPPVPEPAPEQGLHFPRGLGGGCGDGRGNVPRKWSPGLPLVREARGAGDETRGRTRVLTRWPGCPAGSSSYDGFTEKNMKILGAEGASHMDILGRKRKYKALEETQRLLAEPVPGIKAEPDESNARYFHVVIAGPQDSPFEGGTFKLELFLPEEYPMAAPKVRFMTKIYHPNVDKLGRICLDILKDKWSPALQIRTVLLSIQALLSAPNPDDPLANDVAEQWKTNEAQAIETARAWTRLYAMNNI

SEQ ID NO: 824859 - protein, 174 aa, Homo sapiens
MISWGSPGQVNSEPFSQITSDKMAGLPRRIIKETQRLLAEPVPGIKAEPDESNARYFHVVIAGPQDSPFEGGTFKLELFLPEEYPMAAPKVRFMTKIYHPNVDKLGRICLDILKDKWSPALQIRTVLLSIQALLSAPNPDDPLANDVAEQWKTNEAQAIETARAWTRLYAMNNI

SEQ ID NO: 824860 - protein, 152 aa, Homo sapiens; identical to SEQ ID NO: 824854

SEQ ID NO: 824861 - protein, 156 aa, Homo sapiens
GSQAPLLRPDGAAEETQRLLAEPVPGIKAEPDESNARYFHVVIAGPQDSPFEGGTFKLELFLPEEYPMAAPKVRFMTKIYHPNVDKLGRICLDILKDKWSPALQIRTVLLSIQALLSAPNPDDPLANDVAEQWKTNEAQAIETARAWTRLYAMNNI

SEQ ID NO: 824862 - protein, 152 aa, Homo sapiens; identical to SEQ ID NO: 824854

SEQ ID NO: 824863 - protein, 134 aa, Homo sapiens
MAGLPRRIIKETQRLLAEPVPGIKAEPDESNARYFHVVIAGPQDSPFEGGTFKLELFLPEEYPMAAPKVRFMTKNKWSPALQIRTVLLSIQALLSAPNPDDPLANDVAEQWKTNEAQAIETARAWTRLYAMNNI

SEQ ID NO: 824864 - protein, 152 aa, Homo sapiens; identical to SEQ ID NO: 824854

SEQ ID NO: 824865 - protein, 152 aa, Homo sapiens; identical to SEQ ID NO: 824854

SEQ ID NO: 824866 - protein, 169 aa, Homo sapiens
MAGLPRRIIKETQRLLAEPVPGIKAEPDESNARYFHVVIAGPQDSPFEGGTFKLELFLPEEYPMAAPKVRFMTKIYHPNVDKLGRICLDILKDKWSPALQIRTVLLSIQALLSAPNPDDPLANDVAEQWKTNEAQAIETASLTLFRRCRWTSLIVGTKMGTLNKHHSPH

SEQ ID NO: 824867 - protein, 120 aa, Homo sapiens
MAGLPRRIIKETQRLLAEPVPGIKAEPDESNARYFHVVIAGPQDSPFEGGTFKLELFLPEEYPMAAPKVRFMTKIYHPNVDKLGRICLDILKDKWSPALQIRTVLLSIQALLSAPNPDDP

SEQ ID NO: 824868 - protein, 95 aa, Homo sapiens
MAGLPRRIIKETQRLLAEPVPGIKAEPDESNARYFHVVIAGPQDSPFEGGTFKLELFLPEEYPMAAPKVRFMTKIYHPNVDKLTCRLSSARLVQV

SEQ ID NO: 824869 - protein, 173 aa, Homo sapiens
GSQAPLLRPDGAAEETQRLLAEPVPGIKAEPDESNARYFHVVIAGPQDSPFEGGTFKLELFLPEEYPMAAPKVRFMTKIYHPNVDKLGRICLDILKDKWSPALQIRTVLLSIQALLSAPNPDDPLANDVAEQWKTNEAQAIETASLTLFRRCRWTSLIVGTKMGTLNKHHSPH

SEQ ID NO: 824870 - protein, 152 aa, Homo sapiens; identical to SEQ ID NO: 824854

SEQ ID NO: 824871 - protein, 152 aa, Homo sapiens; identical to SEQ ID NO: 824854

SEQ ID NO: 824872 - protein, 152 aa, Homo sapiens; identical to SEQ ID NO: 824854

SEQ ID NO: 824873 - protein, 165 aa, Homo sapiens
ARYEAGVDRPRDKMAGLPRRIIKETQRLLAEPVPGIKAEPDESNARYFHVVIAGPQDSPFEGGTFKLELFLPEEYPMAAPKVRFMTKIYHPNVDKLGRICLDILKDKWSPALQIRTVLLSIQALLSAPNPDDPLANDVAEQWKTNEAQAIETARAWTRLYAMNNI

SEQ ID NO: 824874 - protein, 178 aa, Homo sapiens
NIQVTAWPGLYWIQSNLNVAVDFTDKMAGLPRRIIKETQRLLAEPVPGIKAEPDESNARYFHVVIAGPQDSPFEGGTFKLELFLPEEYPMAAPKVRFMTKIYHPNVDKLGRICLDILKDKWSPALQIRTVLLSIQALLSAPNPDDPLANDVAEQWKTNEAQAIETARAWTRLYAMNNI

SEQ ID NO: 824875 - protein, 152 aa, Homo sapiens; identical to SEQ ID NO: 824854

SEQ ID NO: 824876 - protein, 152 aa, Homo sapiens; identical to SEQ ID NO: 824854

SEQ ID NO: 824877 - protein, 195 aa, Homo sapiens
TVKRDARAVARGSCRTTVAGRLGHERQSPAPPLAACPKSLPRNRASLPPSPAAVGAGRTGEGARSEGSPPVPEPAPEQGLHFPRGLGGGCGDGRGNVPRKWSPGLPLVREARGAGDETRGRTRVLTRWPGCPAGSSRKPSVCWQNQFLASKPNQMRATPVIFMWSLLALRIPPLREGLLNLNYSFQKNTQWQPLK

SEQ ID NO: 824878 - protein, 152 aa, Homo sapiens; identical to SEQ ID NO: 824854

SEQ ID NO: 824879 - protein, 152 aa, Homo sapiens; identical to SEQ ID NO: 824854

SEQ ID NO: 824880 - protein, 195 aa, Homo sapiens; identical to SEQ ID NO: 824877

SEQ ID NO: 824881 - protein, 110 aa, Homo sapiens
MISWGSPGQVNSEPFSQITSDKMAGLPRRIIKETQRLLAEPVPGIKAEPDESNARYFHVVIAGPQDSPFEGGTFKLELFLPEEYPMAAPKVRFMTKIYHPNVDKFKSNFI

SEQ ID NO: 824882 - protein, 733 aa, Homo sapiens
PVGAAGAGRGRGRGADVAARPAASGPVRRGGGGRSARPSPARSCGGAQSWFLTAFCRGRVCHQVLGSAPARPDLAPRFSAMALVRGAEPAAGPSRWLPTHVQVTVLRARGLRGKSSGAGSTSDAYTVIQVGREKYSTSVVEKTHGCPEWREECSFELPPGALDGLLRAQEADAGPAPWAASSAAACELVLTTMHRSLIGVDKFLGQATVALDEVFGAGRAQHTQWYKLHSKPGKKEKERGEIEVTIQFTRNNLSASMFDLSMKDKPRSPFSKIRDKMKGKKKYDLESASAILPSSAIEDPDLGSLGKMGKAKGFFLRNKLRKSSLTQSNTSLGSDSTLSSASGSLAYQGPGAELLTRSPSRSSWLSTEGGRDSAQSPKLFTHKRTYSDEANQMRVAPPRALLDLQGHLDAASRSSLCVNGSHIYNEEPQGPVRHRSSISGSLPSSGSLQAVSSRFSEEGPRSTDDTWPRGSRSNSSSEAVLGQEELSAQAKVLAPGASHPGEEEGARLPEGKPVQVATPIVASSEAVAEKEGARKEERKPRMGLFHHHHQGLSRSELGRRSSLGEKGGPILGASPHHSSSGEEKAKSSWFGLREAKDPTQKPSPHPVKPLSAAPVEGSPDRKQSRSSLSIALSSGLEKLKTVTSGSIQPVTQAPQAGQMVDTKRLKDSAVLDQSAKYYHLTHDELISLLLQRERELSQRDEHVQELESYIDRLLVRIMETSPTLLQIPPGPPK

SEQ ID NO: 824883 - protein, 575 aa, Homo sapiens
MEMFWIVSQLHLKPGSPGRWVRAGAFGERLSVALRARRGLGSAWYRAGARLPGPVTEFCLLPSSHRWYKLHSKPGKKEKERGEIEVTIQFTRNNLSASMFDLSMKDKPRSPFSKIRDKMKGKKKYDLESASAILPSSAIEDPDLGSLGKMGKAKGFFLRNKLRKSSLTQSNTSLGSDSTLSSASGSLAYQGPGAELLTRSPSRSSWLSTEGGRDSAQSPKLFTHKRTYSDEANQMRVAPPRALLDLQGHLDAASRSSLCVNGSHIYNEEPQGPVRHRSSISGSLPSSGSLQAVSSRFSEEGPRSTDDTWPRGSRSNSSSEAVLGQEELSAQAKVLAPGASHPGEEEGARLPEGKPVQVATPIVASSEAVAEKEGARKEERKPRMGLFHHHHQGLSRSELGRRSSLGEKGGPILGASPHHSSSGEEKAKSSWFGLREAKDPTQKPSPHPVKPLSAAPVEGSPDRKQSRSSLSIALSSGLEKLKTVTSGSIQPVTQAPQAGQMVDTKRLKDSAVLDQSAKYYHLTHDELISLLLQRERELSQRDEHVQELESYIDRLLVRIMETSPTLLQIPPGPPK

SEQ ID NO: 824884 - protein, 699 aa, Homo sapiens
ALPSASRASPTPLASPGKALPEWDNTFNVFAASRLRPEARSEILAPAGVGLEAAGLQDPGPGAMTAKAAEPQGEPGGGGGGGGGGGGRGGSSVWLEPRVPLDLGPNHQSASAADPGLLGSVGAGLPSSSAQLQLRASGSEPDRELPAPEVEAGQSPADSGTSLFSSPEVISVWERLPGPESAAEGQDDESSRGENQLCPDVETADDAWPWDVVTISPAAETASLVFRGESDEPAPQVQPESPETVSPKGSEGLPPPEPEPKPEWVSDKGLQPSTPPPKPPRLFTPSRSQEEEEEKAAVGLSNRGPETEGEDASPSALVVGPPETKEEGEKRESEESDSCSSATLLGQPGLEELVEDASPPVSGPCLSAPASCPEGPAPIPCHSKSLALQSQHIWGTPEVGEGPEAPEAQGQDPVGEGLGSLSATSQQADVWVSKEDALNPFLFQGSRDPPSLSSASPPGSRESSIHSGPEELPTPPEPDFPPPPLPPWASHHRGGPSPPCSPLSEAWPLTTSSAPPGEPALLPGPHEPSPPGGSPALLREDLAAATPASPLVLLPLETRPAEEPQPSASPHPVKPLSAAPVEGSPDRKQSRSSLSIALSSGLEKLKTVTSGSIQPVTQAPQAGQMVDTKRLKDSAVLDQSAKYYHLTHDELISLLLQRERELSQRDEHVQELESYIDRLLVRIMETSPTLLQIPPGPPK

SEQ ID NO: 824885 - protein, 699 aa, Homo sapiens; identical to SEQ ID NO: 824884

SEQ ID NO: 824886 - protein, 699 aa, Homo sapiens; identical to SEQ ID NO: 824884

SEQ ID NO: 824887 - protein, 654 aa, Homo sapiens
MSLAAYCVICCRRIGTSTSPPKSGTHWRDIRNIIKFTGSLILGGSLFLTYEVLALKKAVTLDTQVVEREKMKSYIYVHTVSLDKGENHGIAWQARKELHKAVRKVLATSAKILRNPFADPFSTVDIEDHECAVWLLLRKSKSDDKTTRLEAVREMSETHHWHDYQYRIIAQACDPKTLIGLARSEESDLRFFLLPPPLPSLKEDSSTEEELRQLLASLPQTELDECIQYFTSLALSESSQSLAAQKGGLWCFGGNGLPYAESFGEVPSATVEMFCLEAIVKHSEISTHCDKIEANGGLQLLQRLYRLHKDCPKVQRNIMRVIGNMALNEHLHSSIVRSGWVSIMAEAMKSPHIMESSHAARILANLDRETVQEKYQDGVYVLHPQYRTSQPIKADVLFIHGLMGAAFKTWRQQDSEQAVIEKPMEDEDRYTTCWPKTWLAKDCPALRIISVEYDTSLSDWRARCPMERKSIAFRSNELLRKLRAAGVGDRPVVWISHSMGGLLVKKMLLEASTKPEMSTVINNTRGIIFYSVPHHGSRLAEYSVNIRYLLFPSLEVKELSKDSPALKTLQDDFLEFAKDKNFQVLNFVETLPTYIGSMIKLHVVPVESADLGIGDLIPVDVNHLNICKPKKKDAFLYQRTLQFIREALAKDLEN

SEQ ID NO: 824888 - protein, 587 aa, Homo sapiens
MSLAAYCVICCRRIGTSTSPPKSGTHWRDIRNIIKFTGSLILGGSLFLTYEVLALKKAVTLDTQVVEREKMKSYIYVHTVSLDKGENHGIAWQARKELHKAVRKVLATSAKILRNPFADPFSTVDIEDHECAVWLLLRKSKSDDKTTRLEAVREMSETHHWHDYQYRIIAQACDPKTLIGLARSEESDLRFFLLPPPLPSLKEDSSTEEELRQLLASLPQTELDECIQYFTSLALSESSQSLAAQKGGLWCFGGNGLPYAESFGEVPSATVEMFCLEAIVKHSEISTHCDKIEANGGLQLLQRLYRLHKDCPKVQRNIMRVIGNMALNEHLHSSIVRSGWVSIMAEAMKSPHIMESSHAARILANLDRETVQEKYQDGVYVLHPQYRTSQPIKADVLFIHGLMGAAFKTWRQQDSEQAVIEKPMEDEDRYTTCWPKTWLAKDCPALRIISVEYDTSLSDWRARCPMERKSIAFRSNELLRKLRAAGVGDRPVVWISHSMGGLLVKKMLLEASTKPEMSTVINNTRGIIFYSVPHHGSRLAEYSVNIRYLLFPSLEVKELSKGNTFCHKGNWGYINISYTEKKKKFLP

SEQ ID NO: 824889 - protein, 195 aa, Homo sapiens [sequence omitted]

SEQ ID NO: 824890 - protein, 283 aa, Homo sapiens
MVRPGMVEGALAGGDWGGGEEAVWPPYLLWLGASGLERCEESLRPRCISLQLTRSAFARPQLLLPPPAVLGTWLPWPRGACLTGLCTSDPCEPVFLCASTPQPGSSDQESEEQQQFRNIFKQIAGDDMEICADELKKVLNTVVNKHKDLKTHGFTLESCRSMIALMDTDGSGKLNLQEFHHLWNKIKAWQKIFKHYDTDQSGTINSYEMRNAVNDAGFHLNNQLYDIITMRYADKHMNIDFDSFICCFVRLEGMFRAFHAFDKDGDGIIKLNVLEWLQLTMYA

SEQ ID NO: 824891 - protein, 77 aa, Homo sapiens
KFKNKTVLKKRCKDCYLLKRLCRWYVYCPSPRLYTESPAEAPAGGTQHLLVLEPSITFTLSHHGPGTKPALGSTAVG

SEQ ID NO: 824892 - protein, 156 aa, Homo sapiens
MEICADELKKVLNTVVNKHKDLKTHGFTLESCRSMIALMDTDGSGKLNLQEFHHLWNKIKAWQKIFKHYDTDQSGTINSYEMRNAVNDAGFHLNNQLYDIITMRYADKHMNIDFDSFICCFVRLEGMFRAFHAFDKDGDGIIKLNVLEWLQLTMYA

SEQ ID NO: 824893 - protein, 156 aa, Homo sapiens; identical to SEQ ID NO: 824892

SEQ ID NO: 824894 - protein, 156 aa, Homo sapiens; identical to SEQ ID NO: 824892

SEQ ID NO: 824895 - protein, 156 aa, Homo sapiens; identical to SEQ ID NO: 824892

SEQ ID NO: 824896 - protein, 156 aa, Homo sapiens; identical to SEQ ID NO: 824892

SEQ ID NO: 824897 - protein, 251 aa, Homo sapiens
MKDTSAYPFLFQYAGRVSFMLLGTGSYNILPIIFVSDRANSNKELGVDQESEEGKGKTSPDKQKQSPQPQPGSSDQESEEQQQFRNIFKQIAGDDMEICADELKKVLNTVVNKHKDLKTHGFTLESCRSMIALMDTDGSGKLNLQEFHHLWNKIKAWQKIFKHYDTDQSGTINSYEMRNAVNDAGFHLNNQLYDIITMRYADKHMNIDFDSFICCFVRLEGMFRAFHAFDKDGDGIIKLNVLEWLQLTMYA

SEQ ID NO: 824898 - protein, 162 aa, Homo sapiens
MEICADELKKVLNTVVNKHKDLKTHGFTLESCRSMIALMDTDGSGKLNLQEFHHLWNKIKAWQKIFKHYDTDQSGTINSYEMRNAVNDAGFHLNNQLYDIITMRYADKHMNIDFDSFICCFVRLEGMFRAFHAFDKDGDGIIKLNVLELQKHLPVALSTSLC

SEQ ID NO: 824899 - protein, 137 aa, Homo sapiens
MEICADELKKVLNTVVNKHKDLKTHGFTLESCRSMIALMDTDGSGKLNLQEFHHLWNKIKAWQMRNESTTRFHLNNQLYDIITMRYADKHMNIDFDSFICCFVRLEGMFRAFHAFDKDGDGIIKLNVLEWLQLTMYA

SEQ ID NO: 824900 - protein, 129 aa, Homo sapiens
RNLSEEVENTISVDRPVKKKKTKPIIFVSDRANSNKELGVDQESEEGKGKTSPDKQKQSPQPQPGSSDQESEEQQQFRNIFKQIAGDDMEICADELKKVLNTVVNKHKDLKTHGFTLESCRSMIALMDP

SEQ ID NO: 824901 - protein, 324 aa, Homo sapiens
PLWTVFWAVTVMVIILTLSQCQVSKCLLNDHRRLVLVVGKKKKTKPIIFVSDRANSNKELGVDQESEEGKGKTSPDKQKQSPQPQPGSSDQESEEQQQFRNIFKQIAGDDMEICADELKKVLNTVVNKHKDLKTHGFTLESCRSMIALMDTDGSGKLNLQEFHHLWNKIKAWQKIFKHYDTDQSGTINSYEMRNAVNDAGFHLNNQLYDIITMRYADKHMNIDFDSFICCFVRLEGMFRAFMPLTRWDGIISSSSGSGAAHMCGLTGGSFKHGEPPIRSPFSSFLQARYPRPGLGVPISPTLGQRFKGGEPLRRERRPGVSGGA

SEQ ID NO: 824902 - protein, 246 aa, Homo sapiens
MSRAGVIRSGPSHKLMVAGRRPIIFVSDRANSNKELGVDQESEEGKGKTSPDKQKQSPQPQPGSSDQESEEQQQFRNIFKQIAGDDMEICADELKKVLNTVVNKHKDLKTHGFTLESCRSMIALMDTDGSGKLNLQEFHHLWNKIKAWQKIFKHYDTDQSGTINSYEMRNAVNDAGFHLNNSSMTSLPCGKLEGMFRAFHAFDQAGDGFIKAHRLEAVGNPVRWLRPLGVKLHNFRGPRADPHGFC

SEQ ID NO: 824903 - protein, 156 aa, Homo sapiens; identical to SEQ ID NO: 824892

SEQ ID NO: 824904 - protein, 156 aa, Homo sapiens; identical to SEQ ID NO: 824892

SEQ ID NO: 824905 - protein, 156 aa, Homo sapiens; identical to SEQ ID NO: 824892

SEQ ID NO: 824906 - protein, 156 aa, Homo sapiens; identical to SEQ ID NO: 824892

SEQ ID NO: 824907 - protein, 244 aa, Homo sapiens
RNLSEEVENTISVDRPVKKKKTKPIIFVSDRANSNKELGVDQESEEGKGKTSPDKQKQSPQPQPGSSDQESEEQQQFRNIFKQIAGDDMEICADELKKVLNTVVNKHKDLKTHGFTLESCRSMIALMDTDGSGKLNLQEFHHLWNKIKAWQKIFKHYDTDQSGTINSYEMRNAVNDAGFHLNNQLYDIITMRYADKHMNIDFDSFICCFVRLEGMFRAFHAFDKDGDGIIKLNVLEWLQLTMYA

SEQ ID NO: 824908 - protein, 215 aa, Homo sapiens
MGGVASTLQGLPMRLGYTGAGGFPGVCLEHLEPQPGSSDQESEEQQQFRNIFKQIAGDDMEICADELKKVLNTVVNKHKDLKTHGFTLESCRSMIALMDTDGSGKLNLQEFHHLWNKIKAWQKIFKHYDTDQSGTINSYEMRNAVNDAGFHLNNQLYDIITMRYADKHMNIDFDSFICCFVRLEGMFRAFHAFDKDGDGIIKLNVLEWLQLTMYA

SEQ ID NO: 824909 - protein, 114 aa, Homo sapiens
GCRIRHESPQPGSSDQESEEQQQFRNIFKQIAGDDMEICADELKKVLNTVVNKHKDLKTHGFTLESCRSMIALMDTDGSGKLNLQEFHHLWNKIKAWQMRNAVNDAIPPQQPAL

SEQ ID NO: 824910 - protein, 160 aa, Homo sapiens
MEICADELKKVLNTVVNKHKDLKTHGFTLESCRSMIALMDTDGSGKLNLQEFHHLWNKIKAWQKIFKHYDTDQSGTINSYEMRNAVNDAGFHLNNSSMTSLPCGKLEGMFRAFHAFDQAGDGFIKAHRLEAVGNPVRWLRPLGVKLHNFRGPRADPHGFC

SEQ ID NO: 824911 - protein, 1003 aa, Homo sapiens
RRSGILRAEGGGSAGAGDRLGGFGKQFGAGGRPCYSASRPVSARLAAPWPPASSNVSHRPGVAAARARNRGAMSEAGGRGCGSPVPQRARWRLVAATAAFCLVSATSVWTAGAEPMSREEKQKLGNQVLEMFDHAYGNYMEHAYPADELMPLTCRGRVRGQEPSRGDVDDALGKFSLTLIDSLDTLVLNKTKEFEDAVRKVLRDVNLDNDVVVSVFETNIRVLGGLLGGHSLAIMLKEKGEYMQWYNDELLQMAKQLGYKLLPAFNTTSGLPYPRINLKFGIRKPEARTGTETDTCTACAGTLILEFAALSRFTGATIFEEYARKALDFLWEKRQRSSNLVGVTINIHTGDWVRKDSGVGAGIDSYYEYLLKAYVLLGDDSFLERFNTHYDAIMRYISQPPLLLDVHIHKPMLNARTWMDALLAFFPGLQVLKGDIRPAIETHEMLYQVIKKHNFLPEAFTTDFRVHWAQHPLRPEFAESTYFLYKATGDPYYLEVGKTLIENLNKYARVPCGFAAMKDVRTGSHEDRMDSFFLAEMFKYLYLLFADKEDIIFDIEDYIFTTEAHLLPLWLSTTNQSISKKNTTSEYTELDDSNFDWTCPNTQILFPNDPLYAQSIREPLKNVVDKSCPRGIIRVEESFRSGAKPPLRARDFMATNPEHLEILKKMGVSLIHLKDGRVQLVQHAIQAASSIDAEDGLRFMQEMIELSSQQQKEQQLPPRAVQIVSHPFFGRVVLTAGPAQFGLDLSKHKETRGFVASSKPSNGCSELTNPEAVMGKIALIQRGQCMFAEKARNIQNAGAIGGIVIDDNEGSSSDTAPLFQMAGDGKDTDDIKIPMLFLFSKEGSIILDAIREYEEVEVLLSDKAKDRDPEMENEEQPSSENDSQNQSGEQISSSSQEVDLVDQESSEENSLNSHPESLSLADMDNAASISPSEQTSNPTENHETTNLNGECTDLDNQLQEQSETEEDSNPNVSWGKKVQPIDSILADWNEDIEAFEMMEKDEL

SEQ ID NO: 824912 - protein, 136 aa, Homo sapiens
RRSGILRAEGGGSAGAGDRLGGFGKQFGAGGRPCYSASRPVSARLAAPWPPASSNVSHRPGVAAARARNRGAMSEAGGRGCGSPVPQRARWRLVAATAAFCLVSATSVWTAGAEPMSREEKQKLGNMLTLLMNSCL

SEQ ID NO: 824913 - protein, 228 aa, Homo sapiens
RRSGILRAEGGGSAGAGDRLGGFGKQFGAGGRPCYSASRPVSARLAAPWPPASSNVSHRPGVAAARARNRGAMSEAGGRGCGSPVPQRARWRLVAATAAFCLVSATSVWTAGAEPMSREEKQKLGNQVLEMFDHAYGNYMEHAYPADELMPLTCRGRVRGQEPSRGDVDDALGKFSLTLIDSLDTLLEVITSSHQPYSIPCLVCNLSHKARIANSYIHFVPFFCLTEP

SEQ ID NO: 824914 - protein, 228 aa, Homo sapiens; identical to SEQ ID NO: 824913

SEQ ID NO: 824915 - protein, 1003 aa, Homo sapiens; identical to SEQ ID NO: 824911

SEQ ID NO: 824916 - protein, 1003 aa, Homo sapiens; identical to SEQ ID NO: 824911

SEQ ID NO: 824917 - protein, 125 aa, Homo sapiens
RRSGILRAEGGGSAGAGDRLGGFGKQFGAGGRPCYSASRPVSARLAAPWPPASSNVSHRPGVAAARARNRGAMSEAGGRGCGSPVPQRARWRLVAATAAFCLVSATSVWTAGAEPMSREEKQKLG

SEQ ID NO: 824918 - protein, 958 aa, Homo sapiens
RRSGILRAEGGGSAGAGDRLGGFGKQFGAGGRPCYSASRPVSARLAAPWPPASSNVSHRPGVAAARARNRGAMSEAGGRGCGSPVPQRARWRLVAATAAFCLVSATSVWTAGAEPMSREEKQKLGNQVLEMFDHAYGNYMEHAYPADELMPLTCRGRVRGQEPSRGDVDDALGKFSLTLIDSLDTLVLNKTKEFEDAVRKVLRDVNLDNDVVVSVFETNIRVLGGLLGGHSLAIMLKEKGEYMQWYNDELLQMAKQLGYKLLPAFNTTSGLPYPRINLKFGIRKPEARTGTETDTCTACAGTLILEFAALSRFTGATIFEEYARKALDFLWEKRQRSSNLVGVTINIHTGDWVRKDSGVGAGIDSYYEYLLKAYVLLGDDSFLERFNTHYDAIMRYISQPPLLLDVHIHKPMLNARTWMDALLAFFPGLQVLKGDIRPAIETHEMLYQVIKKHNFLPEAFTTDFRVHWAQHPLRPEFAESTYFLYKATGDPYYLEVGKTLIENLNKYARVPCGFAAMKDVRTGSHEDRMDSFFLAEMFKYLYLLFADKEDIIFDIEDYIFTTEAHLLPLWLSTTNQSISKKNTTSEYTELDDSNFDWTCPNTQILFPNDPLYAQSIREPLKNVVDKSCPRGIIRVEESFRSGAKPPLRARDFMATNPEHLEILKKMGVSLIHLKDGRVQLANMQSKVVLTAGPAQFGLDLSKHKETRGFVASSKPSNGCSELTNPEAVMGKIALIQRGQCMFAEKARNIQNAGAIGGIVIDDNEGSSSDTAPLFQMAGDGKDTDDIKIPMLFLFSKEGSIILDAIREYEEVEVLLSDKAKDRDPEMENEEQPSSENDSQNQSGEQISSSSQEVDLVDQESSEENSLNSHPESLSLADMDNAASISPSEQTSNPTENHETTNLNGECTDLDNQLQEQSETEEDSNPNVSWGKKVQPIDSILADWNEDIEAFEMMEKDEL

SEQ ID NO: 824919 - protein, 1003 aa, Homo sapiens; identical to SEQ ID NO: 824911

SEQ ID NO: 824920 - protein, 115 aa, Homo sapiens; identical to SEQ ID NO: 762671

SEQ ID NO: 824921 - protein, 715 aa, Homo sapiens
MAYIKMFYKYSQKLLFYCMQRVMAIFNSNVFKYFELKLNLTNVKLPQRRLEKRKVIKSCFIIKYHYKQVFQMYYFTCLEKIAQKARWPANPVSMSIGKNPGHKVNSEQSFLSAAGLDKQRERLERVFLLQLIGRSDGIMEYCDLFCFFFFLVFYSFDMKFFKEVNIYSMLQLVLTKRCHSRSVSLAFIRRRLNAGNHFLSSTSKSPIVQLNPVMNCKLFASAQTEELLDGLGDLSGGTCASTPCIRKTSPGSWETLLWVWSFYQSCKRSLCPCFVGELLVFKGTMELEREKWGIEQVKTTTDFAVLIEVQQLFLNYCPLDCCKPLVNFQSFEENDFDNFPSIFIVIMEECIFLGYSRSPTSLLRFYNGISYGYPKYTWQVVLETTNNSLLKIQKLLLLANKINEINLIIVEEIKFFKIKKLQMLKFSTMLIQTFSYTTNCPGLILNTSQKIYLFYTRKAKYGPQCIFGLSASTVAIIFKRLKTLNFVNMLINCLLGFINFKIYRDYPIQLYLYPISNSPEQLYTLAKTLQMIYKEKVKYTTEFIQLSKDAQNLSVSLTPSLNPHTTSEEKMIWCNDASILNAEGLITCPFQAVTEACPLDPGILSISPLKVTQSHTSLKQRPLDASTPDFFYLHFNISPYSNPHFSTPCHLRKGILSPLFHSKLLKFVPLILPLPNIPRLAPLIISSLGILISSSSLDPSPQPLKLLDLKTLSVI

SEQ ID NO: 824922 - protein, 652 aa, Homo sapiens [sequence omitted]

SEQ ID NO: 824923 - protein, 652 aa, Homo sapiens [sequence omitted]

SEQ ID NO: 824924 - protein, 652 aa, Homo sapiens [sequence omitted]

SEQ ID NO: 824925 - protein, 241 aa, Homo sapiens
YVVGAEVGGSTRRWAARDEACVISDTIYSESVLGFTAQKSGPEAVVSFRSESSVSNQARSLSGEDGFRDVAGFVRFFVFGCRWNSGSRLHCSVSSAPRGPASGPVTCRYWESTAKTPGHPGSLEMDNLRYGVYPVKGASGYPGAERNLLEYSYFEKGPLTFRDVVIEFSQEEWQCLDTAQQDLYRKVMLENFRNLVFLGIDVSKPDLITCLEQGKDPWNMKRHSMVATPPDGVSLLFPRPE

SEQ ID NO: 824926 - protein, 251 aa, Homo sapiens
MGAEVRRLYSAVGGPRLSFVISDTIYSESVLGFTAQKSGPEAVVSFRSESSVSNQARSLSGEDGFRDVAGFVRFFVFGCRWNSGSRLHCSVSSAPRGPASGPVTCRYWESTAKTPGHPGSLEMDNLRYGVYPVKGASGYPGAERNLLEYSYFEKGPLTFRDVVIEFSQEEWQCLDTAQQDLYRKVMLENFRNLVFLGIDVSKPDLITCLEQGKDPWNMKRHSMVATPPGIFFVVRGGLHKTFKRYNVFQSS

SEQ ID NO: 824927 - protein, 241 aa, Homo sapiens; identical to SEQ ID NO: 824925

SEQ ID NO: 824928 - protein, 259 aa, Homo sapiens
MGAEVRRLYSAVGGPRLSFVISDTIYSESVLGFTAQKSGPEAVVSFRSESSVSNQARSLSGEDGFRDVAGFVRFFVFGCRWNSGSRLHCSVSSAPRGPASGPVTCRYWESTAKTPGHPGSLEMDNLRYGVYPVKGASGYPGAERNLLEYSYFEKGPLTFRDVVIEFSQEEWQCLDTAQQDLYRKVMLENFRNLVFLGIDVSKPDLITCLEQGKDPWNMKRHSMVATPPESGVLKFPTIIILLSRCFFQSVNICFIYLEP

SEQ ID NO: 824929 - protein, 170 aa, Homo sapiens
MSDTIYSESVLGFTAQKSGPEAVVSFRSESSVSNQARSLSGEDGFRDVAGFVRFFVFGCRWNSGSRLHCSVSSAPRGPASGPVTCRYWESTAKTPGHPGSLEMDNLRYGVYPVKGASGYPGAERNLLEYSYFEKTEFRSCCPGWSAMARSQLTSTSASRVQAILLPQPPE

SEQ ID NO: 824930 - protein, 380 aa, Homo sapiens
MSETVICSSRATVMLYDDGNKRWLPAGTGPQAFSRVQIYHNPTANSFRVVGRKMQPDQQVVINCAIVRGVKYNQATPNFHQWRDARQVWGLNFGSKEDAAQFAAGMASALEALEGGGPPPPPALPTWSVPNGPSPEEVEQQKRQQPGPSEHIERRVSNAGGPPAPPAGGPPPPPGPPPPPGPPPPPGLPPSGVPAAAHGAGGGPPPAPPLPAAQGPGGGGAGAPGLAAAIAGAKLRKVSKQEEASGGPTAPKAESGRSGGGGLMEEMNAMLARRRKATQVGEKTPKDESANQEEPEARVPAQSESVRRPWEKNSTTLPRMKSSSSVTTSETQPCTPSSSDYSDLQRVKQELLEEVKKELQKVKEEIIEAFVQELRKRGSP

SEQ ID NO: 824931 - protein, 380 aa, Homo sapiens; identical to SEQ ID NO: 824930

SEQ ID NO: 824932 - protein, 305 aa, Homo sapiens
MSETVICSSRATVMLYDDGNKRWLPAGTGPQAFSRVQIYHNPTANSFRVVGRKMQPDQQVVINCAIVRGVKYNQATPNFHQWRDARQVWGLNFGSKEDAAQFAAGMASALEALEGGGPPPPPALPTWSVPNGPSPEEVEQQKRQQPGPSEHIERRVSNAGGPPAPPAGGPPPPPGPPPPPGPPPPPGLPPSGVPAAAHGAGGGPPPAPPLPAAQGPGGGGAGAPGLAAAIAGAKLRKVSKQEEASGGPTAPKAESGRSGGGGLMEEMNAMLARRRKATQVGEKTPKDESANQEEPEARVPAQSGE

SEQ ID NO: 824933 - protein, 117 aa, Homo sapiens [sequence omitted]

SEQ ID NO: 824934 - protein, 239 aa, Homo sapiens
MRQQPGPSEHIERRVSNAGGPPAPPAGGPPPPPGPPPPPGPPPPPGLPPSGVPAAAHGAGGGPPPAPPLPAAQGPGGGGAGAPGLAAAIAGAKLRKVSKQEEASGGPTAPKAESGRSGGGGLMEEMNAMLARRRKATQVGEKTPKDESANQEEPEARVPAQSESVRRPWEKNSTTLPRMKSSSSVTTSETQPCTPSSSDYSDLQRVKQELLEEVKKELQKVKEEIIEAFVQELRKRGSP

SEQ ID NO: 824935 - protein, 380 aa, Homo sapiens; identical to SEQ ID NO: 824930

SEQ ID NO: 824936 - protein, 102 aa, Homo sapiens
MEKSMGKEIAPLPRPSSEFPQWERTRKQGRSPSPSPTCPSGGGDSQGAPLGYNIGERSEIAEASRVQSCPFKRPPPPRLEAHAAPLRRGALWVRGVEFWNEM

SEQ ID NO: 824937 - protein, 212 aa, Homo sapiens
MSETVICSSRATVMLYDDGNKRWLPAGTGPQAFSRVQIYHNPTANSFRVVGRKMQPDQQVVINCAIVRGVKYNQATPNFHQWRDARQVWGLNFGSKEDAAQFAAGMASALEALEGGGPPPPPALPTWSVPNGPSPEEVEQQKRQQPGPSEHIERRVSNAGGPPDASRWEVHGKESTREQGARRGRTEQQKKKKKKERQGKQKKKKEQKRKNK

SEQ ID NO: 824938 - protein, 135 aa, Homo sapiens
MSETVICSSRATVMLYDDGNKRWLPAGTGPQAFSRVQIYHNPTANSFRVVGRKMQPDQQVVINCAIVRGVKYNQATPNFHQWRDARQVWGLNFGSKEDAAQFAAGMASALEALEGGGPPPPPALPTWSPLLGMHQ

SEQ ID NO: 824939 - protein, 305 aa, Homo sapiens; identical to SEQ ID NO: 824932

SEQ ID NO: 824940 - protein, 305 aa, Homo sapiens; identical to SEQ ID NO: 824932

SEQ ID NO: 824941 - protein, 102 aa, Homo sapiens; identical to SEQ ID NO: 824936

SEQ ID NO: 824942 - protein, 102 aa, Homo sapiens; identical to SEQ ID NO: 824936

SEQ ID NO: 824943 - protein, 380 aa, Homo sapiens; identical to SEQ ID NO: 824930

SEQ ID NO: 824944 - protein, 123 aa, Homo sapiens
MSETVICSSRATVMLYDDGNKRWLPAGTGPQAFSRVQIYHNPTANSFRVVGRKMQPDQQVVINCAIVRGVKYNQATPNFHQWRDARQVWGLNFGSKEDAAQFAAGMASALEALEGSSPARRST

SEQ ID NO: 824945 - protein, 276 aa, Homo sapiens
MSETVICSSRATVMLYDDGNKRWLPAGTGPQAFSRVQIYHNPTANSFRVVGRKMQPDQQVVINCAIVRGVKYNQLQVPPPPPGLPPSGVPAAAHGAGGGPPPAPPLPAAQGPGGGGAGAPGLAAAIAGAKLRKVSKQEEASGGPTAPKAESGRSGGGGLMEEMNAMLARRRKATQVGEKTPKDESANQEEPEARVPAQSESVRRPWEKNSTTLPRMKSSSSVTTSETQPCTPSSSDYSDLQRVKQELLEEVKKELQKVKEEIIEAFVQELRKRGSP

SEQ ID NO: 824946 - protein, 256 aa, Homo sapiens
AQPGAGVWGRGLPGGSPHLQQPGPSEHIERRVSNAGGPPAPPAGGPPPPPGPPPPPGPPPPPGLPPSGVPAAAHGAGGGPPPAPPLPAAQGPGGGGAGAPGLAAAIAGAKLRKVSKQEEASGGPTAPKAESGRSGGGGLMEEMNAMLARRRKATQVGEKTPKDESANQEEPEARVPAQSESVRRPWEKNSTTLPRMKSSSSVTTSETQPCTPSSSDYSDLQRVKQELLEEVKKELQKVKEEIIEAFVQELRKRGSP

SEQ ID NO: 824947 - protein, 117 aa, Homo sapiens [sequence omitted]

SEQ ID NO: 824948 - protein, 380 aa, Homo sapiens; identical to SEQ ID NO: 824930

SEQ ID NO: 824949 - protein, 179 aa, Homo sapiens
MSETVICSSRATVMLYDDGNKRWLPAGTGPQAFSRVQIYHNPTANSFRVVGRKMQPDQQVVINCAIVRGVKYNQATPNFHQWRDARQVWGLNFGSKEDAAQFAAGMASALEALEGGGPPPPPALPTWSVPNGPSPEEVEQQKRQQPGPSEHIERRVSNAGGPPAPPDGGPGGGAGGVEG

SEQ ID NO: 824950 - protein, 305 aa, Homo sapiens; identical to SEQ ID NO: 824932

SEQ ID NO: 824951 - protein, 195 aa, Homo sapiens
MSETVICSSRATVMLYDDGNKRWLPAGTGPQAFSRVQIYHNPTANSFRVVGRKMQPDQQVVINCAIVRGVKYNQATPNFHQWRDARQVWGLNFGSKEDAAQFAAGMASALEALEGGGPPPPPALPTWSVPNGPSPEEVEQQKSRRPAVEHIERGLHGRRPTCHARTDHKPRQPTQNTQEHQPTTAHDNNTSTHLT

SEQ ID NO: 824952 - protein, 520 aa, Homo sapiens
MSNKCDVVVVGGGISGMAAAKLLHDSGLNVVVLEARDRVGGRTYTLRNQKVKYVDLGGSYVGPTQNRILRLAKELGLETYKVNEVERLIHHVKGKSYPFRGPFPPVWNPITYLDHNNFWRTMDDMGREIPSDAPWKAPLAEEWDNMTMKELLDKLCWTESAKQLATLFVNLCVTAETHEVSALWFLWYVKQCGGTTRIISTTNGGQERKFVGGSGQVSERIMDLLGDRVKLERPVIYIDQTRENVLVETLNHEMYEAKYVISAIPPTLGMKIHFNPPLPMMRNQMITRVPLGSVIKCIVYYKEPFWRKKDYCGTMIIDGEEAPVAYTLDDTKPEGNYAAIMGFILAHKARKLARLTKEERLKKLCELYAKVLGSLEALEPVHYEEKNWCEEQYSGGCYTTYFPPGILTQYGRVLRQPVDRIYFAGTETATHWSGYMEGAVEAGERAAREILHAMGKIPEDEIWQSEPESVDVPAQPITTTFLERHLPSVPGLLRLIGLTTIFSATALGFLAHKRGLLVRV

SEQ ID NO: 824953 - protein, 110 aa, Homo sapiens
MRLAEALVHGGSAQQAGGQAGGLAGRQDWDRGPENGAAGTREAWNGASAMSNKCDVVVVGGGISGPQPIGLDGAHYIESRFSSPSLPTPMPVSSGNTLTGTPRNNASPAI

SEQ ID NO: 824954 - protein, 520 aa, Homo sapiens; identical to SEQ ID NO: 824952

SEQ ID NO: 824955 - protein, 506 aa, Homo sapiens
MGMAAAKLLHDSGLNVVVLEARDRVGGRTYTLRNQKVKYVDLGGSYVGPTQNRILRLAKELGLETYKVNEVERLIHHVKGKSYPFRGPFPPVWNPITYLDHNNFWRTMDDMGREIPSDAPWKAPLAEEWDNMTMKELLDKLCWTESAKQLATLFVNLCVTAETHEVSALWFLWYVKQCGGTTRIISTTNGGQERKFVGGSGQVSERIMDLLGDRVKLERPVIYIDQTRENVLVETLNHEMYEAKYVISAIPPTLGMKIHFNPPLPMMRNQMITRVPLGSVIKCIVYYKEPFWRKKDYCGTMIIDGEEAPVAYTLDDTKPEGNYAAIMGFILAHKARKLARLTKEERLKKLCELYAKVLGSLEALEPVHYEEKNWCEEQYSGGCYTTYFPPGILTQYGRVLRQPVDRIYFAGTETATHWSGYMEGAVEAGERAAREILHAMGKIPEDEIWQSEPESVDVPAQPITTTFLERHLPSVPGLLRLIGLTTIFSATALGFLAHKRGLLVRV

SEQ ID NO: 824956 - protein, 520 aa, Homo sapiens; identical to SEQ ID NO: 824952

SEQ ID NO: 824957 - protein, 244 aa, Homo sapiens
MSNKCDVVVVGGGISGMAAAKLLHDSGLNVVVLEARDRVGGRTYTLRNQKVKYVDLGGSYVGPTQNRILRLAKELGLETYKVNEVERLIHHVKGKSYPFRGPFPPVWNPITYLDHNNFWRTMDDMGREIPSDAPWKAPLAEEWDNMTMKELLDKLCWTESAKQLATLFVNLCVTAETHEVSALWFLWYVKQCGGTTRIISFTPCHSYRWCPVVWVYSVLSCLTLLKCYSVYSLKSYCFVRCVSS

SEQ ID NO: 824958 - protein, 502 aa, Homo sapiens
MSNKCDVVVVGGGISGMAAAKLLHDSGLNVVVLEARDRVGGRTYTLRNQKVKYVDLGGSYVGPTQNRILRLAKELGLETYKVNEVERLIHHVKGKSYPFRGPFPPVWNPITYLDHNNFWRTMDDMGREIPSDAPWKAPLAEEWDNMTMKELLDKLCWTESAKQLATLFVNLCVTAETHEVSALWFLWYVKQCGGTTRIISTTNGGQERKFVGGSGQVSERIMDLLGDRVKLERPVIYIDQTRENVLVETLNHEMYEAKYVISAIPPTLGMKIHFNPPLPMMRNQMITRVPLGSVIKCIVYYKEPFWRKKDYCGTMIIDGEEAPVAYTLDDTKPEGNYAAIMGFILAHKARKLARLTKEERLKKLCELYAKVLGSLEALEPVHYEAPGILTQYGRVLRQPVDRIYFAGTETATHWSGYMEGAVEAGERAAREILHAMGKIPEDEIWQSEPESVDVPAQPITTTFLERHLPSVPGLLRLIGLTTIFSATALGFLAHKRGLLVRV

SEQ ID NO: 824959 - protein, 474 aa, Homo sapiens
MSNKCDVVVVGGGISGMAAAKLLHDSGLNVVVLEARDRVGGRTYTLRGKSYPFRGPFPPVWNPITYLDHNNFWRTMDDMGREIPSDAPWKAPLAEEWDNMTMKELLDKLCWTESAKQLATLFVNLCVTAETHEVSALWFLWYVKQCGGTTRIISTTNGGQERKFVGGSGQVSERIMDLLGDRVKLERPVIYIDQTRENVLVETLNHEMYEAKYVISAIPPTLGMKIHFNPPLPMMRNQMITRVPLGSVIKCIVYYKEPFWRKKDYCGTMIIDGEEAPVAYTLDDTKPEGNYAAIMGFILAHKARKLARLTKEERLKKLCELYAKVLGSLEALEPVHYEEKNWCEEQYSGGCYTTYFPPGILTQYGRVLRQPVDRIYFAGTETATHWSGYMEGAVEAGERAAREILHAMGKIPEDEIWQSEPESVDVPAQPITTTFLERHLPSVPGLLRLIGLTTIFSATALGFLAHKRGLLVRV

SEQ ID NO: 824960 - protein, 623 aa, Homo sapiens
MSNKCDVVVVGGGISGMAAAKLLHDSGLNVVVLEARDRVGGRTYTLRNQKVKYVDLGGSYVGPTQNRILRLAKELGLETYKVNEVERLIHHVKGKSYPFRGPFPPVWNPITYLDHNNFWRTMDDMGREIPSDAPWKAPLAEEWDNMTMKELLDKLCWTESAKQLATLFVNLCVTAETHEVSALWFLWYVKQCGGTTRIISTTNGGQERKFVGGSGQVSERIMDLLGDRVKLERPVIYIDQTRENVLVETLNHEMYEAKYVISAIPPTLGMKIHFNPPLPMMRNQMITRVPLGSVIKCIVYYKEPFWRKKDYCGTMIIDGEEAPVAYTLDDTKPEGNYAAIMGFILAHKARKLARLTKEERLKKLCELYAKVLGSLEALEPVHYEEKNWCEEQYSGGCYTTYFPPGILTQYGRVLRQPVDRIYFAGTETATHWSGYMEGAVEAGERAAREILHAMGKIPEDEIWQSEPESVDVPAQPITTTFLERHLPSVPGLLRLIGLTTIFSATALGFLAHKRGLLVRVSVELVRRRLSPGGLALDLVYDQLTIKMDYGEELRSPITSLTPGESKTTSPSSPEEDVMLGSLTFSVDYNFPKKALVVTIQEAHGLSVMDARPRYLTLNQMTSF

SEQ ID NO: 824961 - protein, 260 aa, Homo sapiens
VVAAAAAERGGGGAEGGVSVSSGCLFGKWIRRCRSSPKGAADREASTDPARPRAPPPPAMARDYDHLFKLLIIGDSGVGKSSLLLRFADNTFSGSYITTIGVDFKIRTVEINGEKVKLQIWDTAGQERFRTITSTYYRGTHGVIVVYDVTSAESFVNVKRWLHEINQNCDDVCRILVGNKNDDPERKVVETEDAYKFAGQMGIQLFETSAKENVNVEEMFNCITELVLRAKKDNLAKQQQQQQNDVVKLTKNSKRKKRCC

SEQ ID NO: 824962 - protein, 260 aa, Homo sapiens; identical to SEQ ID NO: 824961

SEQ ID NO: 824963 - protein, 260 aa, Homo sapiens; identical to SEQ ID NO: 824961

SEQ ID NO: 824964 - protein, 260 aa, Homo sapiens; identical to SEQ ID NO: 824961

SEQ ID NO: 824965 - protein, 276 aa, Homo sapiens
MAPSPLQRLHCGPSPSPRPTEVPRGTVSVSCRYLKNSLHVFVSGGAIGTSSPALLECQEGVGPARPSLLVPPPPRPRRLDLARTLPAERTDSQSLYIVYIALPGRTPRPALAFAFLMPACCNRPSPRPSPAHLTASSVLRRQRHVLAASAASPCQWSGLRVAHSLRQVVSLCPRCTGSCPFSGACASSLPSPLSCPHSHSGSWGTWSQGRPCSSTEVAGLALWPTDFLSCLLDASELQTQGSHGFSFTPTGFSSNRKVGVGSCRDGAGRGAMGGLF

SEQ ID NO: 824966 - protein, 260 aa, Homo sapiens; identical to SEQ ID NO: 824961

SEQ ID NO: 824967 - protein, 260 aa, Homo sapiens; identical to SEQ ID NO: 824961

SEQ ID NO: 824968 - protein, 260 aa, Homo sapiens; identical to SEQ ID NO: 824961

SEQ ID NO: 824969 - protein, 260 aa, Homo sapiens; identical to SEQ ID NO: 824961

SEQ ID NO: 824970 - protein, 219 aa, Homo sapiens
VVAAAAAERGGGGAEGGVSVSSGCLFGKWIRRCRSSPKGAADREASTDPARPRAPPPPAMARDYDHLFKLLIIGDSGVGKSSLLLRFADNTFSGSYITTIGVDFKIRTVEINGEKVKLQIWDTAGQERFRTITSTAETALRSLPQPEAHGGSSGDSLSFVPLFKEFSPCFCIGRCHRHFLPRPPRVPRRCWTSPPFPTGAPSSPAKAPGPGEDAARRAD

SEQ ID NO: 824971 - protein, 182 aa, Homo sapiens
VVAAAAAERGGGGAEGGVSVSSGCLFGKWIRRCRSSPKGAADREASTDPARPRAPPPPAMARDYDHLFKLLRQVVSLCPRCTGSCPFSGACASSLPSPLSCPHSHSGSWGTWSQGRPCSSTEVAGLALWPTDFLSCLLDASELQTQGSHGFSFTPTGFSSNRKVGVGSCRDGAGRGAMGGLF

SEQ ID NO: 824972 - protein, 282 aa, Homo sapiens
MASSFLPAGAITGDSGGELSSGDDSGEVEFPHSPEIEETSCLAELFEKAAAHLQGLIQVASREQLLYLYARYKQVKVGNCNTPKPSFFDFEGKQKWEAWKALGDSSPSQAMQEYIAVVKKLDPGWNPQIPEKKGKEANTGFGGPVISSLYHEETIREEDKNIFDYCRENNIDHITKAIKSKNVDVNVKDEEGRALLHWACDRGHKELVTVLLQHRADINCQDNEGQTALHYASACEFLDIVELLLQSGADPTLRDQDGCLPEEVTGCKTVSLVLQRHTTGKA

SEQ ID NO: 824973 - protein, 282 aa, Homo sapiens; identical to SEQ ID NO: 824972

SEQ ID NO: 824974 - protein, 252 aa, Homo sapiens
MASSFLPAGAITGDSGGELSSGDDSGEVEFPHSPEIEETSCLAELFEKAAAHLQGLIQVASREQLLYLYARYKQVKVGNCNTPKPSFFDFEGKQKWEAWKALGDSSPSQAMQEYIAVVKKLDPGWNPQIPEKKGKEANTGFGGPVISSLYHEETIREEDKNIFDYCRENNIDHITKAIKSKNVDVNVKDEEDNEGQTALHYASACEFLDIVELLLQSGADPTLRDQDGCLPEEVTGCKTVSLVLQRHTTGKA

SEQ ID NO: 824975 - protein, 116 aa, Homo sapiens
MASSFLPAGAITGDSGGELSSGDDSGEVEFPHSPEIEETSCLAELFEKAAAHLQGLIQVASREQLLYLYARYKQSNWKLYTPNQASGFEETKWNLNTVINPPTIRYSIVNCSVDLD

SEQ ID NO: 824976 - protein, 282 aa, Homo sapiens; identical to SEQ ID NO: 824972

SEQ ID NO: 824977 - protein, 282 aa, Homo sapiens; identical to SEQ ID NO: 824972

SEQ ID NO: 824978 - protein, 282 aa, Homo sapiens; identical to SEQ ID NO: 824972

SEQ ID NO: 824979 - protein, 282 aa, Homo sapiens; identical to SEQ ID NO: 824972

SEQ ID NO: 824980 - protein, 255 aa, Homo sapiens
MASSFLPAGAITGDSGGELSSGDDSGEVEFPHSPEIEETSCLAELFEKAAAHLQGLIQVASREQLLYLYARYKQVKVGNCNTPKPSFFDFEGKQKWEAWKALGDSSPSQAMQEYIAVVKKLDPGWNPQIPEKKGKEANTGFGGPVISSLYHEETIREEDKNIFDYCRENNIDHITKAIKSKNVDVNVKDEEGRALLHWACDRGHKELVTVLLQHRADINCQVPAQPQWARTPSGLLGCLIPCLGSWTALDQTSLG

SEQ ID NO: 824981 - protein, 255 aa, Homo sapiens; identical to SEQ ID NO: 824980

SEQ ID NO: 824982 - protein, 277 aa, Homo sapiens
MADPWQECMDYAVTLARQAGEVVCEAIKNEMNVMLKSSPVDLVTATDQKVEKMLISSIKEKYPSHSFIGEESVAAGEKSILTDNPTWIIDPIDGTTNFVHRFPFVAVSIGFAVNKKIEFGVVYSCVEGKMYTARKGKGAFCNGQKLQVSQQEDITKSLLVTELGSSRTPETVRMVLSNMEKLFCIPVHGIRSVGTAAVNMCLVATGGADAYYEMGIHCWDVAGAGIIVTEAGGVLMDVTGGPFDLMSRRVIAANNRILAERIAKEIQVIPLQRDDED

SEQ ID NO: 824983 - protein, 277 aa, Homo sapiens; identical to SEQ ID NO: 824982

SEQ ID NO: 824984 - protein, 336 aa, Homo sapiens
MGQRPGPVLPAVAVLGQVAKRKVAWLLRWKAVTRTETAGNSSGVYGFGKMKIFVKYFQKMADPWQECMDYAVTLARQAGEVVCEAIKNEMNVMLKSSPVDLVTATDQKVEKMLISSIKEKYPSHSFIGEESVAAGEKSILTDNPTWIIDPIDGTTNFVHRFPFVAVSIGFAVNKKIEFGVVYSCVEGKMYTARKGKGAFCNGQKLQVSQQEDITKSLLVTELGSSRTPETVRMVLSNMEKLFCIPVHGIRSVGTAAVNMCLVATGGADAYYEMGIHCWDVAGAGIIVTEAGGVLMDVTGGPFDLMSRRVIAANNRILAERIAKEIQVIPLQRDDED

SEQ ID NO: 824985 - protein, 148 aa, Homo sapiens
MYTARKGKGAFCNGQKLQVSQQEDITKSLLVTELGSSRTPETVRMVLSNMEKLFCIPVHGIRSVGTAAVNMCLVATGGADAYYEMGIHCWDVAGAGIIVTEAGGVLMDVTGGPFDLMSRRVIAANNRILAERIAKEIQVIPLQRDDED

SEQ ID NO: 824986 - protein, 242 aa, Homo sapiens
MADPWQECMDYAVTLARQAGEVVCEAIKNEMNVMLKSSPVDLVTATDQKVEKMLISSIKEKYPSHRFPFVAVSIGFAVNKKIEFGVVYSCVEGKMYTARKGKGAFCNGQKLQVSQQEDITKSLLVTELGSSRTPETVRMVLSNMEKLFCIPVHGIRSVGTAAVNMCLVATGGADAYYEMGIHCWDVAGAGIIVTEAGGVLMDVTGGPFDLMSRRVIAANNRILAERIAKEIQVIPLQRDDED

SEQ ID NO: 824987 - protein, 277 aa, Homo sapiens; identical to SEQ ID NO: 824982

SEQ ID NO: 824988 - protein, 277 aa, Homo sapiens; identical to SEQ ID NO: 824982

SEQ ID NO: 824989 - protein, 277 aa, Homo sapiens; identical to SEQ ID NO: 824982

SEQ ID NO: 824990 - protein, 234 aa, Homo sapiens
MKWVESIFLIFLLNFTESRTLHRNEYGIASILDSYQCTAEISLADLATIFFAQFVQEATYKEVSKMVKDALTAIEKPTGDEQSSGCLENQLPAFLEELCHEKEILEKYGHSDCCSQSEEGRHNCFLAHKKPTPASIPLFQVPEPVTSCEAYEEDRETFMNKFIYEIARRHPFLYAPTILLWAARYDKIIPSCCKAENAVECFQTKAATVTKELRESSLLNQHACAVMKFTGDFT

SEQ ID NO: 824991 - protein, 226 aa, Homo sapiens
  misc_feature (209)..(209): Xaa can be any naturally occurring amino acid
MKWVESIFLIFLLNFTESRTLHRNEYGIASILDSYQCTAEISLADLATIFFAQFVQEATYKEVSKMVKDALTAIEKPTGDEQSSGCLENQLPAFLEELCHEKEILEKYGHSDCCSQSEEGRHNCFLAHKKPTPASIPLFQVPEPVTSCEAYEEDRETFMNKFIYEIARRHPFLYAPTILLWAARYDKIIPSCCKAENAVECFQTKKNPXKKKGGGPQRGPPKKTPP

SEQ ID NO: 824992 - protein, 469 aa, Homo sapiens
MKWVESIFLIFLLNFTESRTLHRNEYGIASILDSYQCTAEISLADLATIFFAQFVQEATYKEVSKMVKDALTAIEKPTGDEQSSGCLENQLPAFLEELCHEKEILEKYGHSDCCSQSEEGRHNCFLAHKKPTPASIPLFQVPEPVTSCEAYEEDRETFMNKFIYEIARRHPFLYAPTILLWAARYDKIIPSCCKAENAVECFQTKAATVTKELRESSLLNQHACAVMKNFGTRTFQAITGTKLSQKFTKVNFTEIQKLVLDVAHVHEHCCRGDVLDCLQDGEKIMSYICSQQDTLSNKITECCKLTTLERGQCIIHAENDEKPEGLSPNLNRFLGDRDFNQFSSGEKNIFLASFVHEYSRRHPQLAVSVILRVAKGYQELLEKCFQTENPLECQDKGEEELQKYIQESQALAKRSCGLFQKLGEYYLQNAFLVAYTKKAPQLTSSELMAITRKMAATADIIIGHLCIQT

SEQ ID NO: 824993 - protein, 472 aa, Homo sapiens
MKWVESIFLIFLLNFTESRTLHRNEYGIASILDSYQCTAEISLADLATIFFAQFVQEATYKEVSKMVKDALTAIEKPTGDEQSSGCLENQKYGHSDCCSQSEEGRHNCFLAHKKPTPASIPLFQVPEPVTSCEAYEEDRETFMNKFIYEIARRHPFLYAPTILLWAARYDKIIPSCCKAENAVECFQTKAATVTKELRESSLLNQHACAVMKNFGTRTFQAITGTKLSQKFTKVNFTEIQKLVLDVAHVHEHCCRGDVLDCLQDGEKIMSYICSQQDTLSNKITECCKLTTLERGQCIIHAENDEKPEGLSPNLNRFLGDRDFNQFSSGEKNIFLASFVHEYSRRHPQLAVSVILRVAKGYQELLEKCFQTENPLECQDKGEEELQKYIQESQALAKRSCGLFQKLGEYYLQNAFLVAYTKKAPQLTSSELMAITRKMAATAATCCQLSEDKLLACGEGAADIIIGHLCIQT

SEQ ID NO: 824994 - protein, 204 aa, Homo sapiens
MSYICSQQDTLSNKITECCKLTTLERGQCIIHAENDEKPEGLSPNLNRFLGDRDFNQFSSGEKNIFLASFVHEYSRRHPQLAVSVILRVAKGYQELLEKCFQTENPLECQDKGEEELQKYIQESQALAKRSCGLFQKLGEYYLQNAFLVAYTKKAPQLTSSELMAITRKMAATAATCCQLSEDKLLACGEGAADIIIGHLCIQT

SEQ ID NO: 824995 - protein, 488 aa, Homo sapiens
MKWVESIFLIFLLNFTESRTLHRNEYGIASILDSYQCTAEISLADLATIFFAQFVQEATYKEVSKMVKDALTAIEKPTGDEQSSGCLENQLPAFLEELCHEKEILEKYGHSDCCSQSEEGRHNCFLAHKKPTPASIPLFQVPEPVTSCEAYEEDRETFMNKFIYEIARRHPFLYAPTILLWAARYDKIIPSCCKAENAVECFQTKAATVTKELRESSLLNQHACAVMKNFGTRTFQAITGTKLSQKFTKVNFTEIQKLVLDVAHVHEHCCRGDVLDCLQDGEKIMSYICSQQDTLSNKITECCKLTTLERGQCIIHAENDEKPEGLSPNLNRFLGDRDFNQFSSGEKNIFLASFVHEYSRRHPQLAVSVILRVAKGYQELLEKCFQTENPLECQDKGEEELQKYIQESQALAKRSCGLFQKLGEYYLQNAFLVAYTKKAPQLTSSELMAITRKMAATAATCCQLSEDKLLACGEGAADIIIGHLCIQT

SEQ ID NO: 824996 - protein, 488 aa, Homo sapiens; identical to SEQ ID NO: 824995

SEQ ID NO: 824997 - protein, 488 aa, Homo sapiens; identical to SEQ ID NO: 824995

SEQ ID NO: 824998 - protein, 488 aa, Homo sapiens; identical to SEQ ID NO: 824995

SEQ ID NO: 824999 - protein, 488 aa, Homo sapiens; identical to SEQ ID NO: 824995

SEQ ID NO: 825000 - protein, 330 aa, Homo sapiens
MNKFIYEIARRHPFLYAPTILLWAARYDKIIPSCCKAENAVECFQTKAATVTKELRESSLLNQHACAVMKNFGTRTFQAITGTKLSQKFTKVNFTEIQKLVLDVAHVHEHCCRGDVLDCLQDGEKIMSYICSQQDTLSNKITECCKLTTLERGQCIIHAENDEKPEGLSPNLNRFLGDRDFNQFSSGEKNIFLASFVHEYSRRHPQLAVSVILRVAKGYQELLEKCFQTENPLECQDKGEEELQKYIQESQALAKRSCGLFQKLGEYYLQNAFLVAYTKKAPQLTSSELMAITRKMAATAATCCQLSEDKLLACGEGAADIIIGHLCIQT

SEQ ID NO: 825001 - protein, 356 aa, Homo sapiens
MKWVESIFLIFLLNFTESRTLHRNEYGIASILDSYQCTAEISLADLATIFFAQFVQEATYKEVSKMVKDALTAIEKPTGDEQSSGCLENQLPAFLEELCHEKEILEKYGHSDCCSQSEEGRHNCFLAHKKPTPASIPLFQVPEPVTSCEAYEEDRETFMNKFIYEIARRHPFLYAPTILLWAARYDKIIPSCCKAENAVECFQTKAATVTKELRESSLLNQHACAVMKNFGTRTFQAITGTKLSQKFTKVNFTEIQKLVLDVAHVHEHCCRGDVLDCLQDGEKIMSYICSQQDTLSNKITECCKLTTLERGQCIIHAENDEKPEGLSPNLNRFLGDRDFNQFSSGEKNIFLASGGG

SEQ ID NO: 825002 - protein, 488 aa, Homo sapiens; identical to SEQ ID NO: 824995

SEQ ID NO: 825003 - protein, 455 aa, Homo sapiens
ASSVAPPPAPSSRPLVHFRLLPLPGPFSLVFPGLASPSPCARPEREVPEPRRGRVLGCRRCWPARPSRGSRHRLESFSCPRCVGRLESQENQMASGDFCSPGEGMEILQQVCSKQLPPCNLSKEDLLQNPYFSKLLLNLSQHVDESGLSLTLAKEQAQAWKEVRLHKTTWLRSEILHRVIQELLVDYYVKIQDTNVTSEDKKFHETLEQRLLVTELMRLLGPSQEREIPPLLGLEKADLLELMPLSEDFVWMRARLQQEVEEQLKKKCFTLLCYYDPNSDADSETVKAAKVWKLAEVLVGEQQQCQDAKSQQKEQMLLLEKKSAAYSQVLLRCLTLLQRLLQEHRLKTQSELDRINAQYLEVKCGAMILKLRMEELKILSDTYTVEKVEVHRLIRDRLEGAIHLQEQDMENSRQVLNSYEVLGEEFDRLVKEYTVLKQATENKRWALQEFSKVYR

SEQ ID NO: 825004 - protein, 438 aa, Homo sapiens
KARTGWCESAEVVFPGLASPSPCARPEREVPEPRRGRVLGCRRCWPARPSRGSRHRLESFSCPRCVGRLESQENQMASGDFCSPGEGMEILQQVCSKQLPPCNLSKEDLLQNPYFSKLLLNLSQHVDESGLSLTLAKEQAQAWKEVRLHKTTWLRSEILHRVIQELLVDYYVKIQDTNVTSEDKKFHETLEQRLLVTELMRLLGPSQEREIPPLLGLEKADLLELMPLSEDFVWMRARLQQEVEEQLKKKCFTLLCYYDPNSDADSETVKAAKVWKLAEVLVGEQQQCQDAKSQQKEQMLLLEKKSAAYSQVLLRCLTLLQRLLQEHRLKTQSELDRINAQYLEVKCGAMILKLRMEELKILSDTYTVEKVEVHRLIRDRLEGAIHLQEQDMENSRQVLNSYEVLGEEFDRLVKEYTVLKQATENKRWALQEFSKVYR

SEQ ID NO: 825005 - protein, 363 aa, Homo sapiens
MASGDFCSPGEGMEILQQVCSKQLPPCNLSKEDLLQNPYFSKLLLNLSQHVDESGLSLTLAKEQAQAWKEVRLHKTTWLRSEILHRVIQELLVDYYVKIQDTNVTSEDKKFHETLEQRLLVTELMRLLGPSQEREIPPLLGLEKADLLELMPLSEDFVWMRARLQQEVEEQLKKKCFTLLCYYDPNSDADSETVKAAKVWKLAEVLVGEQQQCQDAKSQQKEQMLLLEKKSAAYSQVLLRCLTLLQRLLQEHRLKTQSELDRINAQYLEVKCGAMILKLRMEELKILSDTYTVEKVEVHRLIRDRLEGAIHLQEQDMENSRQVLNSYEVLGEEFDRLVKEYTVLKQATENKRWALQEFSKVYR

SEQ ID NO: 825006 - protein, 455 aa, Homo sapiens; identical to SEQ ID NO: 825003

SEQ ID NO: 825007 - protein, 455 aa, Homo sapiens; identical to SEQ ID NO: 825003

SEQ ID NO: 825008 - protein, 414 aa, Homo sapiens
ASSVAPPPAPSSRPLVHFRLLPLPGPFSLVFPGLASPSPCARPEREVPEPRRGRVLGCRRCWPARPSRGSRHRLESFSCPRCVGRLESQENQMASGDFCSPGEGMEILQQVCSKQLPPCNLSKEDLLQNPYFSKLLLNLSQHVDESGLSLTLAKEQAQAWKEVRLHKTTWLRSEILHRVIQELLVDYYVKIQDTNVTSEDKKFHETLEQRLLVTELMRLLGPSQEREIPPLLGLEKADLLELMPLSEDFVWMRARLQQEVEEQLKKKCFTLLCYYDPNSDADSETVKAAKVWKLAEVLVGEQQQCQDAKSQQKEQMLLLEKKSAAYSQVYQGMGQPLSFILTPGALLGKTKIPDLPSFLLSLFMPSSSSILGSGASPLPHFAAEASSRTPAEDSIRARPHQCPVPGSQVRCYDP

SEQ ID NO: 825009 - protein, 414 aa, Homo sapiens; identical to SEQ ID NO: 825008

SEQ ID NO: 825010 - protein, 363 aa, Homo sapiens; identical to SEQ ID NO: 825005

SEQ ID NO: 825011 - protein, 410 aa, Homo sapiens
ASSVAPPPAPSSRPLVHFRLLPLPGPFSLVFPGLASPSPCARPEREVPEPRRGRVLGCRRCWPARPSRGSRHRLESFSCPRCVGRLESQENQMASGDFCSPGEGMEILQQVCSKQLPPCNLSKEDLLQNPYFSKLLLNLSQHVDESGLSLTLAKEQAQAWKEVRLHKTTWLRSEILHRVIQELLVDYYVKIQDTNVTSEDKKDFVWMRARLQQEVEEQLKKKCFTLLCYYDPNSDADSETVKAAKVWKLAEVLVGEQQQCQDAKSQQKEQMLLLEKKSAAYSQVLLRCLTLLQRLLQEHRLKTQSELDRINAQYLEVKCGAMILKLRMEELKILSDTYTVEKVEVHRLIRDRLEGAIHLQEQDMENSRQVLNSYEVLGEEFDRLVKEYTVLKQATENKRWALQEFSKVYR

SEQ ID NO: 825012 - protein, 280 aa, Homo sapiens
ASSVAPPPAPSSRPLVHFRLLPLPGPFSLVFPGLASPSPCARPEREVPEPRRGRVLGCRRCWPARPSRGSRHRLESFSCPRCVGRLESQENQMASGDFCSPGEGMEILQQVCSKQLPPCNLSKEDLLQNPYFSKLLLNLSQHVDESGLSLTLAKEQAQAWKEVRLHKTTWLRSEILHRVIQELLVDYYVKIQDTNVTSEDKKFHETLEQRLLVTELMRLLGPSQEREIPPLLGLEKADLLELMPLSEDFVWMRARLQQEVEEQLKKKCFTLLCYYDPNSG

SEQ ID NO: 825013 - protein, 163 aa, Homo sapiens
MASGDFCSPGEGMEILQQVCSKQLPPCNLSKEDLLQNPYFSKLLLNLSQHVDESGLSLTLAKEQAQAWKEVRLHKTTWLRSEILHRVIQELLVDYYVKIQDTNVTSEDKKFHETLEQRLLVTELMRLLGPSQEREIPPLLGLEKADLLELMPLSEVGGEILEP

SEQ ID NO: 825014 - protein, 258 aa, Homo sapiens
ASSVAPPPAPSSRPLVHFRLLPLPGPFSLVFPGLASPSPCARPEREVPEPRRGRVLGCRRCWPARPSRGSRHRLESFSCPRCVGRLESQENQMASGDFCSPGEGMEILQQVCSKQLPPCNLSKEDLLQNPYFSKLLLNLSQHVDESGLSLTLAKEQAQAWKEVRLHKTTWLRSEILHRVIQELLVDYYVKIQDTNVTSEDKKFHETLEQRLLVTELMRLLGPSQEREIPPLLGLEKADLLELMPLSEDCVDEGSVQQK

SEQ ID NO: 825015 - protein, 156 aa, Homo sapiens
MASGDFCSPGEGMEILQQVCSKQLPPCNLSKEDLLQNPYFSKLLLNLSQHVDESGLSLTLAKEQAQAWKEVRLHKTTWLRSEILHRVIQELLVDYYVKIQDTNVTSEDKKFHETLEQRLLVTELMRLLGPSQEREIPPLLGLEKADLLENLARRFI

SEQ ID NO: 825016 - protein, 166 aa, Homo sapiens
MASGDFCSPGEGMEILQQVCSKQLPPCNLSKEDLLQNPYFSKLLLNLSQHVDESGLSLTLAKEQAQAWKEVRLHKTTWLRSEILHRVIQELLVDYYVKIQDTNVTSEDKKFHETLEQRLLVTELMRLLGPSQEREIPPLLGLEKADLLELMPLSEDCVDEGSVQQK

SEQ ID NO: 825017 - protein, 500 aa, Homo sapiens
ASSVAPPPAPSSRPLVHFRLLPLPGPFSLVFPGLASPSPCARPEREVPEPRRGRVLGCRRCWPARPSRGSRHRLESFSCPRCVGRLESQENQMASGDFCSPGEGMEILQQVCSKQLPPCNLSKEDLLQNPYFSKLLLNLSQHVDESGLSLTLAKEQAQAWKEVRLHKTTWLRSEILHRVIQELLVDYYVKIQDTNVTSEDKKFHETLEQRLLVTELMRLLGPSQEREIPPLLGLEKADLLELMPLSEDFVWMRARLQQEVEEQLKKKCFTLLCYYDPNSDADSETVKAAKVWKLAEVLVGEQQQCQDAKSQQKEQMLLLEKKSAAYSQVYQGMGQPLSFILTPGALLGKTKIPDLPSFLLSYLCPLLPPSWAQVLLRCLTLLQRLLQEHRLKTQSELDRINAQYLEVKCGAMILKLRMEELKILSDTYTVEKVEVHRLIRDRLEGAIHLQEQDMENSRQVLNSYEVLGEEFDRLVKEYTVLKQATENKRWALQEFSKVYR

SEQ ID NO: 825018 - protein, 413 aa, Homo sapiens
ASSVAPPPAPSSRPLVHFRLLPLPGPFSLVFPGLASPSPCARPEREVPEPRRGRVLGCRRCWPARPSRGSRHRLESFSCPRCVGRLESQENQMASGDFCSPGEGMEILQQVCSKQLPPCNLSKEDLLQNPYFSKLLLNLSQHVDESGLSLTLAKEQAQAWKEVRLHKTTWLRSEILHRVIQELLVDYYVKIQDTNVTSEDKKFHETLEQRLLVTELMRLLGPSQEREIPPLLGLEKADLLELMPLSEDFVWMRARLQQEVEEQLKKKCFTLLCYYDPNSDADSETVKAAKVWKLAEVLVGEQQQCQDAKSQQKEQMLLLEKKSAAYSQVLLRCLTLLQRLLQEHRLKTQSELDRINAQYLEVKCGAMILKLRMEELKILSNREQAVGPPGVQQGLPLSSGRARRHGFCIAAAS

SEQ ID NO: 825019 - protein, 462 aa, Homo sapiens
ASSVAPPPAPSSRPLVHFRLLPLPGPFSLVFPGLASPSPCARPEREVPEPRRGRVLGCRRCWPARPSRGSRHRLESFSCPRCVGRLESQENQMASGDFCSPGEGMEILQQVCSKQLPPCNLSKEDLLQNPYFSKLLLNLSQHVDESGLSLTLAKEQAQAWKEVRLHKTTWLRSEILHRVIQELLVDYYVKIQDTNVTSEDKKFHETLEQRLLVTELMRLLGPSQEREIPPLLGLEKADLLELMPLSEDFVWMRARLQQEVEEQLKKKCFTLLCYYDPNSVLCPFAADADSETVKAAKVWKLAEVLVGEQQQCQDAKSQQKEQMLLLEKKSAAYSQVLLRCLTLLQRLLQEHRLKTQSELDRINAQYLEVKCGAMILKLRMEELKILSDTYTVEKVEVHRLIRDRLEGAIHLQEQDMENSRQVLNSYEVLGEEFDRLVKEYTVLKQATENKRWALQEFSKVYR

SEQ ID NO: 825020 - protein, 320 aa, Homo sapiens
ASSVAPPPAPSSRPLVHFRLLPLPGPFSLVFPGLASPSPCARPEREVPEPRRGRVLGCRRCWPARPSRGSRHRLESFSCPRCVGRLESQENQMASGDFCSPGEGMEILQQVCSKQLPPCNLSKEDLLQNPYFSKLLLNLSQHVDESGLSLTLAKEQAQAWKEVRLHKTTWLRSEILHRVIQELLVDYYVKIQDTNVTSEDKKFHETLEQRLLVTELMRLLGPSQEREIPPLLGLEKADLLELMPLSEDFVWMRARLQQEVEEQLKKKCFTLLCYYDPNSGASPLPHFAAEASSRTPAEDSIRARPHQCPVPGSQVRCYDP

SEQ ID NO: 825021 - protein, 363 aa, Homo sapiens; identical to SEQ ID NO: 825005

SEQ ID NO: 825022 - protein, 417 aa, Homo sapiens
ASSVAPPPAPSSRPLVHFRLLPLPGPFSLVFPGLASPSPCARPEREVPEPRRGRVLGCRRCWPARPSRGSRHRLESFSCPRCVGRLESQENQMASGDFCSPGEGMEILQQVCSKQLPPCNLSKEDLLQNPYFSKLLLNLSQHVDESGLSLTLAKEQAQAWKEVRLHKTTWLRSEILHRVIQELLVDYYVKIQDTNVTSEDKKDFVWMRARLQQEVEEQLKKKCFTLLCYYDPNSVLCPFAADADSETVKAAKVWKLAEVLVGEQQQCQDAKSQQKEQMLLLEKKSAAYSQVLLRCLTLLQRLLQEHRLKTQSELDRINAQYLEVKCGAMILKLRMEELKILSDTYTVEKVEVHRLIRDRLEGAIHLQEQDMENSRQVLNSYEVLGEEFDRLVKEYTVLKQATENKRWALQEFSKVYR

SEQ ID NO: 825023 - protein, 188 aa, Homo sapiens
MNSGVNLQRSLSSPPSSKRPKTISIDENMEPSPTGDFYPSPSSPAAGSRTWHERDQDMSSPTTMKKPEKPLFSSASPQDSSPRLSTFPQHHHPGIPGVAHSVISTRTPPPPSPLPFPTQAILPPAPSSYFSHPTIRYPPHLNPQDTLKNYVPSYDPSSPQTSQSWYLGSWGLSQCRKGTPFYGQSKSG

SEQ ID NO: 825024 - protein, 420 aa, Homo sapiens
MMYSPICLTQDEFHPFIEALLPHVRAIAYTWFNLQARKRKYFKKHEKRMSKDEERAVKDELLSEKPEIKQKWASRLLAKLRKDIRQEYREDFVLTVTGKKHPCCVLSNPDQKGKIRRIDCLRQADKVWRLDLVMVILFKGIPLESTDGERLMKSPHCTNPALCVQPHHITVSVKELDLFLAYYVQEQDSGQSGSPSHNDPAKNPPGYLEDSFVKSGVFNVSELVRVSRTPITQGTGVNFPIGEIPSQPYYHDMNSGVNLQRSLSSPPSSKRPKTISIDENMEPSPTGDFYPSPSSPAAGSRTWHERDQDMSSPTTMKKPEKPLFSSASPQDSSPRLSTFPQHHHPGIPGVAHSVISTRTPPPPSPLPFPTQAILPPAPSSYFSHPTIRYPPHLNPQDTLKNYVPSYDPSSPQTSQSWYLG

SEQ ID NO: 825025 - protein, 570 aa, Homo sapiens
MMYSPICLTQDEFHPFIEALLPHVRAIAYTWFNLQARKRKYFKKHEKRMSKDEERAVKDELLSEKPEIKQKWASRLLAKLRKDIRQEYREDFVLTVTGKKHPCCVLSNPDQKGKIRRIDCLRQADKVWRLDLVMVILFKGIPLESTDGERLMKSPHCTNPALCVQPHHITVSVKELDLFLAYYVQEQDSGQSGSPSHNDPAKNPPGYLEDSFVKSGVFNVSELVRVSRTPITQGTGVNFPIGEIPSQPYYHDMNSGVNLQRSLSSPPSSKRPKTISIDENMEPSPTGDFYPSPSSPAAGSRTWHERDQDMSSPTTMKKPEKPLFSSASPQDSSPRLSTFPQHHHPGIPGVAHSVISTRTPPPPSPLPFPTQAILPPAPSSYFSHPTIRYPPHLNPQDTLKNYVPSYDPSSPQTSQPNGSGQVVGKVPGHFTPVLAPSPHPSAVRPVTLSMTDTKPITTSTEGEAASPTATTYTASGTSQANRYVGLSPRDPSFLHQQQLRICDWTMNQNGRHLYPSTSEDTLGITWQSPGTWASLVPFQVSNRTPILPANVQNYGLNIIGEPFLQAETSN

SEQ ID NO: 825026 - protein, 345 aa, Homo sapiens
MMYSPICLTQDEFHPFIEALLPHVRAIAYTWFNLQARKRKYFKKHEKRMSKDEERAVKDELLSEKPEIKQKWASRLLAKLRKDIRQEYREDFVLTVTGKKHPCCVLSNPDQKDSGQSGSPSHNDPAKNPPGYLEDSFVKSGVFNVSELVRVSRTPITQGTGVNFPIGEIPSQPYYHDMNSGVNLQRSLSSPPSSKRPKTISIDENMEPSPTGDFYPSPSSPAAGSRTWHERDQDMSSPTTMKKPEKPLFSSASPQDSSPRLSTFPQHHHPGIPGVAHSVISTRTPPPPSPLPFPTQAILPPAPSSYFSHPTIRYPPHLNPQDTLKNYVPSYDPSSPQTSQSWYLG

SEQ ID NO: 825027 - protein, 561 aa, Homo sapiens
MMYSPICLTQDEFHPFIEALLPHVRAIAYTWFNLQARKRKYFKKHEKRMSKDEERAVKDELLSEKPEIKQKWASRLLAKLRKDIRQEYREDFVLTVTGKKHPCCVLSNPDQKGKIRRIDCLRQADKVWRLDLVMVILFKGIPLESTDGERLMKSPHCTNPALCVQPHHITVSVKELDLFLAYYVQEQDSGQSGSPSHNDPAKNPPGYLEDSFVKSGVFNVSELVRVSRTPITQGTGVNFPIGEIPSQPYYHDMNSGVNLQRSLSSPPSSKRPKTISIDENMEPSPTGDFYPSPSSPAAGSRTWHERDQDMSSPTTMKKPEKPLFSSASPQDSSPRLSTFPQHHHPGIPGVAHSVISTRTPPPPSPLPFPTQAILPPAPSSYFSHPTIRYPPHLNPQDTLKNYVPSYDPSSPQTSQPNGSGQVVGKVPGHFTPVLAPSPHPSAVRPVTLSMTDTKPITTSTEAYTASGTSQANRYVGLSPRDPSFLHQQQLRICDWTMNQNGRHLYPSTSEDTLGITWQSPGTWASLVPFQVSNRTPILPANVQNYGLNIIGEPFLQAETSN

SEQ ID NO: 825028 - protein, 487 aa, Homo sapiens
MMYSPICLTQDEFHPFIEALLPHVRAIAYTWFNLQARKRKYFKKHEKRMSKDEERAVKDELLSEKPEIKQKWASRLLAKLRKDIRQEYREDFVLTVTGKKHPCCVLSNPDQKGKIRRIDCLRQADKVWRLDLVMVILFKGIPLESTDGERLMKSPHCTNPALCVQPHHITVSVKELDLFLAYYVQEQDSGQSGSPSHNDPAKNPPGYLEDSFVKSGVFNVSELVRVSRTPITQGTGVNFPIGEIPSQPYYHDMNSGVNLQRSLSSPPSSKRPKTISIDENMEPSPTGDFYPSPSSPAAGSRTWHERDQDMSSPTTMKKPEKPLFSSASPQDSSPRLSTFPQHHHPGIPGVAHSVISTRTPPPPSPLPFPTQAILPPAPSSYFSHPTIRYPPHLNPQDTLKNYVPSYDPSSPQTSQLRICDWTMNQNGRHLYPSTSEDTLGITWQSPGTWASLVPFQVSNRTPILPANVQNYGLNIIGEPFLQAETSN

SEQ ID NO: 825029 - protein, 168 aa, Homo sapiens
MNSGVNLQRSLSSPPSSKRPKTISIDENMEPSPTGDFYPSPSSPAAGSRTWHERDQDMSSPTTMKKPEKPLFSSASPQDSSPRLSTFPQHHHPGIPGVAHSVISTRTPPPPSPLPFPTQAILPPAPSSYFSHPTIRYPPHLNPQDTLKNYVPSYDPSSPQTSQSWYLG

SEQ ID NO: 825030 - protein, 420 aa, Homo sapiens; identical to SEQ ID NO: 825024

SEQ ID NO: 825031 - protein, 387 aa, Homo sapiens
MMYSPICLTQDEFHPFIEALLPHVRAIAYTWFNLQARKRKYFKKHEKRMSKDEERAVKDELLSEKPEIKQKWASRLLAKLRKDIRQEYREDFVLTVTGKKHPCCVLSNPDQKGKIRRIDCLRQADKVWRLDLVMVILFKGIPLESTDGERLMKSPHCTNPALCVQPHHITVSVKELDLFLAYYVQEQDSGQSGSPSHNDPAKNPPGYLEDSFVKSGVFNVSELVRVSRTPITQGTGVNFPIGEIPSQPYYHDMNSGVNLQRSLSSPPSSKRPKTISIDENMEPSPTGDFYPSPSSPAAGSRTWHERDQDMSSPTTMKKPEKPLFSSASPQDSSPRLSTFPQHHHPGIPGVAHSVISTRTPPPPSPLPFPTQAILPPAPGNHSSLLHF

SEQ ID NO: 825032 - protein, 200 aa, Homo sapiens
MMYSPICLTQDEFHPFIEALLPHVRAIAYTWFNLQARKRKYFKKHEKRMSKDEERAVKDELLSEKPEIKQKWASRLLAKLRKDIRQEYREDFVLTVTGKKHPCCVLSNPDQKGKIRRIDCLRQADKVWRLDLVMVILFKGIPLESTDGERLMKSPHCTNPALCVQPHHITVSVKELDLFLAYYVQEQGKNFFSSNKCIKI

SEQ ID NO: 825033 - protein, 420 aa, Homo sapiens; identical to SEQ ID NO: 825024

SEQ ID NO: 825034 - protein, 435 aa, Homo sapiens
MAGKTSDSSIKWQLCYDMSARTWWMDEFHPFIEALLPHVRAIAYTWFNLQARKRKYFKKHEKRMSKDEERAVKDELLSEKPEIKQKWASRLLAKLRKDIRQEYREDFVLTVTGKKHPCCVLSNPDQKGKIRRIDCLRQADKVWRLDLVMVILFKGIPLESTDGERLMKSPHCTNPALCVQPHHITVSVKELDLFLAYYVQEQDSGQSGSPSHNDPAKNPPGYLEDSFVKSGVFNVSELVRVSRTPITQGTGVNFPIGEIPSQPYYHDMNSGVNLQRSLSSPPSSKRPKTISIDENMEPSPTGDFYPSPSSPAAGSRTWHERDQDMSSPTTMKKPEKPLFSSASPQDSSPRLSTFPQHHHPGIPGVAHSVISTRTPPPPSPLPFPTQAILPPAPSSYFSHPTIRYPPHLNPQDTLKNYVPSYDPSSPQTSQSWYLG

SEQ ID NO: 825035 - protein, 446 aa, Homo sapiens
TEKRNELWHRSCLLNSSTPIKKKKSHCVLCKMVLHSDEFHPFIEALLPHVRAIAYTWFNLQARKRKYFKKHEKRMSKDEERAVKDELLSEKPEIKQKWASRLLAKLRKDIRQEYREDFVLTVTGKKHPCCVLSNPDQKGKIRRIDCLRQADKVWRLDLVMVILFKGIPLESTDGERLMKSPHCTNPALCVQPHHITVSVKELDLFLAYYVQEQDSGQSGSPSHNDPAKNPPGYLEDSFVKSGVFNVSELVRVSRTPITQGTGVNFPIGEIPSQPYYHDMNSGVNLQRSLSSPPSSKRPKTISIDENMEPSPTGDFYPSPSSPAAGSRTWHERDQDMSSPTTMKKPEKPLFSSASPQDSSPRLSTFPQHHHPGIPGVAHSVISTRTPPPPSPLPFPTQAILPPAPSSYFSHPTIRYPPHLNPQDTLKNYVPSYDPSSPQTSQSWYLG

SEQ ID NO: 825036 - protein, 243 aa, Homo sapiens
AQTVSVLLPLGCSRGLKESAASTEIPLPGYLEDSFVKSGVFNVSELVRVSRTPITQGTGVNFPIGEIPSQPYYHDMNSGVNLQRSLSSPPSSKRPKTISIDENMEPSPTGDFYPSPSSPAAGSRTWHERDQDMSSPTTMKKPEKPLFSSASPQDSSPRLSTFPQHHHPGIPGVAHSVISTRTPPPPSPLPFPTQAILPPAPSSYFSHPTIRYPPHLNPQDTLKNYVPSYDPSSPQTSQSWYLG

SEQ ID NO: 825037 - protein, 393 aa, Homo sapiens
AQTVSVLLPLGCSRGLKESAASTEIPLPGYLEDSFVKSGVFNVSELVRVSRTPITQGTGVNFPIGEIPSQPYYHDMNSGVNLQRSLSSPPSSKRPKTISIDENMEPSPTGDFYPSPSSPAAGSRTWHERDQDMSSPTTMKKPEKPLFSSASPQDSSPRLSTFPQHHHPGIPGVAHSVISTRTPPPPSPLPFPTQAILPPAPSSYFSHPTIRYPPHLNPQDTLKNYVPSYDPSSPQTSQPNGSGQVVGKVPGHFTPVLAPSPHPSAVRPVTLSMTDTKPITTSTEGEAASPTATTYTASGTSQANRYVGLSPRDPSFLHQQQLRICDWTMNQNGRHLYPSTSEDTLGITWQSPGTWASLVPFQVSNRTPILPANVQNYGLNIIGEPFLQAETSN

SEQ ID NO: 825038 - protein, 420 aa, Homo sapiens; identical to SEQ ID NO: 825024

SEQ ID NO: 825039 - protein, 440 aa, Homo sapiens
MMYSPICLTQDEFHPFIEALLPHVRAIAYTWFNLQARKRKYFKKHEKRMSKDEERAVKDELLSEKPEIKQKWASRLLAKLRKDIRQEYREDFVLTVTGKKHPCCVLSNPDQKGKIRRIDCLRQADKVWRLDLVMVILFKGIPLESTDGERLMKSPHCTNPALCVQPHHITVSVKELDLFLAYYVQEQDSGQSGSPSHNDPAKNPPGYLEDSFVKSGVFNVSELVRVSRTPITQGTGVNFPIGEIPSQPYYHDMNSGVNLQRSLSSPPSSKRPKTISIDENMEPSPTGDFYPSPSSPAAGSRTWHERDQDMSSPTTMKKPEKPLFSSASPQDSSPRLSTFPQHHHPGIPGVAHSVISTRTPPPPSPLPFPTQAILPPAPSSYFSHPTIRYPPHLNPQDTLKNYVPSYDPSSPQTSQSWYLGSWGLSQCRKGTPFYGQSKSG

SEQ ID NO: 825040 - protein, 118 aa, Homo sapiens
  misc_feature (29)..(29): Xaa can be any naturally occurring amino acid
ELAAYKEEANTIAKSDLLQCLQYQFYQIXGTCLLPEVTEEDQGRICVVIDLDETLVHSSFKPINNADFIVPIEIERTLLFGPRELFCLSCSISCRFPPSRCHLEGRGSASHCDWAMGF

SEQ ID NO: 825041 - protein, 1646 aa, Homo sapiens
SAALGASLAIPRPGLPGVHGRGPGTLSGRAMEGAEPRARPERLAEAETRAADGGRLVEVQLSGGAPWGFTLKGGREHGEPLVITKIEEGSKAAAVDKLLAGDEIVGINDIGLSGFRQEAICLVKGSHKTLKLVVKRRSELGWRPHSWHATKFSDSHPELAASPFTSTSGCPSWSGRHHASSSSHDLSSSWEQTNLQRTLDHFSSLGSVDSLDHPSSRLSVAKSNSSIDHLGSHSKRDSAYGSFSTSSSTPDHTLSKADTSSAENILYTVGLWEAPRQGGRQAQAAGDPQGSEEKLSCFPPRVPGDSGKGPRPEYNAEPKLAAPGRSNFGPVWYVPDKKKAPSSPPPPPPPLRSDSFAATKSHEKAQGPVFSEAAAAQHFTALAQAQPRGDRRPELTDRPWRSAHPGSLGKGSGGPGCPQEAHADGSWPPSKDGASSRLQASLSSSDVRFPQSPHSGRHPPLYSDHSPLCADSLGQEPGAASFQNDSPPQVRGLSSCDQKLGSGWQGPRPCVQGDLQAAQLWAGCWPSDTALGALESLPPPTVGQSPRHHLPQPEGPPDARETGRCYPLDKGAEGCSAGAQEPPRASRAEKASQRLAASITWADGESSRICPQETPLLHSLTQEGKRRPESSPEDSATRPPPFDAHVGKPTRRSDRFATTLRNEIQMHRAKLQKSRSTVALTAAGEAEDGTGRWRAGLGGGTQEGPLAGTYKDHLKEAQARVLRATSFKRRDLDPNPGDLYPESLEHRMGDPDTVPHFWEAGLAQPPSSTSGGPHPPRIGGRRRFTAEQKLKSYSEPEKMNEVGLTRGYSPHQHPRTSEDTVGTFADRWKFFEETSKPVPQRPAQKQALHGIPRDKPERPRTAGRTCEGTEPWSRTTSLGDSLNAHSAAEKAGTSDLPRRLGTFAEYQASWKEQRKPLEARSSGRCHSADDILDVSLDPQERPQHVHGRSRSSPSTDHYKQEASVELRRQAGDPGEPREELPSAVRAEEGQSTPRQADAQCREGSPGSQQHPPSQKAPNPPTFSELSHCRGAPELPREGRGRAGTLPRDYRYSEESTPADLGPRAQSPGSPLHARGQDSWPVSSALLSKRPAPQRPPPPKREPRRYRATDGAPADAPVGVLGRPFPTPSPASLDVYVARLSLSHSPSVFSSAQPQDTPKATVCERGSQHVSGDASRPLPEALLPPKQQHLRLQTATMETSRSPSPQFAPQKLTDKPPLLIQDEDSTRIERVMDNNTTVKMVPIKIVHSESQPEKESRQSLACPAEPPALPHGLEKDQIKTLSTSEQFYSRFCLYTRQGAEPEAPHRAQPAEPQPLGTQVPPEKDRCTSPPGLSYMKAKEKTVEDLKSEELAREIVGKDKSLADILDPSVKIKTTMDLMEGIFPKDEHLLEEAQQRRKLLPKIPSPRSTEERKEEPSVPAAVSLATNSTYYSTSAPKAELLIKMKDLQEQQEHEEDSGSDLDHDLSVKKQELIESISRKLQVLREARESLLEDVQANTVLGAEVEAIVKGVCKPSEFDKFRMFIGDLDKVVNLLLSLSGRLARVENALNNLDDGASPGDRQSLLEKQRVLIQQHEDAKELKENLDRRERIVFDILANYLSEESLADYEHFVKMKSALIIEQRELEDKIHLGEEQLKCLLDSLQPERGK

SEQ ID NO: 825042 - protein, 1646 aa, Homo sapiens; identical to SEQ ID NO: 825041

SEQ ID NO: 825043 - protein, 1353 aa, Homo sapiens
SAALGASLAIPRPGLPGVHGRGPGTLSGRAMEGAEPRARPERLAEAETRAADGGRLVEVQLSGGAPWGFTLKGGREHGEPLVITKIEEGSKAAAVDKLLAGDEIVGINDIGLSGFRQEAICLVKGSHKTLKLVVKRRSELGWRPHSWHATKFSDSHPELAASPFTSTSGCPSWSGRHHASSSSHDLSSSWEQTNLQRTLDHFSSLGSVDSLDHPSSRLSVAKSNSSIDHLGSHSKRDSAYGSFSTSSSTPDHTLSKADTSSAENILYTVGLWEAPRQGGRQAQAAGDPQGSEEKLSCFPPRVPGDSGKGPRPEYNAEPKLAAPGRSNFGPVWYVPDKKKAPSSPPPPPPPLRSDSFAATKSHEKAQGPVFSEAAAAQHFTALAQAQPRGDRRPELTDRPWRSAHPGSLGKGSGGPGCPQEAHADGSWPPSKDGASSRLQASLSSSDVRFPQSPHSGRHPPLYSDHSPLCADSLGQEPGAASFQNDSPPQVRGLSSCDQKLGSGWQGPRPCVQGDLQAAQLWAGCWPSDTALGALESLPPPTVGQSPRHHLPQPEGPPDARETGRCYPLDKGAEGCSAGAQEPPRASRAEKASQRLAASITWADGESSRICPQETPLLHSLTQEGKRRPESSPEDSATRPPPFDAHVGKPTRRSDRFATTLRNEIQMHRAKLQKSRSTVALTAAGEAEDGTGRWRAGLGGGTQEGPLAGTYKDHLKEAQARVLRATSFKRRDLDPNPGDLYPESLEHRMGDPDTVPHFWEAGLAQPPSSTSGGPHPPRIGGRRRFTAEQKLKSYSEPEKMNEVGLTRGYSPHQHPRTSEDTVGTFADRWKFFEETSKPVPQRPAQKQALHGIPRDKPERPRTAGRTCEGTEPWSRTTSLGDSLNAHSAAEKAGTSDLPRRLGTFAEYQASWKEQRKPLEARSSGRCHSADDILDVSLDPQERPQHVHGRSRSSPSTDHYKQEASVELRRQAGDPGEPREELPSAVRAEEGQSTPRQADAQCREGSPGSQQHPPSQKAPNPPTFSELSHCRGAPELPREGRGRAGTLPRDYRYSEESTPADLGPRAQSPGSPLHARGQDSWPVSSALLSKRPAPQRPPPPKREPRRYRATDGAPADAPVGVLGRPFPTPSPASLDVYVARLSLSHSPSVFSSAQPQDTPKATVCERGSQHVSGDASRPLPEALLPPKQQHLRLQTATMETSRSPSPQFAPQKLTDKPPLLIQDEDSTRIERVMDNNTTVKMVPIKIVHSESQPEKESRQSLACPAEPPALPHGLEKDQIKTLSTSEQFYSRFCLYTRQGAEPEAPHRAQPAEPQPLGTQVPPEKDRCTSPPGLSYMKHIEPAVLSVPLFASETSG

SEQ ID NO: 825044 - protein, 679 aa, Homo sapiens
ESCSRGGLWVPEAHRCLHSWANSHPARQADAQCREGSPGSQQHPPSQKAPNPPTFSELSHCRGAPELPREGRGRAGTLPRDYRYSEESTPADLGPRAQSPGSPLHARGQDSWPVSSALLSKRPAPQRPPPPKREPRRYRATDGAPADAPVGVLGRPFPTPSPASLDVYVARLSLSHSPSVFSSAQPQDTPKATVCERGSQHVSGDASRPLPEALLPPKQQHLRLQTATMETSRSPSPQFAPQKLTDKPPLLIQDEDSTRIERVMDNNTTVKMVPIKIVHSESQPEKESRQSLACPAEPPALPHGLEKDQIKTLSTSEQFYSRFCLYTRQGAEPEAPHRAQPAEPQPLGTQVPPEKDRCTSPPGLSYMKAKEKTVEDLKSEELAREIVGKDKSLADILDPSVKIKTTMDLMEGIFPKDEHLLEEAQQRRKLLPKIPSPRSTEERKEEPSVPAAVSLATNSTYYSTSAPKAELLIKMKDLQEQQEHEEDSGSDLDHDLSVKKQELIESISRKLQVLREARESLLEDVQANTVLGAEVEAIVKGVCKPSEFDKFRMFIGDLDKVVNLLLSLSGRLARVENALNNLDDGASPGDRQSLLEKQRVLIQQHEDAKELKENLDRRERIVFDILANYLSEESLADYEHFVKMKSALIIEQRELEDKIHLGEEQLKCLLDSLQPERGK

SEQ ID NO: 825045 - protein, 1191 aa, Homo sapiens
MSSPMPDCTSKCRSLKHALDVLSVVTKGSENQIKAFLSSHCYNAATIKDVFGRNALHLVSSCGKKGVLDWLIQKGVDLLVKDKESGWTALHRSIFYGHIDCVWSLLKHGVSLYIQDKEGLSALDLVMKDRPTHVVFKNTDPTDVYTWGDNTNFTLGHGSQNSKHHPELVDLFSRSGIYIKQVVLCKFHSVFLSQKGQVYTCGHGPGGRLGHGDEQTCLVPRLVEGLNGHNCSQVAAAKDHTVVLTEDGCVYTFGLNIFHQLGIIPPPSSCNVPRQIQAKYLKGRTIIGVAAGRFHTVLWTREAVYTMGLNGGQLGCLLDPNGEKCVTAPRQVSALHHKDIALSLVAASDGATVCVTTRGDIYLLADYQCKKMASKQLNLKKVLVSGGHMEYKVDPEHLKENGGQKICILAMDGAGRVFCWRSVNSSLKQCRWAYPRQVFISDIALNRNEILFVTQDGEGFRGRWFEEKRKSSEKKEILSNLHNSSSDVSYVSDINSVYERIRLEKLTFAHRAVSVSTDPSGCNFAILQSDPKTSLYEIPAVSSSSFFEEFGKLLREADEMDSIHDVTFQVGNRLFPAHKYILAVHSDFFQKLFLSDGNTSEFTDIYQKDEDSAGCHLFVVEKVHPDMFEYLLQFIYTDTCDFLTHGFKPRIHLNKNPEEYQGTLNSHLNKVNFHEDDNQKSAFEVYKSNQAQTVSERQKSKPKSCKKGKNIREDDPVRMLQTVAKKFDFSNLSSRLDGVRFENEKINVIAKNTGNKLKLSQKKCSFLCDVTMKSVDGKEFPCHKCVLCARLEYFHSMLSSSWIEASSCAALEMPIHSDILKVILDYLYTDEAVVIKESQNVDFICSVLVVADQLLITRLKEICEVALTEKLTLKNAAMLLEFAAMYSAKQLKLSCLQFIGLNMAALLEARSLDVLSDGVLKDLSEFYRKMIPAMDRRVITPYQDGPDISYLEVEDGDIFLKEEINMEQNHSETMFKKAKTKAKKKPRKRSDSSGGYNLSDIIQSPSSTGLLKSGKTNSVESLPELLTSDSEGSYAGVGSPRDLQSPDFTTGFHSDKIEAKVKPYVNGTSPVYSREDLKPWEKSPILKISAPQPIPSNRIDTTSSASWVAGSFSPVSPPVVDLRTIMEIEESRQKCGATPKSHLGKTVSHGVKLSQKQRKMIALTTKENNSGMNSMETVLFTPSKAPKPVNA

SEQ ID NO: 825046 - protein, 1353 aa, Homo sapiens
MSSPMPDCTSKCRSLKHALDVLSVVTKGSENQIKAFLSSHCYNAATIKDVFGRNALHLVSSCGKKGVLDWLIQKGVDLLVKDKESGWTALHRSIFYGHIDCVWSLLKHGVSLYIQDKEGLSALDLVMKDRPTHVVFKNTDPTDVYTWGDNTNFTLGHGSQNSKHHPELVDLFSRSGIYIKQVVLCKFHSVFLSQKGQVYTCGHGPGGRLGHGDEQTCLVPRLVEGLNGHNCSQVAAAKDHTVVLTEDGCVYTFGLNIFHQLGIIPPPSSCNVPRQIQAKYLKGRTIIGVAAGRFHTVLWTREAVYTMGLNGGQLGCLLDPNGEKCVTAPRQVSALHHKDIALSLVAASDGATVCVTTRGDIYLLADYQCKKMASKQLNLKKVLVSGGHMEYKVDPEHLKENGGQKICILAMDGAGRVFCWRSVNSSLKQCRWAYPRQVFISDIALNRNEILFVTQDGEGFRGRWFEEKRKSSEKKEILSNLHNSSSDVSYVSDINSVYERIRLEKLTFAHRAVSVSTDPSGCNFAILQSDPKTSLYEIPAVSSSSFFEEFGKLLREADEMDSIHDVTFQVGNRLFPAHKYILAVHSDFFQKLFLSDGNTSEFTDIYQKDEDSAGCHLFVVEKVHPDMFEYLLQFIYTDTCDFLTHGFKPRIHLNKNPEEYQGTLNSHLNKVNFHEDDNQKSAFEVYKSNQAQTVSERQKSKPKSCKKGKNIREDDPVRMLQTVAKKFDFSNLSSRLDGVRFENEKINVIAKNTGNKLKLSQKKCSFLCDVTMKSVDGKEFPCHKCVLCARLEYFHSMLSSSWIEASSCAALEMPIHSDILKVILDYLYTDEAVVIKESQNVDFICSVLVVADQLLITRLKEICEVALTEKLTLKNAAMLLEFAAMYSAKQLKLSCLQFIGLNMAALLEARSLDVLSDGVLKDLSEFYRKMIPAMDRRVITPYQDGPDISYLEVEDGDIFLKEEINMEQNHSETMFKKAKTKAKKKPRKRSDSSGGYNLSDIIQSPSSTGLLKSGKTNSVESLPELLTSDSEGSYAGVGSPRDLQSPDFTTGFHSDKIEAKVKPYVNGTSPVYSREDLKPWEKSPILKISAPQPIPSNRIDTTSSASWVAGSFSPVSPPVVDLRTIMEIEESRQKCGATPKSHLGKTVSHGVKLSQKQRKMIALTTKENNSGMNSMETVLFTPSKAPKPVNAWASSLHSVSSKSFRDFLLEEKKSVTSHSSGDHVKKVSFKGIENSQAPKIVRCSTHGTPGPEGNHISDLPLLDSPNPWLSSSVTAPSMVAPVTFASIVEEELQQEAALIRSREKPLALIQIEEHAIQDLLVFYEAFGNPEEFVIVERTPQGPLAVPMWNKHGC

SEQ ID NO: 825047 - protein, 1249 aa, Homo sapiens
MSSPMPDCTSKCRSLKHALDVLSVVTKGSENQIKAFLSSHCYNAATIKDVFGRNALHLVSSCGKKGVLDWLIQKGVDLLVKDKESGWTALHRSIFYGHIDCVWSLLKHGVSLYIQDKEGLSALDLVMKDRPTHVVFKNTDPTDVYTWGDNTNFTLGHGSQNSKHHPELVDLFSRSGIYIKQVVLCKFHSVFLSQKGQVYTCGHGPGGRLGHGDEQTCLVPRLVEGLNGHNCSQVAAAKDHTVVLTEDGCVYTFGLNIFHQLGIIPPPSSCNVPRQIQAKYLKGRTIIGVAAGRFHTVLWTREAVYTMGLNGGQLGCLLDPNGEKCVTAPRQVSALHHKDIALSLVAASDGATVCVTTRGDIYLLADYQCKKMASKQLNLKKVLVSGGHMEYKVDPEHLKENGGQKICILAMDGAGRVFCWRSVNSSLKQCRWAYPRQVFISDIALNRNEILFVTQDGEGFRGRWFEEKRKSSEKKEILSNLHNSSSDVSYVSDINSVYERIRLEKLTFAHRAVSVSTDPSGCNFAILQSDPKTSLYEIPAVSSSSFFEEFGKLLREADEMDSIHDVTFQVGNRLFPAHKYILAVHSDFFQKLFLSDGNTSEFTDIYQKDEDSAGCHLFVVEKVHPDMFEYLLQFIYTDTCDFLTHGFKPRIHLNKNPEEYQGTLNSHLNKVNFHEDDNQKSAFEVYKSNQAQTVSERQKSKPKSCKKGKNIREDDPVRMLQTVAKKFDFSNLSSRLDGVRFENEKINVIAKNTGNKLKLSQKKCSFLCDVTMKSVDGKEFPCHKCVLCARLEYFHSMLSSSWIEASSCAALEMPIHSDILKVILDYLYTDEAVVIKESQNVDFICSVLVVADQLLITRLKEICEVALTEKLTLKNAAMLLEFAAMYSAKQLKLSCLQFIGLNMAALLEARSLDVLSDGVLKDLSEFYRKMIPAMDRRVITPYQDGPDISYLEVEDGDIFLKEEINMEQNHSETMFKKAKTKAKKKPRKRSDSSGGYNLSDIIQSPSSTGLLKSGKTNSVESLPELLTSDSEGSYAGVGSPRDLQSPDFTTGFHSDKIEAKVKPYVNGTSPVYSREDLKPWEKSPILKISAPQPIPSNRIDTTSSASWVAGSFSPVSPPVVDLRTIMEIEESRQKCGATPKSHLGKTVSHGVKLSQKQRKMIALTTKENNSGMNSMETVLFTPSKAPKPVNAWASSLHSVSSKSFRDFLLEEKKSVTSHSSGDHVKKVSFKGIENSQAPKIVSFVGGERR

SEQ ID NO: 825048 - protein, 1353 aa, Homo sapiens; identical to SEQ ID NO: 825046

SEQ ID NO: 825049 - protein, 345 aa, Homo sapiens
MSSPMPDCTSKCRSLKHALDVLSVVTKGSENQIKAFLSSHCYNAATIKDVFGRNALHLVSSCGKKGVLDWLIQKGVDLLVKDKESGWTALHRSIFYGHIDCVWSLLKHGVSLYIQDKEGLSALDLVMKDRPTHVVFKNTDPTDVYTWGDNTNFTLGHGSQNSKHHPELVDLFSRSGIYIKQVVLCKFHSVFLSQKGQVYTCGHGPGGRLGHGDEQTCLVPRLVEGLNGHNCSQVAAAKDHTVVLTEDGCVYTFGLNIFHQLGIIPPPSSCNVPRQIQAKYLKGRTIIGVAAGRFHTVLWTREAVYTMGLNGGQLGCFAENPQMEEKHVVAASSYRYSRPFHPSQG

SEQ ID NO: 825050 - protein, 203 aa, Homo sapiens
MLIDIISRKMIALTTKENNSGMNSMETVLFTPSKAPKPVNAWASSLHSVSSKSFRDFLLEEKKSVTSHSSGDHVKKVSFKGIENSQAPKIVRCSTHGTPGPEGNHISDLPLLDSPNPWLSSSVTAPSMVAPVTFASIVEEELQQEAALIRSREKPLALIQIEEHAIQDLLVFYEAFGNPEEFVIVERTPQGPLAVPMWNKHGC

SEQ ID NO: 825051 - protein, 1353 aa, Homo sapiens; identical to SEQ ID NO: 825046

SEQ ID NO: 825052 - protein, 1353 aa, Homo sapiens; identical to SEQ ID NO: 825046

SEQ ID NO: 825053 - protein, 132 aa, Homo sapiens
PLPPGFKRFSCLRHPSSWDYRCSTHGTPGPEGNHISDLPLLDSPNPWLSSSVTAPSMVAPVTFASIVEEELQQEAALIRSREKPLALIQIEEHAIQDLLVFYEAFGNPEEFVIVERTPQGPLAVPMWNKHGC

SEQ ID NO: 825054 - protein, 156 aa, Homo sapiens
MARTRLTAVSDLAGLRATGGRRRQSTCLNQAYKTPKMGALYQAGAQQMSAEKMMQGAVLTQVTMCDRKAVIKNADMSEEMQQDSVECATQALEKYNIEKDIAAHIKKEFDKKYNPTWALPSWGRNFGSYVTHGNPNTFIYFLPLGQVAHFFLFKSG

SEQ ID NO: 825055 - protein, 130 aa, Homo sapiens
MRQCSVNRGVASMAGLGLMIALIPPQDTVGSRTICFYYGYTMFDRNAYDATECGEQDSVECATQALEKYNIEKDIAAHIKKEFDKKYNPTWALPSWGRNFGSYVTHGNPNTFIYFLPLGQVAHFFLFKSG

SEQ ID NO: 825056 - protein, 90 aa, Homo sapiens
MCDRKAVIKNADMSEEMQQDSVECATQALEKYNIEKDIAAHIKKEFDKKYNPTWALPSWGRNFGSYVTHGNPNTFIYFLPLGLSLPGYRA

SEQ ID NO: 825057 - protein, 120 aa, Homo sapiens
MGALYQAGAQQMSAEKMMQGAVLTQVTMCDRKAVIKNADMSEEMQQDSVECATQALEKYNIEKDIAAHIKKEFDKKYNPTWALPSWGRNFGSYVTHGNPNTFIYFLPLGQVAHFFLFKSG

SEQ ID NO: 825058 - protein, 124 aa, Homo sapiens
MCDRKAVIKNADMSEEMQQDSVECATQALEKYNIEKDIAAHIKKEFDKKYNPTWALPSWGRNFGSYVTHGNPNTFIYFLPLGPPLPSFGGGGGGAPPPPKKKASGPFLSVQIWLKAWDCAHTPQ

SEQ ID NO: 825059 - protein, 111 aa, Homo sapiens
  misc_feature (107)..(107): Xaa can be any naturally occurring amino acid
MCDRKAVIKNADMSEEMQQDSVECATQALEKYNIEKDIAAHIKKEFDKKYNPTWALPSWGRNFGSYVTHGNPNTFQFFKPFFFFPFVLKNPPPLFWGGGGALSGHSXVQIW

SEQ ID NO: 825060 - protein, 247 aa, Homo sapiens
ICCCLLLDNIHSYLPASVYLRLQICTENFKGLAIPYLEHIIHVWEETGSRFHNCLIQLYCEKVQGLMKEYLLSFPAGKTPVPAGEEEGELGEYRQKLLMFLEISSYYDPGRLICDFPFDGLLEERALLLGRMGKHEQALFIYVHILKDTRMAEEYRSKLILFPRKPSAPKKGDSSAEELKLATQLTGPVMPVRNVYKKEKARVITEEEKNFKAFASLRMARANARLFGIRAKRAKEAAEQDVDHEQT

SEQ ID NO: 825061 - protein, 875 aa, Homo sapiens
MHDAFEPVPILEKLPLQIDCLAAWEEWLLVGTKQGHLLLYRIRKDVGCNRFEVTLEKSNKNFSKKIQQIHVVSQFKILVSLLENNIYVHDLLTFQQITTVSKAKGASLFTCDLQHTETGEEVLRMCVAVKKKLQLYFWKDREFHELQGDFSVPDVPKSMAWCENSICVGFKRDYYLIRVDGKGSIKELFPTGKQLEPLVAPLADGKVAVGQDDLTVVLNEEGICTQKCALNWTDIPVAMEHQPPYIIAVLPRYVEIRTFEPRLLVQSIELQRPRFITSGGSNIIYVASNHFVWRLIPVPMATQIQQLLQDKQFELALQLAEMKDDSDSEKQQQIHHIKNLYAFNLFCQKRFDESMQVFAKLGTDPTHVMGLYPDLLPTDYRKQLQYPNPLPVLSGAELEKAHLALIDYLTQKRSQLVKKLNDSDHQSSTSPLMEGTPTIKSKKKLLQIIDTTLLKCYLHTNVALVAPLLRLENNHCHIEESEHVLKKAHKYSELIILYEKKGLHEKALQVLVDQSKKANSPLKGHERTVQYLQHLGTENLHLIFSYSVWVLRDFPEDGLKIFTEDLPEVESLPRDRVLGFLIENFKGLAIPYLEHIIHVWEETGSRFHNCLIQLYCEKVQGLMKEYLLSFPAGKTPVPAGEEEGELGEYRQKLLMFLEISSYYDPGRLICDFPFDGLLEERALLLGRMGKHEQALFIYVHILKDTRMAEEYCHKHYDRNKDGNKDVYLSLLRMYLSPPSIHCLGPIKLELLEPKANLQAALQVLELHHSKLDTTKALNLLPANTQINDIRIFLEKVLEENAQKKRFNQVLKNLLHAEFLRVQEERILHQQVKCIITEEKVCMVCKKKIGNSAFARYPNGVVVHYFCSKEVNPADT

SEQ ID NO: 825062 - protein, 727 aa, Homo sapiens
MSVYQSSCFHLSDIDVGTTAEVIERLLPNKVDGKGSIKELFPTGKQLEPLVAPLADGKVAVGQDDLTVVLNEEGICTQKCALNWTDIPVAMEHQPPYIIAVLPRYVEIRTFEPRLLVQSIELQRPRFITSGGSNIIYVASNHFVWRLIPVPMATQIQQLLQDKQFELALQLAEMKDDSDSEKQQQIHHIKNLYAFNLFCQKRFDESMQVFAKLGTDPTHVMGLYPDLLPTDYRKQLQYPNPLPVLSGAELEKAHLALIDYLTQKRSQLVKKLNDSDHQSSTSPLMEGTPTIKSKKKLLQIIDTTLLKCYLHTNVALVAPLLRLENNHCHIEESEHVLKKAHKYSELIILYEKKGLHEKALQVLVDQSKKANSPLKGHERTVQYLQHLGTENLHLIFSYSVWVLRDFPEDGLKIFTEDLPEVESLPRDRVLGFLIENFKGLAIPYLEHIIHVWEETGSRFHNCLIQLYCEKVQGLMKEYLLSFPAGKTPVPAGEEEGELGEYRQKLLMFLEISSYYDPGRLICDFPFDGLLEERALLLGRMGKHEQALFIYVHILKDTRMAEEYCHKHYDRNKDGNKDVYLSLLRMYLSPPSIHCLGPIKLELLEPKANLQAALQVLELHHSKLDTTKALNLLPANTQINDIRIFLEKVLEENAQKKRFNQVLKNLLHAEFLRVQEERILHQQVKCIITEEKVCMVCKKKIGNSAFARYPNGVVVHYFCSKEVNPADT

SEQ ID NO: 825063 - protein, 683 aa, Homo sapiens
MTLITIKHLTAHGKVAVGQDDLTVVLNEEGICTQKCALNWTDIPVAMEHQPPYIIAVLPRYVEIRTFEPRLLVQSIELQRPRFITSGGSNIIYVASNHFVWRLIPVPMATQIQQLLQDKQFELALQLAEMKDDSDSEKQQQIHHIKNLYAFNLFCQKRFDESMQVFAKLGTDPTHVMGLYPDLLPTDYRKQLQYPNPLPVLSGAELEKAHLALIDYLTQKRSQLVKKLNDSDHQSSTSPLMEGTPTIKSKKKLLQIIDTTLLKCYLHTNVALVAPLLRLENNHCHIEESEHVLKKAHKYSELIILYEKKGLHEKALQVLVDQSKKANSPLKGHERTVQYLQHLGTENLHLIFSYSVWVLRDFPEDGLKIFTEDLPEVESLPRDRVLGFLIENFKGLAIPYLEHIIHVWEETGSRFHNCLIQLYCEKVQGLMKEYLLSFPAGKTPVPAGEEEGELGEYRQKLLMFLEISSYYDPGRLICDFPFDGLLEERALLLGRMGKHEQALFIYVHILKDTRMAEEYCHKHYDRNKDGNKDVYLSLLRMYLSPPSIHCLGPIKLELLEPKANLQAALQVLELHHSKLDTTKALNLLPANTQINDIRIFLEKVLEENAQKKRFNQVLKNLLHAEFLRVQEERILHQQVKCIITEEKVCMVCKKKIGNSAFARYPNGVVVHYFCSKEVNPADT

SEQ ID NO: 825064 - protein, 644 aa, Homo sapiens
LLCMFSFTEHQPPYIIAVLPRYVEIRTFEPRLLVQSIELQRPRFITSGGSNIIYVASNHFVWRLIPVPMATQIQQLLQDKQFELALQLAEMKDDSDSEKQQQIHHIKNLYAFNLFCQKRFDESMQVFAKLGTDPTHVMGLYPDLLPTDYRKQLQYPNPLPVLSGAELEKAHLALIDYLTQKRSQLVKKLNDSDHQSSTSPLMEGTPTIKSKKKLLQIIDTTLLKCYLHTNVALVAPLLRLENNHCHIEESEHVLKKAHKYSELIILYEKKGLHEKALQVLVDQSKKANSPLKGHERTVQYLQHLGTENLHLIFSYSVWVLRDFPEDGLKIFTEDLPEVESLPRDRVLGFLIENFKGLAIPYLEHIIHVWEETGSRFHNCLIQLYCEKVQGLMKEYLLSFPAGKTPVPAGEEEGELGEYRQKLLMFLEISSYYDPGRLICDFPFDGLLEERALLLGRMGKHEQALFIYVHILKDTRMAEEYCHKHYDRNKDGNKDVYLSLLRMYLSPPSIHCLGPIKLELLEPKANLQAALQVLELHHSKLDTTKALNLLPANTQINDIRIFLEKVLEENAQKKRFNQVLKNLLHAEFLRVQEERILHQQVKCIITEEKVCMVCKKKIGNSAFARYPNGVVVHYFCSKEVNPADT

SEQ ID NO: 825065 - protein, 319 aa, Homo sapiens
ICCCLLLDNIHSYLPASVYLRLQICTENFKGLAIPYLEHIIHVWEETGSRFHNCLIQLYCEKVQGLMKEYLLSFPAGKTPVPAGEEEGELGEYRQKLLMFLEISSYYDPGRLICDFPFDGLLEERALLLGRMGKHEQALFIYVHILKDTRMAEEYCHKHYDRNKDGNKDVYLSLLRMYLSPPSIHCLGPIKLELLEPKANLQAALQVLELHHSKLDTTKALNLLPANTQINDIRIFLEKVLEENAQKKRFNQVLKNLLHAEFLRVQEERILHQQVKCIITEEKVCMVCKKKIGNSAFARYPNGVVVHYFCSKEVNPADT

SEQ ID NO: 825066 - protein, 886 aa, Homo sapiens
MHDAFEPVPILEKLPLQIDCLAAWEEWLLVGTKQGHLLLYRIRKDVVPADVASPESGSCNRFEVTLEKSNKNFSKKIQQIHVVSQFKILVSLLENNIYVHDLLTFQQITTVSKAKGASLFTCDLQHTETGEEVLRMCVAVKKKLQLYFWKDREFHELQGDFSVPDVPKSMAWCENSICVGFKRDYYLIRVDGKGSIKELFPTGKQLEPLVAPLADGKVAVGQDDLTVVLNEEGICTQKCALNWTDIPVAMEHQPPYIIAVLPRYVEIRTFEPRLLVQSIELQRPRFITSGGSNIIYVASNHFVWRLIPVPMATQIQQLLQDKQFELALQLAEMKDDSDSEKQQQIHHIKNLYAFNLFCQKRFDESMQVFAKLGTDPTHVMGLYPDLLPTDYRKQLQYPNPLPVLSGAELEKAHLALIDYLTQKRSQLVKKLNDSDHQSSTSPLMEGTPTIKSKKKLLQIIDTTLLKCYLHTNVALVAPLLRLENNHCHIEESEHVLKKAHKYSELIILYEKKGLHEKALQVLVDQSKKANSPLKGHERTVQYLQHLGTENLHLIFSYSVWVLRDFPEDGLKIFTEDLPEVESLPRDRVLGFLIENFKGLAIPYLEHIIHVWEETGSRFHNCLIQLYCEKVQGLMKEYLLSFPAGKTPVPAGEEEGELGEYRQKLLMFLEISSYYDPGRLICDFPFDGLLEERALLLGRMGKHEQALFIYVHILKDTRMAEEYCHKHYDRNKDGNKDVYLSLLRMYLSPPSIHCLGPIKLELLEPKANLQAALQVLELHHSKLDTTKALNLLPANTQINDIRIFLEKVLEENAQKKRFNQVLKNLLHAEFLRVQEERILHQQVKCIITEEKVCMVCKKKIGNSAFARYPNGVVVHYFCSKEVNPADT

SEQ ID NO: 825067 - protein, 886 aa, Homo sapiens; identical to SEQ ID NO: 825066

SEQ ID NO: 825068 - protein, 886 aa, Homo sapiens; identical to SEQ ID NO: 825066

SEQ ID NO: 825069 - protein, 463 aa, Homo sapiens
MHDAFEPVPILEKLPLQIDCLAAWEEWLLVGTKQGHLLLYRIRKDVGCNRFEVTLEKSNKNFSKKIQQIHVVSQFKILVSLLENNIYVHDLLTFQQITTVSKAKGASLFTCDLQHTETGEEVLRMCVAVKKKLQLYFWKDREFHELQGDFSVPDVPKSMAWCENSICVGFKRDYYLIRVDGKGSIKELFPTGKQLEPLVAPLADGKVAVGQDDLTVVLNEEGICTQKCALNWTDIPVAMEHQPPYIIAVLPRYVEIRTFEPRLLVQSIELQRPRFITSGGSNIIYVASNHFVWRLIPVPMATQIQQLLQDKQFELALQLAEMKDDSDSEKQQQIHHIKNLYAFNLFCQKRFDESMQVFAKLGTDPTHVMGLYPDLLPTDYRKQLQYPNPLPVLSGAELEKAHLALIDYLTQKRSQLVKKLNDSDHQSSTSLDSRNLTCHVCPAFLASCACYLPFSQTVFEAIE

SEQ ID NO: 825070 - protein, 107 aa, Homo sapiens
AVCFLLLVLHSWPFSLEQAWPGKGGAPQEAVSTELLLFLQTNVALVAPLLRLENNHCHIEESEHVLKKAHKYSELIILYEKKGLHEKGVGVVPWIWEGLLYMAGETH

SEQ ID NO: 825071 - protein, 96 aa, Homo sapiens
LTSRKSGVDDGCVVEGPVAGGFLAGSRSTLSPDSFRTPARPGTLWARRRWQLSPCRHARRFRASADPRKAASANRLSGCLGGMASCGNQTRTSSSL

SEQ ID NO: 825072 - protein, 886 aa, Homo sapiens; identical to SEQ ID NO: 825066

SEQ ID NO: 825073 - protein, 886 aa, Homo sapiens; identical to SEQ ID NO: 825066

SEQ ID NO: 825074 - protein, 658 aa, Homo sapiens
KGVIKPRRDVSLNRNETYQLAMEHQPPYIIAVLPRYVEIRTFEPRLLVQSIELQRPRFITSGGSNIIYVASNHFVWRLIPVPMATQIQQLLQDKQFELALQLAEMKDDSDSEKQQQIHHIKNLYAFNLFCQKRFDESMQVFAKLGTDPTHVMGLYPDLLPTDYRKQLQYPNPLPVLSGAELEKAHLALIDYLTQKRSQLVKKLNDSDHQSSTSPLMEGTPTIKSKKKLLQIIDTTLLKCYLHTNVALVAPLLRLENNHCHIEESEHVLKKAHKYSELIILYEKKGLHEKALQVLVDQSKKANSPLKGHERTVQYLQHLGTENLHLIFSYSVWVLRDFPEDGLKIFTEDLPEVESLPRDRVLGFLIENFKGLAIPYLEHIIHVWEETGSRFHNCLIQLYCEKVQGLMKEYLLSFPAGKTPVPAGEEEGELGEYRQKLLMFLEISSYYDPGRLICDFPFDGLLEERALLLGRMGKHEQALFIYVHILKDTRMAEEYCHKHYDRNKDGNKDVYLSLLRMYLSPPSIHCLGPIKLELLEPKANLQAALQVLELHHSKLDTTKALNLLPANTQINDIRIFLEKVLEENAQKKRFNQVLKNLLHAEFLRVQEERILHQQVKCIITEEKVCMVCKKKIGNSAFARYPNGVVVHYFCSKEVNPADT

SEQ ID NO: 825075 - protein, 886 aa, Homo sapiens; identical to SEQ ID NO: 825066

SEQ ID NO: 825076 - protein, 886 aa, Homo sapiens; identical to SEQ ID NO: 825066

SEQ ID NO: 825077 - protein, 96 aa, Homo sapiens
SGEMCQQKRSNYPASARAPHETRQRPSAGNTQGMSGPGTDNGVLPSVPERCLGTAEGTRGARTAGRWFKNNSPPNLWSSVGHPARGAQAGVSGTAG

SEQ ID NO: 825078 - protein, 781 aa, Homo sapiens
MHDAFEPVPILEKLPLQIDCLAAWEEWLLVGTKQGHLLLYRIRKDVGCNRFEVTLEKSNKNFSKKIQQIHVVSQFKILVSLLENNIYVHDLLTFQQITTVSKAKGASLFTCDLQHTETGEEVLRMCVAVKKKLQLYFWKDREFHELQGDFSVPDVPKSMAWCENSICVGFKRDYYLIRVDGKGSIKELFPTGKQLEPLVAPLADGKVAVGQDDLTVVLNEEGICTQKCALNWTDIPVAMEHQPPYIIAVLPRYVEIRTFEPRLLVQSIELQRPRFITSGGSNIIYVASNHFVWRLIPVPMATQIQQLLQDKQFELALQLAEMKDDSDSEKQQQIHHIKNLYAFNLFCQKRFDESMQVFAKLGTDPTHVMGLYPDLLPTDYRKQLQYPNPLPVLSGAELEKAHLALIDYLTQKRSQLVKKLNDSDHQSSTSPLMEGTPTIKSKKKLLQIIDTTLLKCYLHTNVALVAPLLRLENNHCHIEESEHVLKKAHKYSELIILYEKKGLHEKALQVLVDQSKKANSPLKGHERTVQYLQHLGTENLHLIFSYSVWVLRDFPEDGLKIFTEDLPEVESLPRDRVLGFLIENFKGLAIPYLEHIIHVWEETGSRFHNCLIQLYCEKVQGLMKEYLLSFPAGKTPVPAGEEEGELGEYRQKLLMFLEISSYYDPGRLICDFPFDGLLEERALLLGRMGKHEQALFIYVHILKDTRMAEEYCHKHYDRNKDGNKDVYLSLLRMYLSPPSIHCLGPIKLELLEPKANLQAALQVLELHHSKLDTTKALNLLL

SEQ ID NO: 825079 - protein, 367 aa, Homo sapiens
MHDAFEPVPILEKLPLQIDCLAAWEEWLLVGTKQGHLLLYRIRKDVGCNRFEVTLEKSNKNFSKKIQQIHVVSQFKILVSLLENNIYVHDLLTFQQITTVSKAKGASLFTCDLQHTETGEEVLRMCVAVKKKLQLYFWKDREFHELQGDFSVPDVPKSMAWCENSICVGFKRDYYLIRVDGKGSIKELFPTGKQLEPLVAPLADGKVAVGQDDLTVVLNEEGICTQKCALNWTDIPVAMEHQPPYIIAVLPRYVEIRTFEPRLLVQSIELQRPRFITSGGSNIIYVASNHFVWRLIPVPMATQIQQLLQDKQFELALQLAEMKDDSDSEKQQQIHHIKNLYAFNLFCQKRFDESMQVFAKLGTGNKW

SEQ ID NO: 825080 - protein, 353 aa, Homo sapiens
ARSRRPAPNRPALGICGGLRRGSRAEPVSSSERQGRGACGAAMEATRRRQHLGATGGPGAQLGASFLQARHGSVSADEAARTAPFHLDLWFYFTLQNWVLDFGRPIAMLVFPLEWFPLNKPSVGDYFHMAYNVITPFLLLKLIERSPRTLPRSITYVSIIIFIMGASIHLVGDSVNHRLLFSGYQHHLSVRENPIIKNLKPETLIDSFELLYYYDEYLGHCMWYIPFFLILFMYFSGCFTASKAESLIPGPALLLVAPSGLYYWYLVTEGQIFILFIFTFFAMLALVLHQKRKRLFLDSNGLFLFSSFALTLLLVALWVAWLWNDPVLRKKYPGVIYVPEPWAFYTLHVSSRH

SEQ ID NO: 825081 - protein, 353 aa, Homo sapiens; identical to SEQ ID NO: 825080

SEQ ID NO: 825082 - protein, 290 aa, Homo sapiens
ARSRRPAPNRPALGICGGLRRGSRAEPVSSSERQGRGACGAAMEATRRRQHLGATGGPGAQLGASFLQARHGSVSADEAARTAPFHLDLWFYFTLQNWVLDFGRPIAMLVFPLEWFPLNKPSVGDYFHMAYNVITPFLLLKIDSFELLYYYDEYLGHCMWYIPFFLILFMYFSGCFTASKAESLIPGPALLLVAPSGLYYWYLVTEGQIFILFIFTFFAMLALVLHQKRKRLFLDSNGLFLFSSFALTLLLVALWVAWLWNDPVLRKKYPGVIYVPEPWAFYTLHVSSRH

SEQ ID NO: 825083 - protein, 200 aa, Homo sapiens
ARSRRPAPNRPALGICGGLRRGSRAEPVSSSERQGRGACGAAMEATRRRQHLGATGGPGAQLGASFLQARYIPFFLILFMYFSGCFTASKAESLIPGPALLLVAPSGLYYWYLVTEGQIFILFIFTFFAMLALVLHQKRKRLFLDSNGLFLFSSFALTLLLVALWVAWLWNDPVLRKKYPGVIYVPEPWAFYTLHVSSRH

SEQ ID NO: 825084 - protein, 353 aa, Homo sapiens; identical to SEQ ID NO: 825080

SEQ ID NO: 825085 - protein, 353 aa, Homo sapiens; identical to SEQ ID NO: 825080

SEQ ID NO: 825086 - protein, 290 aa, Homo sapiens; identical to SEQ ID NO: 825082

SEQ ID NO: 825087 - protein, 362 aa, Homo sapiens
ARSRRPAPNRPALGICGGLRRGSRAEPVSSSERQGRGACGAAMEATRRRQHLGATGGPGAQLGASFLQARHGSVSADEAARTAPFHLDLWFYFTLQNWVLDFGRPIAMLVFPLEWFPLNKPSVGDYFHMAYNVITPFLLLKLIERSPRTLPRSITYVSIIIFIMGASIHLVGDSVNHRLLFSGYQHHLSVRENPIIKNLKPETLVEATSCSLPIDSFELLYYYDEYLGHCMWYIPFFLILFMYFSGCFTASKAESLIPGPALLLVAPSGLYYWYLVTEGQIFILFIFTFFAMLALVLHQKRKRLFLDSNGLFLFSSFALTLLLVALWVAWLWNDPVLRKKYPGVIYVPEPWAFYTLHVSSRH

SEQ ID NO: 825088 - protein, 357 aa, Homo sapiens
  misc_feature (41)..(41): Xaa can be any naturally occurring amino acid
  misc_feature (46)..(46): Xaa can be any naturally occurring amino acid
  misc_feature (54)..(54): Xaa can be any naturally occurring amino acid
  misc_feature (78)..(78): Xaa can be any naturally occurring amino acid
  misc_feature (109)..(109): Xaa can be any naturally occurring amino acid
  misc_feature (121)..(121): Xaa can be any naturally occurring amino acid
  misc_feature (133)..(133): Xaa can be any naturally occurring amino acid
  misc_feature (148)..(151): Xaa can be any naturally occurring amino acid
  misc_feature (157)..(157): Xaa can be any naturally occurring amino acid
  misc_feature (167)..(167): Xaa can be any naturally occurring amino acid
  misc_feature (170)..(170): Xaa can be any naturally occurring amino acid
  misc_feature (173)..(173): Xaa can be any naturally occurring amino acid
ARSRRPAPNRPALGICGGLRRGSRAEPVSSSERQGRGGGGXAGGGXGGGGRGGXGGGGGGGGGGGGGGGGGGGRGGGXGGGEGAPWEGEGGGGGERGEGGGGGGGGQGXGGRGGGGGGREXAEGGGGVGEGVXGEGGGGRGEGEEGGXXXXGGGAEXGEVRGEHAGXGGXAGXGGGEGVNHRAGGSGYQHHLSVRENPIIKNLKPETLIDSFELLYYYDEYLGHCMWYIPFFLILFMYFSGCFTASKAESLIPGPALLLVAPSGLYYWYLVTEGQIFILFIFTFFAMLALVLHQKRKRLFLDSNGLFLFSSFALTLLLVALWVAWLWNDPVLRKKYPGVIYVPEPWAFYTLHVSSRH

SEQ ID NO: 825089 - protein, 353 aa, Homo sapiens; identical to SEQ ID NO: 825080

SEQ ID NO: 825090 - protein, 353 aa, Homo sapiens; identical to SEQ ID NO: 825080

SEQ ID NO: 825091 - protein, 1198 aa, Homo sapiens
MGDMTNSDFYSKNQRNESSHGGEFGCTMEELRSLMELRGTEAVVKIKETYGDTEAICRRLKTSPVEGLPGTAPDLEKRKQIFGQNFIPPKKPKTFLQLVWEALQDVTLIILEIAAIISLGLSFYHRPGEGNEGCATAQGGAEDEGEAEAGWIEGAAILLSVICVVLVTAFNDWSKEKQFRGLQSRIEQEQKFTVVRAGQVVQIPVAEIVVGDIAQVKYGDLLPADGLFIQGNDLKIDESSLTGESDQVRKSVDKDPMLLSGTHVMEGSGRMLVTAVGVNSQTGIIFTLLGAGGEEEEKKDKKAKQQDGAAAMEMQPLKSAEGGDADDRKKASMHKKEKSVLQGKLTKLAVQIGKAGLVMSAITVIILVLYFTVDTFVVNKKPWLPECTPVYVQYFVKFFIIGVTVLVVAVPEGLPLAVTISLAYSVKKMMKDNNLVRHLDACETMGNATAICSDKTGTLTTNRMTVVQAYVDDVHYKEIPDPSSINTKTMELLINAIAINSAYTTKILPPEKEGALPRQVGNKTECGLLGFVLDLKQDYEPVRSQMPEEKLYKVYTFNSVRKSMSTVIKLPDESFRMYSKGASEIVLKKCCKILNGAGEPRVFRPRDRDEMVKKVIEPMACDGLRTICVAYRDFPSSPEPDWDNENDILNELTCICVVGIEDPVRPEVPEAIRKCQRAGITVRMVTGDNINTARAIAIKCGIIHPGEDFLCLEGKEFNRRIRNEKGEIEQERIDKIWPKLRVLARSSPTDKHTLVKGIIDSTHTEQRQVVAVTGDGTNDGPALKKADVGFAMGIAGTDVAKEASDIILTDDNFSSIVKAVMWGRNVYDSISKFLQFQLTVNVVAVIVAFTGACITQDSPLKAVQMLWVNLIMDTFASLALATEPPTETLLLRKPYGRNKPLISRTMMKNILGHAVYQLALIFTLLFVGEKMFQIDSGRNAPLHSPPSEHYTIIFNTFVMMQLFNEINARKIHGERNVFDGIFRNPIFCTIVLGTFAIQIVIVQFGGKPFSCSPLQLDQWMWCIFIGLGELVWGQVIATIPTSRLKFLKEAGRLTQKEEIPEEELNEDVEEIDHAERELRRGQILWFRGLNRIQTQIRVVKAFRSSLYEGLEKPESRTSIHNFMAHPEFRIEDSQPHIPLIDDTDLEEDAALKQNSSPPSSLNKNNSAIDSGINLTTDTSKSATSSSPGSPIHSLETSL

SEQ ID NO: 825092 - protein, 182 aa, Homo sapiens
PLQIEVVNTFKSGASFQGALRRQSSVTSQSQDVANLSSPSRVSLSNALFLSDQPSSCCSRAGLENPGHRVQQERVKLKEIRVVKAFRSSLYEGLEKPESRTSIHNFMAHPEFRIEDSQPHIPLIDDTDLEEDAALKQNSSPPSSLNKNNSAIDSGINLTTDTSKSATSSSPGSPIHSLETSL

SEQ ID NO: 825093 - protein, 119 aa, Homo sapiens
MKTTKGKKAGLLISVLIRVVKAFRSSLYEGLEKPESRTSIHNFMAHPEFRIEDSQPHIPLIDDTDLEEDAALKQNSSPPSSLNKNNSAIDSGINLTTDTSKSATSSSPGSPIHSLETSL

SEQ ID NO: 825094 - protein, 1243 aa, Homo sapiens
MGDMTNSDFYSKNQRNESSHGGEFGCTMEELRSLMELRGTEAVVKIKETYGDTEAICRRLKTSPVEGLPGTAPDLEKRKQIFGQNFIPPKKPKTFLQLVWEALQDVTLIILEIAAIISLGLSFYHRPGEGNEGCATAQGGAEDEGEAEAGWIEGAAILLSVICVVLVTAFNDWSKEKQFRGLQSRIEQEQKFTVVRAGQVVQIPVAEIVVGDIAQVKYGDLLPADGLFIQGNDLKIDESSLTGESDQVRKSVDKDPMLLSGTHVMEGSGRMLVTAVGVNSQTGIIFTLLGAGGEEEEKKDKKGVKKGDGLQLPAADGAAASNAADSANASLVNGKMQDGNVDASQSKAKQQDGAAAMEMQPLKSAEGGDADDRKKASMHKKEKSVLQGKLTKLAVQIGKAGLVMSAITVIILVLYFTVDTFVVNKKPWLPECTPVYVQYFVKFFIIGVTVLVVAVPEGLPLAVTISLAYSVKKMMKDNNLVRHLDACETMGNATAICSDKTGTLTTNRMTVVQAYVDDVHYKEIPDPSSINTKTMELLINAIAINSAYTTKILPPEKEGALPRQVGNKTECGLLGFVLDLKQDYEPVRSQMPEEKLYKVYTFNSVRKSMSTVIKLPDESFRMYSKGASEIVLKKCCKILNGAGEPRVFRPRDRDEMVKKVIEPMACDGLRTICVAYRDFPSSPEPDWDNENDILNELTCICVVGIEDPVRPEVPEAIRKCQRAGITVRMVTGDNINTARAIAIKCGIIHPGEDFLCLEGKEFNRRIRNEKGEIEQERIDKIWPKLRVLARSSPTDKHTLVKGIIDSTHTEQRQVVAVTGDGTNDGPALKKADVGFAMGIAGTDVAKEASDIILTDDNFSSIVKAVMWGRNVYDSISKFLQFQLTVNVVAVIVAFTGACITQDSPLKAVQMLWVNLIMDTFASLALATEPPTETLLLRKPYGRNKPLISRTMMKNILGHAVYQLALIFTLLFVGEKMFQIDSGRNAPLHSPPSEHYTIIFNTFVMMQLFNEINARKIHGERNVFDGIFRNPIFCTIVLGTFAIQIVIVQFGGKPFSCSPLQLDQWMWCIFIGLGELVWGQVIATIPTSRLKFLKEAGRLTQKEEIPEEELNEDVEEIDHAERELRRGQILWFRGLNRIQTQIRVVKAFRSSLYEGLEKPESRTSIHNFMAHPEFRIEDSQPHIPLIDDTDLEEDAALKQNSSPPSSLNKNNSAIDSGINLTTDTSKSATSSSPGSPIHSLETSL

SEQ ID NO: 825095 - protein, 1198 aa, Homo sapiens; identical to SEQ ID NO: 825091

SEQ ID NO: 825096 - protein, 125 aa, Homo sapiens
MRIPDDGGTDPVLPRLNRIQTQIRVVKAFRSSLYEGLEKPESRTSIHNFMAHPEFRIEDSQPHIPLIDDTDLEEDAALKQNSSPPSSLNKNNSAIDSGINLTTDTSKSATSSSPGSPIHSLETSL

SEQ ID NO: 825097 - protein, 104 aa, Homo sapiens
SRDLVYRFLPPPPLPAPVLRPLLKHLAQPSALRALIFPPCSGWCHRRLCGPRSASNGCVDVPFSWSYSTPPQECLPSARTKTEETAILMDSQANYEVETKKVIT

SEQ ID NO: 825098 - protein, 483 aa, Homo sapiens
GGRGEGGGKSAALPLAAGSLAAPGGGGGSAGGARPGDSHSPVPPPPHAAWTMDARWWAVVVLAAFPSLGAGGETPEAPPESWTQLWFFRFVVNAAGYASFMVPGYLLVQYFRRKNYLETGRGLCFPLVKACVFGNEPKASDEVPLAPRTEAAETTPMWQALKLLFCATGLQVSYLTWGVLQERVMTRSYGATATSPGERFTDSQFLVLMNRVLALIVAGLSCVLCKQPRHGAPMYRYSFASLSNVLSSWCQYEALKFVSFPTQVLAKASKVIPVMLMGKLVSRRSYEHWEYLTATLISIGVSMFLLSSGPEPRSSPATTLSGLILLAGYIAFDSFTSNWQDALFAYKMSSVQMMFGVNFFSCLFTVGSLLEQGALLEGTRFMGRHSEFAAHALLLSICSACGQLFIFYTIGQFGAAVFTIIMTLRQAFAILLSCLLYGHTVTVVGGLGVAVVFAALLLRVYARGRLKQRGKKAVPVESPVQKV

SEQ ID NO: 825099 - protein, 457 aa, Homo sapiens
AEWLKGQNAGVFSVSQTSSAAGDWGAQEAAFRFALSHPSSSKQFILSPGGDSPESWTQLWFFRFVVNAAGYASFMVPGYLLVQYFRRKNYLETGRGLCFPLVKACVFGNEPKASDEVPLAPRTEAAETTPMWQALKLLFCATGLQVSYLTWGVLQERVMTRSYGATATSPGERFTDSQFLVLMNRVLALIVAGLSCVLCKQPRHGAPMYRYSFASLSNVLSSWCQYEALKFVSFPTQVLAKASKVIPVMLMGKLVSRRSYEHWEYLTATLISIGVSMFLLSSGPEPRSSPATTLSGLILLAGYIAFDSFTSNWQDALFAYKMSSVQMMFGVNFFSCLFTVGSLLEQGALLEGTRFMGRHSEFAAHALLLSICSACGQLFIFYTIGQFGAAVFTIIMTLRQAFAILLSCLLYGHTVTVVGGLGVAVVFAALLLRVYARGRLKQRGKKAVPVESPVQKV

SEQ ID NO: 825100 - protein, 418 aa, Homo sapiens
GAAGREAGRARHFRWPLARWPLLEAAAGAQGARGPGTRIPRFPLHPTRPGPWTPGRGLCFPLVKACVFGNEPKASDEVPLAPRTEAAETTPMWQALKLLFCATGLQVSYLTWGVLQERVMTRSYGATATSPGERFTDSQFLVLMNRVLALIVAGLSCVLCKQPRHGAPMYRYSFASLSNVLSSWCQYEALKFVSFPTQVLAKASKVIPVMLMGKLVSRRSYEHWEYLTATLISIGVSMFLLSSGPEPRSSPATTLSGLILLAGYIAFDSFTSNWQDALFAYKMSSVQMMFGVNFFSCLFTVGSLLEQGALLEGTRFMGRHSEFAAHALLLSICSACGQLFIFYTIGQFGAAVFTIIMTLRQAFAILLSCLLYGHTVTVVGGLGVAVVFAALLLRVYARGRLKQRGKKAVPVESPVQKV

SEQ ID NO: 825101 - protein, 483 aa, Homo sapiens; identical to SEQ ID NO: 825098

SEQ ID NO: 825102 - protein, 357 aa, Homo sapiens
GGRGEGGGKSAALPLAAGSLAAPGGGGGSAGGARPGDSHSPVPPPPHAAWTMDARWWAVVVLAAFPSLGAGGETPEAPPESWTQLWFFRFVVNAAGYASFMVPGYLLVQYFRRKNYLETGRGLCFPLVKACVFGNEPKASDEVPLAPRTEAAETTPMWQALKLLFCATGLQVSYLTWGVLQERVMTRSYGATATSPGERFTDSQFLVLMNRVLALIVAGLSCVLCKQPRHGAPMYRYSFASLSNVLSSWCQYEALKFVSFPTQVLAKASKVIPVMLMGKLVSRRSYEHWEYLTATLISIGVSMFLLSSGPEPRSSPATTLSGLILLAGYIAFDSFTSNWQDALFAYKMSKACGNDPN

SEQ ID NO: 825103 - protein, 483 aa, Homo sapiens; identical to SEQ ID NO: 825098

SEQ ID NO: 825104 - protein, 339 aa, Homo sapiens
MLLAMPALWYLATSWCSTSGGRTTWRPVSYLTWGVLQERVMTRSYGATATSPGERFTDSQFLVLMNRVLALIVAGLSCVLCKQPRHGAPMYRYSFASLSNVLSSWCQYEALKFVSFPTQVLAKASKVIPVMLMGKLVSRRSYEHWEYLTATLISIGVSMFLLSSGPEPRSSPATTLSGLILLAGYIAFDSFTSNWQDALFAYKMSSVQMMFGVNFFSCLFTVGSLLEQGALLEGTRFMGRHSEFAAHALLLSICSACGQLFIFYTIGQFGAAVFTIIMTLRQAFAILLSCLLYGHTVTVVGGLGVAVVFAALLLRVYARGRLKQRGKKAVPVESPVQKV

SEQ ID NO: 825105 - protein, 484 aa, Homo sapiens
GGRGEGGGKSAALPLAAGSLAAPGGGGGSAGGARPGDSHSPVPPPPHAAWTMDARWWAVVVLAAFPSLGAGGETPEAPPESWTQLWFFRFVVNAAGYASFMVPGYLLVQYFRRKNYLETGRGLCFPLVKACVFGNEPKASDEVPLAPRTEAAETTPMWQALKLLFCATGLQVSYLTWGVLQERVMTRSYGATATSPGERFTDSQFLVLMNRVLALIVAGLSCVLCKQPRHGAPMYRYSFASLSNVLSSWCQYEALKFVSFPTQVLAKASKVIPVMLMGKLVSRRSYEHWEYLTATLISIGVSMFLLSSGPEPRSSPATTLSGLILLAGYIAFDSFTSNWQDALFAYKMSSVQMMFGVNFFSCLFTVGSLLEQGALLEGTRFMGRHSEFAAHALLLSICSACGQLFIFYTIGQFGAAVFTIIMTLRQAFAILLSCLLYGHTVTVVGGLGVAVVFAALLLRVYARGRLKQRGKKAVPVESPVQKGD

SEQ ID NO: 825106 - protein, 441 aa, Homo sapiens
  misc_feature (420)..(420): Xaa can be any naturally occurring amino acid
  misc_feature (438)..(438): Xaa can be any naturally occurring amino acid
GGRGEGGGKSAALPLAAGSLAAPGGGGGSAGGARPGDSHSPVPPPPHAAWTMDARWWAVVVLAAFPSLGAGGETPEAPPESWTQLWFFRFVVNAAGYASFMVPGYLLVQYFRRKNYLETGRGLCFPLVKACVFGNEPKASDEVPLAPRTEAAETTPMWQALKLLFCATGLQVSYLTWGVLQERVMTRSYGATATSPGERFTDSQFLVLMNRVLALIVAGLSCVLCKQPRHGAPMYRYSFASLSNVLSSWCQYEALKFVSFPTQVLAKASKVIPVMLMGKLVSRRSYEHWEYLTATLISIGVSMFLLSSGPEPRSSPATTLSGLILLAGYIAFDSFTSNWQDALFAYKMSSVQMMFGVNFFSCLFTVGSLLEQGALLEGTRFMGRHSEFAAHALLLSICSACGQLFIFYTIGQFGAAVFTXLHHPVQRGDCGWTWPHLXRLV

SEQ ID NO: 825107 - protein, 174 aa, Homo sapiens
PPGHVTAAPQHGGRVGSRLLGRRPAYRCPEPAGMGAAAWFCAPWGASGGGAGDPDVPDRGGECGGRGASSDLSSRLALEGTEETCVARGADPPPGREEALPGQRRRTPSPRERERERLFVRAGAAAEGAGRRLRALLQCGPLWRAEGMRSCALILMSAFLTDGGQWWCWLRSPP

SEQ ID NO: 825108 - protein, 251 aa, Homo sapiens
MRHDKIVIVLKNRIYVYSFPDNPRKLFEFDTRDNPKGLCDLCPSLEKQLLVFPGHKCGSLQLVDLASTKPGTSSAPFTINAHQSDIACVSLNQPGTVVASASQKGTLIRLFDTQSKEKLVELRRGTDPATLYCINFSHDSSFLCASSDKGTVHIFALKDTRLNRRSALARVGKVGPMIGQYVDSQWSLASFTVPAESACICAFGRNTSKNVNSVIAICVDGTFHKYVFTPDGNCNREAFDVYLDICDDDDF

SEQ ID NO: 825109 - protein, 218 aa, Homo sapiens
MRHDKIVIVLKNRIYVYSFPDNPRKLFEFDTRDNPKGLCDLCPSLEKQLLVFPGHKCGSLQLVDLASTKPGTSSAPFTINAHQSDIACVSLNQPGTVVASASQKGTLIRLFDTQSKEKLVELRRGTDPATLYCINFSHDSSFLCASSDKGTVHIFALKDTRLNRRSALARVGKVGPMIGQYVDSQWSLASFTVPAESACICAFGRNTSKNVNSVIVQS

SEQ ID NO: 825110 - protein, 293 aa, Homo sapiens
MTQQPLRGVTSLRFNQDQSCFCCAMETGVRIYNVEPLMEKGHLDHEQVGSMGLVEMLHRSNLLALVGGGSSPKFSEISGLCDLCPSLEKQLLVFPGHKCGSLQLVDLASTKPGTSSAPFTINAHQSDIACVSLNQPGTVVASASQKGTLIRLFDTQSKEKLVELRRGTDPATLYCINFSHDSSFLCASSDKGTVHIFALKDTRLNRRSALARVGKVGPMIGQYVDSQWSLASFTVPAESACICAFGRNTSKNVNSVIAICVDGTFHKYVFTPDGNCNREAFDVYLDICDDDDF

SEQ ID NO: 825111 - protein, 251 aa, Homo sapiens; identical to SEQ ID NO: 825108

SEQ ID NO: 825112 - protein, 251 aa, Homo sapiens; identical to SEQ ID NO: 825108

SEQ ID NO: 825113 - protein, 251 aa, Homo sapiens; identical to SEQ ID NO: 825108

SEQ ID NO: 825114 - protein, 251 aa, Homo sapiens; identical to SEQ ID NO: 825108

SEQ ID NO: 825115 - protein, 279 aa, Homo sapiens
MRHDKIVIVLKNRIYVYSFPDNPRKLFEFDTRDNPKGLCDLCPSLEKQLLVFPGHKCGSLQLVDLASTKPGTSSAPFTINAHQSDIACVSLNQPGTVVASASQKGTLIRLFDTQSKEKLVELRRGTDPATLYCINFSHDSSFLCASSDKGTVHIFALKDTRLNRRSAREYPLPTLPCPCPPAHLPYLGLASAACRLARVGKVGPMIGQYVDSQWSLASFTVPAESACICAFGRNTSKNVNSVIVVSGNSPLVGGTAWGKGLQVGPERILGPCEAQLHHQ

SEQ ID NO: 825116 - protein, 251 aa, Homo sapiens; identical to SEQ ID NO: 825108

SEQ ID NO: 825117 - protein, 251 aa, Homo sapiens
MRHDKIVIVLKNRIYVYSFPDNPRKLFEFDTRDNPKGLCDLCPSLEKQLLVFPGHKCGSLQLVDLASTKPGTSSAPFTINAHQSDIACVSLNQPGTVVASASQKGTLIRLFDTQSKEKLVELRRGTDPATLYCINFSHDSSFLCASSDKGTVHIFALKDTRLNRRSALARVGKVGPMIGQYVDSQWSLASFTVPAESACICAFGRNTSKNVNSVIVVSGNSPLVGGTAWGKGLQVGPERILGPCEAQLHHQ

SEQ ID NO: 825118 - protein, 221 aa, Homo sapiens
MRHDKIVIVLKNRIYVYSFPDNPRKLFEFDTRDNPKGLCDLCPSLEKQLLVFPGHKCGSLQLVPGTVVASASQKGTLIRLFDTQSKEKLVELRRGTDPATLYCINFSHDSSFLCASSDKGTVHIFALKDTRLNRRSALARVGKVGPMIGQYVDSQWSLASFTVPAESACICAFGRNTSKNVNSVIAICVDGTFHKYVFTPDGNCNREAFDVYLDICDDDDF

SEQ ID NO: 825119 - protein, 172 aa, Homo sapiens [sequence omitted]

SEQ ID NO: 825120 - protein, 172 aa, Homo sapiens [sequence omitted]

SEQ ID NO: 825121 - protein, 144 aa, Homo sapiens
IFALKDMDSTLITGSAEEGGVVAEVNAVEGGRVSCLCASSDKGTVHIFALKDTRLNRRSALARVGKVGPMIGQYVDSQWSLASFTVPAESACICAFGRNTSKNVNSVIAICVDGTFHKYVFTPDGNCNREAFDVYLDICDDDDF

SEQ ID NO: 825122 - protein, 43 aa, Homo sapiens
MRLVLGEGRGIPDRVLEWRCKKGVLKVGAVQRITLRQSCPKKE

SEQ ID NO: 825123 - protein, 251 aa, Homo sapiens; identical to SEQ ID NO: 825108

SEQ ID NO: 825124 - protein, 223 aa, Homo sapiens
  misc_feature (204)..(205): Xaa can be any naturally occurring amino acid
  misc_feature (207)..(207): Xaa can be any naturally occurring amino acid
  misc_feature (209)..(209): Xaa can be any naturally occurring amino acid
  misc_feature (214)..(214): Xaa can be any naturally occurring amino acid
  misc_feature (218)..(218): Xaa can be any naturally occurring amino acid
MRHDKIVIVLKNRIYVYSFPDNPRKLFEFDTRDNPKGLCDLCPSLEKQLLVFPGHKCGSLQLVDLASTKPGTSSAPFTINAHQSDIACVSLNQPGTVVASASQKGTLIRLFDTQSKEKLVELRRGTDPATLYCINFSHDSSFLCASSDKGTVHIFALKDTRLNRRSALARVGKVGPMIGQYVDSQWSLASFTVPAESACISLRXXSXRXSVLHXVMDXTIFSL

SEQ ID NO: 825125 - protein, 251 aa, Homo sapiens; identical to SEQ ID NO: 825108

SEQ ID NO: 825126 - protein, 251 aa, Homo sapiens; identical to SEQ ID NO: 825108

SEQ ID NO: 825127 - protein, 251 aa, Homo sapiens; identical to SEQ ID NO: 825108

SEQ ID NO: 825128 - protein, 218 aa, Homo sapiens; identical to SEQ ID NO: 825109

SEQ ID NO: 825129 - protein, 262 aa, Homo sapiens
MRHDKIVIVLKNRIYVYSFPDNPRKLFEFDTRDNPKAAHPTPHLHTLGLCDLCPSLEKQLLVFPGHKCGSLQLVDLASTKPGTSSAPFTINAHQSDIACVSLNQPGTVVASASQKGTLIRLFDTQSKEKLVELRRGTDPATLYCINFSHDSSFLCASSDKGTVHIFALKDTRLNRRSALARVGKVGPMIGQYVDSQWSLASFTVPAESACICAFGRNTSKNVNSVIAICVDGTFHKYVFTPDGNCNREAFDVYLDICDDDDF

SEQ ID NO: 825130 - protein, 218 aa, Homo sapiens; identical to SEQ ID NO: 825109

SEQ ID NO: 825131 - protein, 279 aa, Homo sapiens
MRHDKIVIVLKNRIYVYSFPDNPRKLFEFDTRDNPKGLCDLCPSLEKQLLVFPGHKCGSLQLVDLASTKPGTSSAPFTINAHQSDIACVSLNQPGTVVASASQKGTLIRLFDTQSKEKLVELRRGTDPATLYCINFSHDSSFLCASSDKGTVHIFALKDTRLNRRSAREYPLPTLPCPCPPAHLPYLGLASAACRLARVGKVGPMIGQYVDSQWSLASFTVPAESACICAFGRNTSKNVNSVIAICVDGTFHKYVFTPDGNCNREAFDVYLDICDDDDF

SEQ ID NO: 825132 - protein, 172 aa, Homo sapiens [sequence omitted]

SEQ ID NO: 825133 - protein, 172 aa, Homo sapiens [sequence omitted]

SEQ ID NO: 825134 - protein, 211 aa, Homo sapiens
MANAGLQLLGFILAFLGWIGAIVSTALPQWRIYSYAGDNIVTAQAMYEGLWMSCVSQSTGQIQCKVFDSLLNLSSTLQATRALMVVGILLGVIAIFVATVGMKCMKCLEDDEVQKMRMAVIGGAIFLLAGLAILVATAWYGNRIVQEFYDPMTPVNARYEFGQALFTGWAAASLCLLGGALLCCSCPRKTTSYPTPRPYPKPAPSSGKDYV

SEQ ID NO: 825135 - protein, 128 aa, Homo sapiens [sequence omitted]

SEQ ID NO: 825136 - protein, 211 aa, Homo sapiens; identical to SEQ ID NO: 825134

SEQ ID NO: 825137 - protein, 211 aa, Homo sapiens; identical to SEQ ID NO: 825134

SEQ ID NO: 825138 - protein, 211 aa, Homo sapiens; identical to SEQ ID NO: 825134

SEQ ID NO: 825139 - protein, 123 aa, Homo sapiens
MANAGLQLLGFILAFLGWIGAIVSTALPQWRIYSYAGDNIVTAQAMYEGLWMSCVSQSTGQIQCKVFDSLLNLSSTLQATRALMVVGILLGVIAIFVATVGMKCMKCLEDDEVQKMRMAVWLF

SEQ ID NO: 825140 - protein, 211 aa, Homo sapiens; identical to SEQ ID NO: 825134

SEQ ID NO: 825141 - protein, 817 aa, Homo sapiens
RRESAGKAARQADRGVSPKPICRRLKGPEEIARLLSWGFFTLIFVRLAGLKNLAEALGLGSPQEDEPSLAEAGAAPESLCEMKTEAQPSTSLLANTSWTGTVISDSVPGSQTWEDKGSLTRSATSWTSEAQVSAARVAEAQARTSQPKQISVLEALTASALNQKPTHEKVQMTEKKESEVLLARPFWSSKTEYILAQVGFSMKPSCLWRFAYLWLNSGGCSFAAIYIFMLFLVGVPLLFLEMAAGQSMRQGGMGVWKIIAPWIGGVGYSSFMVCFILGLYFNVVNSWIIFYMSQSFQFPVPWEKCPLTMNSSGFDPECERTTPSIYFWYQQALKASDRIEDGGSPVYSLVLPFFLCWCLVGAFMINGLKSTGKVIYVLVLLPCFIIVGFFIRTLLLEGAKFGLQQLVVAKISDVYNMSVWSLAGGQVLSNTGIGLGSVASLASYMPQSNNCLSDAFLVSVINLLTLLVFTSFNFCVLGFWATVITHRCCERNAEILLKLINLGKLPPDAKPPVNLLYNPTSIYNAWLSGLPQHIKSMVLREVTECNIETQFLKASEGPKFAFLSFVEAMSFLPPSVFWSFIFFLMLLAMGLSSAIGIMQGIITPLQDTFSFFRKHTKLLIVGVFLLMFVCGLFFTRPSGSYFIRLLSDYWIVFPIIVVVVFETMAVSWAYGARRFLADLTILLGHPISPIFGWLWPHLCPVVLLIIFVTMMVHLCMKPITYMSWDSSTSKEVLRPYPPWALLLMITLFAIVILPIPAYFVYCRIHRIPFRPKSGDGPMTASTSLPLSHQLTPSKEVQKEEILQVDETKYPSTCNVTS

SEQ ID NO: 825142 - protein, 309 aa, Homo sapiens
RRESAGKAARQADRGVSPKPICRRLKGPEEIARLLSWGFFTLIFVRLAGLKNLAEALGLGNAEILLKLINLGKLPPDAKPPVNLLYNPTSIYNAWLSGLPQHIKSMVLREVTECNIETQFLKASEGPKFAFLSFVEAMSFLPPSVFWSFIFFLMLLAMGLSSAIGIMQGIITPLQDTFSFFRKHTKLLIVGVFLLMFVCGLFFTRPSGSYFIRLLSDYWIVFPIIVVVVFETMAVSWAYGARRFLADLTILLGHPISPIFGWLWPHLCPVVLLIIFVTMMVHLCMKPITYMSWDSSTVSLPQDPEPLWE

SEQ ID NO: 825143 - protein, 252 aa, Homo sapiens
RRESAGKAARQADRGVSPKPICRRLKGPEEIARLLSWGFFTLIFVRLAGLKNLAEALGLGSPQEDEPSLAEAGAAPESLCEMKTEAQPSTSLLANTSWTGTVISDSVPGSQTWEDKGSLTRSATSWTSEAQVSAARVAEAQARTSQPKQISVLEALTASALNQKPTHEKVQMTEKKESEVLLARPFWSSKTEYILAQVGFSMKPSCLWRFAYLWLNSGGCKSGDQETWVHKGQSGQSPVQALTMNVSEICRD

SEQ ID NO: 825144 - protein, 740 aa, Homo sapiens
RRESAGKAARQADRGVSPKPICRRLKGPEEIARLLSWGFFTLIFVRLAGLKNLAEALGLGSPQEDEPSLAEAGAAPESLCEMKTEAQPSTSLLANTSWTGTVISDSVPGSQTWEDKGSLTRSATSWTSEAQVSAARVAEAQARTSQPKQISVLEALTASALNQKPTHEKVQMTEKKESEVLLARPFWSSKTEYILAQVGFSMKPSCLWRFAYLWLNSGGCSFAAIYIFMLFLVGVPLLFLEMAAGQSMRQGGMGVWKIIAPWIGGVGYSSFMVCFILGLYFNVVNSWIIFYMSQSFQFPVPWEKCPLTMNSSGFDPECERTTPSIYFWYQQALKASDRIEDGGSPVYSLVLPFFLCWCLVGAFMINGLKSTGKVIYVLVLLPCFIIVGFFIRTLLLEGAKFGLQQLVVAKISDVYNMSVWSLAGGQVLSNTGIGLGSVASLASYMPQSNNCLSDAFLVSVINLLTLLVFTSFNFCVLGFWATVITHRCCERNAEILLKLINLGKLPPDAKPPVNLLYNPTSIYNAWLSGLPQHIKSMVLREVTECNIETQFLKASEGPKFAFLSFVEAMSFLPPSVFWSFIFFLMLLAMGLSSAIGIMQGIITPLQDTFSFFRKHTKLLIVGVFLLMFVCGLFFTRPSGSYFIRLLSDYWIVFPIIVVVVFETMAVSWAYGARRFLADLTILLGHPISPIFGWLWPHLCPVVLLIIFVTMMVHLCMKPITYMSWDSSTVSLPQDPEPLWE

SEQ ID NO: 825145 - protein, 388 aa, Homo sapiens
RRESAGKAARQADRGVSPKPICRRLKGPEEIARLLSWGFFTLIFVRLAGLKNLAEALGLGSPQEDEPSLAEAGAAPESLCEMKTEAQPSTSLLANTSWTGTVISDSVPGSQTWEDKGSLTRSATSWTSEAQVSAARVAEAQARTSQPKQISVLEALTASALNQKPTHEKVQMTEKKESEVLLARPFWSSKTEYILAQVGFSMKPSCLWRFAYLWLNSGGCSFAAIYIFMLFLVGVPLLFLEMAAGQSMRQGGMGVWKIIAPWIGGVGYSSFMVCFILGLYFNVVNSWIIFYMSQSFQFPVPWEKCPLTMNSSGFDPECERTTPSIYFWYQQALKASDRIEDGGSPVYSLVLPFFLCWCLVGAFMINGLKSTGKQRQGFTVLARTVSIF

SEQ ID NO: 825146 - protein, 179 aa, Homo sapiens
MQRQNFRPPTPPYPGPGGGGWGSGSSFRGTPGGGGPRPPSPRDGYGSPHHTPPYGPRSRPYGSSHSPRHGGSFPGGRFGSPSPGGYPGSYSRSPAGSQQQFGYSPGQQQTHPQGSPRTSTPFGSGRVREKRMSNELENYFKPSMLEDPWAGLEPVSVVDISQQYSNTQTFTGKKGRYFC

SEQ ID NO: 825147 - protein, 179 aa, Homo sapiens; identical to SEQ ID NO: 825146

SEQ ID NO: 825148 - protein, 227 aa, Homo sapiens
MDNARMNSFLEYPILSSGDSGTCSARAYPSDHRITTFQSCAVSANSCGGDDRFLVGRGVQIGSPHHHHHHHHHHPQPATYQTSGNLGVSYSHSSCGPSYGSQNFSAPYSPYALNQEADVSGGYPQCAPAVYSGNLSSPMVQHHHHHQGYAGGAVGSPQYIHHSYGQEHQSLALATYNNSLSPLHASHQEACRSPASETSSPAQTFDWMKVKRNPPKTGQSCWLVDAP

SEQ ID NO: 825149 - protein, 128 aa, Homo sapiens [sequence omitted]

SEQ ID NO: 825150 - protein, 335 aa, Homo sapiens
MDNARMNSFLEYPILSSGDSGTCSARAYPSDHRITTFQSCAVSANSCGGDDRFLVGRGVQIGSPHHHHHHHHHHPQPATYQTSGNLGVSYSHSSCGPSYGSQNFSAPYSPYALNQEADVSGGYPQCAPAVYSGNLSSPMVQHHHHHQGYAGGAVGSPQYIHHSYGQEHQSLALATYNNSLSPLHASHQEACRSPASETSSPAQTFDWMKVKRNPPKTGKVGEYGYLGQPNAVRTNFTTKQLTELEKEFHFNKYLTRARRVEIAASLQLNETQVKIWFQNRRMKQKKREKEGLLPISPATPPGNDEKAEESSEKSSSSPCVPSPGSSTSDTLTTSH

SEQ ID NO: 825151 - protein, 103 aa, Homo sapiens
MCTLDFYEGQGRLDGALCSYTEKDKQAYLEAAYAAGVRNIEMESSVFAAMCSACGLQAAVVCVTLLNRLEGDQISSPRNVLSEYQQRPQRLVSYFIKKKLSKA

SEQ ID NO: 825152 - protein, 103 aa, Homo sapiens; identical to SEQ ID NO: 825151

SEQ ID NO: 825153 - protein, 103 aa, Homo sapiens; identical to SEQ ID NO: 825151

SEQ ID NO: 825154 - protein, 173 aa, Homo sapiens
MQRKLKVTSLEPGTVVITEQAVDTCFKAEFEQIVLGKRVIRKTDLNKKLVQELLLCSAELSEFTTVVGNTMCTLDFYEGQGRLDGALCSYTEKDKQAYLEAAYAAGVRNIEMESSVFAAMCSACGLQAAVVCVTLLNRLEGDQISSPRNVLSEYQQRPQRLVSYFIKKKLSKA

SEQ ID NO: 825155 - protein, 103 aa, Homo sapiens; identical to SEQ ID NO: 825151

SEQ ID NO: 825156 - protein, 173 aa, Homo sapiens; identical to SEQ ID NO: 825154

SEQ ID NO: 825157 - protein, 235 aa, Homo sapiens
MAATGANAEKAESHNDCPVRLLNPNIAKMKEDILYHFNLTTSRHNFPALFGDVKFVCVGGSPSRMKAFIRCLEPGTVVITEQAVDTCFKAEFEQIVLGKRVIRKTDLNKKLVQELLLCSAELSEFTTVVGNTMCTLDFYEGQGRLDGALCSYTEKDKQAYLEAAYAAGVRNIEMESSVFAAMCSACGLQAAVVCVTLLNRLEGDQISSPRNVLSEYQQRPQRLVSYFIKKKLSKA

SEQ ID NO: 825158 - protein, 103 aa, Homo sapiens; identical to SEQ ID NO: 825151

SEQ ID NO: 825159 - protein, 103 aa, Homo sapiens; identical to SEQ ID NO: 825151

SEQ ID NO: 825160 - protein, 103 aa, Homo sapiens; identical to SEQ ID NO: 825151

SEQ ID NO: 825161 - protein, 183 aa, Homo sapiens
MAATGANAEKAESHNDCPVRLLNPNIAKMKEDILYHFNLTTSRHNFPALFGDVKLCVCWWRDRQDERKYKVRKEQTGERSERRNKREQLRREENSKSKEIKTDPEEDTKATEQSINRQHKTEDKRQYRRRTHTGSYTPTTIKRNRTNRPRQRQETETREQNKPQRRRRSTDTKEQKAETTDKN

SEQ ID NO: 825162 - protein, 103 aa, Homo sapiens; identical to SEQ ID NO: 825151

SEQ ID NO: 825163 - protein, 103 aa, Homo sapiens; identical to SEQ ID NO: 825151

SEQ ID NO: 825164 - protein, 103 aa, Homo sapiens; identical to SEQ ID NO: 825151

SEQ ID NO: 825165 - protein, 173 aa, Homo sapiens; identical to SEQ ID NO: 825154

SEQ ID NO: 825166 - protein, 173 aa, Homo sapiens; identical to SEQ ID NO: 825154

SEQ ID NO: 825167 - protein, 181 aa, Homo sapiens
MAATGANAEKAESHNDCPVRLLNPNIAKMKEDILYHFNLTTSRHNFPALFGDVKFVCVGGSPSRMKAFIRCVGAELGLDCPGRDYPNICAGTDRYAMYKVGPVLSVSHGMGIPSISIMLHELIKLLYYARCSNVTIIRIGTSGGIGPGARPGVLNRAGVVPAQASLEAIARGPAPGRAYRS

SEQ ID NO: 825168 - protein, 171 aa, Homo sapiens
MKAFIRCLEPGTVVITEQAVDTCFKAEFEQIVLGKRVIRKTDLNKKLVQELLLCSAELSEFTTVVGNTMCTLDFYEGQGRLDGALCSYTEKDKQAYLEAAYAAGVRNIEMESSVFAAMCSACGLQAAVVCVTLLNRLEGDQISSPRNVLSEYQQRPQRLVSYFIKKKLSKA

SEQ ID NO: 825169 - protein, 246 aa, Homo sapiens
MAFLRSMWGVLSALGRSGAELCTGCGSRLRSPFSFVYLPRWFSSVLASCPKKPVSSYLRFSKEQLPIFKAQNPDAKTTELIRRIAQRWRELPDSKKKIYQDAYRAEWQVYKEEISRFKEQLTPSQIMSLEKEIMDKHLKRKAMTKKKELTLLGKPKRPRSAYNVYVAERFQEAKGDSPQEKLKTVKENWKNLSDSEKELYIQHAKEDETRYHNEMKSWEEQMIEVGRKDLLRRTIKKQRKYGAEEC

SEQ ID NO: 825170 - protein, 246 aa, Homo sapiens; identical to SEQ ID NO: 825169

SEQ ID NO: 825171 - protein, 127 aa, Homo sapiens [sequence omitted]

SEQ ID NO: 825172 - protein, 246 aa, Homo sapiens; identical to SEQ ID NO: 825169

SEQ ID NO: 825173 - protein, 246 aa, Homo sapiens; identical to SEQ ID NO: 825169

SEQ ID NO: 825174 - protein, 214 aa, Homo sapiens
MAFLRSMWGVLSALGRSGAELCTGCGSRLRSPFSFVYLPRWFSSVLASCPKKPVSSYLRFSKEQLPIFKAQNPDAKTTELIRRIAQRWRELPDSKKKIYQDAYRAEWQVYKEEISRFKEQLTPSQIMSLEKEIMDKHLKRKAMTKKKEKLKTVKENWKNLSDSEKELYIQHAKEDETRYHNEMKSWEEQMIEVGRKDLLRRTIKKQRKYGAEEC

SEQ ID NO: 825175 - protein, 120 aa, Homo sapiens [sequence omitted]

SEQ ID NO: 825176 - protein, 237 aa, Homo sapiens
MAFLRSMWGVLSALGRSGAELCTGCGSRLRSPFSFVYLPRWFSSVLASCPKKPVSSYLRFSKEQLPIFKAQNPDAKTTELIRRIAQRWRELPDSKKKIYQDAYRAEWQVYKEEISRFKEQLTPSQIMSLEKEIMDKHLKRKAMTKKKELTLLGKPKRPRSAYNVYVAERFQEAKGDSPQEKLKTVKENWKNLSDSEKEVSITVVSLKCLLRISVRECIRARLDSCEDNLVLLIIQVF

SEQ ID NO: 825177 - protein, 146 aa, Homo sapiens
GGASASLAPGSARAGLLSAAAHRRPVVRGAGTRRRRRRWRLCVAGAEARRPVPVAGERAGGGAMWFMYLLSWLSLFIQVAFITLAVGETARPRPARAPAPASVLVGGRIAGVSEPLGGPLPGAPGLRRPNPFPPDPAPPVEPGSPA

SEQ ID NO: 825178 - protein, 259 aa, Homo sapiens
GGASASLAPGSARAGLLSAAAHRRPVVRGAGTRRRRRRWRLCVAGAEARRPVPVAGERAGGGAMWFMYLLSWLSLFIQVAFITLAVAAGLYYLAELIEEYTVATSRIIKYMIWFSTAVLIGLYVFERFPTSMIGVGLFTNLVYFGLLQTFPFIMLTSPNFILSCGLVVVNHYLAFQFFAEEYYPFSEVLAYFTFCLWIIPFAFFVSLSAGENVLPSTMQPGDDVVSNYFTKGKRGKRLGILVVFSFIKEAILPSRQKIY

SEQ ID NO: 825179 - protein, 114 aa, Homo sapiens
GGASASLAPGSARAGLLSAAAHRRPVVRGAGTRRRRRRWRLCVAGAEARRPVPVAGERAGGGAMWFMYLLSWLSLFIQVAFITLAVAAGLYYLAELIEEYTVATSRIIKYMIWD

SEQ ID NO: 825180 - protein, 259 aa, Homo sapiens; identical to SEQ ID NO: 825178

SEQ ID NO: 825181 - protein, 259 aa, Homo sapiens; identical to SEQ ID NO: 825178

SEQ ID NO: 825182 - protein, 259 aa, Homo sapiens; identical to SEQ ID NO: 825178

SEQ ID NO: 825183 - protein, 259 aa, Homo sapiens; identical to SEQ ID NO: 825178

SEQ ID NO: 825184 - protein, 259 aa, Homo sapiens; identical to SEQ ID NO: 825178

SEQ ID NO: 825185 - protein, 96 aa, Homo sapiens
YLTEVGEGYEFFVSFCVRAQTAANRVVIAPKHSVRVWISGLFSARGWKRMSKKIPATTIVLKRIALIRLSLTPYTALPGMLEAAVHAPGNSDVTRT

SEQ ID NO: 825186 - protein, 259 aa, Homo sapiens; identical to SEQ ID NO: 825178

SEQ ID NO: 825187 - protein, 69 aa, Homo sapiens
PPPRLRTANRCGSHSSRACRAELFPNAYRRLCASGPSCSLLSPPLTLLLWLVPIRPQLRCHLFREVHRG

SEQ ID NO: 825188 - protein, 149 aa, Homo sapiens
MIWFSTAVLIGLYVFERFPTSMIGVGLFTNLVYFGLLQTFPFIMLTSPNFILSCGLVVVNHYLAFQFFAEEYYPFSEVLAYFTFCLWIIPFAFFVSLSAGENVLPSTMQPGDDVVSNYFTKGKRGKRLGILVVFSFIKEAILPSRQKIY

SEQ ID NO: 825189 - protein, 259 aa, Homo sapiens; identical to SEQ ID NO: 825178

SEQ ID NO: 825190 - protein, 259 aa, Homo sapiens; identical to SEQ ID NO: 825178

SEQ ID NO: 825191 - protein, 259 aa, Homo sapiens; identical to SEQ ID NO: 825178

SEQ ID NO: 825192 - protein, 259 aa, Homo sapiens; identical to SEQ ID NO: 825178

SEQ ID NO: 825193 - protein, 259 aa, Homo sapiens; identical to SEQ ID NO: 825178

SEQ ID NO: 825194 - protein, 259 aa, Homo sapiens; identical to SEQ ID NO: 825178

SEQ ID NO: 825195 - protein, 103 aa, Homo sapiens
MGQQSSVRRLKRSVPCESNEANEANEANKTMPETPTGDSDPQPAPKKMKTSESSTILVVRYRRNVKRTSPEELLNDHARENRINPDQMEEEEFIEITTERPKK

SEQ ID NO: 825196 - protein, 245 aa, Homo sapiens
RPGRGRAGPPLAAAARRGRRLHVGRLVDDRCVVEPAAGDLDNPPKKFRDCLFKVCPMNRYSAQKQYWKAKQTKQDKEKIADVVLLQKLQHAAQMEQKQNDTENKKVHGDVVKYGSVIQLLHMKSNKYLTVNKRLPALLEKNAMRVTLDATGNEGSWLFIQPFWKLRSNGDNVVVGDKVILNPVNAGQPLHASNYELSDNAGCKEVNSVNCNTSWKINLFMQFRDHLEEVLKGVRTGNPCPAQLAT

SEQ ID NO: 825197 - protein, 2671 aa, Homo sapiens
MSEMSSFLHIGDIVSLYAEGSVNGFISTLGLVDDRCVVEPAAGDLDNPPKKFRDCLFKVCPMNRYSAQKQYWKAKQTKQDKEKIADVVLLQKLQHAAQMEQKQNDTENKKVHGDVVKYGSVIQLLHMKSNKYLTVNKRLPALLEKNAMRVTLDATGNEGSWLFIQPFWKLRSNGDNVVVGDKVILNPVNAGQPLHASNYELSDNAGCKEVNSVNCNTSWKINLFMQFRDHLEEVLKGGDVVRLFHAEQEKFLTCDEYKGKLQVFLRTTLRQSATSATSSNALWEVEVVHHDPCRGGAGHWNGLYRFKHLATGNYLAAEENPSYKGDASDPKAAGMGAQGRTGRRNAGEKIKYCLVAVPHGNDIASLFELDPTTLQKTDSFVPRNSYVRLRHLCTNTWIQSTNVPIDIEEERPIRLMLGTCPTKEDKEAFAIVSVPVSEIRDLDFANDASSMLASAVEKLNEGFISQNDRRFVIQLLEDLVFFVSDVPNNGQNVLDIMVTKPNRERQKLMREQNILKQVFGILKAPFREKGGEGPLVRLEELSDQKNAPYQHMFRLCYRVLRHSQEDYRKNQEHIAKQFGMMQSQIGYDILAEDTITALLHNNRKLLEKHITKTEVETFVSLVRKNREPRFLDYLSDLCVSNHIAIPVTQELICKCVLDPKNSDILIRTELRPVKEMAQSHEYLSIEYSEEEVWLTWTDKNNEHHEKSVRQLAQEARAGNAHDENVLSYYRYQLKLFARMCLDRQYLAIDEISQQLGVDLIFLCMADEMLPFDLRASFCHLMLHVHVDRDPQELVTPVKFARLWTEIPTAITIKDYDSNLNASRDDKKNKFANTMEFVEDYLNNVVSEAVPFANEEKNKLTFEVVSLAHNLIYFGFYSFSELLRLTRTLLGIIDCVQGPPAMLQAYEDPGGKNVRRSIQGVGHMMSTMVLSRKQSVFSAPSLSAGASAAEPLDRSKFEENEDIVVMETKLKILEILQFILNVRLDYRISYLLSVFKKEFVEVFPMQDSGADGTAPAFDSTTANMNLDRIGEQAEAMFGVGKTSSMLEVDDEGGRMFLRVLIHLTMHDYAPLVSGALQLLFKHFSQRQEAMHTFKQVQLLISAQDVENYKVIKSELDRLRTMVEKSELWVDKKGSGKGEEVEAGAAKDKKERPTDEEGFLHPPGEKSSENYQIVKGILERLNKMCGVGEQMRKKQQRLLKNMDAHKVMLDLLQIPYDKGDAKMMEILRYTHQFLQKFCAGNPGNQALLHKHLHLFLTPGLLEAETMQHIFLNNYQLCSEISEPVLQHFVHLLATHGRHVQYLDFLHTVIKAEGKYVKKCQDMIMTELTNAGDDVVVFYNDKASLAHLLDMMKAARDGVEDHSPLMYHISLVDLLAACAEGKNVYTEIKCTSLLPLEDVVSVVTHEDCITEVKMAYVNFVNHCYVDTEVEMKEIYTSNHIWTLFENFTLDMARVCSKREKRVADPTLEKYVLSVVLDTINAFFSSPFSENSTSLQTHQTIVVQLLQSTTRLLECPWLQQQHKGSVEACIRTLAMVAKGRAILLPMDLDAHISSMLSSGASCAAAAQRNASSYKATTRAFPRVTPTANQWDYKNIIEKLQDIITALEERLKPLVQAELSVLVDVLHWPELLFLEGSEAYQRCESGGFLSKLIQHTKDLMESEEKLCIKVLRTLQQMLLKKTKYGDRGNQLRKMLLQNYLQNRKSTSRGDLPDPIGTGLDPDWSAIAATQCRLDKEGATKLVCDLITSTKNEKIFQESIGLAIHLLDGGNTEIQKSFHNLMMSDKKSERFFKVLHDRMKRAQQETKSTVAVNMNDLGSQPHEDREPVDPTTKGRVASFSIPGSSSRYSLGPSLRRGHEVSERVQSSEMGTSVLIMQPILRFLQLLCENHNRDLQNFLRCQNNKTNYNLVCETLQFLDIMCGSTTGGLGLLGLYINEDNVGLVIQTLETLTEYCQGPCHENQTCIVTHESNGIDIITALILNDISPLCKYRMDLVLQLKDNASKLLLALMESRHDSENAERILISLRPQELVDVIKKAYLQEEERENSEVSPREVGHNIYILALQLSRHNKQLQHLLKPVKRIQEEEAEGISSMLSLNNKQLSQMLKSSAPAQEEEEDPLAYYENHTSQIEIVRQDRSMEQIVFPVPGICQFLTEETKHRLFTTTEQDEQGSKVSDFFDQSSFLHNEMEWQRKLRSMPLIYWFSRRMTLWGSISFNLAVFINIIIAFFYPYMEGASTGVLDSPLISLLFWILICFSIAALFTKRYSIRPLIVALILRSIYYLGIGPTLNILGALNLTNKIVFVVSFVGNRGTFIRGYKAMVMDMEFLYHVGYILTSVLGLFAHELFYSILLFDLIYREETLFNVIKSVTRNGRSILLTALLALILVYLFSIVGFLFLKDDFILEVDRLPNNHSTASPLGMPHGAAAFVDTCSGDKMDCVSGLSVPEVLEEDRELDSTERACDTLLMCIVTVMNHGLRNGGGVGDILRKPSKDESLFPARVVYDLLFFFIVIIIVLNLIFGVIIDTFADLRSEKQKKEEILKTTCFICGLERDKFDNKTVSFEEHIKLEHNMWNYLYFIVLVRVKNKTDYTGPESYVAQMIKNKNLDWFPRMRAMSLVSNEGEGEQNEIRILQDKLNSTMKLVSHLTAQLNELKEQMTEQRKRRQRLGFVDVQNCISR

SEQ ID NO: 825198 - protein, 2677 aa, Homo sapiens
MSEMSSFLHIGDIVSLYAEGSVNGFISTLGLVDDRCVVEPAAGDLDNPPKKFRDCLFKVCPMNRYSAQKQYWKAKQTKQDKEKIADVVLLQKLQHAAQMEQKQNDTENKKVHGDVVKYGSVIQLLHMKSNKYLTVNKRLPALLEKNAMRVTLDATGNEGSWLFIQPFWKLRSNGDNVVVGDKVILNPVNAGQPLHASNYELSDNAGCKEVNSVNCNTSWKINLFMQFRDHLEEVLKGGDVVRLFHAEQEKFLTCDEYKGKLQVFLRTTLRQSATSATSSNALWEVEVVHHDPCRGGAGHWNGLYRFKHLATGNYLAAEENPSYKGDASDPKAAGMGAQGRTGRRNAGEKIKYCLVAVPHGNDIASLFELDPTTLQKTDSFVPRNSYVRLRHLCTNTWIQSTNVPIDIEEERPIRLMLGTCPTKEDKEAFAIVSVPVSEIRDLDFANDASSMLASAVEKLNEGFISQNDRRFVIQLLEDLVFFVSDVPNNGQNVLDIMVTKPNRERQKLMREQNILKQVFGILKAPFREKGGEGPLVRLEELSDQKNAPYQHMFRLCYRVLRHSQEDYRKNQEHIAKQFGMMQSQIGYDILAEDTITALLHNNRKLLEKHITKTEVETFVSLVRKNREPRFLDYLSDLCVSNHIAIPVTQELICKCVLDPKNSDILIRTELLVVCRLRPVKEMAQSHEYLSIEYSEEEVWLTWTDKNNEHHEKSVRQLAQEARAGNAHDENVLSYYRYQLKLFARMCLDRQYLAIDEISQQLGVDLIFLCMADEMLPFDLRASFCHLMLHVHVDRDPQELVTPVKFARLWTEIPTAITIKDYDSNLNASRDDKKNKFANTMEFVEDYLNNVVSEAVPFANEEKNKLTFEVVSLAHNLIYFGFYSFSELLRLTRTLLGIIDCVQGPPAMLQAYEDPGGKNVRRSIQGVGHMMSTMVLSRKQSVFSAPSLSAGASAAEPLDRSKFEENEDIVVMETKLKILEILQFILNVRLDYRISYLLSVFKKEFVEVFPMQDSGADGTAPAFDSTTANMNLDRIGEQAEAMFGVGKTSSMLEVDDEGGRMFLRVLIHLTMHDYAPLVSGALQLLFKHFSQRQEAMHTFKQVQLLISAQDVENYKVIKSELDRLRTMVEKSELWVDKKGSGKGEEVEAGAAKDKKERPTDEEGFLHPPGEKSSENYQIVKGILERLNKMCGVGEQMRKKQQRLLKNMDAHKVMLDLLQIPYDKGDAKMMEILRYTHQFLQKFCAGNPGNQALLHKHLHLFLTPGLLEAETMQHIFLNNYQLCSEISEPVLQHFVHLLATHGRHVQYLDFLHTVIKAEGKYVKKCQDMIMTELTNAGDDVVVFYNDKASLAHLLDMMKAARDGVEDHSPLMYHISLVDLLAACAEGKNVYTEIKCTSLLPLEDVVSVVTHEDCITEVKMAYVNFVNHCYVDTEVEMKEIYTSNHIWTLFENFTLDMARVCSKREKRVADPTLEKYVLSVVLDTINAFFSSPFSENSTSLQTHQTIVVQLLQSTTRLLECPWLQQQHKGSVEACIRTLAMVAKGRAILLPMDLDAHISSMLSSGASCAAAAQRNASSYKATTRAFPRVTPTANQWDYKNIIEKLQDIITALEERLKPLVQAELSVLVDVLHWPELLFLEGSEAYQRCESGGFLSKLIQHTKDLMESEEKLCIKVLRTLQQMLLKKTKYGDRGNQLRKMLLQNYLQNRKSTSRGDLPDPIGTGLDPDWSAIAATQCRLDKEGATKLVCDLITSTKNEKIFQESIGLAIHLLDGGNTEIQKSFHNLMMSDKKSERFFKVLHDRMKRAQQETKSTVAVNMNDLGSQPHEDREPVDPTTKGRVASFSIPGSSSRYSLGPSLRRGHEVSERVQSSEMGTSVLIMQPILRFLQLLCENHNRDLQNFLRCQNNKTNYNLVCETLQFLDIMCGSTTGGLGLLGLYINEDNVGLVIQTLETLTEYCQGPCHENQTCIVTHESNGIDIITALILNDISPLCKYRMDLVLQLKDNASKLLLALMESRHDSENAERILISLRPQELVDVIKKAYLQEEERENSEVSPREVGHNIYILALQLSRHNKQLQHLLKPVKRIQEEEAEGISSMLSLNNKQLSQMLKSSAPAQEEEEDPLAYYENHTSQIEIVRQDRSMEQIVFPVPGICQFLTEETKHRLFTTTEQDEQGSKVSDFFDQSSFLHNEMEWQRKLRSMPLIYWFSRRMTLWGSISFNLAVFINIIIAFFYPYMEGASTGVLDSPLISLLFWILICFSIAALFTKRYSIRPLIVALILRSIYYLGIGPTLNILGALNLTNKIVFVVSFVGNRGTFIRGYKAMVMDMEFLYHVGYILTSVLGLFAHELFYSILLFDLIYREETLFNVIKSVTRNGRSILLTALLALILVYLFSIVGFLFLKDDFILEVDRLPNNHSTASPLGMPHGAAAFVDTCSGDKMDCVSGLSVPEVLEEDRELDSTERACDTLLMCIVTVMNHGLRNGGGVGDILRKPSKDESLFPARVVYDLLFFFIVIIIVLNLIFGVIIDTFADLRSEKQKKEEILKTTCFICGLERDKFDNKTVSFEEHIKLEHNMWNYLYFIVLVRVKNKTDYTGPESYVAQMIKNKNLDWFPRMRAMSLVSNEGEGEQNEIRILQDKLNSTMKLVSHLTAQLNELKEQMTEQRKRRQRLGFVDVQNCISR

SEQ ID NO: 825199 - protein, 2338 aa, Homo sapiens
THRSQYEMICCVSETKDSSSLTRSLPRKLFADLETGPTDLTRKPTLSVPRNSYVRLRHLCTNTWIQSTNVPIDIEEERPIRLMLGTCPTKEDKEAFAIVSVPVSEIRDLDFANDASSMLASAVEKLNEGFISQNDRRFVIQLLEDLVFFVSDVPNNGQNVLDIMVTKPNRERQKLMREQNILKQVFGILKAPFREKGGEGPLVRLEELSDQKNAPYQHMFRLCYRVLRHSQEDYRKNQEHIAKQFGMMQSQIGYDILAEDTITALLHNNRKLLEKHITKTEVETFVSLVRKNREPRFLDYLSDLCVSNHIAIPVTQELICKCVLDPKNSDILIRTELRPVKEMAQSHEYLSIEYSEEEVWLTWTDKNNEHHEKSVRQLAQEARAGNAHDENVLSYYRYQLKLFARMCLDRQYLAIDEISQQLGVDLIFLCMADEMLPFDLRASFCHLMLHVHVDRDPQELVTPVKFARLWTEIPTAITIKDYDSNLNASRDDKKNKFANTMEFVEDYLNNVVSEAVPFANEEKNKLTFEVVSLAHNLIYFGFYSFSELLRLTRTLLGIIDCVQGPPAMLQAYEDPGGKNVRRSIQGVGHMMSTMVLSRKQSVFSAPSLSAGASAAEPLDRSKFEENEDIVVMETKLKILEILQFILNVRLDYRISYLLSVFKKEFVEVFPMQDSGADGTAPAFDSTTANMNLDRIGEQAEAMFGVGKTSSMLEVDDEGGRMFLRVLIHLTMHDYAPLVSGALQLLFKHFSQRQEAMHTFKQVQLLISAQDVENYKVIKSELDRLRTMVEKSELWVDKKGSGKGEEVEAGAAKDKKERPTDEEGFLHPPGEKSSENYQIVKGILERLNKMCGVGEQMRKKQQRLLKNMDAHKVMLDLLQIPYDKGDAKMMEILRYTHQFLQKFCAGNPGNQALLHKHLHLFLTPGLLEAETMQHIFLNNYQLCSEISEPVLQHFVHLLATHGRHVQYLDFLHTVIKAEGKYVKKCQDMIMTELTNAGDDVVVFYNDKASLAHLLDMMKAARDGVEDHSPLMYHISLVDLLAACAEGKNVYTEIKCTSLLPLEDVVSVVTHEDCITEVKMAYVNFVNHCYVDTEVEMKEIYTSNHIWTLFENFTLDMARVCSKREKRVADPTLEKYVLSVVLDTINAFFSSPFSENSTSLQTHQTIVVQLLQSTTRLLECPWLQQQHKGSVEACIRTLAMVAKGRAILLPMDLDAHISSMLSSGASCAAAAQRNASSYKATTRAFPRVTPTANQWDYKNIIEKLQDIITALEERLKPLVQAELSVLVDVLHWPELLFLEGSEAYQRCESGGFLSKLIQHTKDLMESEEKLCIKVLRTLQQMLLKKTKYGDRGNQLRKMLLQNYLQNRKSTSRGDLPDPIGTGLDPDWSAIAATQCRLDKEGATKLVCDLITSTKNEKIFQESIGLAIHLLDGGNTEIQKSFHNLMMSDKKSERFFKVLHDRMKRAQQETKSTVAVNMNDLGSQPHEDREPVDPTTKGRVASFSIPGSSSRYSLGPSLRRGHEVSERVQSSEMGTSVLIMQPILRFLQLLCENHNRDLQNFLRCQNNKTNYNLVCETLQFLDIMCGSTTGGLGLLGLYINEDNVGLVIQTLETLTEYCQGPCHENQTCIVTHESNGIDIITALILNDISPLCKYRMDLVLQLKDNASKLLLALMESRHDSENAERILISLRPQELVDVIKKAYLQEEERENSEVSPREVGHNIYILALQLSRHNKQLQHLLKPVKRIQEEEAEGISSMLSLNNKQLSQMLKSSAPAQEEEEDPLAYYENHTSQIEIVRQDRSMEQIVFPVPGICQFLTEETKHRLFTTTEQDEQGSKVSDFFDQSSFLHNEMEWQRKLRSMPLIYWFSRRMTLWGSISFNLAVFINIIIAFFYPYMEGASTGVLDSPLISLLFWILICFSIAALFTKRYSIRPLIVALILRSIYYLGIGPTLNILGALNLTNKIVFVVSFVGNRGTFIRGYKAMVMDMEFLYHVGYILTSVLGLFAHELFYSILLFDLIYREETLFNVIKSVTRNGRSILLTALLALILVYLFSIVGFLFLKDDFILEVDRLPNNHSTASPLGMPHGAAAFVDTCSGDKMDCVSGLSVPEVLEEDRELDSTERACDTLLMCIVTVMNHGLRNGGGVGDILRKPSKDESLFPARVVYDLLFFFIVIIIVLNLIFGVIIDTFADLRSEKQKKEEILKTTCFICGLERDKFDNKTVSFEEHIKLEHNMWNYLYFIVLVRVKNKTDYTGPESYVAQMIKNKNLDWFPRMRAMSLVSNEGEGEQNEIRILQDKLNSTMKLVSHLTAQLNELKEQMTEQRKRRQRLGFVDVQNCISR

SEQ ID NO: 825200 - protein, 2695 aa, Homo sapiens
MSEMSSFLHIGDIVSLYAEGSVNGFISTLGLVDDRCVVEPAAGDLDNPPKKFRDCLFKVCPMNRYSAQKQYWKAKQTKQDKEKIADVVLLQKLQHAAQMEQKQNDTENKKVHGDVVKYGSVIQLLHMKSNKYLTVNKRLPALLEKNAMRVTLDATGNEGSWLFIQPFWKLRSNGDNVVVGDKVILNPVNAGQPLHASNYELSDNAGCKEVNSVNCNTSWKINLFMQFRDHLEEVLKGGDVVRLFHAEQEKFLTCDEYKGKLQVFLRTTLRQSATSATSSNALWEVEVVHHDPCRGGAGHWNGLYRFKHLATGNYLAAEENPSYKGDASDPKAAGMGAQGRTGRRNAGEKIKYCLVAVPHGNDIASLFELDPTTLQKTDSFVPRNSYVRLRHLCTNTWIQSTNVPIDIEEERPIRLMLGTCPTKEDKEAFAIVSVPVSEIRDLDFANDASSMLASAVEKLNEGFISQNDRRFVIQLLEDLVFFVSDVPNNGQNVLDIMVTKPNRERQKLMREQNILKQVFGILKAPFREKGGEGPLVRLEELSDQKNAPYQHMFRLCYRVLRHSQEDYRKNQEHIAKQFGMMQSQIGYDILAEDTITALLHNNRKLLEKHITKTEVETFVSLVRKNREPRFLDYLSDLCVSNHIAIPVTQELICKCVLDPKNSDILIRTELRPVKEMAQSHEYLSIEYSEEEVWLTWTDKNNEHHEKSVRQLAQEARAGNAHDENVLSYYRYQLKLFARMCLDRQYLAIDEISQQLGVDLIFLCMADEMLPFDLRASFCHLMLHVHVDRDPQELVTPVKFARLWTEIPTAITIKDYDSNLNASRDDKKNKFANTMEFVEDYLNNVVSEAVPFANEEKNKLTFEVVSLAHNLIYFGFYSFSELLRLTRTLLGIIDCVQGPPAMLQAYEDPGGKNVRRSIQGVGHMMSTMVLSRKQSVFSAPSLSAGASAAEPLDRSKFEENEDIVVMETKLKILEILQFILNVRLDYRISYLLSVFKKEFVEVFPMQDSGADGTAPAFDSTTANMNLDRIGEQAEAMFGVGKTSSMLEVDDEGGRMFLRVLIHLTMHDYAPLVSGALQLLFKHFSQRQEAMHTFKQVQLLISAQDVENYKVIKSELDRLRTMVEKSELWVDKKGSGKGEEVEAGAAKDKKERPTDEEGFLHPPGEKSSENYQIVKGILERLNKMCGVGEQMRKKQQRLLKNMDAHKVMLDLLQIPYDKGDAKMMEILRYTHQFLQKFCAGNPGNQALLHKHLHLFLTPGLLEAETMQHIFLNNYQLCSEISEPVLQHFVHLLATHGRHVQYLDFLHTVIKAEGKYVKKCQDMIMTELTNAGDDVVVFYNDKASLAHLLDMMKAARDGVEDHSPLMYHISLVDLLAACAEGKNVYTEIKCTSLLPLEDVVSVVTHEDCITEVKMAYVNFVNHCYVDTEVEMKEIYTSNHIWTLFENFTLDMARVCSKREKRVADPTLEKYVLSVVLDTINAFFSSPFSENSTSLQTHQTIVVQLLQSTTRLLECPWLQQQHKGSVEACIRTLAMVAKGRAILLPMDLDAHISSMLSSGASCAAAAQRNASSYKATTRAFPRVTPTANQWDYKNIIEKLQDIITALEERLKPLVQAELSVLVDVLHWPELLFLEGSEAYQRCESGGFLSKLIQHTKDLMESEEKLCIKVLRTLQQMLLKKTKYGDRGNQLRKMLLQNYLQNRKSTSRGDLPDPIGTGLDPDWSAIAATQCRLDKEGATKLVCDLITSTKNEKIFQESIGLAIHLLDGGNTEIQKSFHNLMMSDKKSERFFKVLHDRMKRAQQETKSTVAVNMNDLGSQPHEDREPVDPTTKGRVASFSIPGSSSRYSLGPSLRRGHEVSERVQSSEMGTSVLIMQPILRFLQLLCENHNRDLQNFLRCQNNKTNYNLVCETLQFLDIMCGSTTGGLGLLGLYINEDNVGLVIQTLETLTEYCQGPCHENQTCIVTHESNGIDIITALILNDISPLCKYRMDLVLQLKDNASKLLLALMESRHDSENAERILISLRPQELVDVIKKAYLQEEERENSEVSPREVGHNIYILALQLSRHNKQLQHLLKPVKRIQEEEAEGISSMLSLNNKQLSQMLKSSAPAQEEEEDPLAYYENHTSQIEVGLWAAGAGVGACAGRDHVLCVLQIVRQDRSMEQIVFPVPGICQFLTEETKHRLFTTTEQDEQGSKVSDFFDQSSFLHNEMEWQRKLRSMPLIYWFSRRMTLWGSISFNLAVFINIIIAFFYPYMEGASTGVLDSPLISLLFWILICFSIAALFTKRYSIRPLIVALILRSIYYLGIGPTLNILGALNLTNKIVFVVSFVGNRGTFIRGYKAMVMDMEFLYHVGYILTSVLGLFAHELFYSILLFDLIYREETLFNVIKSVTRNGRSILLTALLALILVYLFSIVGFLFLKDDFILEVDRLPNNHSTASPLGMPHGAAAFVDTCSGDKMDCVSGLSVPEVLEEDRELDSTERACDTLLMCIVTVMNHGLRNGGGVGDILRKPSKDESLFPARVVYDLLFFFIVIIIVLNLIFGVIIDTFADLRSEKQKKEEILKTTCFICGLERDKFDNKTVSFEEHIKLEHNMWNYLYFIVLVRVKNKTDYTGPESYVAQMIKNKNLDWFPRMRAMSLVSNEGEGEQNEIRILQDKLNSTMKLVSHLTAQLNELKEQMTEQRKRRQRLGFVDVQNCISR

SEQ ID NO: 825201 - protein, 2253 aa, Homo sapiens
MSEMSSFLHIGDIVSLYAEGSVNGFISTLGLVDDRCVVEPAAGDLDNPPKKFRDCLFKVCPMNRYSAQKQYWKAKQTKQDKEKIADVVLLQKLQHAAQMEQKQNDTENKKVHGDVVKYGSVIQLLHMKSNKYLTVNKRLPALLEKNAMRVTLDATGNEGSWLFIQPFWKLRSNGDNVVVGDKVILNPVNAGQPLHASNYELSDNAGCKEVNSVNCNTSWKINLFMQFRDHLEEVLKGGDVVRLFHAEQEKFLTCDEYKGKLQVFLRTTLRQSATSATSSNALWEVEVVHHDPCRGGAGHWNGLYRFKHLATGNYLAAEENPSYKGDASDPKAAGMGAQGRTGRRNAGEKIKYCLVAVPHGNDIASLFELDPTTLQKTDSFVPRNSYVRLRHLCTNTWIQSTNVPIDIEEERPIRLMLGTCPTKEDKEAFAIVSVPVSEIRDLDFANDASSMLASAVEKLNEGFISQNDRRFVIQLLEDLVFFVSDVPNNGQNVLDIMVTKPNRERQKLMREQNILKQVFGILKAPFREKGGEGPLVRLEELSDQKNAPYQHMFRLCYRVLRHSQEDYRKNQEHIAKQFGMMQSQIGYDILAEDTITALLHNNRKLLEKHITKTEVETFVSLVRKNREPRFLDYLSDLCVSNHIAIPVTQELICKCVLDPKNSDILIRTELRPVKEMAQSHEYLSIEYSEEEVWLTWTDKNNEHHEKSVRQLAQEARAGNAHDENVLSYYRYQLKLFARMCLDRQYLAIDEISQQLGVDLIFLCMADEMLPFDLRASFCHLMLHVHVDRDPQELVTPVKFARLWTEIPTAITIKDYDSNLNASRDDKKNKFANTMEFVEDYLNNVVSEAVPFANEEKNKLTFEVVSLAHNLIYFGFYSFSELLRLTRTLLGIIDCVQGPPAMLQAYEDPGGKNVRRSIQGVGHMMSTMVLSRKQSVFSAPSLSAGASAAEPLDRSKFEENEDIVVMETKLKILEILQFILNVRLDYRISYLLSVFKKEFVEVFPMQDSGADGTAPAFDSTTANMNLDRIGEQAEAMFGVGKTSSMLEVDDEGGRMFLRVLIHLTMHDYAPLVSGALQLLFKHFSQRQEAMHTFKQVQLLISAQDVENYKVIKSELDRLRTMVEKSELWVDKKGSGKGEEVEAGAAKDKKERPTDEEGFLHPPGEKSSENYQIVKGILERLNKMCGVGEQMRKKQQRLLKNMDAHKVMLDLLQIPYDKGDAKMMEILRYTHQFLQKFCAGNPGNQALLHKHLHLFLTPGLLEAETMQHIFLNNYQLCSEISEPVLQHFVHLLATHGRHVQYLDFLHTVIKAEGKYVKKCQDMIMTELTNAGDDVVVFYNDKASLAHLLDMMKAARDGVEDHSPLMYHISLVDLLAACAEGKNVYTEIKCTSLLPLEDVVSVVTHEDCITEVKMAYVNFVNHCYVDTEVEMKEIYTSNHIWTLFENFTLDMARVCSKREKRVADPTLEKYVLSVVLDTINAFFSSPFSENSTSLQTHQTIVVQLLQSTTRLLECPWLQQQHKGSVEACIRTLAMVAKGRAILLPMDLDAHISSMLSSGASCAAAAQRNASSYKATTRAFPRVTPTANQWDYKNIIEKLQDIITALEERLKPLVQAELSVLVDVLHWPELLFLEGSEAYQRCESGGFLSKLIQHTKDLMESEEKLCIKVLRTLQQMLLKKTKYGDRGNQLRKMLLQNYLQNRKSTSRGDLPDPIGTGLDPDWSAIAATQCRLDKEGATKLVCDLITSTKNEKIFQESIGLAIHLLDGGNTEIQKSFHNLMMSDKKSERFFKVLHDRMKRAQQETKSTVAVNMNDLGSQPHEDREPVDPTTKGRVASFSIPGSSSRYSLGPSLRRGHEVSERVQSSEMGTSVLIMQPILRFLQLLCENHNRDLQNFLRCQNNKTNYNLVCETLQFLDIMCGSTTGGLGLLGLYINEDNVGLVIQTLETLTEYCQGPCHENQTCIVTHESNGIDIITALILNDISPLCKYRMDLVLQLKDNASKLLLALMESRHDSENAERILISLRPQELVDVIKKAYLQEEERENSEVSPREVGHNIYILALQLSRHNKQLQHLLKPVKRIQEEEAEGISSMLSLNNKQLSQMLKSSAPAQEEEEDPLAYYENHTSQIEIVRQDRSMEQIVFPVPGICQFLTEETKHRLFTTTEQDEQGSKVSDFFDQSSFLHNEMEWQRKLRSMPLIYWFSRRMTLWGSISFNLAVFINIIIAFFYPYMEGASTADQQDRVCGELRGQPWHLHPGL

SEQ ID NO: 825202 - protein, 1654 aa, Homo sapiens
EPQLCHPQPAAPEPAEAIFGVGKTSSMLEVDDEGGRMFLRVLIHLTMHDYAPLVSGALQLLFKHFSQRQEAMHTFKQVQLLISAQDVENYKVIKSELDRLRTMVEKSELWVDKKGSGKGEEVEAGAAKDKKERPTDEEGFLHPPGEKSSENYQIVKGILERLNKMCGVGEQMRKKQQRLLKNMDAHKVMLDLLQIPYDKGDAKMMEILRYTHQFLQKFCAGNPGNQALLHKHLHLFLTPGLLEAETMQHIFLNNYQLCSEISEPVLQHFVHLLATHGRHVQYLDFLHTVIKAEGKYVKKCQDMIMTELTNAGDDVVVFYNDKASLAHLLDMMKAARDGVEDHSPLMYHISLVDLLAACAEGKNVYTEIKCTSLLPLEDVVSVVTHEDCITEVKMAYVNFVNHCYVDTEVEMKEIYTSNHIWTLFENFTLDMARVCSKREKRVADPTLEKYVLSVVLDTINAFFSSPFSENSTSLQTHQTIVVQLLQSTTRLLECPWLQQQHKGSVEACIRTLAMVAKGRAILLPMDLDAHISSMLSSGASCAAAAQRNASSYKATTRAFPRVTPTANQWDYKNIIEKLQDIITALEERLKPLVQAELSVLVDVLHWPELLFLEGSEAYQRCESGGFLSKLIQHTKDLMESEEKLCIKVLRTLQQMLLKKTKYGDRGNQLRKMLLQNYLQNRKSTSRGDLPDPIGTGLDPDWSAIAATQCRLDKEGATKLVCDLITSTKNEKIFQESIGLAIHLLDGGNTEIQKSFHNLMMSDKKSERFFKVLHDRMKRAQQETKSTVAVNMNDLGSQPHEDREPVDPTTKGRVASFSIPGSSSRYSLGPSLRRGHEVSERVQSSEMGTSVLIMQPILRFLQLLCENHNRDLQNFLRCQNNKTNYNLVCETLQFLDIMCGSTTGGLGLLGLYINEDNVGLVIQTLETLTEYCQGPCHENQTCIVTHESNGIDIITALILNDISPLCKYRMDLVLQLKDNASKLLLALMESRHDSENAERILISLRPQELVDVIKKAYLQEEERENSEVSPREVGHNIYILALQLSRHNKQLQHLLKPVKRIQEEEAEGISSMLSLNNKQLSQMLKSSAPAQEEEEDPLAYYENHTSQIEIVRQDRSMEQIVFPVPGICQFLTEETKHRLFTTTEQDEQGSKVSDFFDQSSFLHNEMEWQRKLRSMPLIYWFSRRMTLWGSISFNLAVFINIIIAFFYPYMEGASTGVLDSPLISLLFWILICFSIAALFTKRYSIRPLIVALILRSIYYLGIGPTLNILGALNLTNKIVFVVSFVGNRGTFIRGYKAMVMDMEFLYHVGYILTSVLGLFAHELFYSILLFDLIYREETLFNVIKSVTRNGRSILLTALLALILVYLFSIVGFLFLKDDFILEVDRLPNNHSTASPLGMPHGAAAFVDTCSGDKMDCVSGLSVPEVLEEDRELDSTERACDTLLMCIVTVMNHGLRNGGGVGDILRKPSKDESLFPARVVYDLLFFFIVIIIVLNLIFGVIIDTFADLRSEKQKKEEILKTTCFICGLERDKFDNKTVSFEEHIKLEHNMWNYLYFIVLVRVKNKTDYTGPESYVAQMIKNKNLDWFPRMRAMSLVSNEGEGEQNEIRILQDKLNSTMKLVSHLTAQLNELKEQMTEQRKRRQRLGFVDVQNCISR

SEQ ID NO: 825203 - protein, 839 aa, Homo sapiens
PVRSTEPSRYSLGPSLRRGHEVSERVQSSEMGTSVLIMQPILRFLQLLCENHNRDLQNFLRCQNNKTNYNLVCETLQFLDIMCGSTTGGLGLLGLYINEDNVGLVIQTLETLTEYCQGPCHENQTCIVTHESNGIDIITALILNDISPLCKYRMDLVLQLKDNASKLLLALMESRHDSENAERILISLRPQELVDVIKKAYLQEEERENSEVSPREVGHNIYILALQLSRHNKQLQHLLKPVKRIQEEEAEGISSMLSLNNKQLSQMLKSSAPAQEEEEDPLAYYENHTSQIEIVRQDRSMEQIVFPVPGICQFLTEETKHRLFTTTEQDEQGSKVSDFFDQSSFLHNEMEWQRKLRSMPLIYWFSRRMTLWGSISFNLAVFINIIIAFFYPYMEGASTGVLDSPLISLLFWILICFSIAALFTKRYSIRPLIVALILRSIYYLGIGPTLNILGALNLTNKIVFVVSFVGNRGTFIRGYKAMVMDMEFLYHVGYILTSVLGLFAHELFYSILLFDLIYREETLFNVIKSVTRNGRSILLTALLALILVYLFSIVGFLFLKDDFILEVDRLPNNHSTASPLGMPHGAAAFVDTCSGDKMDCVSGLSVPEVLEEDRELDSTERACDTLLMCIVTVMNHGLRNGGGVGDILRKPSKDESLFPARVVYDLLFFFIVIIIVLNLIFGVIIDTFADLRSEKQKKEEILKTTCFICGLERDKFDNKTVSFEEHIKLEHNMWNYLYFIVLVRVKNKTDYTGPESYVAQMIKNKNLDWFPRMRAMSLVSNEGEGEQNEIRILQDKLNSTMKLVSHLTAQLNELKEQMTEQRKRRQRLGFVDVQNCISR

SEQ ID NO: 825204 - protein, 248 aa, Homo sapiens
EAGGNRPRLCLRLSVPEVLEEDRELDSTERACDTLLMCIVTVMNHGLRNGGGVGDILRKPSKDESLFPARVVYDLLFFFIVIIIVLNLIFGVIIDTFADLRSEKQKKEEILKTTCFICGLERDKFDNKTVSFEEHIKLEHNMWNYLYFIVLVRVKNKTDYTGPESYVAQMIKNKNLDWFPRMRAMSLVSNEGEGEQNEIRILQDKLNSTMKLVSHLTAQLNELKEQMTEQRKRRQRLGFVDVQNCISR

SEQ ID NO: 825205 - protein, 2596 aa, Homo sapiens
MSEMSSFLHIGDIVSLYAEGSVNGFISTLGLVDDRCVVEPAAGDLDNPPKKFRDCLFKVCPMNRYSAQKQYWKAKQTKQDKEKIADVVLLQKLQHAAQMEQKQNDTENKKVHGDVVKYGSVIQLLHMKSNKYLTVNKRLPALLEKNAMRVTLDATGNEGSWLFIQPFWKLRSNGDNVVVGDKVILNPVNAGQPLHASNYELSDNAGCKEVNSVNCNTSWKINLFMQFRDHLEEVLKGGDVVRLFHAEQEKFLTCDEYKGKLQVFLRTTLRQSATSATSSNALWEVEVVHHDPCRGGAGHWNGLYRFKHLATGNYLAAEENPSYKGDASDPKAAGMGAQGRTGRRNAGEKIKYCLVAVPHGNDIASLFELDPTTLQKTDSFVPRNSYVRLRHLCTNTWIQSTNVPIDIEEERPIRLMLGTCPTKEDKEAFAIVSVPVSEIRDLDFANDASSMLASAVEKLNEGFISQNDRRFVIQLLEDLVFFVSDVPNNGQNVLDIMVTKPNRERQKLMREQNILKQVFGILKAPFREKGGEGPLVRLEELSDQKNAPYQHMFRLCYRVLRHSQEDYRKNQEHIAKQFGMMQSQIGYDILAEDTITALLHNNRKLLEKHITKTEVETFVSLVRKNREPRFLDYLSDLCVSNHIAIPVTQELICKCVLDPKNSDILIRTELRPVKEMAQSHEYLSIEYSEEEVWLTWTDKNNEHHEKSVRQLAQEARAGNAHDENVLSYYRYQLKLFARMCLDRQYLAIDEISQQLGVDLIFLCMADEMLPFDLRASFCHLMLHVHVDRDPQELVTPVKFARLWTEIPTAITIKDYDSNLNASRDDKKNKFANTMEFVEDYLNNVVSEAVPFANEEKNKLTFEVVSLAHNLIYFGFYSFSELLRLTRTLLGIIDCVQGPPAMLQAYEDPGGKNVRRSIQGVGHMMSTMVLSRKQSVFSAPSLSAGASAAEPLDRSKFEENEDIVVMETKLKILEILQFILNVRLDYRISYLLSVFKKEFVEVFPMQDSGADGTAPAFDSTTANMNLDRIGEQAEAMFGVGKTSSMLEVDDEGGRMFLRVLIHLTMHDYAPLVSGALQLLFKHFSQRQEAMHTFKQVQLLISAQDVENYKVIKSELDRLRTMVEKSELWVDKKGSGKGEEVEAGAAKDKKERPTDEEGFLHPPGEKSSENYQIVKGILERLNKMCGVGEQMRKKQQRLLKNMDAHKVMLDLLQIPYDKGDAKMMEILRYTHQFLQKFCAGNPGNQALLHKHLHLFLTPGLLEAETMQHIFLNNYQLCSEISEPVLQHFVHLLATHGRHVQYLDFLHTVIKAEGKYVKKCQDMIMTELTNAGDDVVVFYNDKASLAHLLDMMKAARDGVEDHSPLMYHISLVDLLAACAEGKNVYTEIKCTSLLPLEDVVSVVTHEDCITEVKMAYVNFVNHCYVDTEVEMKEIYTSNHIWTLFENFTLDMARVCSKREKRVADPTLEKYVLSVVLDTINAFFSSPFSENSTSLQTHQTIVVQLLQSTTRLLECPWLQQQHKGSVEACIRTLAMVAKGRAILLPMDLDAHISSMLSSGASCAAAAQRNASSYKATTRAFPRVTPTANQWDYKNIIEKLQDIITALEERLKPLVQAELSVLVDVLHWPELLFLEGSEAYQRCESGGFLSKLIQHTKDLMESEEKLCIKVLRTLQQMLLKKTKYGDRGNQLRKMLLQNYLQNRKSTSRGDLPDPIGTGLDPDWSAIAATQCRLDKEGATKLVCDLITSTKNEKIFQESIGLAIHLLDGGNTEIQKSFHNLMMSDKKSERFFKVLHDRMKRAQQETKSTVAVNMNDLGSQPHEDREPVDPTTKGRVASFSIPGSSSRYSLGPSLRRGHEVSERVQSSEMGTSVLIMQPILRFLQLLCENHNRDLQNFLRCQNNKTNYNLVCETLQFLDIMCGSTTGGLGLLGLYINEDNVGLVIQTLETLTEYCQGPCHENQTCIVTHESNGIDIITALILNDISPLCKYRMDLVLQLKDNASKLLLALMESRHDSENAERILISLRPQELVDVIKKAYLQEEERENSEVSPREVGHNIYILALQLSRHNKQLQHLLKPVKRIQEEEAEGISSMLSLNNKQLSQMLKSSAPAQEEEEDPLAYYENHTSQIEIVRQDRSMEQIVFPVPGICQFLTEETKHRLFTTTEQDEQGSKVSDFFDQSSFLHNEMEWQRKLRSMPLIYWFSRRMTLWGSISFNLAVFINIIIAFFYPYMEGASTGVLDSPLISLLFWILICFSIAALFTKRYSIRPLIVALILRSIYYLGIGPTLNILGALNLTNKIVFVVSFVGNRGTFIRGYKAMVMDMEFLYHVGYILTSVLGLFAHELFYSILLFDLIYREETLFNVIKSVTRNGRSILLTALLALILVYLFSIVGFLFLKDDFILEVDRLPNNHSTASPLGMPHGAAAFVDTCSGDKMDCVSGLSVPEVLEEDRELDSTERACDTLLMCIVTVMNHGLRNGGGVGDILRKPSKDESLFPARVVYDLLFFFIVIIIVLNLIFGVIIDTFADLRSEKQKKEEILKTTCFICGLERDKFDNKTVSFEEHIKLEHNMWNYLYFIVLVRVKNKTDYTGPESYVAQMIKV

SEQ ID NO: 825206 - protein, 2492 aa, Homo sapiens
MSEMSSFLHIGDIVSLYAEGSVNGFISTLGLVDDRCVVEPAAGDLDNPPKKFRDCLFKVCPMNRYSAQKQYWKAKQTKQDKEKIADVVLLQKLQHAAQMEQKQNDTENKKVHGDVVKYGSVIQLLHMKSNKYLTVNKRLPALLEKNAMRVTLDATGNEGSWLFIQPFWKLRSNGDNVVVGDKVILNPVNAGQPLHASNYELSDNAGCKEVNSVNCNTSWKINLFMQFRDHLEEVLKGGDVVRLFHAEQEKFLTCDEYKGKLQVFLRTTLRQSATSATSSNALWEVEVVHHDPCRGGAGHWNGLYRFKHLATGNYLAAEENPSYKGDASDPKAAGMGAQGRTGRRNAGEKIKYCLVAVPHGNDIASLFELDPTTLQKTDSFVPRNSYVRLRHLCTNTWIQSTNVPIDIEEERPIRLMLGTCPTKEDKEAFAIVSVPVSEIRDLDFANDASSMLASAVEKLNEGFISQNDRRFVIQLLEDLVFFVSDVPNNGQNVLDIMVTKPNRERQKLMREQNILKQVFGILKAPFREKGGEGPLVRLEELSDQKNAPYQHMFRLCYRVLRHSQEDYRKNQEHIAKQFGMMQSQIGYDILAEDTITALLHNNRKLLEKHITKTEVETFVSLVRKNREPRFLDYLSDLCVSNHIAIPVTQELICKCVLDPKNSDILIRTELRPVKEMAQSHEYLSIEYSEEEVWLTWTDKNNEHHEKSVRQLAQEARAGNAHDENVLSYYRYQLKLFARMCLDRQYLAIDEISQQLGVDLIFLCMADEMLPFDLRASFCHLMLHVHVDRDPQELVTPVKFARLWTEIPTAITIKDYDSNLNASRDDKKNKFANTMEFVEDYLNNVVSEAVPFANEEKNKLTFEVVSLAHNLIYFGFYSFSELLRLTRTLLGIIDCVQGPPAMLQAYEDPGGKNVRRSIQGVGHMMSTMVLSRKQSVFSAPSLSAGASAAEPLDRSKFEENEDIVVMETKLKILEILQFILNVRLDYRISYLLSVFKKEFVEVFPMQDSGADGTAPAFDSTTANMNLDRIGEQAEAMFGVGKTSSMLEVDDEGGRMFLRVLIHLTMHDYAPLVSGALQLLFKHFSQRQEAMHTFKQVQLLISAQDVENYKVIKSELDRLRTMVEKSELWVDKKGSGKGEEVEAGAAKDKKERPTDEEGFLHPPGEKSSENYQIVKGILERLNKMCGVGEQMRKKQQRLLKNMDAHKVMLDLLQIPYDKGDAKMMEILRYTHQFLQKFCAGNPGNQALLHKHLHLFLTPGLLEAETMQHIFLNNYQLCSEISEPVLQHFVHLLATHGRHVQYLDFLHTVIKAEGKYVKKCQDMIMTELTNAGDDVVVFYNDKASLAHLLDMMKAARDGVEDHSPLMYHISLVDLLAACAEGKNVYTEIKCTSLLPLEDVVSVVTHEDCITEVKMAYVNFVNHCYVDTEVEMKEIYTSNHIWTLFENFTLDMARVCSKREKRVADPTLEKYVLSVVLDTINAFFSSPFSENSTSLQTHQTIVVQLLQSTTRLLECPWLQQQHKGSVEACIRTLAMVAKGRAILLPMDLDAHISSMLSSGASCAAAAQRNASSYKATTRAFPRVTPTANQWDYKNIIEKLQDIITALEERLKPLVQAELSVLVDVLHWPELLFLEGSEAYQRCESGGFLSKLIQHTKDLMESEEKLCIKVLRTLQQMLLKKTKYGDRGNQLRKMLLQNYLQNRKSTSRGDLPDPIGTGLDPDWSAIAATQCRLDKEGATKLVCDLITSTKNEKIFQESIGLAIHLLDGGNTEIQKSFHNLMMSDKKSERFFKVLHDRMKRAQQETKSTVAVNMNDLGSQPHEDREPVDPTTKGRVASFSIPGSSSRYSLGPSLRRGHEVSERVQSSEMGTSVLIMQPILRFLQLLCENHNRDLQNFLRCQNNKTNYNLVCETLQFLDIMCGSTTGGLGLLGLYINEDNVGLVIQTLETLTEYCQGPCHENQTCIVTHESNGIDIITALILNDISPLCKYRMDLVLQLKDNASKLLLALMESRHDSENAERILISLRPQELVDVIKKAYLQEEERENSEVSPREVGHNIYILALQLSRHNKQLQHLLKPVKRIQEEEAEGISSMLSLNNKQLSQMLKSSAPAQEEEEDPLAYYENHTSQIEIVRQDRSMEQIVFPVPGICQFLTEETKHRLFTTTEQDEQGSKVSDFFDQSSFLHNEMEWQRKLRSMPLIYWFSRRMTLWGSISFNLAVFINIIIAFFYPYMEGASTGVLDSPLISLLFWILICFSIAALFTKRYSIRPLIVALILRSIYYLGIGPTLNILGALNLTNKIVFVVSFVGNRGTFIRGYKAMVMDMEFLYHVGYILTSVLGLFAHELFYSILLFDLIYREETLFNVIKSVTRNGRSILLTALLALILVYLFSIVGFLFLKDDFILEVDRLPNNHSTASPLGMPHGAAAFVDTCSGDKMDCVSGLSVPEVLEEDRELDSTERACDTLLMCIVTVMNHGLRNGGGVGDILRKPSKDVSTPAH

SEQ ID NO: 825207 - protein, 2493 aa, Homo sapiens
MSEMSSFLHIGDIVSLYAEGSVNGFISTLGLVDDRCVVEPAAGDLDNPPKKFRDCLFKVCPMNRYSAQKQYWKAKQTKQDKEKIADVVLLQKLQHAAQMEQKQNDTENKKVHGDVVKYGSVIQLLHMKSNKYLTVNKRLPALLEKNAMRVTLDATGNEGSWLFIQPFWKLRSNGDNVVVGDKVILNPVNAGQPLHASNYELSDNAGCKEVNSVNCNTSWKINLFMQFRDHLEEVLKGGDVVRLFHAEQEKFLTCDEYKGKLQVFLRTTLRQSATSATSSNALWEVEVVHHDPCRGGAGHWNGLYRFKHLATGNYLAAEENPSYKGDASDPKAAGMGAQGRTGRRNAGEKIKYCLVAVPHGNDIASLFELDPTTLQKTDSFVPRNSYVRLRHLCTNTWIQSTNVPIDIEEERPIRLMLGTCPTKEDKEAFAIVSVPVSEIRDLDFANDASSMLASAVEKLNEGFISQNDRRFVIQLLEDLVFFVSDVPNNGQNVLDIMVTKPNRERQKLMREQNILKQVFGILKAPFREKGGEGPLVRLEELSDQKNAPYQHMFRLCYRVLRHSQEDYRKNQEHIAKQFGMMQSQIGYDILAEDTITALLHNNRKLLEKHITKTEVETFVSLVRKNREPRFLDYLSDLCVSNHIAIPVTQELICKCVLDPKNSDILIRTELRPVKEMAQSHEYLSIEYSEEEVWLTWTDKNNEHHEKSVRQLAQEARAGNAHDENVLSYYRYQLKLFARMCLDRQYLAIDEISQQLGVDLIFLCMADEMLPFDLRASFCHLMLHVHVDRDPQELVTPVKFARLWTEIPTAITIKDYDSNLNASRDDKKNKFANTMEFVEDYLNNVVSEAVPFANEEKNKLTFEVVSLAHNLIYFGFYSFSELLRLTRTLLGIIDCVQGPPAMLQAYEDPGGKNVRRSIQGVGHMMSTMVLSRKQSVFSAPSLSAGASAAEPLDRSKFEENEDIVVMETKLKILEILQFILNVRLDYRISYLLSVFKKEFVEVFPMQDSGADGTAPAFDSTTANMNLDRIGEQAEAMFGVGKTSSMLEVDDEGGRMFLRVLIHLTMHDYAPLVSGALQLLFKHFSQRQEAMHTFKQVQLLISAQDVENYKVIKSELDRLRTMVEKSELWVDKKGSGKGEEVEAGAAKDKKERPTDEEGFLHPPGEKSSENYQIVKGILERLNKMCGVGEQMRKKQQRLLKNMDAHKVMLDLLQIPYDKGDAKMMEILRYTHQFLQKFCAGNPGNQALLHKHLHLFLTPGLLEAETMQHIFLNNYQLCSEISEPVLQHFVHLLATHGRHVQYLDFLHTVIKAEGKYVKKCQDMIMTELTNAGDDVVVFYNDKASLAHLLDMMKAARDGVEDHSPLMYHISLVDLLAACAEGKNVYTEIKCTSLLPLEDVVSVVTHEDCITEVKMAYVNFVNHCYVDTEVEMKEIYTSNHIWTLFENFTLDMARVCSKREKRVADPTLEKYVLSVVLDTINAFFSSPFSENSTSLQTHQTIVVQLLQSTTRLLECPWLQQQHKGSVEACIRTLAMVAKGRAILLPMDLDAHISSMLSSGASCAAAAQRNASSYKATTRAFPRVTPTANQWDYKNIIEKLQDIITALEERLKPLVQAELSVLVDVLHWPELLFLEGSEAYQRCESGGFLSKLIQHTKDLMESEEKLCIKVLRTLQQMLLKKTKYGDRGNQLRKMLLQNYLQNRKSTSRGDLPDPIGTGLDPDWSAIAATQCRLDKEGATKLVCDLITSTKNEKIFQESIGLAIHLLDGGNTEIQKSFHNLMMSDKKSERFFKVLHDRMKRAQQETKSTVAVNMNDLGSQPHEDREPVDPTTKGRVASFSIPGSSSRYSLGPSLRRGHEVSERVQSSEMGTSVLIMQPILRFLQLLCENHNRDLQNFLRCQNNKTNYNLVCETLQFLDIMCGSTTGGLGLLGLYINEDNVGLVIQTLETLTEYCQGPCHENQTCIVTHESNGIDIITALILNDISPLCKYRMDLVLQLKDNASKLLLALMESRHDSENAERILISLRPQELVDVIKKAYLQEEERENSEVSPREVGHNIYILALQLSRHNKQLQHLLKPVKRIQEEEAEGISSMLSLNNKQLSQMLKSSAPAQEEEEDPLAYYENHTSQIEIVRQDRSMEQIVFPVPGICQFLTEETKHRLFTTTEQDEQGSKVSDFFDQSSFLHNEMEWQRKLRSMPLIYWFSRRMTLWGSISFNLAVFINIIIAFFYPYMEGASTGVLDSPLISLLFWILICFSIAALFTKRYSIRPLIVALILRSIYYLGIGPTLNILGALNLTNKIVFVVSFVGNRGTFIRGYKAMVMDMEFLYHVGYILTSVLGLFAHELFYSILLFDLIYREETLFNVIKSVTRNGRSILLTALLALILVYLFSIVGFLFLKDDFILEVDRLPNNHSTASPLGMPHGAAAFVDTCSGDKMDCVSGLSVPEVLEEDRELDSTERACDTLLMCIVTVMNHGLRNGGGVGRSAHIFGGLQREPLES

SEQ ID NO: 825208 - protein, 2117 aa, Homo sapiens
MSEMSSFLHIGDIVSLYAEGSVNGFISTLGLVDDRCVVEPAAGDLDNPPKKFRDCLFKVCPMNRYSAQKQYWKAKQTKQDKEKIADVVLLQKLQHAAQMEQKQNDTENKKVHGDVVKYGSVIQLLHMKSNKYLTVNKRLPALLEKNAMRVTLDATGNEGSWLFIQPFWKLRSNGDNVVVGDKVILNPVNAGQPLHASNYELSDNAGCKEVNSVNCNTSWKINLFMQFRDHLEEVLKGGDVVRLFHAEQEKFLTCDEYKGKLQVFLRTTLRQSATSATSSNALWEVEVVHHDPCRGGAGHWNGLYRFKHLATGNYLAAEENPSYKGDASDPKAAGMGAQGRTGRRNAGEKIKYCLVAVPHGNDIASLFELDPTTLQKTDSFVPRNSYVRLRHLCTNTWIQSTNVPIDIEEERPIRLMLGTCPTKEDKEAFAIVSVPVSEIRDLDFANDASSMLASAVEKLNEGFISQNDRRFVIQLLEDLVFFVSDVPNNGQNVLDIMVTKPNRERQKLMREQNILKQVFGILKAPFREKGGEGPLVRLEELSDQKNAPYQHMFRLCYRVLRHSQEDYRKNQEHIAKQFGMMQSQIGYDILAEDTITALLHNNRKLLEKHITKTEVETFVSLVRKNREPRFLDYLSDLCVSNHIAIPVTQELICKCVLDPKNSDILIRTELRPVKEMAQSHEYLSIEYSEEEVWLTWTDKNNEHHEKSVRQLAQEARAGNAHDENVLSYYRYQLKLFARMCLDRQYLAIDEISQQLGVDLIFLCMADEMLPFDLRASFCHLMLHVHVDRDPQELVTPVKFARLWTEIPTAITIKDYDSNLNASRDDKKNKFANTMEFVEDYLNNVVSEAVPFANEEKNKLTFEVVSLAHNLIYFGFYSFSELLRLTRTLLGIIDCVQGPPAMLQAYEDPGGKNVRRSIQGVGHMMSTMVLSRKQSVFSAPSLSAGASAAEPLDRSKFEENEDIVVMETKLKILEILQFILNVRLDYRISYLLSVFKKEFVEVFPMQDSGADGTAPAFDSTTANMNLDRIGEQAEAMFGVGKTSSMLEVDDEGGRMFLRVLIHLTMHDYAPLVSGALQLLFKHFSQRQEAMHTFKQVQLLISAQDVENYKVIKSELDRLRTMVEKSELWVDKKGSGKGEEVEAGAAKDKKERPTDEEGFLHPPGEKSSENYQIVKGILERLNKMCGVGEQMRKKQQRLLKNMDAHKVMLDLLQIPYDKGDAKMMEILRYTHQFLQKFCAGNPGNQALLHKHLHLFLTPGLLEAETMQHIFLNNYQLCSEISEPVLQHFVHLLATHGRHVQYLDFLHTVIKAEGKYVKKCQDMIMTELTNAGDDVVVFYNDKASLAHLLDMMKAARDGVEDHSPLMYHISLVDLLAACAEGKNVYTEIKCTSLLPLEDVVSVVTHEDCITEVKMAYVNFVNHCYVDTEVEMKEIYTSNHIWTLFENFTLDMARVCSKREKRVADPTLEKYVLSVVLDTINAFFSSPFSENSTSLQTHQTIVVQLLQSTTRLLECPWLQQQHKGSVEACIRTLAMVAKGRAILLPMDLDAHISSMLSSGASCAAAAQRNASSYKATTRAFPRVTPTANQWDYKNIIEKLQDIITALEERLKPLVQAELSVLVDVLHWPELLFLEGSEAYQRCESGGFLSKLIQHTKDLMESEEKLCIKVLRTLQQMLLKKTKYGDRGNQLRKMLLQNYLQNRKSTSRGDLPDPIGTGLDPDWSAIAATQCRLDKEGATKLVCDLITSTKNEKIFQESIGLAIHLLDGGNTEIQKSFHNLMMSDKKSERFFKVLHDRMKRAQQETKSTVAVNMNDLGSQPHEDREPVDPTTKGRVASFSIPGSSSRYSLGPSLRRGHEVSERVQSSEMGTSVLIMQPILRFLQLLCENHNRDLQNFLRCQNNKTNYNLVCETLQFLDIMCGSTTGGLGLLGLYINEDNVGLVIQTLETLTEYCQGPCHENQTCIVTHESNGIDIITALILNDISPLCKYRMDLVLQLKDNASKLLLALMESRHDSENAERILISLRPQELVDVIKKAYLQEEERENSEVSPREVGHNIYILALQLSRHNKQLQHLLKPVKQHSRGGGRGYLFHAQPQQQAAVTDAQVLSASTGGGGRPPGLL

SEQ ID NO: 825209 - protein, 1223 aa, Homo sapiens [sequence omitted]

SEQ ID NO: 825210 - protein, 1036 aa, Homo sapiens
MSEMSSFLHIGDIVSLYAEGSVNGFISTLGLVDDRCVVEPAAGDLDNPPKKFRDCLFKVCPMNRYSAQKQYWKAKQTKQDKEKIADVVLLQKLQHAAQMEQKQNDTENKKVHGDVVKYGSVIQLLHMKSNKYLTVNKRLPALLEKNAMRVTLDATGNEGSWLFIQPFWKLRSNGDNVVVGDKVILNPVNAGQPLHASNYELSDNAGCKEVNSVNCNTSWKINLFMQFRDHLEEVLKGGDVVRLFHAEQEKFLTCDEYKGKLQVFLRTTLRQSATSATSSNALWEVEVVHHDPCRGGAGHWNGLYRFKHLATGNYLAAEENPSYKGDASDPKAAGMGAQGRTGRRNAGEKIKYCLVAVPHGNDIASLFELDPTTLQKTDSFVPRNSYVRLRHLCTNTWIQSTNVPIDIEEERPIRLMLGTCPTKEDKEAFAIVSVPVSEIRDLDFANDASSMLASAVEKLNEGFISQNDRRFVIQLLEDLVFFVSDVPNNGQNVLDIMVTKPNRERQKLMREQNILKQVFGILKAPFREKGGEGPLVRLEELSDQKNAPYQHMFRLCYRVLRHSQEDYRKNQEHIAKQFGMMQSQIGYDILAEDTITALLHNNRKLLEKHITKTEVETFVSLVRKNREPRFLDYLSDLCVSNHIAIPVTQELICKCVLDPKNSDILIRTELRPVKEMAQSHEYLSIEYSEEEVWLTWTDKNNEHHEKSVRQLAQEARAGNAHDENVLSYYRYQLKLFARMCLDRQYLAIDEISQQLGVDLIFLCMADEMLPFDLRASFCHLMLHVHVDRDPQELVTPVKFARLWTEIPTAITIKDYDSNLNASRDDKKNKFANTMEFVEDYLNNVVSEAVPFANEEKNKLTFEVVSLAHNLIYFGFYSFSELLRLTRTLLGIIDCVQGPPAMLQAYEDPGGKNVRRSIQGVGHMMSTMVLSRKQSVFSAPSLSAGASAAEPLDRSKFEENEDIVVMETKLKILEILQFILNVRLDYRISYLLSVFKKEFVEVFPMQDSGADGTAPAFDSTTANMTDQSGCTNRRDPL

SEQ ID NO: 825211 - protein, 815 aa, Homo sapiens
MSEMSSFLHIGDIVSLYAEGSVNGFISTLGLVDDRCVVEPAAGDLDNPPKKFRDCLFKVCPMNRYSAQKQYWKAKQTKQDKEKIADVVLLQKLQHAAQMEQKQNDTENKKVHGDVVKYGSVIQLLHMKSNKYLTVNKRLPALLEKNAMRVTLDATGNEGSWLFIQPFWKLRSNGDNVVVGDKVILNPVNAGQPLHASNYELSDNAGCKEVNSVNCNTSWKINLFMQFRDHLEEVLKGGDVVRLFHAEQEKFLTCDEYKGKLQVFLRTTLRQSATSATSSNALWEVEVVHHDPCRGGAGHWNGLYRFKHLATGNYLAAEENPSYKGDASDPKAAGMGAQGRTGRRNAGEKIKYCLVAVPHGNDIASLFELDPTTLQKTDSFVPRNSYVRLRHLCTNTWIQSTNVPIDIEEERPIRLMLGTCPTKEDKEAFAIVSVPVSEIRDLDFANDASSMLASAVEKLNEGFISQNDRRFVIQLLEDLVFFVSDVPNNGQNVLDIMVTKPNRERQKLMREQNILKQVFGILKAPFREKGGEGPLVRLEELSDQKNAPYQHMFRLCYRVLRHSQEDYRKNQEHIAKQFGMMQSQIGYDILAEDTITALLHNNRKLLEKHITKTEVETFVSLVRKNREPRFLDYLSDLCVSNHIAIPVTQELICKCVLDPKNSDILIRTELRPVKEMAQSHEYLSIEYSEEEVWLTWTDKNNEHHEKSVRQLAQEARAGNAHDENVLSYYRYQLKLFARMCLDRQYLAIDEISQQLGVDLIFLCMADEMLPFDLRASFCHLMLHVHVDRDPQELVTPVKFARLWTEIPISNNVKIK

SEQ ID NO: 825212 - protein, 180 aa, Homo sapiens
MTWAASHMRTASQSTPPPKVRGLRQRHGVTGIPGEDVQGGGQGGGQLQPHQVSPTGRVASFSIPGSSSRYSLGPSLRRGHEVSERVQSSEMGTSVLIMQPILRFLQLLCENHNRDLQVSASPHTCPFPRWPAGMQTRQCGWCPSMAGVPCPGHCCFVAGGSPTPAAHKIVLPRPASLSVL

SEQ ID NO: 825213 - protein, 128 aa, Homo sapiens
SVRFFQPLPLYLQRGTGVGKGWEKELQAGVFSREGPEPQDESFPSPPTCPTTDCLFKVCPMNRYSAQKQYWKAKQTKQDKEKIADVVLLQKLQVCVCVQACICAHVPGTWVHKQRCCLSEPVGALWLS

SEQ ID NO: 825214 - protein, 2671 aa, Homo sapiens; identical to SEQ ID NO: 825197

SEQ ID NO: 825215 - protein, 2714 aa, Homo sapiens
MSEMSSFLHIGDIVSLYAEGSVNGFISTLGLVDDRCVVEPAAGDLDNPPKKFRDCLFKVCPMNRYSAQKQYWKAKQTKQDKEKIADVVLLQKLQHAAQMEQKQNDTENKKVHGDVVKYGSVIQLLHMKSNKYLTVNKRLPALLEKNAMRVTLDATGNEGSWLFIQPFWKLRSNGDNVVVGDKVILNPVNAGQPLHASNYELSDNAGCKEVNSVNCNTSWKINLFMQFRDHLEEVLKGGDVVRLFHAEQEKFLTCDEYKGKLQVFLRTTLRQSATSATSSNALWEVEVVHHDPCRGGAGHWNGLYRFKHLATGNYLAAEENPSYKGDASDPKAAGMGAQGRTGRRNAGEKIKYCLVAVPHGNDIASLFELDPTTLQKTDSFVPRNSYVRLRHLCTNTWIQSTNVPIDIEEERPIRLMLGTCPTKEDKEAFAIVSVPVSEIRDLDFANDASSMLASAVEKLNEGFISQNDRRFVIQLLEDLVFFVSDVPNNGQNVLDIMVTKPNRERQKLMREQNILKQVFGILKAPFREKGGEGPLVRLEELSDQKNAPYQHMFRLCYRVLRHSQEDYRKNQEHIAKQFGMMQSQIGYDILAEDTITALLHNNRKLLEKHITKTEVETFVSLVRKNREPRFLDYLSDLCVSNHIAIPVTQELICKCVLDPKNSDILIRTELRPVKEMAQSHEYLSIEYSEEEVWLTWTDKNNEHHEKSVRQLAQEARAGNAHDENVLSYYRYQLKLFARMCLDRQYLAIDEISQQLGVDLIFLCMADEMLPFDLRASFCHLMLHVHVDRDPQELVTPVKFARLWTEIPTAITIKDYDSNLNASRDDKKNKFANTMEFVEDYLNNVVSEAVPFANEEKNKLTFEVVSLAHNLIYFGFYSFSELLRLTRTLLGIIDCVQGPPAMLQAYEDPGGKNVRRSIQGVGHMMSTMVLSRKQSVFSAPSLSAGASAAEPLDRSKFEENEDIVVMETKLKILEILQFILNVRLDYRISYLLSVFKKEFVEVFPMQDSGADGTAPAFDSTTANMNLDRIGEQAEAMFGVGKTSSMLEVDDEGGRMFLRVLIHLTMHDYAPLVSGALQLLFKHFSQRQEAMHTFKQVQLLISAQDVENYKVIKSELDRLRTMVEKSELWVDKKGSGKGEEVEAGAAKDKKERPTDEEGFLHPPGEKSSENYQIVKGILERLNKMCGVGEQMRKKQQRLLKNMDAHKVMLDLLQIPYDKGDAKMMEILRYTHQFLQKFCAGNPGNQALLHKHLHLFLTPGLLEAETMQHIFLNNYQLCSEISEPVLQHFVHLLATHGRHVQYLDFLHTVIKAEGKYVKKCQDMIMTELTNAGDDVVVFYNDKASLAHLLDMMKAARDGVEDHSPLMYHISLVDLLAACAEGKNVYTEIKCTSLLPLEDVVSVVTHEDCITEVKMAYVNFVNHCYVDTEVEMKEIYTSNHIWTLFENFTLDMARVCSKREKRVADPTLEKYVLSVVLDTINAFFSSPFSENSTSLQTHQTIVVQLLQSTTRLLECPWLQQQHKGSVEACIRTLAMVAKGRAILLPMDLDAHISSMLSSGASCAAAAQRNASSYKATTRAFPRVTPTANQWDYKNIIEKLQDIITALEERLKPLVQAELSVLVDVLHWPELLFLEGSEAYQRCESGGFLSKLIQHTKDLMESEEKLCIKVLRTLQQMLLKKTKYGDRGNQLRKMLLQNYLQNRKSTSRGDLPDPIGTGLDPDWSAIAATQCRLDKEGATKLVCDLITSTKNEKIFQESIGLAIHLLDGGNTEIQVWGAWGLDMPSFASLPFWRRWALSWALKAEEGVKEERPEQWLEKSFHNLMMSDKKSERFFKVLHDRMKRAQQETKSTVAVNMNDLGSQPHEDREPVDPTTKGRVASFSIPGSSSRYSLGPSLRRGHEVSERVQSSEMGTSVLIMQPILRFLQLLCENHNRDLQNFLRCQNNKTNYNLVCETLQFLDIMCGSTTGGLGLLGLYINEDNVGLVIQTLETLTEYCQGPCHENQTCIVTHESNGIDIITALILNDISPLCKYRMDLVLQLKDNASKLLLALMESRHDSENAERILISLRPQELVDVIKKAYLQEEERENSEVSPREVGHNIYILALQLSRHNKQLQHLLKPVKRIQEEEAEGISSMLSLNNKQLSQMLKSSAPAQEEEEDPLAYYENHTSQIEIVRQDRSMEQIVFPVPGICQFLTEETKHRLFTTTEQDEQGSKVSDFFDQSSFLHNEMEWQRKLRSMPLIYWFSRRMTLWGSISFNLAVFINIIIAFFYPYMEGASTGVLDSPLISLLFWILICFSIAALFTKRYSIRPLIVALILRSIYYLGIGPTLNILGALNLTNKIVFVVSFVGNRGTFIRGYKAMVMDMEFLYHVGYILTSVLGLFAHELFYSILLFDLIYREETLFNVIKSVTRNGRSILLTALLALILVYLFSIVGFLFLKDDFILEVDRLPNNHSTASPLGMPHGAAAFVDTCSGDKMDCVSGLSVPEVLEEDRELDSTERACDTLLMCIVTVMNHGLRNGGGVGDILRKPSKDESLFPARVVYDLLFFFIVIIIVLNLIFGVIIDTFADLRSEKQKKEEILKTTCFICGLERDKFDNKTVSFEEHIKLEHNMWNYLYFIVLVRVKNKTDYTGPESYVAQMIKNKNLDWFPRMRAMSLVSNEGEGEQNEIRILQDKLNSTMKLVSHLTAQLNELKEQMTEQRKRRQRLGFVDVQNCISR

SEQ ID NO: 825216 - protein, 2604 aa, Homo sapiens
MSEMSSFLHIGDIVSLYAEGSVNGFISTLGLVDDRCVVEPAAGDLDNPPKKFRDCLFKVCPMNRYSAQKQYWKAKQTKQDKEKIADVVLLQKLQHAAQMEQKQNDTENKKVHGDVVKYGSVIQLLHMKSNKYLTVNKRLPALLEKNAMRVTLDATGNEGSWLFIQPFWKLRSNGDNVVVGDKVILNPVNAGQPLHASNYELSDNAGCKEVNSVNCNTSWKINLFMQFRDHLEEVLKGGDVVRLFHAEQEKFLTCDEYKGKLQVFLRTTLRQSATSATSSNALWEVEVVHHDPCRGGAGHWNGLYRFKHLATGNYLAAEENPSYKGDASDPKAAGMGAQGRTGRRNAGEKIKYCLVAVPHGNDIASLFELDPTTLQKTDSFVPRNSYVRLRHLCTNTWIQSTNVPIDIEEERPIRLMLGTCPTKEDKEAFAIVSVPVSEIRDLDFANDASSMLASAVEKLNEGFISQNDRRFVIQLLEDLVFFVSDVPNNGQNVLDIMVTKPNRERQKLMREQNILKQVFGILKAPFREKGGEGPLVRLEELSDQKNAPYQHMFRLCYRVLRHSQEDYRKNQEHIAKQFGMMQSQIGYDILAEDTITALLHNNRKLLEKHITKTEVETFVSLVRKNREPRFLDYLSDLCVSNHIAIPVTQELICKCVLDPKNSDILIRTELRPVKEMAQSHEYLSIEYSEEEVWLTWTDKNNEHHEKSVRQLAQEARAGNAHDENVLSYYRYQLKLFARMCLDRQYLAIDEISQQLGVDLIFLCMADEMLPFDLRASFCHLMLHVHVDRDPQELVTPVKFARLWTEIPTAITIKDYDSNLNASRDDKKNKFANTMEFVEDYLNNVVSEAVPFANEEKNKLTFEVVSLAHNLIYFGFYSFSELLRLTRTLLGIIDCVQGPPAMLQAYEDPGGKNVRRSIQGVGHMMSTMVLSRKQSVFSAPSLSAGASAAEPLDRSKFEENEDIVVMETKLKILEILQFILNVRLDYRMFLRVLIHLTMHDYAPLVSGALQLLFKHFSQRQEAMHTFKQVQLLISAQDVENYKVIKSELDRLRTMVEKSELWVDKKGSGKGEEVEAGAAKDKKERPTDEEGFLHPPGEKSSENYQIVKGILERLNKMCGVGEQMRKKQQRLLKNMDAHKVMLDLLQIPYDKGDAKMMEILRYTHQFLQKFCAGNPGNQALLHKHLHLFLTPGLLEAETMQHIFLNNYQLCSEISEPVLQHFVHLLATHGRHVQYLDFLHTVIKAEGKYVKKCQDMIMTELTNAGDDVVVFYNDKASLAHLLDMMKAARDGVEDHSPLMYHISLVDLLAACAEGKNVYTEIKCTSLLPLEDVVSVVTHEDCITEVKMAYVNFVNHCYVDTEVEMKEIYTSNHIWTLFENFTLDMARVCSKREKRVADPTLEKYVLSVVLDTINAFFSSPFSENSTSLQTHQTIVVQLLQSTTRLLECPWLQQQHKGSVEACIRTLAMVAKGRAILLPMDLDAHISSMLSSGASCAAAAQRNASSYKATTRAFPRVTPTANQWDYKNIIEKLQDIITALEERLKPLVQAELSVLVDVLHWPELLFLEGSEAYQRCESGGFLSKLIQHTKDLMESEEKLCIKVLRTLQQMLLKKTKYGDRGNQLRKMLLQNYLQNRKSTSRGDLPDPIGTGLDPDWSAIAATQCRLDKEGATKLVCDLITSTKNEKIFQESIGLAIHLLDGGNTEIQKSFHNLMMSDKKSERFFKVLHDRMKRAQQETKSTVAVNMNDLGSQPHEDREPVDPTTKGRVASFSIPGSSSRYSLGPSLRRGHEVSERVQSSEMGTSVLIMQPILRFLQLLCENHNRDLQNFLRCQNNKTNYNLVCETLQFLDIMCGSTTGGLGLLGLYINEDNVGLVIQTLETLTEYCQGPCHENQTCIVTHESNGIDIITALILNDISPLCKYRMDLVLQLKDNASKLLLALMESRHDSENAERILISLRPQELVDVIKKAYLQEEERENSEVSPREVGHNIYILALQLSRHNKQLQHLLKPVKRIQEEEAEGISSMLSLNNKQLSQMLKSSAPAQEEEEDPLAYYENHTSQIEIVRQDRSMEQIVFPVPGICQFLTEETKHRLFTTTEQDEQGSKVSDFFDQSSFLHNEMEWQRKLRSMPLIYWFSRRMTLWGSISFNLAVFINIIIAFFYPYMEGASTGVLDSPLISLLFWILICFSIAALFTKRYSIRPLIVALILRSIYYLGIGPTLNILGALNLTNKIVFVVSFVGNRGTFIRGYKAMVMDMEFLYHVGYILTSVLGLFAHELFYSILLFDLIYREETLFNVIKSVTRNGRSILLTALLALILVYLFSIVGFLFLKDDFILEVDRLPNNHSTASPLGMPHGAAAFVDTCSGDKMDCVSGLSVPEVLEEDRELDSTERACDTLLMCIVTVMNHGLRNGGGVGDILRKPSKDESLFPARVVYDLLFFFIVIIIVLNLIFGVIIDTFADLRSEKQKKEEILKTTCFICGLERDKFDNKTVSFEEHIKLEHNMWNYLYFIVLVRVKNKTDYTGPESYVAQMIKNKNLDWFPRMRAMSLVSNEGEGEQNEIRILQDKLNSTMKLVSHLTAQLNELKEQMTEQRKRRQRLGFVDVQNCISR

SEQ ID NO: 825217 - protein, 2596 aa, Homo sapiens; identical to SEQ ID NO: 825205

SEQ ID NO: 825218 - protein, 1792 aa, Homo sapiens
MHPLPPSSDQGPLCTASTTSLATSSASPSTGKNVRRSIQGVGHMMSTMVLSRKQSVFSAPSLSAGASAAEPLDRSKFEENEDIVVMETKLKILEILQFILNVRLDYRISYLLSVFKKEFVEVFPMQDSGADGTAPAFDSTTANMNLDRIGEQAEAMFGVGKTSSMLEVDDEGGRMFLRVLIHLTMHDYAPLVSGALQLLFKHFSQRQEAMHTFKQVQLLISAQDVENYKVIKSELDRLRTMVEKSELWVDKKGSGKGEEVEAGAAKDKKERPTDEEGFLHPPGEKSSENYQIVKGILERLNKMCGVGEQMRKKQQRLLKNMDAHKVMLDLLQIPYDKGDAKMMEILRYTHQFLQKFCAGNPGNQALLHKHLHLFLTPGLLEAETMQHIFLNNYQLCSEISEPVLQHFVHLLATHGRHVQYLDFLHTVIKAEGKYVKKCQDMIMTELTNAGDDVVVFYNDKASLAHLLDMMKAARDGVEDHSPLMYHISLVDLLAACAEGKNVYTEIKCTSLLPLEDVVSVVTHEDCITEVKMAYVNFVNHCYVDTEVEMKEIYTSNHIWTLFENFTLDMARVCSKREKRVADPTLEKYVLSVVLDTINAFFSSPFSENSTSLQTHQTIVVQLLQSTTRLLECPWLQQQHKGSVEACIRTLAMVAKGRAILLPMDLDAHISSMLSSGASCAAAAQRNASSYKATTRAFPRVTPTANQWDYKNIIEKLQDIITALEERLKPLVQAELSVLVDVLHWPELLFLEGSEAYQRCESGGFLSKLIQHTKDLMESEEKLCIKVLRTLQQMLLKKTKYGDRGNQLRKMLLQNYLQNRKSTSRGDLPDPIGTGLDPDWSAIAATQCRLDKEGATKLVCDLITSTKNEKIFQESIGLAIHLLDGGNTEIQKSFHNLMMSDKKSERFFKVLHDRMKRAQQETKSTVAVNMNDLGSQPHEDREPVDPTTKGRVASFSIPGSSSRYSLGPSLRRGHEVSERVQSSEMGTSVLIMQPILRFLQLLCENHNRDLQNFLRCQNNKTNYNLVCETLQFLDIMCGSTTGGLGLLGLYINEDNVGLVIQTLETLTEYCQGPCHENQTCIVTHESNGIDIITALILNDISPLCKYRMDLVLQLKDNASKLLLALMESRHDSENAERILISLRPQELVDVIKKAYLQEEERENSEVSPREVGHNIYILALQLSRHNKQLQHLLKPVKRIQEEEAEGISSMLSLNNKQLSQMLKSSAPAQEEEEDPLAYYENHTSQIEIVRQDRSMEQIVFPVPGICQFLTEETKHRLFTTTEQDEQGSKVSDFFDQSSFLHNEMEWQRKLRSMPLIYWFSRRMTLWGSISFNLAVFINIIIAFFYPYMEGASTGVLDSPLISLLFWILICFSIAALFTKRYSIRPLIVALILRSIYYLGIGPTLNILGALNLTNKIVFVVSFVGNRGTFIRGYKAMVMDMEFLYHVGYILTSVLGLFAHELFYSILLFDLIYREETLFNVIKSVTRNGRSILLTALLALILVYLFSIVGFLFLKDDFILEVDRLPNNHSTASPLGMPHGAAAFVDTCSGDKMDCVSGLSVPEVLEEDRELDSTERACDTLLMCIVTVMNHGLRNGGGVGDILRKPSKDESLFPARVVYDLLFFFIVIIIVLNLIFGVIIDTFADLRSEKQKKEEILKTTCFICGLERDKFDNKTVSFEEHIKLEHNMWNYLYFIVLVRVKNKTDYTGPESYVAQMIKNKNLDWFPRMRAMSLVSNEGEGEQNEIRILQDKLNSTMKLVSHLTAQLNELKEQMTEQRKRRQRLGFVDVQNCISR

SEQ ID NO: 825219 - protein, 562 aa, Homo sapiens
APGESAEDENHTSQIEIVRQDRSMEQIVFPVPGICQFLTEETKHRLFTTTEQDEQGSKVSDFFDQSSFLHNEMEWQRKLRSMPLIYWFSRRMTLWGSISFNLAVFINIIIAFFYPYMEGASTGVLDSPLISLLFWILICFSIAALFTKRYSIRPLIVALILRSIYYLGIGPTLNILGALNLTNKIVFVVSFVGNRGTFIRGYKAMVMDMEFLYHVGYILTSVLGLFAHELFYSILLFDLIYREETLFNVIKSVTRNGRSILLTALLALILVYLFSIVGFLFLKDDFILEVDRLPNNHSTASPLGMPHGAAAFVDTCSGDKMDCVSGLSVPEVLEEDRELDSTERACDTLLMCIVTVMNHGLRNGGGVGDILRKPSKDESLFPARVVYDLLFFFIVIIIVLNLIFGVIIDTFADLRSEKQKKEEILKTTCFICGLERDKFDNKTVSFEEHIKLEHNMWNYLYFIVLVRVKNKTDYTGPESYVAQMIKNKNLDWFPRMRAMSLVSNEGEGEQNEIRILQDKLNSTMKLVSHLTAQLNELKEQMTEQRKRRQRLGFVDVQNCISR

SEQ ID NO: 825220 - protein, 2661 aa, Homo sapiens
MSEMSSFLHIGDIVSLYAEGSVNGFISTLGLVDDRCVVEPAAGDLDNPPKKFRDCLFKVCPMNRYSAQKQYWKAKQTKQDKEKIADVVLLQKLQHAAQMEQKQNDTENKKVHGDVVKYGSVIQLLHMKSNKYLTVNKRLPALLEKNAMRVTLDATGNEGSWLFIQPFWKLRSNGDNVVVGDKVILNPVNAGQPLHASNYELSDNAGCKEVNSVNCNTSWKINLFMQFRDHLEEVLKGGDVVRLFHAEQEKFLTCDEYKGKLQVFLRTTLRQSATSATSSNALWEVEVVHHDPCRGGAGHWNGLYRFKHLATGNYLAAEENPSYKGDASDPKAAGMGAQGRTGRRNAGEKIKYCLVAVPHGNDIASLFELDPTTLQKTDSFVPRNSYVRLRHLCTNTWIQSTNVPIDIEEERPIRLMLGTCPTKEDKEAFAIVSVPVSEIRDLDFANDASSMLASAVEKLNEGFISQNDRRFVIQLLEDLVFFVSDVPNNGQNVLDIMVTKPNRERQKLMREQNILKQVFGILKAPFREKGGEGPLVRLEELSDQKNAPYQHMFRLCYRVLRHSQEDYRKNQEHIAKQFGMMQSQIGYDILAEDTITALLHNNRKLLEKHITKTEVETFVSLVRKNREPRFLDYLSDLCVSNHIAIPVTQELICKCVLDPKNSDILIRTELRPVKEMAQSHEYLSIEYSEEEVWLTWTDKNNEHHEKSVRQLAQEARAGNAHDENVLSYYRYQLKLFARMCLDRQYLAIDEISQQLGVDLIFLCMADEMLPFDLRASFCHLMLHVHVDRDPQELVTPVKFARLWTEIPTAITIKDYDSNLNASRDDKKNKFANTMEFVEDYLNNVVSEAVPFANEEKNKLTFEVVSLAHNLIYFGFYSFSELLRLTRTLLGIIDCVQGPPAMLQAYEDPGGKNVRRSIQGVGHMMSTMVLSRKQSVFSAPSLSAGASAAEPLDRSKFEENEDIVVMETKLKILEILQFILNVRLDYRISYLLSVFKKEFVEVFPMQDSGADGTAPAFDSTTANMNLDRIGEQAEAMFGVGKTSSMLEVDDEGGRMFLRVLIHLTMHDYAPLVSGALQLLFKHFSQRQEAMHTFKQVQLLISAQDVENYKVIKSELDRLRTMVEKSELWVDKKGSGKGEEVEAGAAKDKKERPTDEEGFLHPPGEKSSENYQIVKGILERLNKMCGVGEQMRKKQQRLLKNMDAHKVMLDLLQIPYDKGDAKMMEILRYTHQFLQKFCAGNPGNQALLHKHLHLFLTPGLLEAETMQHIFLNNYQLCSEISEPVLQHFVHLLATHGRHVQYLDFLHTVIKAEGKYVKKCQDMIMTELTNAGDDVVVFYNDKASLAHLLDMMKAARDGVEDHSPLMYHISLVDLLAACAEGKNVYTEIKCTSLLPLEDVVSVVTHEDCITEVKMAYVNFVNHCYVDTEVEMKEIYTSNHIWTLFENFTLDMARVCSKREKRVADPTLEKYVLSVVLDTINAFFSSPFSENSTSLQTHQTIVVQLLQSTTRLLECPWLQQQHKGSVEACIRTLAMVAKGRAILLPMDLDAHISSMLSSGASCAAAAQRNASSYKATTRAFPRVTPTANQWDYKNIIEKLQDIITALEERLKPLVQAELSVLVDVLHWPELLFLEGSEAYQRCESGGFLSKLIQHTKDLMESEEKLCIKVLRTLQQMLLKKTKYGDRGNQLRKMLLQNYLQNRKSTSRGDLPDPIGTGLDPDWSAIAATQCRLDKEGATKLVCDLITSTKNEKIFQESIGLAIHLLDGGNTEIQKSFHNLMMSDKKSERFFKVLHDRMKRAQQETKSTVAVNMNDLGSQPHEDREPVDPTTKGRVASFSIPGSSSRYSLGPSLRRGHEVSERVQSSEMGTSVLIMQPILRFLQLLCENHNRDLQNFLRCQNNKTNYNLVCETLQFLDIMCGSTTGGLGLLGLYINEDNVGLVIQTLETLTEYCQGPCHENQTCIVTHESNGIDIITALILNDISPLCKYRMDLVLQLKDNASKLLLALMESRHDSENAERILISLRPQELVDVIKKAYLQEEERENSEVSPREVGHNIYILALQLSRHNKQLQHLLKPVKRIQEEEAEGISSMLSLNNKQLSQMLKSSAPAQEEEEDPLAYYENHTSQIEIVRQDRSMEQIVFPVPGICQFLTEETKHRLFTTTEQDEQGSKVSDFFDQSSFLHNEMEWQRKLRSMPLIYWFSRRMTLWGSISFNLAVFINIIIAFFYPYMEGASTGVLDSPLISLLFWILICFSIAALFTKRYSIRPLIVALILRSIYYLGIGPTLNILGALNLTNKIVFVVSFVGNRGTFIRGYKAMVMDMEFLYHVGYILTSVLGLFAHELFYSILLFDLIYREETLFNVIKSVTRNGRSILLTALLALILVYLFSIVGFLFLKDDFILEVDRLPNNHSTASPLGMPHGAAAFVDTCSGDKMDCVSGLSVPEVLEEDRELDSTERACDTLLMCIVTVMNHGLRNGGGVGDILRKPSKDESLFPARVVYDLLFFFIVIIIVLNLIFGVIIDTFADLRSEKQKKEEILKTTCFICGLERDKFDNKTVSFEEHIKLEHNMWNYLYFIVLVRVKNKTDYTGPESYVAQMIKNKNLDWFPRMRAMSLVSNEGEGEQNEIRILQDKLKPSVAWFPLLRHLLLELVELGTEVGHQLHGGG

SEQ ID NO: 825221 - protein, 140 aa, Homo sapiens [sequence omitted]

SEQ ID NO: 825222 - protein, 2310 aa, Homo sapiens
MSEMSSFLHIGDIVSLYAEGSVNGFISTLGLVDDRCVVEPAAGDLDNPPKKFRDCLFKVCPMNRYSAQKQYWKAKQTKQDKEKIADVVLLQKLQHAAQMEQKQNDTENKKVHGDVVKYGSVIQLLHMKSNKYLTVNKRLPALLEKNAMRVTLDATGNEGSWLFIQPFWKLRSNGDNVVVGDKVILNPVNAGQPLHASNYELSDNAGCKEVNSVNCNTSWKINLFMQFRDHLEEVLKGGDVVRLFHAEQEKFLTCDEYKGKLQVFLRTTLRQSATSATSSNALWEVEVVHHDPCRGGAGHWNGLYRFKHLATGNYLAAEENPSYKGDASDPKAAGMGAQGRTGRRNAGEKIKYCLVAVPHGNDIASLFELDPTTLQKTDSFVPRNSYVRLRHLCTNTWIQSTNVPIDIEEERPIRLMLGTCPTKEDKEAFAIVSVPVSEIRDLDFANDASSMLASAVEKLNEGFISQNDRRFVIQLLEDLVFFVSDVPNNGQNVLDIMVTKPNRERQKLMREQNILKQVFGILKAPFREKGGEGPLVRLEELSDQKNAPYQHMFRLCYRVLRHSQEDYRKNQEHIAKQFGMMQSQIGYDILAEDTITALLHNNRKLLEKHITKTEVETFVSLVRKNREPRFLDYLSDLCVSNHIAIPVTQELICKCVLDPKNSDILIRTELRPVKEMAQSHEYLSIEYSEEEVWLTWTDKNNEHHEKSVRQLAQEARAGNAHDENVLSYYRYQLKLFARMCLDRQYLAIDEISQQLGVDLIFLCMADEMLPFDLRASFCHLMLHVHVDRDPQELVTPVKFARLWTEIPTAITIKDYDSNLNASRDDKKNKFANTMEFVEDYLNNVVSEAVPFANEEKNKLTFEVVSLAHNLIYFGFYSFSELLRLTRTLLGIIDCVQGPPAMLQAYEDPGGKNVRRSIQGVGHMMSTMVLSRKQSVFSAPSLSAGASAAEPLDRSKFEENEDIVVMETKLKILEILQFILNVRLDYRISYLLSVFKKEFVEVFPMQDSGADGTAPAFDSTTANMNLDRIGEQAEAMFGVGKTSSMLEVDDEGGRMFLRVLIHLTMHDYAPLVSGALQLLFKHFSQRQEAMHTFKQVQLLISAQDVENYKVIKSELDRLRTMVEKSELWVDKKGSGKGEEVEAGAAKDKKERPTDEEGFLHPPGEKSSENYQIVKGILERLNKMCGVGEQMRKKQQRLLKNMDAHKVMLDLLQIPYDKGDAKMMEILRYTHQFLQKFCAGNPGNQALLHKHLHLFLTPGLLEAETMQHIFLNNYQLCSEISEPVLQHFVHLLATHGRHVQYLDFLHTVIKAEGKYVKKCQDMIMTELTNAGDDVVVFYNDKASLAHLLDMMKAARDGVEDHSPLMYHISLVDLLAACAEGKNVYTEIKCTSLLPLEDVVSVVTHEDCITEVKMAYVNFVNHCYVDTEVEMKEIYTSNHIWTLFENFTLDMARVCSKREKRVADPTLEKYVLSVVLDTINAFFSSPFSENSTSLQTHQTIVVQLLQSTTRLLECPWLQQQHKGSVEACIRTLAMVAKGRAILLPMDLDAHISSMLSSGASCAAAAQRNASSYKATTRAFPRVTPTANQWDYKNIIEKLQDIITALEERLKPLVQAELSVLVDVLHWPELLFLEGSEAYQRCESGGFLSKLIQHTKDLMESEEKLCIKVLRTLQQMLLKKTKYGDRGNQLRKMLLQNYLQNRKSTSRGDLPDPIGTGLDPDWSAIAATQCRLDKEGATKLVCDLITSTKNEKIFQESIGLAIHLLDGGNTEIQKSFHNLMMSDKKSERFFKVLHDRMKRAQQETKSTVAVNMNDLGSQPHEDREPVDPTTKGRVASFSIPGSSSRYSLGPSLRRGHEVSERVQSSEMGTSVLIMQPILRFLQLLCENHNRDLQNFLRCQNNKTNYNLVCETLQFLDIMCGSTTGGLGLLGLYINEDNVGLVIQTLETLTEYCQGPCHENQTCIVTHESNGIDIITALILNDISPLCKYRMDLVLQLKDNASKLLLALMESRHDSENAERILISLRPQELVDVIKKAYLQEEERENSEVSPREVGHNIYILALQLSRHNKQLQHLLKPVKRIQEEEAEGISSMLSLNNKQLSQMLKSSAPAQEEEEDPLAYYENHTSQIEIVRQDRSMEQIVFPVPGICQFLTEETKHRLFTTTEQDEQGSKVSDFFDQSSFLHNEMEWQRKLRSMPLIYWFSRRMTLWGSISFNLAVFINIIIAFFYPYMEGASTGVLDSPLISLLFWILICFSIAALFTKRYSIRPLIVALILRSIYYLGIGPTLNILGALNANKIVFVVSLRAPRMLSVGPM

SEQ ID NO: 825223 - protein, 1898 aa, Homo sapiens
MSEMSSFLHIGDIVSLYAEGSVNGFISTLGLVDDRCVVEPAAGDLDNPPKKFRDCLFKVCPMNRYSAQKQYWKAKQTKQDKEKIADVVLLQKLQHAAQMEQKQNDTENKKVHGDVVKYGSVIQLLHMKSNKYLTVNKRLPALLEKNAMRVTLDATGNEGSWLFIQPFWKLRSNGDNVVVGDKVILNPVNAGQPLHASNYELSDNAGCKEVNSVNCNTSWKINLFMQFRDHLEEVLKGGDVVRLFHAEQEKFLTCDEYKGKLQVFLRTTLRQSATSATSSNALWEVEVVHHDPCRGGAGHWNGLYRFKHLATGNYLAAEENPSYKGDASDPKAAGMGAQGRTGRRNAGEKIKYCLVAVPHGNDIASLFELDPTTLQKTDSFVPRNSYVRLRHLCTNTWIQSTNVPIDIEEERPIRLMLGTCPTKEDKEAFAIVSVPVSEIRDLDFANDASSMLASAVEKLNEGFISQNDRRFVIQLLEDLVFFVSDVPNNGQNVLDIMVTKPNRERQKLMREQNILKQVFGILKAPFREKGGEGPLVRLEELSDQKNAPYQHMFRLCYRVLRHSQEDYRKNQEHIAKQFGMMQSQIGYDILAEDTITALLHNNRKLLEKHITKTEVETFVSLVRKNREPRFLDYLSDLCVSNHIAIPVTQELICKCVLDPKNSDILIRTELRPVKEMAQSHEYLSIEYSEEEVWLTWTDKNNEHHEKSVRQLAQEARAGNAHDENVLSYYRYQLKLFARMCLDRQYLAIDEISQQLGVDLIFLCMADEMLPFDLRASFCHLMLHVHVDRDPQELVTPVKFARLWTEIPTAITIKDYDSNLNASRDDKKNKFANTMEFVEDYLNNVVSEAVPFANEEKNKLTFEVVSLAHNLIYFGFYSFSELLRLTRTLLGIIDCVQGPPAMLQAYEDPGGKNVRRSIQGVGHMMSTMVLSRKQSVFSAPSLSAGASAAEPLDRSKFEENEDIVVMETKLKILEILQFILNVRLDYRISYLLSVFKKEFVEVFPMQDSGADGTAPAFDSTTANMNLDRIGEQAEAMFGVGKTSSMLEVDDEGGRMFLRVLIHLTMHDYAPLVSGALQLLFKHFSQRQEAMHTFKQVQLLISAQDVENYKVIKSELDRLRTMVEKSELWVDKKGSGKGEEVEAGAAKDKKERPTDEEGFLHPPGEKSSENYQIVKGILERLNKMCGVGEQMRKKQQRLLKNMDAHKVMLDLLQIPYDKGDAKMMEILRYTHQFLQKFCAGNPGNQALLHKHLHLFLTPGLLEAETMQHIFLNNYQLCSEISEPVLQHFVHLLATHGRHVQYLDFLHTVIKAEGKYVKKCQDMIMTELTNAGDDVVVFYNDKASLAHLLDMMKAARDGVEDHSPLMYHISLVDLLAACAEGKNVYTEIKCTSLLPLEDVVSVVTHEDCITEVKMAYVNFVNHCYVDTEVEMKEIYTSNHIWTLFENFTLDMARVCSKREKRVADPTLEKYVLSVVLDTINAFFSSPFSENSTSLQTHQTIVVQLLQSTTRLLECPWLQQQHKGSVEACIRTLAMVAKGRAILLPMDLDAHISSMLSSGASCAAAAQRNASSYKATTRAFPRVTPTANQWDYKNIIEKLQDIITALEERLKPLVQAELSVLVDVLHWPELLFLEGSEAYQRCESGGFLSKLIQHTKDLMESEEKLCIKVLRTLQQMLLKKTKYGDRGNQLRKMLLQNYLQNRKSTSRGDLPDPIGTGLDPDWSAIAATQCRLDKEGATKLVCDLITSTKNEKIFQESIGLAIHLLDGGNTEIQVWGAWGLDMPSFASLPFWRRWALSWALKAEEGVKEERPEQWLEKSFHNLMMSDKKSERFFKVLHDRMKRAQQETKSTVAVNMNDLGSQPHEDREPVDPTTKASPAQSLSYSPTDLHPHYYSAKKLNYDG

SEQ ID NO: 825224 - protein, 1198 aa, Homo sapiens
MSEMSSFLHIGDIVSLYAEGSVNGFISTLGLVDDRCVVEPAAGDLDNPPKKFRDCLFKVCPMNRYSAQKQYWKAKQTKQDKEKIADVVLLQKLQHAAQMEQKQNDTENKKVHGDVVKYGSVIQLLHMKSNKYLTVNKRLPALLEKNAMRVTLDATGNEGSWLFIQPFWKLRSNGDNVVVGDKVILNPVNAGQPLHASNYELSDNAGCKEVNSVNCNTSWKINLFMQFRDHLEEVLKGGDVVRLFHAEQEKFLTCDEYKGKLQVFLRTTLRQSATSATSSNALWEVEVVHHDPCRGGAGHWNGLYRFKHLATGNYLAAEENPSYKGDASDPKAAGMGAQGRTGRRNAGEKIKYCLVAVPHGNDIASLFELDPTTLQKTDSFVPRNSYVRLRHLCTNTWIQSTNVPIDIEEERPIRLMLGTCPTKEDKEAFAIVSVPVSEIRDLDFANDASSMLASAVEKLNEGFISQNDRRFVIQLLEDLVFFVSDVPNNGQNVLDIMVTKPNRERQKLMREQNILKQVFGILKAPFREKGGEGPLVRLEELSDQKNAPYQHMFRLCYRVLRHSQEDYRKNQEHIAKQFGMMQSQIGYDILAEDTITALLHNNRKLLEKHITKTEVETFVSLVRKNREPRFLDYLSDLCVSNHIAIPVTQELICKCVLDPKNSDILIRTELRPVKEMAQSHEYLSIEYSEEEVWLTWTDKNNEHHEKSVRQLAQEARAGNAHDENVLSYYRYQLKLFARMCLDRQYLAIDEISQQLGVDLIFLCMADEMLPFDLRASFCHLMLHVHVDRDPQELVTPVKFARLWTEIPTAITIKDYDSNLNASRDDKKNKFANTMEFVEDYLNNVVSEAVPFANEEKNKLTFEVVSLAHNLIYFGFYSFSELLRLTRTLLGIIDCVQGPPAMLQAYEDPGGKNVRRSIQGVGHMMSTMVLSRKQSVFSAPSLSAGASAAEPLDRSKFEENEDIVVMETKLKILEILQFILNVRLDYRISYLLSVFKKEFVEVFPMQDSGADGTAPAFDSTTANMNLDRIGEQAEAMFGVGKTSSMLEVDDEGGRMFLRVLIHLTMHDYAPLVSGALQLLFKHFSQRQEAMHTFKQVQLLISAQDVENYKVIKSELDRLRTMVEKSELWVDKKGSGKGEEVEAGAAKDKKERPTDEEGFLHPPGEKSSENYQIVKGILERAVLDVQCVGETMRKLTATDH

SEQ ID NO: 825225 - protein, 399 aa, Homo sapiens
MSEMSSFLHIGDIVSLYAEGSVNGFISTLGLVDDRCVVEPAAGDLDNPPKKFRDCLFKVCPMNRYSAQKQYWKAKQTKQDKEKIADVVLLQKLQHAAQMEQKQNDTENKKVHGDVVKYGSVIQLLHMKSNKYLTVNKRLPALLEKNAMRVTLDATGNEGSWLFIQPFWKLRSNGDNVVVGDKVILNPVNAGQPLHASNYELSDNAGCKEVNSVNCNTSWKINLFMQFRDHLEEVLKGGDVVRLFHAEQEKFLTCDEYKGKLQVFLRTTLRQSATSATSSNALWEVEVENVMVWTVGVCRHSVERKGEVLLIPQNGFWTLEMFGNPYRALSSPERILPLKESLCRVGVFLDYEAGDVSFYNMRDRSHIYTCPRSAFTVPVRPFFRLGSDDSPIFICPALT

SEQ ID NO: 825226 - protein, 105 aa, Homo sapiens
MVASEGSVSPPMPILIGPWFLDLGLPRVGAWAAAAGSVTSCRHTRRLWCSCCSLPHASSSVRGYSSSTRAPWRPASGPSPWWVSVPGHWPAPNHSSCRSQWGRLP

SEQ ID NO: 825227 - protein, 1265 aa, Homo sapiens
REATPPLRGLPAPPRHAPFPAGRFEPPRTKQGGRGSHTPWVYVINDLGIEENLKNDGKPKCQTGGKSKRTIQGTHKTTKQSTAVDCKITSSTTGDKHFDKSPTKTRHPRKIDLRARYWAFLFDNLRRAVDEIYVTCESDQSVVECKEVLMMLDNYVRDFKALIDWIQLQEKLEKTDAQSRPTSLAWEVKKMSPGRHVIPSPSTDRINVTSNARRSLNFGGSTGTVPAPRLAPTGVSWADKVKAHHTGSTASSEITPAQSCPPMTVQKASRKNERKDAEGWETVQRGRPIRSRSTAVMPKVSLATEATRSKDDSDKENVCLLPDESIQKGQFVGDGTSNTIESHPKDSLHSCDHPLAEKTQFTVSTLDDVKNSGSIRDNYVRTSEISAVHIDTECVSVMLQAGTPPLQVNEEKFPAEKARIENEMDPSDISNVSAANLSMAEVLAKKEELADRLEKANEEAIASAIAEEEQLTREIEAEENNDINIETDNDSDFSASMGSGSVSFCGMSMDWNDVLADYEARESWRQNTSWGDIVEEEPARPPGHGIHMHEKLSSPSRKRTIAESKKKHEEKQMKAQQLREKLREEKTLKLQKLLEREKDVRKWKEELLDQRRRMMEEKLLHAEFKREVQLQAIVKKAQEEEAKVNEIAFINTLEAQNKRHDVLSKLKEYEQRLNELQEERQRRQEEKQARDEAVQERKRALEAERQARVEELLMKRKEQEARIEQQRQEKEKAREDAARERARDREERLAALTAAQQEAMEELQKKIQLKHDESIRRHMEQIEQRKEKAAELSSGRHANTDYAPKLTPYERKKQCSLCNVLISSEVYLFSHVKGRKHQQAVRENTSIQGRELSDEEVEHLSLKKYIIDIVVESTAPAEALKDGEERQKNKKKAKKIKARMNFRAKEYESLMETKNSGSDSPYKAKLQRLAKDLLKQVQVQDSGSWANNKVSALDRTLGEITRILEKENVADQIAFQAAGGLTALEHILQAVVPATNVNTVLRIPPKSLCNAINVYNLTCNNCSENCSDVLFSNKITFLMDLLIHQLTVYVPDENNTILGRNTNKQVFEGLTTGLLKVSAVVLGCLIANRPDGNCQPATPKIPTQEMKNKPSQGDPFNNRVQDLISYVVNMGLIDKLCACFLSVQGPVDENPKMAIFLQHAAGLLHAMCTLCFAVTGRSYSIFDNNRQDPTGLTAALQATDLAGVLHMLYCVLFHGTILDPSTASPKENYTQNTIQVAIQSLRFFNSFAALHLPAFQVPSIGLYRC

SEQ ID NO: 825228 - protein, 1153 aa, Homo sapiens
MTVQKASRKNERKDAEGWETVQRGRPIRSRSTAVMPKVSLATEATRSKDDSDKENVCLLPDESIQKGQFVGDGTSNTIESHPKDSLHSCDHPLAEKTQFTVSTLDDVKNSGSIRDNYVRTSEISAVHIDTECVSVMLQAGTPPLQVNEEKFPAEKARIENEMDPSDISNSMAEVLAKKEELADRLEKANEEAIASAIAEEEQLTREIEAEENNDINIETDNDSDFSASMGSGSVSFCGMSMDWNDVLADYEARESWRQNTSWGDIVEEEPARPPGHGIHMHEKLSSPSRKRTIAESKKKHEEKQMKAQQLREKLREEKTLKLQKLLEREKDVRKWKEELLDQRRRMMEEKLLHAEFKREVQLQAIVKKAQEEEAKVNEIAFINTLEAQNKRHDVLSKLKEYEQRLNELQEERQRRQEEKQARDEAVQERKRALEAERQARVEELLMKRKEQEARIEQQRQEKEKAREDAARERARDREERLAALTAAQQEAMEELQKKIQLKHDESIRRHMEQIEQRKEKAAELSSGRHANTDYAPKLTPYERKKQCSLCNVLISSEVYLFSHVKGRKHQQAVRENTSIQGRELSDEEVEHLSLKKYIIDIVVESTAPAEALKDGEERQKNKKKAKKIKARMNFRAKEYESLMETKNSGSDSPYKAKLQRLAKDLLKQVQVQDSGSWANNKVSALDRTLGEITRILEKENVADQIAFQAAGGLTALEHILQAVVPATNVNTVLRIPPKSLCNAINVYNLTCNNCSENCSDVLFSNKITFLMDLLIHQLTVYVPDENNTILGRNTNKQVFEGLTTGLLKVSAVVLGCLIANRPDGNCQPATPKIPTQEMKNKPSQGDPFNNRVQDLISYVVNMGLIDKLCACFLSVQGPVDENPKMAIFLQHAAGLLHAMCTLCFAVTGRSYSIFDNNRQDPTGLTAALQATDLAGVLHMLYCVLFHGTILDPSTASPKENYTQNTIQVAIQSLRFFNSFAALHLPAFQSIVGAEGLSLAFRHMASSLLGHCSQVSCESLLHEVIVCVGYFTVNHPDNQVIVQSGRHPTVLQKLCQLPFQYFSDPRLIKVLFPSLIAACYNNHQNKIILEQEMSCVLLATFIQDLAQTPGQAENQPYQPKGKCLGSQDYLELANRFPQQAWEEARQFFLKKEKK

SEQ ID NO: 825229 - protein, 1381 aa, Homo sapiens
MASFQRSNSHDKVRRIVAEEGRTARNLIAWSVPLESKDDDGKPKCQTGGKSKRTIQGTHKTTKQSTAVDCKITSSTTGDKHFDKSPTKTRHPRKIDLRARYWAFLFDNLRRAVDEIYVTCESDQSVVECKEVLMMLDNYVRDFKALIDWIQLQEKLEKTDAQSRPTSLAWEVKKMSPGRHVIPSPSTDRINVTSNARRSLNFGGSTGTVPAPRLAPTGVSWADKVKAHHTGSTASSEITPAQSCPPMTVQKASRKNERKDAEGWETVQRGRPIRSRSTAVMPKVSLATEATRSKDDSDKENVCLLPDESIQKGQFVGDGTSNTIESHPKDSLHSCDHPLAEKTQFTVSTLDDVKNSGSIRDNYVRTSEISAVHIDTECVSVMLQAGTPPLQVNEEKFPAEKARIENEMDPSDISNSMAEVLAKKEELADRLEKANEEAIASAIAEEEQLTREIEAEENNDINIETDNDSDFSASMGSGSVSFCGMSMDWNDVLADYEARESWRQNTSWGDIVEEEPARPPGHGIHMHEKLSSPSRKRTIAESKKKHEEKQMKAQQLREKLREEKTLKLQKLLEREKDVRKWKEELLDQRRRMMEEKLLHAEFKREVQLQAIVKKAQEEEAKVNEIAFINTLEAQNKRHDVLSKLKEYEQRLNELQEERQRRQEEKQARDEAVQERKRALEAERQARVEELLMKRKEQEARIEQQRQEKEKAREDAARERARDREERLAALTAAQQEAMEELQKKIQLKHDESIRRHMEQIEQRKEKAAELSSGRHANTDYAPKLTPYESSHVKGRKHQQAVRENTSIQGRELSDEEVEHLSLKKYIIDIVVESTAPAEALKDGEERQKNKKKAKKIKARMNFRAKEYESLMETKNSGSDSPYKAKLQRLAKDLLKQVQVQDSGSWANNKVSALDRTLGEITRILEKENVADQIAFQAAGGLTALEHILQAVVPATNVNTVLRIPPKSLCNAINVYNLTCNNCSENCSDVLFSNKITFLMDLLIHQLTVYVPDENNTILGRNTNKQVFEGLTTGLLKVSAVVLGCLIANRPDGNCQPATPKIPTQEMKNKPSQGDPFNNRVQDLISYVVNMGLIDKLCACFLSVQGPVDENPKMAIFLQHAAGLLHAMCTLCFAVTGRSYSIFDNNRQDPTGLTAALQATDLAGVLHMLYCVLFHGTILDPSTASPKENYTQNTIQVAIQSLRFFNSFAALHLPAFQSIVGAEGLSLAFRHMASSLLGHCSQVSCESLLHEVIVCVGYFTVNHPDNQVIVQSGRHPTVLQKLCQLPFQYFSDPRLIKVLFPSLIAACYNNHQNKIILEQEMSCVLLATFIQDLAQTPGQAENQPYQPKGKCLGSQDYLELANRFPQQAWEEARQFFLKKEKK

SEQ ID NO: 825230 - protein, 1271 aa, Homo sapiens
MASFQRSNSHDKVRRIVAEEGRTARNLIAWSVPLESKDDDGKPKCQTGGKSKRTIQGTHKTTKQSTAVDCKITSSTTGDKHFDKSPTKTRHPRKIDLRARYWAFLFDNLRRAVDEIYVTCESDQSVVECKEVLMMLDNYVRDFKALIDWIQLQEKLEKTDAQSRPTSLAWEVKKMSPGRHVIPSPSTDRINVTSNARRSLNFGGSTGTVPAPRLAPTGVSWADKVKAHHTGSTASSEITPAQSCPPMTVQKASRKNERKDAEGWETVQRGRPIRSRSTAVMPKVSLATEATRSKDDSDKENVCLLPDESIQKGQFVGDGTSNTIESHPKDSLHSCDHPLAEKTQFTVSTLDDVKNSGSIRDNYVRTSEISAVHIDTECVSVMLQAGTPPLQVNEEKFPAEKARIENEMDPSDISNSMAEVLAKKEELADRLEKANEEAIASAIAEEEQLTREIEAEENNDINIETDNDSDFSASMGSGSVSFCGMSMDWNDVLADYEARESWRQNTSWGDIVEEEPARPPGHGIHMHEKLSSPSRKRTIAESKKKHEEKQMKAQQLREKLREEKTLKLQKLLEREKDVRKWKEELLDQRRRMMEEKLLHAEFKREVQLQAIVKKAQEEEAKVNEIAFINTLEAQNKRHDVLSKLKEYEQRLNELQEERQRRQEEKQARDEAVQERKRALEAERQARVEELLMKRKEQEARIEQQRQEKEKAREDAARERARDREERLAALTAAQQEAMEELQKKIQLKHDESIRRHMEQIEQRKEKAAELSSGRHANTDYAPKLTPYERKKQCSLCNVLISSEVYLFSHVKGRKHQQAVRENTSIQGRELSDEEVEHLSLKKYIIDIVVESTAPAEALKDGEERQKNKKKAKKIKARMNFRAKEYESLMETKNSGSDSPYKAKLQRLAKDLLKQVQVQDSGSWANNKVSALDRTLGEITRILEKENVADQIAFQAAGGLTALEHILQAVVPATNVNTVLRIPPKSLCNAINVYNLTCNNCSENCSDVLFSNKITFLMDLLIHQLTVYVPDENNTILGRNTNKQVFEGLTTGLLKVSAVVLGCLIANRPDGNCQPATPKIPTQEMKNKPSQGDPFNNRVQDLISYVVNMGLIDKLCACFLSVQGPVDENPKMAIFLQHAAGLLHAMCTLCFAVTGRSYSIFDNNRQDPTGLTAALQATDLAGVLHMLYCVLFHGTILDPSTASPKENYTQNTIQVAIQSLRFFNSFAALHLPAFQSIVGAEGLSLAFRHMASSLLGHCSQVSCESLLHEVIV

SEQ ID NO: 825231 - protein, 1399 aa, Homo sapiens
MASFQRSNSHDKVRRIVAEEGRTARNLIAWSVPLESKDDDGKPKCQTGGKSKRTIQGTHKTTKQSTAVDCKITSSTTGDKHFDKSPTKTRHPRKIDLRARYWAFLFDNLRRAVDEIYVTCESDQSVVECKEVLMMLDNYVRDFKALIDWIQLQEKLEKTDAQSRPTSLAWEVKKMSPGRHVIPSPSTDRINVTSNARRSLNFGGSTGTVPAPRLAPTGVSWADKVKAHHTGSTASSEITPAQSCPPMTVQKASRKNERKDAEGWETVQRGRPIRSRSTAVMPKVSLATEATRSKDDSDKENVCLLPDESIQKGQFVGDGTSNTIESHPKDSLHSCDHPLAEKTQFTVSTLDDVKNSGSIRDNYVRTSEISAVHIDTECVSVMLQAGTPPLQVNEEKFPAEKARIENEMDPSDISNSMAEVLAKKEELADRLEKANEEAIASAIAEEEQLTREIEAEENNDINIETDNDSDFSASMGSGSVSFCGMSMDWNDVLADYEARESWRQNTSWGDIVEEEPARPPGHGIHMHEKLSSPSRKRTIAESKKKHEEKQMKAQQLREKLREEKTLKLQKLLEREKDVRKWKEELLDQRRRMMEEKLLHAEFKREVQLQAIVKKAQEEEAKVNEIAFINTLEAQNKRHDVLSKLKEYEQRLNELQEERQRRQEEKQARDEAVQERKRALEAERQARVEELLMKRKEQEARIEQQRQEKEKAREDAARERARDREERLAALTAAQQEAMEELQKKIQLKHDESIRRHMEQIEQRKEKAAELSSGRHANTDYAPKLTPYERKKQCSLCNVLISSEVYLFSHVKGRKHQQAVRENTSIQGRELSDEEVEHLSLKKYIIDIVVESTAPAEALKDGEERQKNKKKAKKIKARMNFRAKEYESLMETKNSGSDSPYKAKLQRLAKDLLKQVQVQDSGSWANNKVSALDRTLGEITRILEKENVADQIAFQAAGGLTALEHILQAVVPATNVNTVLRIPPKSLCNAINVYNLTCNNCSENCSDVLFSNKITFLMDLLIHQLTVYVPDENNTILGRNTNKQVFEGLTTGLLKVSAVVLGCLIANRPDGNCQPATPKIPTQEMKNKPSQGDPFNNRVQDLISYVVNMGLIDKLCACFLSVQGPVDENPKMAIFLQHAAGLLHAMCTLCFAVTGRSYSIFDNNRQDPTGLTAALQATDLAGVLHMLYCVLFHGTILDPSTASPKENYTQNTIQVAIQSLRFFNSFAALHLPAFQSIVGAEGLSLAFRHMASSLLGHCSQVSCESLLHEVIVCVGYFTVNHPDNQVIVQSGRHPTVLQKLCQLPFQYFSDPRLIKVLFPSLIAACYNNHQNKIILEQEMSCVLLATFIQDLAQTPGQAENQPYQPKGKCLGSQDYLELANRFPQQAWEEARQFFLKKEKK

SEQ ID NO: 825232 - protein, 1034 aa, Homo sapiens
MASFQRSNSHDKVRRIVAEEGRTARNLIAWSVPLESKDDDGKPKCQTGGKSKRTIQGTHKTTKQSTAVDCKITSSTTGDKHFDKSPTKTRHPRKIDLRARYWAFLFDNLRRAVDEIYVTCESDQSVVECKEVLMMLDNYVRDFKALIDWIQLQEKLEKTDAQSRPTSLAWEVKKMSPGRHVIPSPSTDRINVTSNARRSLNFGGSTGTVPAPRLAPTGVSWADKVKAHHTGSTASSEITPAQSCPPMTVQKASRKNERKDAEGWETVQRGRPIRSRSTAVMPKVSLATEATRSKDDSDKENVCLLPDESIQKGQFVGDGTSNTIESHPKDSLHSCDHPLAEKTQFTVSTLDDVKNSGSIRDNYVRTSEISAVHIDTECVSVMLQAGTPPLQVNEEKFPAEKARIENEMDPSDISNSMAEVLAKKEELADRLEKANEEAIASAIAEEEQLTREIEAEENNDINIETDNDSDFSASMGSGSVSFCGMSMDWNDVLADYEARESWRQNTSWGDIVEEEPARPPGHGIHMHEKLSSPSRKRTIAESKKKHEEKQMKAQQLREKLREEKTLKLQKLLEREKDVRKWKEELLDQRRRMMEEKLLHAEFKREVQLQAIVKKAQEEEAKVNEIAFINTLEAQNKRHDVLSKLKEYEQRLNELQEERQRRQEEKQARDEAVQERKRALEAERQARVEELLMKRKEQEARIEQQRQEKEKAREDAARERARDREERLAALTAAQQEAMEELQKKIQLKHDESIRRHMEQIEQRKEKAAELSSGRHANTDYAPKLTPYERKKQCSLCNVLISSEVYLFSHVKGRKHQQAVRENTSIQGRELSDEEVEHLSLKKYIIDIVVESTAPAEALKDGEERQKNKKKAKKIKARMNFRAKEYESLMETKNSGSDSPYKAKLQRLAKDLLKQVQVQDSGSWANNKVSALDRTLGEITRILEKENVADQIAFQAAGGLTALEHILQAVVPATNVNTVLRIPPKSLCNAINVYNLTCNNCSENCSDVLFSNKITFLMDLLIHQLTQRPEDSDHL

SEQ ID NO: 825233 - protein, 271 aa, Homo sapiens
WFMKMEWMALHAHTNHAVFAQLYSPLRSYSIFDNNRQDPTGLTAALQATDLAGVLHMLYCVLFHGTILDPSTASPKENYTQNTIQVAIQSLRFFNSFAALHLPAFQSIVGAEGLSLAFRHMASSLLGHCSQVSCESLLHEVIVCVGYFTVNHPDNQVIVQSGRHPTVLQKLCQLPFQYFSDPRLIKVLFPSLIAACYNNHQNKIILEQEMSCVLLATFIQDLAQTPGQAENQPYQPKGKCLGSQDYLELANRFPQQAWEEARQFFLKKEKK

SEQ ID NO: 825234 - protein, 575 aa, Homo sapiens
MASFQRSNSHDKVRRIVAEEGRTARNLIAWSVPLESKDDDGKPKCQTGGKSKRTIQGTHKTTKQSTAVDCKITSSTTGDKHFDKSPTKTRHPRKIDLRARYWAFLFDNLRRAVDEIYVTCESDQSVVECKEVLMMLDNYVRDFKALIDWIQLQEKLEKTDAQSRPTSLAWEVKKMSPGRHVIPSPSTDRINVTSNARRSLNFGGSTGTVPAPRLAPTGVSWADKVKAHHTGSTASSEITPAQSCPPMTVQKASRKNERKDAEGWETVQRGRPIRSRSTAVMPKVSLATEATRSKDDSDKENVCLLPDESIQKGQFVGDGTSNTIESHPKDSLHSCDHPLAEKTQFTVSTLDDVKNSGSIRDNYVRTSEISAVHIDTECVSVMLQAGTPPLQVNEEKFPAEKARIENEMDPSDISNSMAEVLAKKEELADRLEKANEEAIASAIAEEEQLTREIEAEENNDINIETDNDSDFSASMGSGSVSFCGMSMDWNDVLADYEARESWRQNTSWGDIVEEEPARPPGHGIHMHEKLSSPSRKRTIAESKKKHEEKQMKAQQLREKLREEKTLKLQKLLERG

SEQ ID NO: 825235 - protein, 1399 aa, Homo sapiens; identical to SEQ ID NO: 825231

SEQ ID NO: 825236 - protein, 1349 aa, Homo sapiens
MASFQRSNSHDKVRRIVAEEGRTARNLIAWSVPLESKDDDGKPKCQTGGKSKRTIQGTHKTTKQSTAVDCKITSSTTGDKHFDKSPTKTRHPRKIDLRARYWAFLFDNLRRAVDEIYVTCESDQSVVECKEVLMMLDNYVRDFKALIDWIQLQEKLEKTDAQSRPTSLAWEVKKMSPGRHVIPSPSTDRINVTSNARRSLNFGGSTGTVPAPRLAPTGVSWADKVKAHHTGSTASSEITPAQSCPPMTVQKASRKNERKDAEGWETVQRGRPIRSRSTAVMPKVSLATEATRSKDDSDKENVCLLPDESIQKGQFVGDGTSNTIESHPKDSLHSCDHPLAEKTQFTVSTLDDVKNSGSIRDNYVRTSEISAVHIDTECVSVMLQAGTPPLQVNEEKFPAEKARIENEMDPSDISNSMAEVLAKKEELADRLEKANEEAIASAIAEEEQLTREIEAEENNDINIETDNDSDFSASMGSGSVSFCGMSMDWNDVLADYEARESWRQNTSWGDIVEEEPARPPGHGIHMHEKLSSPSRKRTIAESKKKHEEKQMKAQQLREKLREEKTLKLQKLLEREKDVRKWKEELLDQRRRMMEEKLLHAEFKREVQLQAIVKKAQEEEAKVNEIAFINTLEAQNKRHDVLSKLKEYEQRLNELQEERQRRQEEKQARDEAVQERKRALEAERQARVEELLMKRKEQEARIEQQRQEKEKAREDAARERARDREERLAALTAAQQEAMEELQKKIQLKHDESIRRHMEQIEQRKEKAAELSSGRHANTDYAPKLTPYERKKQCSLCNVLISSEVYLFSHVKGRKHQQAVRENTSIQGRELSDEEVEHLSLKKYIIDIVVESTAPAEALKDGEERQKNKKKAKKIKARMNFRAKEYESLMETKNSGSDSPYKAKLQRLAKDLLKQVQVQDSGSWANNKVSALDRTLGEITRILEKENVADQIAFQAAGGLTALEHILQAVVPATNVNTVLRIPPKSLCNAINVYNLTCNNCSENCSDVLFSNKITFLMDLLIHQLTVYVPDENNTILGRNTNKQVFEGLTTGLLKVSAVVLGCLIANRPDGNCQPATPKIPTQEMKNKPSQGDPFNNRVQDLISYVVNMGLIDKLCACFLSVQGPVDENPKMAIFLQHAAGLLHAMCTLCFAVTGRSYSIFDNNRQDPTGLTAALQATDLAGVLHMLYCVLFHGTILDPSTASPKENYTQNTIQVAIQSLRFFNSFAALHLPAFQVIVQSGRHPTVLQKLCQLPFQYFSDPRLIKVLFPSLIAACYNNHQNKIILEQEMSCVLLATFIQDLAQTPGQAENQPYQPKGKCLGSQDYLELANRFPQQAWEEARQFFLKKEKK

SEQ ID NO: 825237 - protein, 522 aa, Homo sapiens [sequence omitted]

SEQ ID NO: 825238 - protein, 1399 aa, Homo sapiens; identical to SEQ ID NO: 825231

SEQ ID NO: 825239 - protein, 1033 aa, Homo sapiens [sequence omitted]

SEQ ID NO: 825240 - protein, 146 aa, Homo sapiens
MFSMVLADTVQVGEGQAGAFRQLTWAALPFQVIVQSGRHPTVLQKLCQLPFQYFSDPRLIKVLFPSLIAACYNNHQNKIILEQEMSCVLLATFIQDLAQTPGQAENQPYQPKGKCLGSQDYLELANRFPQQAWEEARQFFLKKEKK

SEQ ID NO: 825241 - protein, 333 aa, Homo sapiens
MPLGLGRRKKAPPLVENEEAEPGRGGLGVGEPGPLGGGGSGGPQMGLPPPPPALRPRLVFHTQLAHGSPTGRIEGFTNVKELYGKIAEAFRLPTAEVMFCTLNTHKVDMDKLLGGQIGLEDFIFAHVKGQRKEVEVFKSEDALGLTITDNGAGYAFIKRIKEGSVIDHIHLISVGDMIEAINGQSLLGCRHYEVARLLKELPRGRTFTLKLTEPRKAFDMISQRSAGGRPGSGPQLGTGRGTLRLRSRGPATVEDLPSAFEEKAIEKVDDLLESYMGIRDTELAATMVELGKDKRNPDELAEALDERLGDFAFPDEFVFDVWGAIGDAKVGRY

SEQ ID NO: 825242 - protein, 109 aa, Homo sapiens
MPLGLGRRKKAPPLVENEEAEPGRGGLGVGEPGPLGGGGSGGRGNGHARGSGAYWDPARHGARRRRRPGGHRQHDWVVPRDRHQRKHQGRVGRNWHHGLAQRGTMYYRA

SEQ ID NO: 825243 - protein, 196 aa, Homo sapiens
STDVGLNVAGSLHQSQEESLQLPGNGLAEEAAARASTDVEVFKSEDALGLTITDNGAGYAFIKRIKEGSVIDHIHLISVGDMIEAINGQSLLGCRHYEVARLLKELPRGRTFTLKPDAVCAHGLCCEDCQLKPAGTACRDSSNSCDLPEFCTGVSPHWPANVYLHDGHSCQDVGRILLQWHLPDSRAAVAVHIRSV

SEQ ID NO: 825244 - protein, 333 aa, Homo sapiens; identical to SEQ ID NO: 825241

SEQ ID NO: 825245 - protein, 333 aa, Homo sapiens; identical to SEQ ID NO: 825241

SEQ ID NO: 825246 - protein, 236 aa, Homo sapiens
MFCTLNTHKVDMDKLLGGQIGLEDFIFAHVKGQRKEVEVFKSEDALGLTITDNGAGYAFIKRIKEGSVIDHIHLISVGDMIEAINGQSLLGCRHYEVARLLKELPRGRTFTLKLTEPRKAFDMISQRSAGGRPGSGPQLGTGRGTLRLRSRGPATVEDLPSAFEEKAIEKVDDLLESYMGIRDTELAATMVELGKDKRNPDELAEALDERLGDFAFPDEFVFDVWGAIGDAKVGRY

SEQ ID NO: 825247 - protein, 201 aa, Homo sapiens
MPLGLGRRKKAPPLVENEEAEPGRGGLGVGEPGPLGGGGSGGPQMGLPPPPPALRPRLVFHTQLAHGSPTGRIEGFTNVKELYGKIDMISQRSAGGRPGSGPQLGTGRGTLRLRSRGPATVEDLPSAFEEKAIEKVDDLLESYMGIRDTELAATMVELGKDKRNPDELAEALDERLGDFAFPDEFVFDVWGAIGDAKVGRY

SEQ ID NO: 825248 - protein, 128 aa, Homo sapiens
KRRRTQAAGDSGWDMISQRSAGGRPGSGPQLGTGRGTLRLRSRGPATVEDLPSAFEEKAIEKVDDLLESYMGIRDTELAATMVELGKDKRNPDELAEALDERLGDFAFPDEFVFDVWGAIGDAKVGRY

SEQ ID NO: 825249 - protein, 105 aa, Homo sapiens
  misc_feature (1)..(1): Xaa can be any naturally occurring amino acid
  misc_feature (25)..(25): Xaa can be any naturally occurring amino acid
XLCLGTRASLLSPPHPTTPNHHPHXTLPPRPLPRSNRYHPLPGSQSGRGPRPPCALFPTYLSWVRHREGRDQPNWAATPASTTFHHQLPNWSLCLPGALGSVWGS

SEQ ID NO: 825250 - protein, 178 aa, Homo sapiens
MPLGLGRRKKAPPLVENEEAEPGRGGLGVGEPGPLGGGGSGGPQMGLPPPPPALRPRLVFHTQLAHGSPTGRIEGFTNVKELYGKIAEAFRLPTAEVMFCTLNTHKVDMDKLLGGQIGLEDFIFAHVKGQRKEVEVFKSEDALGLTITDNGAGYAFIKVPLSPWGLGFCLGVMTFLVS

SEQ ID NO: 825251 - protein, 175 aa, Homo sapiens
MPLGLGRRKKAPPLVENEEAEPGRGGLGVGEPGPLGGGGSGGPQMGLPPPPPALRPRLVFHTQLAHGSPTGRIEGFTNVKELYGKIAEAFRLPTAEVMFCTLNTHKVDMDKLLGGQIGLEDFIFAHVKGQRKEVEVFKSEDALGLTIKCNNALTPPERSPLPVEPVTSAFDTSLL

SEQ ID NO: 825252 - protein, 66 aa, Homo sapiens
ALSVGFWGFRGPALLEGWGEQVAMKCAIWLAEQRVPLSVQLKELSLVPLSPWGLGFCLGVMTFLVS

SEQ ID NO: 825253 - protein, 333 aa, Homo sapiens; identical to SEQ ID NO: 825241

SEQ ID NO: 825254 - protein, 333 aa, Homo sapiens; identical to SEQ ID NO: 825241

SEQ ID NO: 825255 - protein, 333 aa, Homo sapiens; identical to SEQ ID NO: 825241

SEQ ID NO: 825256 - protein, 333 aa, Homo sapiens; identical to SEQ ID NO: 825241

SEQ ID NO: 825257 - protein, 114 aa, Homo sapiens [sequence omitted]

SEQ ID NO: 825258 - protein, 126 aa, Homo sapiens
MTCWRVTWVSGTRSWRPPWWSWERTKGTRMSWPRPWTMVRGGGARPPAPLQSVPSPPWFPVWPGSPAPLCPVPHLPQLGQAQGGEGSAKLGGHPRLHHFPPSAAKLVPLSPWGLGFCLGVMTFLVS

SEQ ID NO: 825259 - protein, 505 aa, Homo sapiens
MPLGLGRRKKAPPLVENEEAEPGRGGLGVGEPGPLGGGGSGGPQMGLPPPPPALRPRLVFHTQLAHGSPTGRIEGFTNVKELYGKIAEAFRLPTAEVMFCTLNTHKVDMDKLLGGQIGLEDFIFAHVKGQRKEVEVFKSEDALGLTITDNGAGYAFIKRIKEGSVIDHIHLISVGDMIEAINGQSLLGCRHYEVARLLKELPRGRTFTLKLTEPRKAFDMISQRSAGGRPGSGPQLGTGRGTLRLRSRGPATVEDLPSAFEEKAIEKVDDLLESYMGIRDTELAATMVELGKDKRNPDELAEALDDGEGRWGQAPCPAPIGTIPSLVPSLAGVPGPPVPCSPPTSAGSGTGRGGISQIGRPPPPPPLSTISCQTGPSVSLGPWVLFGGHDLPSFLTQGIQGRGLSFPPANAIMPSPLLRGAPSLWSLLPPHLTRVCCEPRNLLPTSHLSFQAHPWPRAGGREGRWRWVFVSEFAVLNIKNLSAVKKKPTQHTNKNTQGGPPKEIP

SEQ ID NO: 825260 - protein, 129 aa, Homo sapiens
MPLGLGRRKKAPPLVENEEAEPGRGGLGVGEPGPLGGGGSGGPQMGLPPPPPALRPRLVFHTQLAHGSPTGRIEGFTNVKELYGKIAEAFRLPTAEVMFCTLNTHKVDMAERSPLPVEPVTSAFDTSLL

SEQ ID NO: 825261 - protein, 36 aa, Homo sapiens
MELFDSEDPRERDYLKTVLHRIYGKFLGLRAFIRKT

SEQ ID NO: 825262 - protein, 303 aa, Homo sapiens
MCHGRIAPKSTSVFAVASVGHGVFLPLVILCTLLGDGLASVCPLPPEPENGGYICHPRPCRDPLTAGSVIEYLCAEGYMLKGDYKYLTCKNGEWKPAMEISCRLNEDKDTHTSLGVPTLSIVASTASSVALILLLVVLFVLLQPKLKSFHHSRRDQGVSGDQVSIMVDGVQVALPSYEEAVYGSSGHCVPPADPRVQIVLSEGSGPSGRSVPREQQLPDQGACSSAGGEDEAPGQSGLCEAWGSRASETVMVHQATTSSWVAGSGNRQLAHKETADSENSDIQSLLSLTSEEYTDDIPLLKEA

SEQ ID NO: 825263 - protein, 303 aa, Homo sapiens; identical to SEQ ID NO: 825262

SEQ ID NO: 825264 - protein, 303 aa, Homo sapiens; identical to SEQ ID NO: 825262

SEQ ID NO: 825265 - protein, 468 aa, Homo sapiens
MNGEEEFFDAVTEANQKVTGMIDLDTSKNNRIGKTGERPSQENGIQKHRTSLPAPMFSRSDFSVWTILKKCVGLELSKITMPIAFNEPLSFLQRITEYMEHVYLIHRASCQPQPLERMQSVAAFAVSAVASQWERTGKPFNPLLGETYELIREDLGFRFISEQVSHHPPISAFHSEGLNHDFLFHGSIYPKLKFWGKSVEAEPRGTITLELLKHNEAYTWTNPTCCVHNVIIGKLWIEQYGTVEILNHRTGHKCVLHFKPCGLFGKELHKVEGHIQDKNKKKLFMIYGKWTECLWGIDPVSYESFKKQERRGDHLRKAKLDEDSGKADSDVADDVPVAQETVQVIPGSKLLWRINTRPPNSAQMYNFTSFTVSLNELETGMEKTLPPTDCRLRPDIRGMENGNMDLASQEKERLEEKQREARRERAKEEAEWQTRWFYPGNNPYTGTPDWLYAGDYFERNFSDCPDIY

SEQ ID NO: 825266 - protein, 480 aa, Homo sapiens
MNGEEEFFDAVTGFDSDNSSGEFSEANQKVTGMIDLDTSKNNRIGKTGERPSQENGIQKHRTSLPAPMFSRSDFSVWTILKKCVGLELSKITMPIAFNEPLSFLQRITEYMEHVYLIHRASCQPQPLERMQSVAAFAVSAVASQWERTGKPFNPLLGETYELIREDLGFRFISEQVSHHPPISAFHSEGLNHDFLFHGSIYPKLKFWGKSVEAEPRGTITLELLKHNEAYTWTNPTCCVHNVIIGKLWIEQYGTVEILNHRTGHKCVLHFKPCGLFGKELHKVEGHIQDKNKKKLFMIYGKWTECLWGIDPVSYESFKKQERRGDHLRKAKLDEDSGKADSDVADDVPVAQETVQVIPGSKLLWRINTRPPNSAQMYNFTSFTVSLNELETGMEKTLPPTDCRLRPDIRGMENGNMDLASQEKERLEEKQREARRERAKEEAEWQTRWFYPGNNPYTGTPDWLYAGDYFERNFSDCPDIY

SEQ ID NO: 825267 - protein, 480 aa, Homo sapiens; identical to SEQ ID NO: 825266

SEQ ID NO: 825268 - protein, 480 aa, Homo sapiens; identical to SEQ ID NO: 825266

SEQ ID NO: 825269 - protein, 279 aa, Homo sapiens [sequence omitted]

SEQ ID NO: 825270 - protein, 88 aa, Homo sapiens
AGRGGGCLYSQLLGRLRLENHLNLDLASQEKERLEEKQREARRERAKEEAEWQTRWFYPGNNPYTGTPDWLYAGDYFERNFSDCPDIY

SEQ ID NO: 825271 - protein, 112 aa, Homo sapiens
MNGEEEFFDAVTGFDSDNSSGEFSEANQKVTGMIDLDTSKNNRIGKTGERPSQENGIQKHRTSLPAPMFSRSDFSVWTILKKCVGLELSKITMPIAIKPGKDTEEPKLHIAE

SEQ ID NO: 825272 - protein, 480 aa, Homo sapiens; identical to SEQ ID NO: 825266

SEQ ID NO: 825273 - protein, 480 aa, Homo sapiens; identical to SEQ ID NO: 825266

SEQ ID NO: 825274 - protein, 480 aa, Homo sapiens; identical to SEQ ID NO: 825266

SEQ ID NO: 825275 - protein, 412 aa, Homo sapiens
CGRSNIRMVHTLKKCVGLELSKITMPIAFNEPLSFLQRITEYMEHVYLIHRASCQPQPLERMQSVAAFAVSAVASQWERTGKPFNPLLGETYELIREDLGFRFISEQVSHHPPISAFHSEGLNHDFLFHGSIYPKLKFWGKSVEAEPRGTITLELLKHNEAYTWTNPTCCVHNVIIGKLWIEQYGTVEILNHRTGHKCVLHFKPCGLFGKELHKVEGHIQDKNKKKLFMIYGKWTECLWGIDPVSYESFKKQERRGDHLRKAKLDEDSGKADSDVADDVPVAQETVQVIPGSKLLWRINTRPPNSAQMYNFTSFTVSLNELETGMEKTLPPTDCRLRPDIRGMENGNMDLASQEKERLEEKQREARRERAKEEAEWQTRWFYPGNNPYTGTPDWLYAGDYFERNFSDCPDIY

SEQ ID NO: 825276 - protein, 243 aa, Homo sapiens
MNGEEEFFDAVTGFDSDNSSGEFSEANQKVTGMIDLDTSKNNRIGKTGERPSQENGIQKHRTSLPAPMFSRSDFSVWTILKKCVGLELSKITMPIAFNEPLSFLQRITEYMEHVYLIHRASCQPQPLERMQSVAAFAVSAVASQWERTGKPFNPLLGETYELIREDLGFRFISEQVSHHPPISAFHSEGLNHDFLFHGSIYPKLKFWGKSVEAEPRGTITLELLNVNQRHLRAKHKSPTNAGR

SEQ ID NO: 825277 - protein, 94 aa, Homo sapiens
RGRLWSREEAMATMENKVICALVLVSMLALGTLAEAQTETCTVAPRERQNCGFPGVTPSQCANKGCCFDDTVRGVPWCFYPNTIDVPPEEECEF

SEQ ID NO: 825278 - protein, 84 aa, Homo sapiens
YRSLLIFRPILSSQSQSSQSVLGAEAQTETCTVAPRERQNCGFPGVTPSQCANKGCCFDDTVRGVPWCFYPNTIDVPPEEECEF

SEQ ID NO: 825279 - protein, 94 aa, Homo sapiens; identical to SEQ ID NO: 825277

SEQ ID NO: 825280 - protein, 94 aa, Homo sapiens; identical to SEQ ID NO: 825277

SEQ ID NO: 825281 - protein, 82 aa, Homo sapiens
VADYRTLFADLGLVSCWPSAPGEAQTETCTVAPRERQNCGFPGVTPSQCANKGCCFDDTVRGVPWCFYPNTIDVPPEEECEF

SEQ ID NO: 825282 - protein, 133 aa, Homo sapiens
GRVGRPTRRGGSEEAKVQLPSVVPNPGSSDTSRLHHAAEVRPQRDQSRRCVLWLWPGLRDGASLGPAARAKLSPYGALKAAASQRPSRCCAAPAKPQPFWALASSRVGGEGGLDHLWRLGSPHALGIPEVHRR

SEQ ID NO: 825283 - protein, 155 aa, Homo sapiens
MTFMTRPPTIVAKLRKSVPPPADFLDAQECGDSPMDTREFMDEDLLVGTLLAIVFDGKSFSPKPRNVAEDPKNLTRRGGRRDSILRSPTPGFLRRETDSAGGRQPATTAQRSEEAKVQLPSVVPNPGSSDTSRLHHAAEVRPQRDQSRIPEVHRR

SEQ ID NO: 825284 - protein, 155 aa, Homo sapiens; identical to SEQ ID NO: 825283

SEQ ID NO: 825285 - protein, 155 aa, Homo sapiens; identical to SEQ ID NO: 825283

SEQ ID NO: 825286 - protein, 155 aa, Homo sapiens; identical to SEQ ID NO: 825283

SEQ ID NO: 825287 - protein, 155 aa, Homo sapiens; identical to SEQ ID NO: 825283

SEQ ID NO: 825288 - protein, 101 aa, Homo sapiens
DAWVDPRVGEARRRPRCNFLRSSRIRVHPTPAASTMPPKFDPNEIKVVGACSGCGRGCGMEHPSAPPRVQSFPRMGLLKPLPPRDLPGVAPPRPSLSLSGP

SEQ ID NO: 825289 - protein, 155 aa, Homo sapiens; identical to SEQ ID NO: 825283

SEQ ID NO: 825290 - protein, 155 aa, Homo sapiens; identical to SEQ ID NO: 825283

SEQ ID NO: 825291 - protein, 155 aa, Homo sapiens; identical to SEQ ID NO: 825283

SEQ ID NO: 825292 - protein, 101 aa, Homo sapiens; identical to SEQ ID NO: 825288

SEQ ID NO: 825293 - protein, 73 aa, Homo sapiens
DAWVDPRVGEARRRPRCNFLRSSRIRVHPTPAASTMPPKFDPNEIKVVYLRCTGGEGRCHFCPGPQDRPPGSD

SEQ ID NO: 825294 - protein, 133 aa, Homo sapiens; identical to SEQ ID NO: 825282

SEQ ID NO: 825295 - protein, 189 aa, Homo sapiens
GRVGRPTRRGGSEEAKVQLPSVVPNPGSSDTSRLHHAAEVRPQRDQSRTSALAPKIGPLGLSPKKVGDDIAKATGDWKGLRITVKLTIQNRQAQIEVVPSASALIIKALKEPPRDRKKQKNIKHSGNITFDEIVNIARQMRHRSLARELSGTIKEILGTAQSVGCNVDGRHPHDIIDDINSGAVECPAS

SEQ ID NO: 825296 - protein, 155 aa, Homo sapiens; identical to SEQ ID NO: 825283

SEQ ID NO: 825297 - protein, 215 aa, Homo sapiens
MLMAAILMTSSMTSTVVLWNAQPVKHKGKTIFTKGFILTNLGCTNKHTKQANNQNSTRKQETTRTHTQTTQANNKDAQENTKQQTQTATPHKKRHQAKKRTVNTQPNLQAEHKHNINQTHLTNYLNALNTETKPNSRPPKQRTRAIQHPQNTRNGPKDTPNTNTTHPTVNPEKNRTSKRDQTQNNQPMQHNMTNQNKNQERKKKHTQKLHHSTQT

SEQ ID NO: 825298 - protein, 155 aa, Homo sapiens; identical to SEQ ID NO: 825283

SEQ ID NO: 825299 - protein, 155 aa, Homo sapiens; identical to SEQ ID NO: 825283

SEQ ID NO: 825300 - protein, 155 aa, Homo sapiens; identical to SEQ ID NO: 825283

SEQ ID NO: 825301 - protein, 155 aa, Homo sapiens; identical to SEQ ID NO: 825283

SEQ ID NO: 825302 - protein, 155 aa, Homo sapiens; identical to SEQ ID NO: 825283

SEQ ID NO: 825303 - protein, 101 aa, Homo sapiens; identical to SEQ ID NO: 825288

SEQ ID NO: 825304 - protein, 101 aa, Homo sapiens; identical to SEQ ID NO: 825288

SEQ ID NO: 825305 - protein, 143 aa, Homo sapiens
RTRGSTHASGRLGGGQGATSFGRPESGFIRHQPPPPCRRSSTPTRSKSIEVVPSASALIIKALKEPPRDRKKQKNIKHSGNITFDEIVNIARQMRHRSLARELSGTIKEILGTAQSVGCNVDGRHPHDIIDDINSGAVECPAS

SEQ ID NO: 825306 - protein, 101 aa, Homo sapiens; identical to SEQ ID NO: 825288

SEQ ID NO: 825307 - protein, 770 aa, Homo sapiens
MFPQSRHPTPHQAAGQPFKFTIPESLDRIKEEFQFLQAQYHSLKLECEKLASEKTEMQRHYVMYYEMSYGLNIEMHKQTEIAKRLNTICAQVIPFLSQEHQQQVAQAVERAKQVTMAELNAIIGQQQLQAQHLSHGHGPPVPLTPHPSGLQPPGIPPLGGSAGLLALSSALSGQSHLAIKDDKKHHDAEHHRDREPGTSNSLLVPDSLRGTDKRRNGPEFSNDIKKRKVDDKDSSHYDSDGDKSDDNLVVDVSNEDPSSPRASPAHSPRENGIDKNRLLKKDASSSPASTASSASSTSLKSKEMSLHEKASTPVLKSSTPTPRSDMPTPGTSATPGLRPGLGKPPAIDPLVNQAAAGLRTPLAVPGPYPAPFGMVPHAGMNGELTSPGAAYASLHNMSPQMSAAAAAAAVVAYGRSPMVGFDPPPHMRVPTIPPNLAGIPGGKPAYSFHVTADGQMQPVPFPPDALIGPGIPRHARQINTLNHGEVVCAVTISNPTRHVYTGGKGCVKVWDISHPGNKSPVSQLDCLNRDNYIRSCKLLPDGCTLIVGGEASTLSIWDLAAPTPRIKAELTSSAPACYALAISPDSKVCFSCCSDGNIAVWDLHNQTLVRQFQGHTDGASCIDISNDGTKLWTGGLDNTVRSWDLREGRQLQQHDFTSQIFSLGYCPTGEWLAVGMESSNVEVLHVNKPDKYQLHLHESCVLSLKFAYCGKWFVSTGKDNLLNAWRTPYGASIFQSKESSSVLSCDISVDDKYIVTGSGDKKATVYEVIY

SEQ ID NO: 825308 - protein, 780 aa, Homo sapiens
MFPQSRHPTPHQAAGQPFKFTIPESLDRIKEEFQFLQAQYHSLKLECEKLASEKTEMQRHYVMYYEMSYGLNIEMHKQTEIAKRLNTICAQVIPFLSQEHQQQVAQAVERAKQVTMAELNAIIGVRGLPGLPPTQQQLQAQHLSHGHGPPVPLTPHPSGLQPPGIPPLGGSAGLLALSSALSGQSHLAIKDDKKHHDAEHHRDREPGTSNSLLVPDSLRGTDKRRNGPEFSNDIKKRKVDDKDSSHYDSDGDKSDDNLVVDVSNEDPSSPRASPAHSPRENGIDKNRLLKKDASSSPASTASSASSTSLKSKEMSLHEKASTPVLKSSTPTPRSDMPTPGTSATPGLRPGLGKPPAIDPLVNQAAAGLRTPLAVPGPYPAPFGMVPHAGMNGELTSPGAAYASLHNMSPQMSAAAAAAAVVAYGRSPMVGFDPPPHMRVPTIPPNLAGIPGGKPAYSFHVTADGQMQPVPFPPDALIGPGIPRHARQINTLNHGEVVCAVTISNPTRHVYTGGKGCVKVWDISHPGNKSPVSQLDCLNRDNYIRSCKLLPDGCTLIVGGEASTLSIWDLAAPTPRIKAELTSSAPACYALAISPDSKVCFSCCSDGNIAVWDLHNQTLVRQFQGHTDGASCIDISNDGTKLWTGGLDNTVRSWDLREGRQLQQHDFTSQIFSLGYCPTGEWLAVGMESSNVEVLHVNKPDKYQLHLHESCVLSLKFAYCGKWFVSTGKDNLLNAWRTPYGASIFQSKESSSVLSCDISVDDKYIVTGSGDKKATVYEVIY

SEQ ID NO: 825309 - protein, 780 aa, Homo sapiens; identical to SEQ ID NO: 825308

SEQ ID NO: 825310 - protein, 804 aa, Homo sapiens
MFPQSRHPTPHQAAGQPFKFTIPESLDRIKEEFQFLQAQYHSLKLECEKLASEKTEMQRHYVMYYEMSYGLNIEMHKQTEIAKRLNTICAQVIPFLSQEHQQQVAQAVERAKQVTMAELNAIIGQQQLQAQHLSHGHGPPVPLTPHPSGLQPPGIPPLGGSAGLLALSSALSGQSHLAIKDDKKHHDAEHHRDREPGTSNSLLVPDSLRGTDKRRNGPEFSNDIKKRKVDDKDSSHYDSDGDKSDDNLVVDVSNEDPSSPRASPAHSPRENGIDKNRLLKKDASSSPASTASSASSTSLKSKEMSLHEKASTPVLKSSTPTPRSDMPTPGTSATPGLRPGLGKPPAIDPLVNQAGLDFHLELVPGNGKFGLKEKSWILSRKSSFEIKSAAGLRTPLAVPGPYPAPFGMVPHAGMNGELTSPGAAYASLHNMSPQMSAAAAAAAVVAYGRSPMVGFDPPPHMRVPTIPPNLAGIPGGKPAYSFHVTADGQMQPVPFPPDALIGPGIPRHARQINTLNHGEVVCAVTISNPTRHVYTGGKGCVKVWDISHPGNKSPVSQLDCLNRDNYIRSCKLLPDGCTLIVGGEASTLSIWDLAAPTPRIKAELTSSAPACYALAISPDSKVCFSCCSDGNIAVWDLHNQTLVRQFQGHTDGASCIDISNDGTKLWTGGLDNTVRSWDLREGRQLQQHDFTSQIFSLGYCPTGEWLAVGMESSNVEVLHVNKPDKYQLHLHESCVLSLKFAYCGKWFVSTGKDNLLNAWRTPYGASIFQSKESSSVLSCDISVDDKYIVTGSGDKKATVYEVIY

SEQ ID NO: 825311 - protein, 792 aa, Homo sapiens
MSHPFLPSLTYCFIHPPHSRPSVPLAGRPQTPHQAAGQPFKFTIPESLDRIKEEFQFLQAQYHSLKLECEKLASEKTEMQRHYVMYYEMSYGLNIEMHKQTEIAKRLNTICAQVIPFLSQEHQQQVAQAVERAKQVTMAELNAIIGQQQLQAQHLSHGHGPPVPLTPHPSGLQPPGIPPLGGSAGLLALSSALSGQSHLAIKDDKKHHDAEHHRDREPGTSNSLLVPDSLRGTDKRRNGPEFSNDIKKRKVDDKDSSHYDSDGDKSDDNLVVDVSNEDPSSPRASPAHSPRENGIDKNRLLKKDASSSPASTASSASSTSLKSKEMSLHEKASTPVLKSSTPTPRSDMPTPGTSATPGLRPGLGKPPAIDPLVNQAAAGLRTPLAVPGPYPAPFGMVPHAGMNGELTSPGAAYASLHNMSPQMSAAAAAAAVVAYGRSPMVGFDPPPHMRVPTIPPNLAGIPGGKPAYSFHVTADGQMQPVPFPPDALIGPGIPRHARQINTLNHGEVVCAVTISNPTRHVYTGGKGCVKVWDISHPGNKSPVSQLDCLNRDNYIRSCKLLPDGCTLIVGGEASTLSIWDLAAPTPRIKAELTSSAPACYALAISPDSKVCFSCCSDGNIAVWDLHNQTLVRQFQGHTDGASCIDISNDGTKLWTGGLDNTVRSWDLREGRQLQQHDFTSQIFSLGYCPTGEWLAVGMESSNVEVLHVNKPDKYQLHLHESCVLSLKFAYCGKWFVSTGKDNLLNAWRTPYGASIFQSKESSSVLSCDISVDDKYIVTGSGDKKATVYEVIY

SEQ ID NO: 825312 - protein, 786 aa, Homo sapiens
MFPQSRHPTPHQAAGQPFKFTIPESLDRIKEEFQFLQAQYHSLKLECEKLASEKTEMQRHYVMYYEMSYGLNIEMHKQTEIAKRLNTICAQVIPFLSQEHQQQVAQAVERAKQVTMAELNAIIGQQQLQAQHLSHGHGPPVPLTPHPSGLQPPGIPPLGGSAGLLALSSALSGQSHLAIKDDKKHHDAEHHRDREPGTSNSLLVPDSLRGTDKRRNGPEFSNDIKKRKVDDKDSSHYDSDGDKSDDNLVVDVSNEDPSSPRASPAHSPRENGIDKNRLLKKDASSSPASTASSASSTSLKSKEMSLHEKASTPVLKSSTPTPRSDMPTPGTSATPGLRPGLGKPPAIDPLVNQAGLDFHLELVPGNGKFGLKENLGFYRVPGPYPAPFGMVPHAGMNGELTSPGAAYASLHNMSPQMSAAAAAAAVVAYGRSPMVGFDPPPHMRVPTIPPNLAGIPGGKPAYSFHVTADGQMQPVPFPPDALIGPGIPRHARQINTLNHGEVVCAVTISNPTRHVYTGGKGCVKVWDISHPGNKSPVSQLDCLNRDNYIRSCKLLPDGCTLIVGGEASTLSIWDLAAPTPRIKAELTSSAPACYALAISPDSKVCFSCCSDGNIAVWDLHNQTLVRQFQGHTDGASCIDISNDGTKLWTGGLDNTVRSWDLREGRQLQQHDFTSQIFSLGYCPTGEWLAVGMESSNVEVLHVNKPDKYQLHLHESCVLSLKFAYCGKWFVSTGKDNLLNAWRTPYGASIFQSKESSSVLSCDISVDDKYIVTGSGDKKATVYEVIY

SEQ ID NO: 825313 - protein, 750 aa, Homo sapiens
MSYGLNIEMHKQTEIAKRLNTICAQVIPFLSQEHQQQVAQAVERAKQVTMAELNAIIGTEIAKRLNTICAQVIPFLSQEHQQQVAQAVERAKQVTMAELNAIIGQQQLQAQHLSHGHGPPVPLTPHPSGLQPPGIPPLGGSAGLLALSSALSGQSHLAIKDDKKHHDAEHHRDREPGTSNSLLVPDSLRGTDKRRNGPEFSNDIKKRKVDDKDSSHYDSDGDKSDDNLVVDVSNEDPSSPRASPAHSPRENGIDKNRLLKKDASSSPASTASSASSTSLKSKEMSLHEKASTPVLKSSTPTPRSDMPTPGTSATPGLRPGLGKPPAIDPLVNQAAAGLRTPLAVPGPYPAPFGMVPHAGMNGELTSPGAAYASLHNMSPQMSAAAAAAAVVAYGRSPMVGFDPPPHMRVPTIPPNLAGIPGGKPAYSFHVTADGQMQPVPFPPDALIGPGIPRHARQINTLNHGEVVCAVTISNPTRHVYTGGKGCVKVWDISHPGNKSPVSQLDCLNRDNYIRSCKLLPDGCTLIVGGEASTLSIWDLAAPTPRIKAELTSSAPACYALAISPDSKVCFSCCSDGNIAVWDLHNQTLVRQFQGHTDGASCIDISNDGTKLWTGGLDNTVRSWDLREGRQLQQHDFTSQIFSLGYCPTGEWLAVGMESSNVEVLHVNKPDKYQLHLHESCVLSLKFAYCGKWFVSTGKDNLLNAWRTPYGASIFQSKESSSVLSCDISVDDKYIVTGSGDKKATVYEVIY

SEQ ID NO: 825314 - protein, 462 aa, Homo sapiens
MFPQSRHPTPHQAAGQPFKFTIPESLDRIKEEFQFLQAQYHSLKLECEKLASEKTEMQRHYVMYYEMSYGLNIEMHKQTEIAKRLNTICAQVIPFLSQEHQQQVAQAVERAKQVTMAELNAIIGQQQLQAQHLSHGHGPPVPLTPHPSGLQPPGIPPLGGSAGLLALSSALSGQSHLAIKDDKKHHDAEHHRDREPGTSNSLLVPDSLRGTDKRRNGPEFSNDIKKRKVDDKDSSHYDSDGDKSDDNLVVDVSNEDPSSPRASPAHSPRENGIDKNRLLKKDASSSPASTASSASSTSLKSKEMSLHEKASTPVLKSSTPTPRSDMPTPGTSATPGLRPGLGKPPAIDPLVNQAAAGLRTPLAVPGPYPAPFGMVPHAGMNGELTSPGAAYASLHNMSPQMSAAAAAAAVVAYGRSPMVGFDPPPHMRVPTIPPNLAGIPGGKPAYSLHVTADGRGYHMEPP

SEQ ID NO: 825315 - protein, 229 aa, Homo sapiens
MFPQSRHPTPHQAAGQPFKFTIPESLDRIKEEFQFLQAQYHSLKLECEKLASEKTEMQRHYVMYYEMSYGLNIEMHKQTEIAKRLNTICAQVIPFLSQEHQQQVAQAVERAKQVTMAELNAIIGQQQLQAQHLSHGHGPPVPLTPHPSGLQPPGIPPLGGSAGLLALSSALSGQSHLAIKDDKKHHDAEHHRDREPGTSQIRTLSSYSYSAAKLCASLKRAPTYTESKQ

SEQ ID NO: 825316 - protein, 108 aa, Homo sapiens
RESRERERVERERERERERERERERERERERERERERERERHLSHGHGPPVPLTPHPSGLQPPGIPPLGGSAGLLALSSALSGQSHLAIARLGLCPHTLTVLQSCVHR

SEQ ID NO: 825317 - protein, 770 aa, Homo sapiens; identical to SEQ ID NO: 825307

SEQ ID NO: 825318 - protein, 696 aa, Homo sapiens
MFPQSRHPTPHQAAGQPFKFTIPESLDRIKEEFQFLQAQYHSLKLECEKLASEKTEMQRHYVMYYEMSYGLNIEMHKQTEIAKRLNTICAQVIPFLSQEHQQQVAQAVERAKQVTMAELNAIIGSNSLLVPDSLRGTDKRRNGPEFSNDIKKRKVDDKDSSHYDSDGDKSDDNLVVDVSNEDPSSPRASPAHSPRENGIDKNRLLKKDASSSPASTASSASSTSLKSKEMSLHEKASTPVLKSSTPTPRSDMPTPGTSATPGLRPGLGKPPAIDPLVNQAAAGLRTPLAVPGPYPAPFGMVPHAGMNGELTSPGAAYASLHNMSPQMSAAAAAAAVVAYGRSPMVGFDPPPHMRVPTIPPNLAGIPGGKPAYSFHVTADGQMQPVPFPPDALIGPGIPRHARQINTLNHGEVVCAVTISNPTRHVYTGGKGCVKVWDISHPGNKSPVSQLDCLNRDNYIRSCKLLPDGCTLIVGGEASTLSIWDLAAPTPRIKAELTSSAPACYALAISPDSKVCFSCCSDGNIAVWDLHNQTLVRQFQGHTDGASCIDISNDGTKLWTGGLDNTVRSWDLREGRQLQQHDFTSQIFSLGYCPTGEWLAVGMESSNVEVLHVNKPDKYQLHLHESCVLSLKFAYCGKWFVSTGKDNLLNAWRTPYGASIFQSKESSSVLSCDISVDDKYIVTGSGDKKATVYEVIY

SEQ ID NO: 825319 - protein, 914 aa, Homo sapiens
MFPQSRHPTPHQAAGQPFKFTIPESLDRIKEEFQFLQAQYHSLKLECEKLASEKTEMQRHYVMYYEMSYGLNIEMHKQTEIAKRLNTICAQVIPFLSQEHQQQVAQAVERAKQVTMAELNAIIGQQQLQAQHLSHGHGPPVPLTPHPSGLQPPGIPPLGGSAGLLALSSALSGQSHLAIKDDKKHHDAEHHRDREPGTSNSLLVPDSLRGTDKRRNGPEFSNDIKKRKVDDKDSSHYDSDGDKSDDNLVVDVSNEDPSSPRASPAHSPRENGIDKNRLLKKDASSSPASTASSASSTSLKSKEMSLHEKASTPVLKSSTPTPRSDMPTPGTSATPGLRPGLGKPPAIDPLVNQAGLDFHLELVPGNGKFGLKEKSWILSRKSSFEIKSGKHLVPVPWFALCKLGREYLNSPGFLVLPFTQMRKCVGCASPGVFSFLEMHSLWGRRDPVYKLEVIFPLPRSLTSFSLPMSDTEQMMRPDLLVRFDGVGQLNDVGLCFLSAAGLRTPLAVPGPYPAPFGMVPHAGMNGELTSPGAAYASLHNMSPQMSAAAAAAAVVAYGRSPMVGFDPPPHMRVPTIPPNLAGIPGGKPAYSFHVTADGQMQPVPFPPDALIGPGIPRHARQINTLNHGEVVCAVTISNPTRHVYTGGKGCVKVWDISHPGNKSPVSQLDCLNRDNYIRSCKLLPDGCTLIVGGEASTLSIWDLAAPTPRIKAELTSSAPACYALAISPDSKVCFSCCSDGNIAVWDLHNQTLVRQFQGHTDGASCIDISNDGTKLWTGGLDNTVRSWDLREGRQLQQHDFTSQIFSLGYCPTGEWLAVGMESSNVEVLHVNKPDKYQLHLHESCVLSLKFAYCGKWFVSTGKDNLLNAWRTPYGASIFQSKESSSVLSCDISVDDKYIVTGSGDKKATVYEVIY

SEQ ID NO: 825320 - protein, 755 aa, Homo sapiens
MFPQSRHPTPHQAAGQPFKFTIPESLDRIKEEFQFLQAQYHSLKLECEKLASEKTEMQRHYVMYYEMSYGLNIEMHKQTEIAKRLNTICAQVIPFLSQEHQQQVAQAVERAKQVTMAELNAIIGQQQLQAQHLSHGHGPPVPLTPHPSGLQPPGIPPLGGSAGLLALSSALSGQSHLAIKDDKKHHDAEHHRDREPGTSNSLLVPDSLRGTDKRRNGPEFSNDIKKRKVDDKDSSHYDSDGDKSDDNLVVDVSNEDPSSPRASPAHSPRENGIDKNRLLKKDASSSPASTASSASSTSLKSKEMSLHEKASTPVLKSSTPTPRSDMPTPGTSATPGLRPAAGLRTPLAVPGPYPAPFGMVPHAGMNGELTSPGAAYASLHNMSPQMSAAAAAAAVVAYGRSPMVGFDPPPHMRVPTIPPNLAGIPGGKPAYSFHVTADGQMQPVPFPPDALIGPGIPRHARQINTLNHGEVVCAVTISNPTRHVYTGGKGCVKVWDISHPGNKSPVSQLDCLNRDNYIRSCKLLPDGCTLIVGGEASTLSIWDLAAPTPRIKAELTSSAPACYALAISPDSKVCFSCCSDGNIAVWDLHNQTLVRQFQGHTDGASCIDISNDGTKLWTGGLDNTVRSWDLREGRQLQQHDFTSQIFSLGYCPTGEWLAVGMESSNVEVLHVNKPDKYQLHLHESCVLSLKFAYCGKWFVSTGKDNLLNAWRTPYGASIFQSKESSSVLSCDISVDDKYIVTGSGDKKATVYEVIY

SEQ ID NO: 825321 - protein, 708 aa, Homo sapiens
MFPQSRHPTPHQAAGQPFKFTIPESLDRIKEEFQFLQAQYHSLKLECEKLASEKTEMQRHYVMYYEMSYGLNIEMHKQTEIAKRLNTICAQVIPFLSQEHQQQVAQAVERAKQVTMAELNAIIGQQQLQAQHLSHGHGPPVPLTPHPSGLQPPGIPPLGGSAGLLALSSALSGQSHLAIKDDKKHHDAEHHRDREPGTSNSLLVPDSLRGTDKRRNGPEFSNDIKKRKVDDKDSSHYDSDGDKSDDNLVVDVSNEEPFFSSNDMPTPGTSATPGLRPGLGKPPAIDPLVNQAAAGLRTPLAVPGPYPAPFGMVPHAGMNGELTSPGAAYASLHNMSPQMSAAAAAAAVVAYGRSPMVGFDPPPHMRVPTIPPNLAGIPGGKPAYSFHVTADGQMQPVPFPPDALIGPGIPRHARQINTLNHGEVVCAVTISNPTRHVYTGGKGCVKVWDISHPGNKSPVSQLDCLNRDNYIRSCKLLPDGCTLIVGGEASTLSIWDLAAPTPRIKAELTSSAPACYALAISPDSKVCFSCCSDGNIAVWDLHNQTLVRQFQGHTDGASCIDISNDGTKLWTGGLDNTVRSWDLREGRQLQQHDFTSQIFSLGYCPTGEWLAVGMESSNVEVLHVNKPDKYQLHLHESCVLSLKFAYCGKWFVSTGKDNLLNAWRTPYGASIFQSKESSSVLSCDISVDDKYIVTGSGDKKATVYEVIY

SEQ ID NO: 825322 - protein, 239 aa, Homo sapiens
MFPQSRHPTPHQAAGQPFKFTIPESLDRIKEEFQFLQAQYHSLKLECEKLASEKTEMQRHYVMYYEMSYGLNIEMHKQTEIAKRLNTICAQVIPFLSQEHQQQVAQAVERAKQVTMAELNAIIGVRGLPGLPPTQQQLQAQHLSHGHGPPVPLTPHPSGLQPPGIPPLGGSAGLLALSSALSGQSHLAIKDDKKHHDAEHHRDREPGTSQIRTLSSYSYSAAKLCASLKRAPTYTESKQ

SEQ ID NO: 825323 - protein, 609 aa, Homo sapiens
MFRCGGLAAGALKQKLVPLVRTVCVRSPRQRNRLPVVQSHHLGSPSRSLASTGASGKDGSNLVYFLIVGATVTGAGVYYAYKTMKEDEKRYNERISGLGLTPEQKQKKAALSASEGEEVPQDKAPSHVPFLLIGGGTAAFAAARSIRARDPGARVLIVSEDPELPYMRPPLSKELWFSDDPNVTKTLRFKQWNGKERSIYFQPPSFYVSAQDLPHIENGGVAVLTGKKVVQLDVRDNMVKLNDGSQITYEKCLIATGGTPRSLSAIDRAGAEVKSRTTLFRKIGDFRSLEKISREVKSITIIGGGFLGSELACALGRKARALGTEVIQLFPEKGNMGKILPEYLSNWTMEKVRREGVKVMPNAIVQSVGVSSGKLLIKLKDGRKVETDHIVAAVGLEPNVELAKTGGLEIDSDFGGFRVNAELQARSNIWVAGDAACFYDIKLGRRRVEHHDHAVVSGRLAGENMTGAAKPYWHQSMFWSDLGPDVGYEAIGLVDSSLPTVGVFAKATAQDNPKSATEQSGTGIRSESETESEASEITIPPSTPAVPQAPVQGEDYGKGVIFYLRDKVVVGIVLWNIFNRMPIARKIIKDGEQHEDLNEVAKLFNIHED

SEQ ID NO: 825324 - protein, 326 aa, Homo sapiens
MFRCGGLAAGALKQKLVPLVRTVCVRSPRQRNRLPARALGTEVIQLFPEKGNMGKILPEYLSNWTMEKVRREGVKVMPNAIVQSVGVSSGKLLIKLKDGRKVETDHIVAAVGLEPNVELAKTGGLEIDSDFGGFRVNAELQARSNIWVAGDAACFYDIKLGRRRVEHHDHAVVSGRLAGENMTGAAKPYWHQSMFWSDLGPDVGYEAIGLVDSSLPTVGVFAKATAQDNPKSATEQSGTGIRSESETESEASEITIPPSTPAVPQAPVQGEDYGKGVIFYLRDKVVVGIVLWNIFNRMPIARKIIKDGEQHEDLNEVAKLFNIHED

SEQ ID NO: 825325 - protein, 145 aa, Homo sapiens [sequence omitted]

SEQ ID NO: 825326 - protein, 226 aa, Homo sapiens
MVETDHIVAAVGLEPNVELAKTGGLEIDSDFGGFRVNAELQARSNIWVAGDAACFYDIKLGRRRVEHHDHAVVSGRLAGENMTGAAKPYWHQSMFWSDLGPDVGYEAIGLVDSSLPTVGVFAKATAQDNPKSATEQSGTGIRSESETESEASEITIPPSTPAVPQAPVQGEDYGKGVIFYLRDKVVVGIVLWNIFNRMPIARKIIKDGEQHEDLNEVAKLFNIHED

SEQ ID NO: 825327 - protein, 369 aa, Homo sapiens
MFRCGGLAAGALKQKLVPLVRTVCVRSPRQRNRLPGNLFQRWHVPLELQMTRQMASSGASGGKIDNSVLVLIVGLSTVGAGAYAYKTMKEDEKRYNERISGLGLTPEQKQKKAALSASEGEEVPQDKAPSHVPFLLIGGGTAAFAAARSIRARDPGARVLIVSEDPELPYMRPPLSKELWFSDDPNVTKTLRFKQWNGKERSIYFQPPSFYVSAQDLPHIENGGVAVLTGKKVVQLDVRDNMVKLNDGSQITYEKCLIATGGTPRSLSAIDRAGAEVKSRTTLFRKIGDFRSLEKISREVKSITIIGGGFLGSELACALGRKARALGTEVIQLFPEKGNMGKILPEYLSNWTMEKVRRVESAVASYLSS

SEQ ID NO: 825328 - protein, 176 aa, Homo sapiens
DSQWSLLLLDLLRIPSNSYLERRRSALRILALTFNFRVLYIEEESRSDLGPDVGYEAIGLVDSSLPTVGVFAKATAQDNPKSATEQSGTGIRSESETESEASEITIPPSTPAVPQAPVQGEDYGKGVIFYLRDKVVVGIVLWNIFNRMPIARKIIKDGEQHEDLNEVAKLFNIHED

SEQ ID NO: 825329 - protein, 613 aa, Homo sapiens
MFRCGGLAAGALKQKLVPLVRTVCVRSPRQRNRLPGNLFQRWHVPLELQMTRQMASSGASGGKIDNSVLVLIVGLSTVGAGAYAYKTMKEDEKRYNERISGLGLTPEQKQKKAALSASEGEEVPQDKAPSHVPFLLIGGGTAAFAAARSIRARDPGARVLIVSEDPELPYMRPPLSKELWFSDDPNVTKTLRFKQWNGKERSIYFQPPSFYVSAQDLPHIENGGVAVLTGKKVVQLDVRDNMVKLNDGSQITYEKCLIATGGTPRSLSAIDRAGAEVKSRTTLFRKIGDFRSLEKISREVKSITIIGGGFLGSELACALGRKARALGTEVIQLFPEKGNMGKILPEYLSNWTMEKVRREGVKVMPNAIVQSVGVSSGKLLIKLKDGRKVETDHIVAAVGLEPNVELAKTGGLEIDSDFGGFRVNAELQARSNIWVAGDAACFYDIKLGRRRVEHHDHAVVSGRLAGENMTGAAKPYWHQSMFWSDLGPDVGYEAIGLVDSSLPTVGVFAKATAQDNPKSATEQSGTGIRSESETESEASEITIPPSTPAVPQAPVQGEDYGKGVIFYLRDKVVVGIVLWNIFNRMPIARKIIKDGEQHEDLNEVAKLFNIHED

SEQ ID NO: 825330 - protein, 274 aa, Homo sapiens
MGKILPEYLSNWTMEKVRREGVKVMPNAIVQSVGVSSGKLLIKLKDGRKVETDHIVAAVGLEPNVELAKTGGLEIDSDFGGFRVNAELQARSNIWVAGDAACFYDIKLGRRRVEHHDHAVVSGRLAGENMTGAAKPYWHQSMFWSDLGPDVGYEAIGLVDSSLPTVGVFAKATAQDNPKSATEQSGTGIRSESETESEASEITIPPSTPAVPQAPVQGEDYGKGVIFYLRDKVVVGIVLWNIFNRMPIARKIIKDGEQHEDLNEVAKLFNIHED

SEQ ID NO: 825331 - protein, 251 aa, Homo sapiens
GCCHAEVSGDNRQWCSLVEESFRKYHQETDHIVAAVGLEPNVELAKTGGLEIDSDFGGFRVNAELQARSNIWVAGDAACFYDIKLGRRRVEHHDHAVVSGRLAGENMTGAAKPYWHQSMFWSDLGPDVGYEAIGLVDSSLPTVGVFAKATAQDNPKSATEQSGTGIRSESETESEASEITIPPSTPAVPQAPVQGEDYGKGVIFYLRDKVVVGIVLWNIFNRMPIARKIIKDGEQHEDLNEVAKLFNIHED

SEQ ID NO: 825332 - protein, 482 aa, Homo sapiens
MFRCGGLAAGALKQKLVPLVRTVCVRSPRQRNRLPGNLFQRWHVPLELQMTRQMASSGASGGKIDNSVLVLIVGLSTVGAGAYAYKTMKEDEKRYNERISGLGLTPEQKQKKAALSASEGEEVPQDKAPSHVPFLLIGGGTAAFAAARSIRARDPGARVLIVSEDPELPYMRPPLSKELWFSDDPNVTKTLRFKQWNGKERSIYFQPPSFYVSAQDLPHIENGGVAVLTGKKVVQLDVRDNMVKLNDGSQITYEKCLIATGGTPRSLSAIDRAGAEVKSRTTLFRKIGDFRSLEKISREVKSITIIGGGFLGSELACALGRKARALGTEVIQLFPEKGNMGKILPEYLSNWTMEKVRREGVKVMPNAIVQSVGVSSGKLLIKLKDGRKVETDHIVAAVGLEPNVELAKTGGLEIDSDFGGFRVNAELQARSNIWVAGDAACFYDIKLGRRRVEHHDHAVVSGRLAGENMTGAAKPYWHQSMF

SEQ ID NO: 825333 - protein, 518 aa, Homo sapiens
MFRCGGLAAGALKQKLVPLVRTVCVRSPRQRNRLPGNLFQRWHVPLELQMTRQMASSGASGGKIDNSVLVLIVGLSTVGAGAYAYKTMKEDEKRYNERISGLGLTPEQKQKKAALSASEGEEVPQDKAPSHVPFLLIGGGTAAFAAARSIRARDPGARVLIVSEDPELPYMRPPLSKELWFSDDPNVTKTLRFKQWNGKERSIYFQPPSFYVSAQDLPHIENGGVAVLTGKKVVQLDVRDNMVKLNDGSQITYEKCLIATGGTPRSLSAIDRAGAEVKSRTTLFRKIGDFRSLEKISREVKSITIIGGGFLGSELACALGRKARALGTEVIQLFPEKGNMGKILPEYLSNWTMEKVRREGVKVMPNAIVQSVGVSSGKLLIKLKDGRKVETDHIVAAVGLEPNVELAKTGGLEIDSDFGGFRVNAELQARSNIWVAGDAACFYDIKLGRRRVEHHDHAVVSGRLAGENMTGAAKPYWHQSMFWSDLGPDVGQLNIGLQAHSCHCVVSFYLPAVFQLDK

SEQ ID NO: 825334 - protein, 279 aa, Homo sapiens
MFRCGGLAAGALKQKLVPLVRTVCVRSPRQRNRLPGNLFQRWHVPLELQMTRQMASSGASGGKIDNSVLVLIVGLSTVGAGAYAYKTMKEDEKRYNERISGLGLTPEQKQKKAALSASEGEEVPQDKAPSHVPFLLIGGGTAAFAAARSIRARDPGARVLIVSEDPELPYMRPPLSKELWFSDDPNVTKTLRFKQWNGKERSIYFQPPSFYVSAQDLPHIENGGVAVLTGKKVVQLDVRDNMVKLNDGSQITYGAGAEVKSRTTLFRIGDFRSLEDFRG

SEQ ID NO: 825335 - protein, 552 aa, Homo sapiens
MLDHKDLEAEIHPLKNEERKSQENLGNPSKNEDNVKSAPPQSRLSRCRAAAFFLSLFLCLFVVFVVSFVIPCPDRPASQRMWRIDYSAAVIYDFLAVDDINGDRIQDVLFLYKNTNSSNNFSRSCVDEGFSSPCTFAAAVSGANGSTLWERPVAQDVALVECAVPQPRGSEAPSACILVGRPSSFIAVNLFTGETLWNHSSSFSGNASILSPLLQVPDVDGDGAPDLLVLTQEREEVSGHLYSGSTGHQIGLRGSLGVDGESGFLLHVTRTGAHYILFPCASSLCGCSVKGLYEKVTGSGGPFKSDPHWESMLNATTRRMLSHSSGAVRYLMHVPGNAGADVLLVGSEAFVLLDGQELTPRWTPKAAHVLRKPIFGRYKPDTLAVAVENGTGTDRQILFLDLGTGAVLCSLALPSLPGGPLSASLPTADHRSAFFFWGLHELGSTSETETGEARHSLYMFHPTLPRVLLELANVSTHIVAFDAVLFEPSRHAAYILLTGPADSEAPGLVSVIKHKVRDLVPSSRVVRLGEGGPDSDQAIRDRFSRLRYQSEA

SEQ ID NO: 825336 - protein, 153 aa, Homo sapiens
TPLLGHSPSRQVDLLYLAGSRGSKLTPRGSGARERCEENRPGTAHAGAGRPACPDGATVRCRCLSLQAFPLPAPLQLLCRGPTAARSGRDLWPKTWPSWSVLCPSQEAVRHLLPASWWADPVLSLQSTCSQVGQPGSGVLTEGLSPEPPHPEG

SEQ ID NO: 825337 - protein, 543 aa, Homo sapiens
MLDHKDLEAEIHPLKNEERKSQENLGNPSKNEDNVKSAPPQSRLSRCRAAAFFLSLFLCLFVVFVVSFVIPCPDRPASQRMWRIDYSAAVIYDFLAVDDINGDRIQDVLFLYKNTNSSNNFSRSCVDEAAVSGANGSTLWERPVAQDVALVECAVPQPRGSEAPSACILVGRPSSFIAVNLFTGETLWNHSSSFSGNASILSPLLQVPDVDGDGAPDLLVLTQEREEVSGHLYSGSTGHQIGLRGSLGVDGESGFLLHVTRTGAHYILFPCASSLCGCSVKGLYEKVTGSGGPFKSDPHWESMLNATTRRMLSHSSGAVRYLMHVPGNAGADVLLVGSEAFVLLDGQELTPRWTPKAAHVLRKPIFGRYKPDTLAVAVENGTGTDRQILFLDLGTGAVLCSLALPSLPGGPLSASLPTADHRSAFFFWGLHELGSTSETETGEARHSLYMFHPTLPRVLLELANVSTHIVAFDAVLFEPSRHAAYILLTGPADSEAPGLVSVIKHKVRDLVPSSRVVRLGEGGPDSDQAIRDRFSRLRYQSEA

SEQ ID NO: 825338 - protein, 651 aa, Homo sapiens
MLDHKDLEAEIHPLKNEERKSQENLGNPSKNEDNVKSAPPQSRLSRCRAAAFFLSLFLCLFVVFVVSFVIPCPDRPASQRMWRIDYSAAVIYDFLAVDDINGDRIQDVLFLYKNTNSSNNFSRSCVDEGFSSPCTFAAAVSGANGSTLWERPVAQDVALVECAVPQPRGSEAPSACILVGRPSSFIAVNLFTGETLWNHSSSFSGNASILSPLLQVPDVDGDGAPDLLVLTQEREEVSGHLYSGSTGHQIGLRGSLGVDGESGFLLHVTRTGAHYILFPCASSLCGCSVKGLYEKVTGSGGPFKSDPHWESMLNATTRRMLSHSSGAVRYLMHVPGNAGADVLLVGSEAFVLLDGQELTPRWTPKAAHVLRYRVSPRTAQVLHPFPASRAHPVGWRGDSAGGGAGAVCCCPGFLPVSGTCPLPQTSAPCPGPWSRCGHGRLRGGRVPGCFLHLSLLTETPRERFLHIVPGKPIFGRYKPDTLAVAVENGTGTDRQILFLDLGTGAVLCSLALPSLPGGPLSASLPTADHRSAFFFWGLHELGSTSETETGEARHSLYMFHPTLPRVLLELANVSTHIVAFDAVLFEPSRHAAYILLTGPADSEAPGLVSVIKHKVRDLVPSSRVVRLGEGGPDSDQAIRDRFSRLRYQSEA

SEQ ID NO: 825339 - protein, 441 aa, Homo sapiens
MLDHKDLEAEIHPLKNEERKSQENLGNPSKNEDNVKSAPPQSRLSRCRAAAFFLSLFLCLFVVFVVSFVIPCPDRPASQRMWRIDYSAAVIYDFLAVDDINGDRIQDVLFLYKNTNSSNNFSRSCVDEGFSSPCTFAAAVSGANGSTLWERPVAQDVALVECAVPQPRGSEAPSACILVGRPSSFIAVNLFTGETLWNHSSSFSGNASILSPLLQVPDVDGDGAPDLLVLTQEREEVSGHLYSGSTGHQIGLRGSLGVDGESGFLLHVTRTGAHYILFPCASSLCGCSVKGLYEKVTGSGGPFKSDPHWESMLNATTRRMLSHSSGAVRYLMHVPGNAGADVLLVGSEAFVLLDGQELTPRWTPKAAHVLRYRVSPRTAQVLHPFPASRAHPVGWRGDSAGGGAGGRGAAARASCLSLVLAPCPRRRLRVLGPGPDVAMGD

SEQ ID NO: 825340 - protein, 419 aa, Homo sapiens
TSTGVPPSPPVGICSECAVSRGLTRVMPQQEPACHRPCSCRAAVEGDSGPRSVTVCLILGETLWNHSSSFSGNASILSPLLQVPDVDGDGAPDLLVLTQEREEVSGHLYSGSTGHQIGLRGSLGVDGESGFLLHVTRTGAHYILFPCASSLCGCSVKGLYEKVTGSGGPFKSDPHWESMLNATTRRMLSHSSGAVRYLMHVPGNAGADVLLVGSEAFVLLDGQELTPRWTPKAAHVLRKPIFGRYKPDTLAVAVENGTGTDRQILFLDLGTGAVLCSLALPSLPGGPLSASLPTADHRSAFFFWGLHELGSTSETETGEARHSLYMFHPTLPRVLLELANVSTHIVAFDAVLFEPSRHAAYILLTGPADSEAPGLVSVIKHKVRDLVPSSRVVRLGEGGPDSDQAIRDRFSRLRYQSEA

SEQ ID NO: 825341 - protein, 515 aa, Homo sapiens
MLDHKDLEAEIHPLKNEERKSQENLGNPSKNEDNVKSAPPQSRLSRCRAAAFFLSLFLCLFVVFVVSFVIPCPDRPASQRMWRIDYSAAVIYDFLAVDDINGDRIQDVLFLYKNTNSSNNFSRSCVDEGFSSPCTFAAAVSGANGSTLWERPVAQDVALVECAVPQPRGSEAPSACILVGRPSSFIAVNLFTGETLWNHSSSFSGNASILSPLLQVPDVDGDGAPDLLVLTQEREEVSGHLYSGSTGHQIGLRGSLGVDGESGFLLHVTRTGAHYILFPCASSLCGCSVKGLYEKVTGSGGPFKSDPHWESMLNATTRRMLSHSSGAVRYLMHVPGNAGADVLLVGSEAFVLLDGQELTPRWTPKAAHVLRKPIFGRYKPDTLAVAVENGTGTDRQILFLDLGTGAVLCSLALPSLPGGPLSASLPTADHRSAFFFWGLHELGSTSETETGEARHSLYMFHPTLPRVLLELANVSTHIVAFDAVLFEPSRHAAYILLTGPADSEAPGLVSVPCCS

SEQ ID NO: 825342 - protein, 410 aa, Homo sapiens [sequence omitted]

SEQ ID NO: 825343 - protein, 132 aa, Homo sapiens
MLDHKDLEAEIHPLKNEERKSQENLGNPSKNEDNVKSAPPQSRLSRCRAAAFFLSLFLCLFVVFVVSFVIPCPDRPASQRMWRIDYSAAVIYDFLAVDDINGDRIQDVLFLYKNTNSSNNFSRSCVDEGHRA

SEQ ID NO: 825344 - protein, 552 aa, Homo sapiens; identical to SEQ ID NO: 825335

SEQ ID NO: 825345 - protein, 410 aa, Homo sapiens [sequence omitted]

SEQ ID NO: 825346 - protein, 500 aa, Homo sapiens
MLDHKDLEAEIHPLKNEERKSQENLGNPSKNEDNVKSAPPQSRLSRCRAAAFFLSLFLCLFVVFVVSFVIPCPDRPASQRMWRIDYSAAVIYDFLAVDDINGDRIQDVLFLYKNTNSSNNFSRSCVDEGFSSPCTFAAAVSGANGSTLWERPVAQDVALVECAVPQPRGSEAPSACILVGRPSSFIAVNLFTGETLWNHSSSFSGNASILSPLLQVPDVDGDGAPDLLVLTQEREEVSGHLYSGSTGHQIGLRGSLGVDGESGFLLHVTRTGAHYILFPCASSLCGCSVKGLYEKVTGSGGPFKSDPHWESMLNATTRRMLSHSSGAVRYLMHVPGNAGADVLLVGSEAFVLLDGQELTPRWTPKAAHVLRKPIFGRYKPDTLAVAVENGTGTDRQETGEARHSLYMFHPTLPRVLLELANVSTHIVAFDAVLFEPSRHAAYILLTGPADSEAPGLVSVIKHKVRDLVPSSRVVRLGEGGPDSDQAIRDRFSRLRYQSEA

SEQ ID NO: 825347 - protein, 290 aa, Homo sapiens
NLRPSPNSRASQNPGAAQPRDVALLQERANKLVKYLMLKDYTKVPIKRSEMLRDIIREYTDVYPEIIELMHVPGNAGADVLLVGSEAFVLLDGQELTPRWTPKAAHVLRKPIFGRYKPDTLAVAVENGTGTDRQILFLDLGTGAVLCSLALPSLPGGPLSASLPTADHRSAFFFWGLHELGSTSETETGEARHSLYMFHPTLPRVLLELANVSTHIVAFDAVLFEPSRHAAYILLTGPADSEAPGLVSVIKHKVRDLVPSSRVVRLGEGGPDSDQAIRDRFSRLRYQSEA

SEQ ID NO: 825348 - protein, 305 aa, Homo sapiens
MLDHKDLEAEIHPLKNEERKSQENLGNPSKNEDNVKSAPPQSRLSRCRAAAFFLSLFLCLFVVFVVSFVIPCPDRPASQRMWRIDYSAAVIYDFLAVDDINGDRIQDVLFLYKNTNSSNNFSRSCVDEGFSSPCTFAAAVSGANGSTLWERPVAQDVALVECAVPQPRGSEAPSACILVGRPSSFIAVNLFTGAVRCHLPWGSREEERLGPRLLLGCQWWQCPGRAQNMNQHSARQGRSGPVSAPKPEGAGLRAPAEPASWKDEGKNAWCTGPCVCVGSLHLIAVWKISVPRFGECSYFPYKLSF

SEQ ID NO: 825349 - protein, 116 aa, Homo sapiens
SRGGASGGGRELGGRRQHCFKLAKLTRARGILRSIPTRGHGTGPCFPLLGPREPGSAFCRVPRPPLQGRADPTRWRFMENFQKVEKIGEGTYGVVYKARNKLTGEVVALKKIRLDT

SEQ ID NO: 825350 - protein, 341 aa, Homo sapiens
SRGGASGGGRELGGRRQHCFKLAKLTRARGILRSIPTRGHGTGPCFPLLGPREPGSAFCRVPRPPLQGRADPTRWRFMENFQKVEKIGEGTYGVVYKARNKLTGEVVALKKIRLDTETEGVPSTAIREISLLKELNHPNIVKLLDVIHTENKLYLVFEFLHQDLKKFMDASALTGIPLPLIKSYLFQLLQGLAFCHSHRVLHRDLKPQNLLINTEGAIKLADFGLARAFGVPVRTYTHEVTRRALFPGDSEIDQLFRIFRTLGTPDEVVWPGVTSMPDYKPSFPKWARQDFSKVVPPLDEDGRSLLSQMLHYDPNKRISAKAALAHPFFQDVTKPVPHLRL

SEQ ID NO: 825351 - protein, 368 aa, Homo sapiens
SRGGASGGGRELGGRRQHCFKLAKLTRARGILRSIPTRGHGTGPCFPLLGPREPGSAFCRVPRPPLQGRADPTRWRFMENFQKVEKIGEGTYGVVYKARNKLKKIRLDTETEGVPSTAIREISLLKELNHPNIVKLLDVIHTENKLYLVFEFLHQDLKKFMDASALTGIPLPLIKSYLFQLLQGLAFCHSHRVLHRDLKPQNLLINTEGAIKLADFGLARAFGVPVRTYTHEVVTLWYRAPEILLGCKYYSTAVDIWSLGCIFAEMVTRRALFPGDSEIDQLFRIFRTLGTPDEVVWPGVTSMPDYKPSFPKWARQDFSKVVPPLDEDGRSLLSQMLHYDPNKRISAKAALAHPFFQDVTKPVPHLRL

SEQ ID NO: 825352 - protein, 375 aa, Homo sapiens
SRGGASGGGRELGGRRQHCFKLAKLTRARGILRSIPTRGHGTGPCFPLLGPREPGSAFCRVPRPPLQGRADPTRWRFMENFQKVEKIGEGTYGVVYKARNKLTGEVVALKKIRLDTETEGVPSTAIREISLLKELNHPNIVKLLDVIHTENKLYLVFEFLHQDLKKFMDASALTGIPLPLIKSYLFQLLQGLAFCHSHRVLHRDLKPQNLLINTEGAIKLADFGLARAFGVPVRTYTHEVVTLWYRAPEILLGCKYYSTAVDIWSLGCIFAEMVTRRALFPGDSEIDQLFRIFRTLGTPDEVVWPGVTSMPDYKPSFPKWARQDFSKVVPPLDEDGRSLLSQMLHYDPNKRISAKAALAHPFFQDVTKPVPHLRL

SEQ ID NO: 825353 - protein, 375 aa, Homo sapiens; identical to SEQ ID NO: 825352

SEQ ID NO: 825354 - protein, 142 aa, Homo sapiens
SRGGASGGGRELGGRRQHCFKLAKLTRARGILRSIPTRGHGTGPCFPLLGPREPGSAFCRVPRPPLQGRADPTRWRFMENFQKVEKIGEGTYGVVYKARNKLTGEVVALKKIRLDTETEGVPSTAIREISLLKELNHPNIVK

SEQ ID NO: 825355 - protein, 195 aa, Homo sapiens
MEDSASASLSSAAATGTSTSTPAAPTARKQLDKEQVRKAVDALLTHCKSRKNNYGLLLNENESLFLMVVLWKIPSKELRVRLTLPHSIRSDSEDICLFTKDEPNSTPEKTEQFYRKLLNKHGIKTVSQIISLQTLKKEYKSYEAKLRLLSSFDFFLTDARIRRLLPSLIGRHFYQRKKVPVSVNLSVQEFIKRDQ

SEQ ID NO: 825356 - protein, 195 aa, Homo sapiens; identical to SEQ ID NO: 825355

SEQ ID NO: 825357 - protein, 195 aa, Homo sapiens; identical to SEQ ID NO: 825355

SEQ ID NO: 825358 - protein, 195 aa, Homo sapiens; identical to SEQ ID NO: 825355

SEQ ID NO: 825359 - protein, 195 aa, Homo sapiens; identical to SEQ ID NO: 825355

SEQ ID NO: 825360 - protein, 195 aa, Homo sapiens; identical to SEQ ID NO: 825355

SEQ ID NO: 825361 - protein, 200 aa, Homo sapiens
FSSFSPCLFFLLIKQRSFGGFIPIADKRGKDGKCSRFLSFHKQEFHALLTHCKSRKNNYGLLLNENESLFLMVVLWKIPSKELRVRLTLPHSIRSDSEDICLFTKDEPNSTPEKTEQFYRKLLNKHGIKTVSQIISLQTLKKEYKSYEAKLRLLSSFDFFLTDARIRRLLPSLIGRHFYQRKKVPVSVNLSVQEFIKRDQ

SEQ ID NO: 825362 - protein, 217 aa, Homo sapiens
ACSRVRTRSQQWGCTRASSRGGNKMEDSASASLSSAAATGTSTSTPAAPTARKQLDKEQVRKAVDALLTHCKSRKNNYGLLLNENESLFLMVVLWKIPSKELRVRLTLPHSIRSDSEDICLFTKDEPNSTPEKTEQFYRKLLNKHGIKTVSQIISLQTLKKEYKSYEAKLRLLSSFDFFLTDARIRRLLPSLIGRHFYQRKNAIRIGHVGMQIGAHH

SEQ ID NO: 825363 - protein, 71 aa, Homo sapiens
ACSRVRTRSQQWGCTRASSRGGNKMEDSASASLSSAAATGTSTSTPAAPTARKQLDKEQDFQKNCQRSGRA

SEQ ID NO: 825364 - protein, 118 aa, Homo sapiens
ACSRVRTRSQQWGCTRASSRGGNKMEDSASASLSSAAATGTSTSTPAAPTARKQLDKEQVRKAVDALLTHCKSRKNNYGLLLNENESLFLMVVLWKIPSKELRVRLDEILRCCPAGVQ

SEQ ID NO: 825365 - protein, 195 aa, Homo sapiens; identical to SEQ ID NO: 825355

SEQ ID NO: 825366 - protein, 195 aa, Homo sapiens; identical to SEQ ID NO: 825355

SEQ ID NO: 825367 - protein, 195 aa, Homo sapiens; identical to SEQ ID NO: 825355

SEQ ID NO: 825368 - protein, 195 aa, Homo sapiens; identical to SEQ ID NO: 825355

SEQ ID NO: 825369 - protein, 195 aa, Homo sapiens; identical to SEQ ID NO: 825355

SEQ ID NO: 825370 - protein, 172 aa, Homo sapiens
LARACAPEASSGVAHAPLHEVETRWRIRPRPRCLLQPLLEPPPRLQRPRQHGSSWIKNRTLPHSIRSDSEDICLFTKDEPNSTPEKTEQFYRKLLNKHGIKTVSQIISLQTLKKEYKSYEAKLRLLSSFDFFLTDARIRRLLPSLIGRHFYQRKKVPVSVNLSVQEFIKRDQ

SEQ ID NO: 825371 - protein, 338 aa, Homo sapiens
ACSRVRTRSQQWGCTRASSRGGNKMEDSASASLSSAAATGTSTSTPAAPTARKQLDKEQCYTYWSRWNANWSTSLKTIVAVTKGLSEKLPEKWESVKLLFVKTEKSAALPIFSSFVSNWDEATKRSLLNKKKKEARRKRRERNFEKQKERKKKRQQARKTASVLSKDDVAPESGDTTVKKPESKKEQTPEHGKKKRGRGKAQVKATNESEDEIPQLVPIGKKTPANEKVEIQKHATGKKSPAKSPNPSTPRGKKRKALPASETPKAAESETPGKSPEKKPKIKEEAVKEKSPSLGKKDARQTPKKPEAKFFTTPSKSVRKASHTPKKWPKKPKVPQST

SEQ ID NO: 825372 - protein, 951 aa, Homo sapiens
AGGRGNARSSQALGVSWCPATWHPRLDMGRLHRPRSSTSYRNLPHLFLFFLFVGPFSCLGSYSRATELLYSLNEGLPAGVLIGSLAEDLRLLPRSAGRPDPQSQLPERTGAEWNPPLSFSLASRGLSGQYVTLDNRSGELHTSAQEIDREALCVEGGGGTAWSGSVSISSSPSDSCLLLLDVLVLPQEYFRFVKVKIAIRDINDNAPQFPVSQISVWVPENAPVNTRLAIEHPAVDPDVGINGVQTYRLLDYHGMFTLDVEENENGERTPYLIVMGALDRETQDQYVSIIIAEDGGSPPLLGSATLTIGISDINDNCPLFTDSQINVTVYGNATVGTPIAAVQAVDKDLGTNAQITYSYSQKVPQASKDLFHLDENTGVIKLFSKIGGSVLESHKLTILANGPGCIPAVITALVSIIKVIFRPPEIVPRYIANEIDGVVYLKELEPVNTPIAFFTIRDPEGKYKVNCYLDGEGPFRLSPYKPYNNEYLLETTKPMDYELQQFYEVAVVAWNSEGFHVKRVIKVQLLDDNDNAPIFLQPLIELTIEENNSPNAFLTKLYATDADSEERGQVSYFLGPDAPSYFSLDSVTGILTVSTQLDREEKEKYRYTVRAVDCGKPPRESVATVALTVLDKNDNSPRFINKDFSFFVPENFPGYGEIGVISVTDADAGRNGWVALSVVNQSDIFVIDTGKGMLRAKVSLDREQQSSYTLWVEAVDGGEPALSSTAKITILLLDINDNPPLVLFPQSNMSYLLVLPSTLPGSPVTEVYAVDKDTGMNAVIAYSIIGRRGPRPESFRIDPKTGNITLEEALLQTDYGLHRLLVKVSDHGYPEPLHSTVMVNLFVNDTVSNESYIESLLRKEPEINIEEKEPQISIEPTHRKVESVSCMPTLVALSVISLGSITLVTGMGIYICLRKGEKHPREDENLEVQIPLKGKIDLHMRERKPMDISNI

SEQ ID NO: 825373 - protein, 713 aa, Homo sapiens
AGGRGNARSSQALGVSWCPATWHPRLDMGRLHRPRSSTSYRNLPHLFLFFLFVGPFSCLGSYSRATELLYSLNEGLPAGVLIGSLAEDLRLLPRSAGRPDPQSQLPERTGAEWNPPLSFSLASRGLSGQYVTLDNRSGELHTSAQEIDREALCVEGGGGTAWSGSVSISSSPSDSCLLLLDVLVLPQEYFRFVKVKIAIRDINDNAPQFPVSQISVWVPENAPVNTRLAIEHPAVDPDVGINGVQTYRLLDYHGMFTLDVEENENGERTPYLIVMGALDRETQDQYVSIIIAEDGGSPPLLGSATLTIGISDINDNCPLFTDSQINVTVYGNATVGTPIAAVQAVDKDLGTNAQITYSYSQKVPQASKDLFHLDENTGVIKLFSKIGGSVLESHKLTILANGPGCIPAVITALVSIIKVIFRPPEIVPRYIANEIDGVVYLKELEPVNTPIAFFTIRDPEGKYKVNCYLDGEGPFRLSPYKPYNNEYLLETTKPMDYELQQFYEVAVVAWNSEGFHVKRVIKVQLLDDNDNAPIFLQPLIELTIEENNSPNAFLTKLYATDADSEERGQVSYFLGPDAPSYFSLDSVTGILTVSTQLDREEKEKYRYTVRAVDCGKPPRESVATVALTVLDKNDNSPRFINKDFSFFVPENFPGYGEIGVISVTDADAGRNGWVALSVVNQSDIFVIDPGKRYLWGKTSLGLSLQMYLILLCV

SEQ ID NO: 825374 - protein, 631 aa, Homo sapiens
MLPVDGEERKSEGSDTEGDRTSPCAVSSATLKDLEVGGSGRRCSDPAGQPSNLLPQRGLGAPLPAETAHTQPSPNDRSLYLSPKSSSASSSLHARQSPCQEQAAVLNSRSIKISRLNDTIKSLKQQKKQVEHQLEEEKKANNEKQKAERELEGQIQRLNTEKKKLNTDLYHMKHSLRYFEEESKDLAGRLQRSSQRIGELEWSLCAVAATQKKKPDGFSSRSKALLKRQLEQSIREQILLKGHVTQLKESLKEVQLERDQYAEQIKGERAQWQQRMRKMSQEVCTLKEEKKHDTHRVEELERSLSRLKNQMAEPLPPDAPAVSSEVELQDLRKELERVAGELQAQVENNQCISLLNRGQKERLREQEERLQEQQERLREREKRLQQLAEPQSDLEELKHENKSALQLEQQVKELQEKLGQVMETLTSAEKEPEAAVPASGTGGESSGLMDLLEEKADLREHVEKLELGFIQYRRERCHQNVHRLLTEPGDSAKDASPGGGHHQAGPGQGGEEGEAAGAAGDGVAACGSYNEGHGKFLAAAQNPAAEPSPGAPAPQELGAADKHGDLCEASLTNSVEPAQGEAREGSSQDNPTAQPIVQLLGEMQDHQEHPGLGSNCCVPCFCWAWLPRRRR

SEQ ID NO: 825375 - protein, 460 aa, Homo sapiens
MKHSLRYFEEESKDLAGRLQRSSQRIGELEWSLCAVAATQKKKPDGFSSRSKALLKRQLEQSIREQILLKGHVTQLKESLKEVQLERDQYAEQIKGERAQWQQRMRKMSQEVCTLKEEKKHDTHRVEELERSLSRLKNQMAEPLPPDAPAVSSEVELQDLRKELERVAGELQAQVENNQCISLLNRGQKERLREQEERLQEQQERLREREKRLQQLAEPQSDLEELKHENKSALQLEQQVKELQEKLGQVMETLTSAEKEPEAAVPASGTGGESSGLMDLLEEKADLREHVEKLELGFIQYRRERCHQNVHRLLTEPGDSAKDASPGGGHHQAGPGQGGEEGEAAGAAGDGVAACGSYNEGHGKFLAAAQNPAAEPSPGAPAPQELGAADKHGDLCEASLTNSVEPAQGEAREGSSQDNPTAQPIVQLLGEMQDHQEHPGLGSNCCVPCFCWAWLPRRRR

SEQ ID NO: 825376 - protein, 603 aa, Homo sapiens
MAEETGQSKLAAAKKKFKEYWQRNRPGVPAAAKRNTKANGSSPETAASGGCHSSEASSSASSSLHARQSPCQEQAAVLNSRSIKISRLNDTIKSLKQQKKQVEHQLEEEKKANNEKQKAERELEGQIQRLNTEKKKLNTDLYHMKHSLRYFEEESKDLAGRLQRSSQRIGELEWSLCAVAATQKKKPDGFSSRSKALLKRQLEQSIREQILLKGHVTQLKESLKEVQLERDQYAEQIKGERAQWQQRMRKMSQEVCTLKEEKKHDTHRVEELERSLSRLKNQMAEPLPPDAPAVSSEVELQDLRKELERVAGELQAQVENNQCISLLNRGQKERLREQEERLQEQQERLREREKRLQQLAEPQSDLEELKHENKSALQLEQQVKELQEKLGQVMETLTSAEKEPEAAVPASGTGGESSGLMDLLEEKADLREHVEKLELGFIQYRRERCHQNVHRLLTEPGDSAKDASPGGGHHQAGPGQGGEEGEAAGAAGDGVAACGSYNEGHGKFLAAAQNPAAEPSPGAPAPQELGAADKHGDLCEASLTNSVEPAQGEAREGSSQDNPTAQPIVQLLGEMQDHQEHPGLGSNCCVPCFCWAWLPRRRR

SEQ ID NO: 825377 - protein, 603 aa, Homo sapiens; identical to SEQ ID NO: 825376

SEQ ID NO: 825378 - protein, 109 aa, Homo sapiens
QFCVPIEGTDLVTGGSDAWFPVVEFVFRKPSPQSSGLADKHGDLCEASLTNSVEPAQGEAREGSSQDNPTAQPIVQLLGEMQDHQEHPGLGSNCCVPCFCWAWLPRRRR

SEQ ID NO: 825379 - protein, 460 aa, Homo sapiens; identical to SEQ ID NO: 825375

SEQ ID NO: 825380 - protein, 460 aa, Homo sapiens; identical to SEQ ID NO: 825375

SEQ ID NO: 825381 - protein, 460 aa, Homo sapiens; identical to SEQ ID NO: 825375

SEQ ID NO: 825382 - protein, 70 aa, Homo sapiens
AEARHCLARLLEGDLAADGEGEHRGPQVPKQGSMGRAAGIGSTEMRKKKNTCSAPETRKGTEIGGQKEVH

SEQ ID NO: 825383 - protein, 617 aa, Homo sapiens
MVQGIIRDSLEVAYLSKEDLEVGGSGRRCSDPAGQPSNLLPQRGLGAPLPAETAHTQPSPNDRSLYLSPKSSSASSSLHARQSPCQEQAAVLNSRSIKISRLNDTIKSLKQQKKQVEHQLEEEKKANNEKQKAERELEGQIQRLNTEKKKLNTDLYHMKHSLRYFEEESKDLAGRLQRSSQRIGELEWSLCAVAATQKKKPDGFSSRSKALLKRQLEQSIREQILLKGHVTQLKESLKEVQLERDQYAEQIKGERAQWQQRMRKMSQEVCTLKEEKKHDTHRVEELERSLSRLKNQMAEPLPPDAPAVSSEVELQDLRKELERVAGELQAQVENNQCISLLNRGQKERLREQEERLQEQQERLREREKRLQQLAEPQSDLEELKHENKSALQLEQQVKELQEKLGQVMETLTSAEKEPEAAVPASGTGGESSGLMDLLEEKADLREHVEKLELGFIQYRRERCHQNVHRLLTEPGDSAKDASPGGGHHQAGPGQGGEEGEAAGAAGDGVAACGSYNEGHGKFLAAAQNPAAEPSPGAPAPQELGAADKHGDLCEASLTNSVEPAQGEAREGSSQDNPTAQPIVQLLGEMQDHQEHPGLGSNCCVPCFCWAWLPRRRR

SEQ ID NO: 825384 - protein, 460 aa, Homo sapiens; identical to SEQ ID NO: 825375

SEQ ID NO: 825385 - protein, 460 aa, Homo sapiens; identical to SEQ ID NO: 825375

SEQ ID NO: 825386 - protein, 979 aa, Homo sapiens
MSILRQLTYRRCDSHPRLIKELLACIAEECLKQHRTDVSFVDRSFTRDSTQKGWYQADVSGESKIVATQLTEELTTAIRTYQSITERITNSRNKIKQVKENLLSCKMLLHCKRDELRKLWIEGIEHKHVLNLLDEIENIKQVPQKLEQCMASKHYLSATDMLVSAVESLEGPLLQVEGLSDLRLELHSKKMNLHLVLIDELHRHLYIKSTSRVVQRNKEKGKISSLVKDASVPLIDVTNLPTPRKFLDTSHYSTAGSSSVREINLQDIKEDLELDPEENSTLFMGILIKGLAKLKKIPETVKAIIERLEQELKQIVKRSTTQVADSGYQRGENVTVENQPRLLLELLELLFDKFNAVAAAHSVVLGYLQDTVVTPLTQQEDIKLYDMADVWVKIQDVLQMLLTEYLDMKNTRTASEPSAQLSYASTGREFAAFFAKKKPQRPKNSLFKFESSSHAISMSAYLREQRRELYSRSGELQGGPDDNLIEGGGTKFVCKPGARNITVIFHPLLRFIQEIEHALGLGPAKQCPLREFLTVYIKNIFLNQVLAEINKEIEGVTKTSDPLKILANADTMKVLGVQRPLLQSTIIVEKTVQDLLNLMHDLSAYSDQFLNMVCVKLQEYKDTCTAAYRGIVQSEEKLVISASWAKDDDISRLLKSLPNWMNMAQPKQLRPKREEEEDFIRAAFGKESEVLIGNLGDKLIPPQDILRDVSDLKALANMHESLEWLASRTKSAFSNLSTSQMLSPAQDSHTNTDLPPVSEQIMQTLSELAKSFQDMADRCLLVLHLEVRVHCFHYLIPLAKEGNYAIVANVESMDYDPLVVKLNKDISAIEEAMSASLQQHKFQYIFEGLGHLISCILINGAQYFRRISESGIKKMCRNIFVLQQNLTNITMSREADLDFARQYYEMLYNTADELLNLVVDQGVKYTELEYIHALTLLHRSQTGVGELTTQNTRLQRLKEIICEQAAIKQATKDKKITTV

SEQ ID NO: 825387 - protein, 444 aa, Homo sapiens
LGRGGVNGRVLAEINKEIEGVTKTSDPLKILANADTMKVLGVQRPLLQSTIIVEKTVQDLLNLMHDLSAYSDQFLNMVCVKLQEYKDTCTAAYRGIVQSEEKLVISASWAKDDDISRLLKSLPNWMNMAQPKQLRPKREEEEDFIRAAFGKESEVLIGNLGDKLIPPQDILRDVSDLKALANMHESLEWLASRTKSAFSNLSTSQMLSPAQDSHTNTDLPPVSEQIMQTLSELAKSFQDMADRCLLVLHLEVRVHCFHYLIPLAKEGNYAIVANVESMDYDPLVVKLNKDISAIEEAMSASLQQHKFQYIFEGLGHLISCILINGAQYFRRISESGIKKMCRNIFVLQQNLTNITMSREADLDFARQYYEMLYNTADELLNLVVDQGVKYTELEYIHALTLLHRSQTGVGELTTQNTRLQRLKEIICEQAAIKQATKDKKITTV

SEQ ID NO: 825388 - protein, 377 aa, Homo sapiens
GQRTRGLPPSWKRPATILGALGARTPWGIVQSEEKLVISASWAKDDDISRLLKSLPNWMNMAQPKQLRPKREEEEDFIRAAFGKESEVLIGNLGDKLIPPQDILRDVSDLKALANMHESLEWLASRTKSAFSNLSTSQMLSPAQDSHTNTDLPPVSEQIMQTLSELAKSFQDMADRCLLVLHLEVRVHCFHYLIPLAKEGNYAIVANVESMDYDPLVVKLNKDISAIEEAMSASLQQHKFQYIFEGLGHLISCILINGAQYFRRISESGIKKMCRNIFVLQQNLTNITMSREADLDFARQYYEMLYNTADELLNLVVDQGVKYTELEYIHALTLLHRSQTGVGELTTQNTRLQRLKEIICEQAAIKQATKDKKITTV

SEQ ID NO: 825389 - protein, 974 aa, Homo sapiens [sequence omitted]

SEQ ID NO: 825390 - protein, 974 aa, Homo sapiens [sequence omitted]

SEQ ID NO: 825391 - protein, 831 aa, Homo sapiens
MAAEAAGGKYRSTVSKSKDPSGLLISVIRTLSTSDDVEDRENEKGRLEEAYEKCDRDLDELIVQHYTELTTAIRTYQSITERITNSRNKIKQVKENLLSCKMLLHCKRDELRKLWIEGIEHKHVLNLLDEIENIKQVPQKLEQCMASKHYLSATDMLVSAVESLEGPLLQVEGLSDLRLELHSKKMNLHLVLIDELHRHLYIKSTSRVVQRNKEKGKISSLVKDASVPLIDVTNLPTPRKFLDTSHYSTAGSSSVREINLQDIKEDLELDPEENSTLFMGILIKGLAKLKKIPETVKAIIERLEQELKQIVKRSTTQVADSGYQRGENVTVENQPRLLLELLELLFDKFNAVAAAHSVVLGYLQDTVVTPLTQQEDIKLYDMADVWVKIQDVLQMLLTEYLDMKNTRTASEPSAQLSYASTGREFAAFFAKKKPQRPKNSLFKFESSSHAISMSAYLREQRRELYSRSGELQGGPDDNLIEGGGTKFVCKPGARNITVIFHPLLRFIQEIEHALGLGPAKQCPLREFLTVYIKNIFLNQVLAEINKEIEGVTKTSDPLKILANADTMKVLGVQRPLLQSTIIVEKTVQDLLNLMHDLSAYSDQFLNMVCVKLQEYKDTCTAAYRGIVQSEEKLVISASWAKDDDISRLLKSLPNWMNMAQPKQLRPKREEEEDFIRAAFGKESEVLIGNLGDKLIPPQDILRDVSDLKALANMHESLEWLASRTKSAFSNLSTSQMLSPAQDSHTNTDLPPVSEQIMQTLSELAKSFQDMADRCLLVLHLEVRVHCFHYLIPLAKEGNYAIVVSEVGMTRCQLTRLGMRADAAQRQSDIQA

SEQ ID NO: 825392 - protein, 773 aa, Homo sapiens
  misc_feature (768)..(768): Xaa can be any naturally occurring amino acid
  misc_feature (773)..(773): Xaa can be any naturally occurring amino acid
MAAEAAGGKYRSTVSKSKDPSGLLISVIRTLSTSDDVEDRENEKGRLEEAYEKCDRDLDELIVQHYTELTTAIRTYQSITERITNSRNKIKQVKENLLSCKMLLHCKRDELRKLWIEGIEHKHVLNLLDEIENIKQVPQKLEQCMASKHYLSATDMLVSAVESLEGPLLQVEGLSDLRLELHSKKMNLHLVLIDELHRHLYIKSTSRVVQRNKEKGKISSLVKDASVPLIDVTNLPTPRKFLDTSHYSTAGSSSVREINLQDIKEDLELDPEENSTLFMGILIKGLAKLKKIPETVKAIIERLEQELKQIVKRSTTQVADSGYQRGENVTVENQPRLLLELLELLFDKFNAVAAAHSVVLGYLQDTVVTPLTQQEDIKLYDMADVWVKIQDVLQMLLTEYLDMKNTRTASEPSAQLSYASTGREFAAFFAKKKPQRPKNSLFKFESSSHAISMSAYLREQRRELYSRSGELQGGPDDNLIEGGGTKFVCKPGARNITVIFHPLLRFIQEIEHALGLGPAKQCPLREFLTVYIKNIFLNQVLAEINKEIEGVTKTSDPLKILANADTMKVLGVQRPLLQSTIIVEKTVQDLLNLMHDLSAYSDQFLNMVCVKLQEYKDTCTAAYRGIVQSEEKLVISASWAKDDDISRLLKSLPNWMNMAQPKQLRPKREEEEDFIRAAFGKESEVLIGNLGDKLIPPQDILRDVSDLKALANMHESLEWLASRTKSAFSNLSTSQMLSPAQDSHTNTDLPPVSEQIMQTLSERGDPKXRKQAX

SEQ ID NO: 825393 - protein, 473 aa, Homo sapiens
MAAEAAGGKYRSTVSKSKDPSGLLISVIRTLSTSDDVEDRENEKGRLEEAYEKCDRDLDELIVQHYTELTTAIRTYQSITERITNSRNKIKQVKENLLSCKMLLHCKRDELRKLWIEGIEHKHVLNLLDEIENIKQVPQKLEQCMASKHYLSATDMLVSAVESLEGPLLQVEGLSDLRLELHSKKMNLHLVLIDELHRHLYIKSTSRVVQRNKEKGKISSLVKDASVPLIDVTNLPTPRKFLDTSHYSTAGSSSVREINLQDIKEDLELDPEENSTLFMGILIKGLAKLKKIPETVKAIIERLEQELKQIVKRSTTQVADSGYQRGENVTVENQPRLLLELLELLFDKFNAVAAAHSVVLGYLQDTVVTPLTQQEDIKLYDMADVWVKIQDVLQMLLTEYLDMKNTRTASEPSAQLSYASTGREFAAFFAKKKPQRPKNSLFKFESSSHAISMSAYLREQRRELYSRSGELQG

SEQ ID NO: 825394 - protein, 402 aa, Homo sapiens
MAAEAAGGKYRSTVSKSKDPSGLLISVIRTLSTSDDVEDRENEKGRLEEAYEKCDRDLDELIVQHYTELTTAIRTYQSITERITNSRNKIKQVKENLLSCKMLLHCKRDELRKLWIEGIEHKHVLNLLDEIENIKQVPQKLEQCMASKHYLSATDMLVSAVESLEGPLLQVEGLSDLRLELHSKKMNLHLVLIDELHRHLYIKSTSRVVQRNKEKGKISSLVKDASVPLIDVTNLPTPRKFLDTSHYSTAGSSSVREINLQDIKEDLELDPEENSTLFMGILIKGLAKLKKIPETVKAIIERLEQELKQIVKRSTTQVADSGYQRGENVTVENQPRLLLELLELLFDKFNAVAAAHSVVLGYLQDTVVTPLTQQEDIKLYDMADVWVKIQDVLQVRAFYKGC

SEQ ID NO: 825395 - protein, 52 aa, Homo sapiens
MNLHLVLIDELHRHLYIKSTSRVVQRNKEKGKIRLKRLFAISVLWQCRIGRN

SEQ ID NO: 825396 - protein, 974 aa, Homo sapiens [sequence omitted]

SEQ ID NO: 825397 - protein, 576 aa, Homo sapiens
KTKMSKGEDPNNPRSIKRISQGGRDNHLAIAKCDLTQLKKKQSEVSNGSRETISMKTCCQHGDRGYWSTGYYWRGGPDDNLIEGGGTKFVCKPGARNITVIFHPLLRFIQEIEHALGLGPAKQCPLREFLTVYIKNIFLNQVLAEINKEIEGVTKTSDPLKILANADTMKVLGVQRPLLQSTIIVEKTVQDLLNLMHDLSAYSDQFLNMVCVKLQEYKDTCTAAYRGIVQSEEKLVISASWAKDDDISRLLKSLPNWMNMAQPKQLRPKREEEEDFIRAAFGKESEVLIGNLGDKLIPPQDILRDVSDLKALANMHESLEWLASRTKSAFSNLSTSQMLSPAQDSHTNTDLPPVSEQIMQTLSELAKSFQDMADRCLLVLHLEVRVHCFHYLIPLAKEGNYAIVANVESMDYDPLVVKLNKDISAIEEAMSASLQQHKFQYIFEGLGHLISCILINGAQYFRRISESGIKKMCRNIFVLQQNLTNITMSREADLDFARQYYEMLYNTADELLNLVVDQGVKYTELEYIHALTLLHRSQTGVGELTTQNTRLQRLKEIICEQAAIKQATKDKKITTV

SEQ ID NO: 825398 - protein, 974 aa, Homo sapiens [sequence omitted]

SEQ ID NO: 825399 - protein, 912 aa, Homo sapiens
MAAEAAGGKYRSTVSKSKDPSGLLISVIRTLSTSDDVEDRENEKGRLEEAYEKCDRDLDELIVQHYTELTTAIRTYQSITERITNSRNKIKQVKENLLSCKMLLHCKRDELRKLWIEGIEHKHVLNLLDEIENIKQVPQKLEQCMASKHYLSATDMLVSAVESLEGPLLQVEGLSDLRLELHSKKMNLHLVLIDELHRHLYIKSTSRVVQRNKEKGKISSLVKDASVPLIDVTNLPTPRKFLDTSHYSTAGSSSVREINLQDIKEDLELDPEENSTLFMGILIKGLAKLKKIPETVKAIIERLEQELKQIVKRSTTQVADSGYQRGENVTVENQPRLLLELLELLFDKFNAVAAAHSVVLGYLQDTVVTPLTQQEDIKLYDMADVWVKIQDVLQMLLTEYLDMKNTRTASEPSAQLSYASTGREFAAFFAKKKPQRPKNSLFKFESSSHAISMSAYLREQRRELYSRSGELQGGPDDNLIEGGGTKFVCKPGARNITVIFHPLLRFIQEIEHALGLGPAKQCPLREFLTVYIKNIFLNQVLAEINKEIEGVTKTSDPLKILANADTMKVLGVQRPLLQSTIIVEKTVQDLLNLMHDLSAYSDQFLNMVCVKLQEYKDTCTAAYRGIVQSEEKLVISASWAKDDDISRLLKSLPNWMNMAQPKQLRPKREEEEDFIRAAFGKESEVLIGNLGDKLIPPQDILRDVSDLKALANMHESLEWLASRTKSAFSNLSTSQMLSPAQDSHTNTDLPPVSEQIMQTLSELAKSFQDMADRCLLVLHLEVRVHCFHYLIPLAKEGNYAIVANVESMDYDPLVVKLNKDISAIEEAMSASLQQHKFQYIFEGLGHLISCILINGAQYFRRISESGIKKMCRNIFVLQQNLTNITMSPGHQSSCCPWFIGHRRQQCTDWATS

SEQ ID NO: 825400 - protein, 896 aa, Homo sapiens
MAAEAAGGKYRSTVSKSKDPSGLLISVIRTLSTSDDVEDRENEKGRLEEAYEKCDRDLDELIVQHYTELTTAIRTYQSITERITNSRNKIKQVKENLLSCKMLLHCKRDELRKLWIEGIEHKHVLNLLDEIENIKQVPQKLEQCMASKHYLSATDMLVSAVESLEGPLLQVEGLSDLRLELHSKKMNLHLVLIDELHRHLYIKSTSRVVQRNKEKGKISSLVKDASVPLIDVTNLPTPRKFLDTSHYSTAGSSSVREINLQDIKEDLELDPEENSTLFMGILIKGLAKLKKIPETVKAIIERLEQELKQIVKRSTTQVADSGYQRGENVTVENQPRLLLELLELLFDKFNAVAAAHSVVLGYLQDTVVTPLTQQEDIKLYDMADVWVKIQDVLQMLLTEYLDMKNTRTASEPSAQLSYASTGREFAAFFAKKKPQRPKNSLFKFESSSHAISMSAYLREQRRELYSRSGELQGGPDDNLIEGGGTKFVCKPGARNITVIFHPLLRFIQEIEHALGLGPAKQCPLREFLTVYIKNIFLNQVLAEINKEIEGVTKTSDPLKILANADTMKVLGVQRPLLQSTIIVEKTVQDLLNLMHDLSAYSDQFLNMVCVKLQEYKDTCTAAYRGIVQSEEKLVISASWAKDDDISRLLKSLPNWMNMAQPKQLRPKREEEEDFIRAAFGKESEVLIGNLGDKLIPPQDILRDVSDLKALANMHESLEWLASRTKSAFSNLSTSQMLSPAQDSHTNTDLPPVSEQIMQTLSELAKSFQDMADRCLLVLHLEVRVHCFHYLIPLAKEGNYAIVANVESMDYDPLVVKLNKDISAIEEAMSASLQQHKFQYIFEGLGHLISCILINGAQYFRRISESGIKKMCRNIFVLQQNLTNITMSREADLDFAR

SEQ ID NO: 825401 - protein, 474 aa, Homo sapiens
MAAEAAGGKYRSTVSKSKDPSGLLISVIRTLSTSDDVEDRENEKGRLEEAYEKCDRDLDELIVQHYTELTTAIRTYQSITERITNSRNKIKQVKENLLSCKMLLHCKRDELRKLWIEGIEHKHVLNLLDEIENIKQVPQKLEQCMASKHYLSATDMLVSAVESLEGPLLQVEGLSDLRLELHSKKMNLHLVLIDELHRHLYIKSTSRVVQRNKEKGKISSLVKDASVPLIDVTNLPTPRKFLDTSHYSTAGSSSVREINLQDIKEDLELDPEENSTLFMGILIKGLAKLKKIPETVKAIIERLEQELKQIVKRSTTQVADSGYQRGENVTVENQPRLLLELLELLFDKFNAVAAAHSVVLGYLQDTVVTPLTQQEDIKLYDMADVWVKIQDVLQMLLTEYLDMKNTRTASEPSAQLSYASTGREFAAFFAKKKPQRPKNSLFKFESSSHAISMSAYLREQRRELYSRSGELQGE

SEQ ID NO: 825402 - protein, 593 aa, Homo sapiens
MAAEAAGGKYRSTVSKSKDPSGLLISVIRTLSTSDDVEDRENEKGRLEEAYEKCDRDLDELIVQHYTELTTAIRTYQSITERITNSRNKIKQVKENLLSCKMLLHCKRDELRKLWIEGIEHKHVLNLLDEIENIKQVPQKLEQCMASKHYLSATDMLVSAVESLEGPLLQVEGLSDLRLELHSKKMNLHLVLIDELHRHLYIKSTSRVVQRNKEKGKISSLVKDASVPLIDVTNLPTPRKFLDTSHYSTAGSSSVREINLQDIKEDLELDPEENSTLFMGILIKGLAKLKKIPETVKAIIERLEQELKQIVKRSTTQVADSGYQRGENVTVENQPRLLLELLELLFDKFNAVAAAHSVVLGYLQDTVVTPLTQQEDIKLYDMADVWVKIQDVLQMLLTEYLDMKNTRTASEPSAQLSYASTGREFAAFFAKKKPQRPKNSLFKFESSSHAISMSAYLREQRRELYSRSGELQGGPDDNLIEGGGTKFVCKPGARNITVIFHPLLRFIQEIEHALGLGPAKQCPLREFLTVYIKNIFLNQVLAEINKEIEGVTKTSDPLKILANADTMKVLGVQRPLLQVIIHFELTIFISNFH

SEQ ID NO: 825403 - protein, 225 aa, Homo sapiens
MAAEAAGGKYRSTVSKSKDPSGLLISVIRTLSTSDDVEDRENEKGRLEEAYEKCDRDLDELIVQHYTELTTAIRTYQSITERITNSRNKIKQVKENLLSCKMLLHCKRDELRKLWIEGIEHKHVLNLLDEIENIKQVPQKLEQCMASKHYLSATDMLVSAVESLEGPLLQVEGLSDLRLELHSKKMNLHLVLIDELHRHLYIKSTSRVVQRNKEKGKIRLKRLFA

SEQ ID NO: 825404 - protein, 209 aa, Homo sapiens
MAANVAHGLQQNVLYVDSNGGLTASRLLQLLQAKTQDEEEQAEALRRIQVVHAFDIFQMLDVLQELRGTVAQQVTGSSGTVKVVVVDSVTAVVSPLLGGQQREGLALMMQLARELKTLARDLGMAVVVTNHITRDRDSGRLKPALGRSWSFVPSTRILLDTIEGAGASGGRRMACLAKSSRQPTGFQEMVDIGTWGTSEQSATLQGDQT

SEQ ID NO: 825405 - protein, 104 aa, Homo sapiens
MVMAALPFSEDLKMPDTCVLPHCPGKENKDGLDKLLDAGLYTGEVTEIVGGPGSGKTQAEALRRIQVVHAFDIFQMLDVLQELRGTVAQQVSLLFCPSLLNSAF

SEQ ID NO: 825406 - protein, 328 aa, Homo sapiens
MGVLRVGLCPGLTEEMIQLLRSHRIKTVVDLVSADLEEVAQKCGLSYKALVALRRVLLAQFSAFPVNGADLYEELKTSTAILSTGIGSLDKLLDAGLYTGEVTEIVGGPGSGKTQVCLCMAANVAHGLQQNVLYVDSNGGLTASRLLQLLQAKTQDEEEQAEALRRIQVVHAFDIFQMLDVLQELRGTVAQQVTGSSGTVKVVVVDSVTAVVSPLLGGQQREGLALMMQLARELKTLARDLGMAVVVTNHITRDRDSGRLKPALGRSWSFVPSTRILLDTIEGAGASGGRRMACLAKSSRQPTGFQEMVDIGTWGTSEQSATLQGDQT

SEQ ID NO: 825407 - protein, 388 aa, Homo sapiens
MGVLRVGLCPGLTEEMIQLLRSHRIKTVVDLVSADLEEVAQKCGLSYKALVALRRVLLAQFSAFPVNGADLYEELKTSTAILSTGIGRHGGRTQVGTWEDCSCLRSPQGDRGVGSGMLLKKAGLGHGGTDGLSLNAFDERGTAVSTSRLDKLLDAGLYTGEVTEIVGGPGSGKTQVCLCMAANVAHGLQQNVLYVDSNGGLTASRLLQLLQAKTQDEEEQAEALRRIQVVHAFDIFQMLDVLQELRGTVAQQVTGSSGTVKVVVVDSVTAVVSPLLGGQQREGLALMMQLARELKTLARDLGMAVVVTNHITRDRDSGRLKPALGRSWSFVPSTRILLDTIEGAGASGGRRMACLAKSSRQPTGFQEMVDIGTWGTSEQSATLQGDQT

SEQ ID NO: 825408 - protein, 328 aa, Homo sapiens; identical to SEQ ID NO: 825406

SEQ ID NO: 825409 - protein, 373 aa, Homo sapiens
MIQLLRSHRIKTVVDLVSADLEEVAQKCGLSYKALVALRRVLLAQFSAFPVNGADLYEELKTSTAILSTGIGRHGGRTQVGTWEDCSCLRSPQGDRGVGSGMLLKKAGLGHGGTDGLSLNAFDERGTAVSTSRLDKLLDAGLYTGEVTEIVGGPGSGKTQVCLCMAANVAHGLQQNVLYVDSNGGLTASRLLQLLQAKTQDEEEQAEALRRIQVVHAFDIFQMLDVLQELRGTVAQQVTGSSGTVKVVVVDSVTAVVSPLLGGQQREGLALMMQLARELKTLARDLGMAVVVTNHITRDRDSGRLKPALGRSWSFVPSTRILLDTIEGAGASGGRRMACLAKSSRQPTGFQEMVDIGTWGTSEQSATLQGDQT

SEQ ID NO: 825410 - protein, 565 aa, Homo sapiens
MGVLRVGLCPGLTEEMIQLLRSHRIKTVVDLVSADLEEVAQKCGLSYKALVALRRVLLAQFSAFPVNGADLYEELKTSTAILSTGIGSLDKLLDAGLYTGEVTEIVGGPGSGKTQAEALRRIQVVHAFDIFQMLDVLQELRGTVAQQVSLLFCPSLLNSAFWCYLCGQVSYYRLFGNADVQSGDSNYAVLLPGWNSRAPKSHTSLFTCSSSLLNSKATLSGRIMSYLCLHSPLGDWFFRNCEGGGCGLGHCGGFPTSGRSAEGRLGLDDAAGPRAEDPGPGPWHGSGGDQPHNSRQGQREAQTCPRTLLELCAQHSDSPGHHRGSRSIRRPAHGVSGQIFPTDFIMWATCCNWFCLDGQPEEVPPPQGARMQAYSNPGYSSFPSPTGLEPSCKSCGAHFANTARKQTCLDCKKNFCMTCSSQVGNGPRLCLLCQRFRATAFQREELMKMKVKDLRDYLSLHDISTEMCREKEELVLLVLGQQPVISQEDRTRASTLSPDFPEQQAFLTQPHSSMVPPTSPNLPSSSAQATSVPPAQVQENQQGQWPCVSGSRGTRLPGERGQSTC

SEQ ID NO: 825411 - protein, 118 aa, Homo sapiens
MGVLRVGLCPGLTEEMIQLLRSHRIKTVVDLVSADLEEVAQKCGLSYKALVALRRVLLAQFSAFPVNGADLYEELKTSTAILSTGIGRHGGRTQVGTWEDCSCLRSPQGDRGVGSGML

SEQ ID NO: 825412 - protein, 220 aa, Homo sapiens
MWATCCNWFCLDGQPEEVPPPQGARMQAYSNPGYSSFPSPTGLEPSCKSCGAHFANTARKQTCLDCKKNFCMTCSSQVGNGPRLCLLCQRFRATAFQREELMKMKVKDLRDYLSLHDISTEMCREKEELVLLVLGQQPVISQEDRTRASTLSPDFPEQQAFLTQPHSSMVPPTSPNLPSSSAQATSVPPAQVQENQQGQWPCVSGSRGTRLPGERGQSTC

SEQ ID NO: 825413 - protein, 209 aa, Homo sapiens; identical to SEQ ID NO: 825404

SEQ ID NO: 825414 - protein, 220 aa, Homo sapiens; identical to SEQ ID NO: 825412

SEQ ID NO: 825415 - protein, 220 aa, Homo sapiens; identical to SEQ ID NO: 825412

SEQ ID NO: 825416 - protein, 226 aa, Homo sapiens
MNKDFIMWATCCNWFCLDGQPEEVPPPQGARMQAYSNPGYSSFPSPTGLEPSCKSCGAHFANTARKQTCLDCKKNFCMTCSSQVGNGPRLCLLCQRFRATAFQREELMKMKVKDLRDYLSLHDISTEMCREKEELVLLVLGQQPVISQEDRTRASTLSPDFPEQQAFLTQPHSSMVPPTSPNLPSSSAQATSVPPAQVQENQQGQWPCVSGSRGTRLPGERGQSTC

SEQ ID NO: 825417 - protein, 342 aa, Homo sapiens
MSYLCLHSPLGDWFFRNCEGGGCGLGHCGGFPTSGRSAEGRLGLDDAAGPRAEDPGPGPWHGSGGDQPHNSRQGQREAQTCPRTLLELCAQHSDSPGHHRGSRSIRRPAHGVSGQIFPTDFIMWATCCNWFCLDGQPEEVPPPQGARMQAYSNPGYSSFPSPTGLEPSCKSCGAHFANTARKQTCLDCKKNFCMTCSSQVGNGPRLCLLCQRFRATAFQREELMKMKVKDLRDYLSLHDISTEMCREKEELVLLVLGQQPVISQEDRTRASTLSPDFPEQQAFLTQPHSSMVPPTSPNLPSSSAQATSVPPAQVQENQQGQWPCVSGSRGTRLPGERGQSTC

SEQ ID NO: 825418 - protein, 342 aa, Homo sapiens; identical to SEQ ID NO: 825417

SEQ ID NO: 825419 - protein, 209 aa, Homo sapiens; identical to SEQ ID NO: 825404

SEQ ID NO: 825420 - protein, 70 aa, Homo sapiens
PPPPPFWGWGGEKNNNPPQFTPAEGAGASGGRRMACLAKSSRQPTGFQEMVDIGTWGTSEQSATLQGDQT

SEQ ID NO: 825421 - protein, 303 aa, Homo sapiens
MQLARELKTLARDLGMAVVVTNHITRDRDSGRLKPALGRSWSFVPSTRILLDTIEGAGASGGRRMACLAKSSRQILSCGQPAATGSAWMDSLRRSHHPREPGCRPIPTLGTAPSLPQQAWNQAASPVGLTLQTRPGRANGHVSQDQEEPVYLESVARVPAEDETQSIDSEDSFVPGRRASLSDLTDLEDIEGLTVRQLKEILARNFVNYKGCCEKWELMERVTRLYKDQKGLQHLVSGAEDQNGGAVPSGLEENLCKICMDSPIDCVLLECGHMVTCTKCGKRMNECPICRQYVIRAVHVFRS

SEQ ID NO: 825422 - protein, 110 aa, Homo sapiens
MGVLRVGLCPGLTEEMIQLLRSHRIKTVVDLVSADLEEVAQKCGLSYKALVALRRVLLAQFSAFPVNGADLYEELKTSTAILSTGIGRFVCVLGEEGERQEDGASSQLCF

SEQ ID NO: 825423 - protein, 282 aa, Homo sapiens
WNPEAAARRDPAGGLWARESRRIPGGRMTPSPTLGAASSSLLSPPAASAPVSSLGRVVDLVSADLEEVAQKCGLSYKALVALRRVLLAQFSAFPVNGADLYEELKTSTAILSTGIGSLDKLLDAGLYTGEVTEIVGGPGSGKTQVCLCMAANVAHGLQQNVLYVDSNGGLTASRLLQLLQAKTQDEEEQAEALRRIQVVHAFDIFQMLDVLQELRGTVAQQVTGSSGTVKVVVVDSVTAVVSPLLGGQQREGLALMMQLARELKTLARDLGMAVVVRKQAWP

SEQ ID NO: 825424 - protein, 328 aa, Homo sapiens; identical to SEQ ID NO: 825406

SEQ ID NO: 825425 - protein, 328 aa, Homo sapiens; identical to SEQ ID NO: 825406

SEQ ID NO: 825426 - protein, 342 aa, Homo sapiens; identical to SEQ ID NO: 825417

SEQ ID NO: 825427 - protein, 342 aa, Homo sapiens; identical to SEQ ID NO: 825417

SEQ ID NO: 825428 - protein, 405 aa, Homo sapiens
MAANVAHGLQQNVLYVDSNGGLTASRLLQLLQAKTQDEEEQAEALRRIQVVHAFDIFQMLDVLQELRGTVAQQVTGSSGTVKVVVVDSVTAVVSPLLGGQQREGLALMMQLARELKTLARDLGMAVVVTNHITRDRDSGRLKPALGRSWSFVPSTRILLDTIEGAGASGGRRMACLAKSSRQIFIMWATCCNWFCLDGQPEEVPPPQGARMQAYSNPGYSSFPSPTGLEPSCKSCGAHFANTARKQTCLDCKKNFCMTCSSQVGNGPRLCLLCQRFRATAFQREELMKMKVKDLRDYLSLHDISTEMCREKEELVLLVLGQQPVISQEDRTRASTLSPDFPEQQAFLTQPHSSMVPPTSPNLPSSSAQATSVPPAQVQENQQGQWPCVSGSRGTRLPGERGQSTC

SEQ ID NO: 825429 - protein, 342 aa, Homo sapiens; identical to SEQ ID NO: 825417

SEQ ID NO: 825430 - protein, 209 aa, Homo sapiens; identical to SEQ ID NO: 825404

SEQ ID NO: 825431 - protein, 412 aa, Homo sapiens
MGVLRVGLCPGLTEEMIQLLRSHRIKTVVDLVSADLEEVAQKCGLSYKAEALRRIQVVHAFDIFQMLDVLQELRGTVAQQVTGSSGTVKVVVVDSVTAVVSPLLGGQQREGLALMMQLARELKTLARDLGMAVVVTNHITRDRDSGRLKPALGRSWSFVPSTRILLDTIEGAGASGGRRMACLAKSSRQIFIMWATCCNWFCLDGQPEEVPPPQGARMQAYSNPGYSSFPSPTGLEPSCKSCGAHFANTARKQTCLDCKKNFCMTCSSQVGNGPRLCLLCQRFRATAFQREELMKMKVKDLRDYLSLHDISTEMCREKEELVLLVLGQQPVISQEDRTRASTLSPDFPEQQAFLTQPHSSMVPPTSPNLPSSSAQATSVPPAQVQENQQGQWPCVSGSRGTRLPGERGQSTC

SEQ ID NO: 825432 - protein, 220 aa, Homo sapiens; identical to SEQ ID NO: 825412

SEQ ID NO: 825433 - protein, 216 aa, Homo sapiens
MGVLRVGLCPGLTEEMIQLLRSHRIKTVVDLVSADLEEVAQKCGLSYKAEALRRIQVVHAFDIFQMLDVLQELRGTVAQQVTGSSGTVKVVVVDSVTAVVSPLLGGQQREGLALMMQLARELKTLARDLGMAVVVTNHITRDRDSGRLKPALGRSWSFVPSTRILLDTIEGAGASGGRRMACLAKSSRQPTGFQEMVDIGTWGTSEQSATLQGDQT

SEQ ID NO: 825434 - protein, 151 aa, Homo sapiens
MLDVLQELRGTVAQQVTGSSGTVKVVVVDSVTAVVSPLLGGQQREGLALMMQLARELKTLARDLGMAVVVTNHITRDRDSGRLKPALGRSWSFVPSTRILLDTIEGAGASGGRRMACLAKSSRQPTGFQEMVDIGTWGTSEQSATLQGDQT

SEQ ID NO: 825435 - protein, 234 aa, Homo sapiens
MSYLCLHSPLGDWFFRNCEGGGCGLGHCGGFPTSGRSAEGRLGLDDAAGPRAEDPGPGPWHGSGGDQPHNSRQGQREAQTCPRTLLELCAQHSDSPGHHRGSRSIRRPAHGVSGQIFPTDFIMWATCCNWFCLDGQPEEVPPPQGARMQAYSNPGYSSFRSTYLTQPPLFICTSHLCSPSPGSGESAGPMAMCLRIKRNPSTWRAWPEYLLRMRPSLLTQRTALSQAEGPLCLT

SEQ ID NO: 825436 - protein, 388 aa, Homo sapiens; identical to SEQ ID NO: 825407

SEQ ID NO: 825437 - protein, 112 aa, Homo sapiens
MWATCCNWFCLDGQPEEVPPPQGARMQAYSNPGYSSFPSPTGLEPSCKSCGAHFANTARKVSADFLACSATAAYGPWASATDPSECLQPFLSLCDAGDPELSLSQKCSRRTN

SEQ ID NO: 825438 - protein, 117 aa, Homo sapiens
MSGWESYYKTEGDEEAEEEQEENLEASGDYKYSGRDSLIFLVDASKAMFESQSEDELTPFDMSIQCIQSVYISKIISSDRDLLAVVFYGTEKDKNSVNFNRIFTSYRSWIIQVQNEF

SEQ ID NO: 825439 - protein, 117 aa, Homo sapiens; identical to SEQ ID NO: 825438

SEQ ID NO: 825440 - protein, 110 aa, Homo sapiens
VGLSVGRLSVSAYLEETEELKRFDDPGLMLMGFKPLVLLKKHHYLRPSLFVYPEESLVIGSSTLFSALLIKCLEKEVAALCRYTPLEYNLPVEYNLPVEYNLPVEYNLPV

SEQ ID NO: 825441 - protein, 157 aa, Homo sapiens [sequence omitted]

SEQ ID NO: 825442 - protein, 262 aa, Homo sapiens [sequence omitted]

SEQ ID NO: 825443 - protein, 262 aa, Homo sapiens [sequence omitted]

SEQ ID NO: 825444 - protein, 262 aa, Homo sapiens [sequence omitted]

SEQ ID NO: 825445 - protein, 262 aa, Homo sapiens [sequence omitted]

SEQ ID NO: 825446 - protein, 262 aa, Homo sapiens [sequence omitted]

SEQ ID NO: 825447 - protein, 262 aa, Homo sapiens [sequence omitted]

SEQ ID NO: 825448 - protein, 262 aa, Homo sapiens [sequence omitted]

SEQ ID NO: 825449 - protein, 262 aa, Homo sapiens [sequence omitted]

SEQ ID NO: 825450 - protein, 262 aa, Homo sapiens [sequence omitted]

SEQ ID NO: 825451 - protein, 262 aa, Homo sapiens [sequence omitted]

SEQ ID NO: 825452 - protein, 262 aa, Homo sapiens [sequence omitted]

SEQ ID NO: 825453 - protein, 157 aa, Homo sapiens [sequence omitted]

SEQ ID NO: 825454 - protein, 262 aa, Homo sapiens [sequence omitted]

SEQ ID NO: 825455 - protein, 164 aa, Homo sapiens
MPFTEKIMATPEQVGKMKAIVEKLRFTYRSDSFENPVLQQHFRNLEALALDLMEPEQAVDLTLPKVEAMNKRLGSLVDEFKELVYPPDYNPEGKVTKRKHDNEGSGSKRPKVEYSEEELKTHISKGTLGKFTVPMLKEACRAYGLKSGLKKQELLEALTKHFQD

SEQ ID NO: 825456 - protein, 262 aa, Homo sapiens [sequence omitted]

SEQ ID NO: 825457 - protein, 262 aa, Homo sapiens [sequence omitted]

SEQ ID NO: 825458 - protein, 117 aa, Homo sapiens; identical to SEQ ID NO: 825438

SEQ ID NO: 825459 - protein, 264 aa, Homo sapiens [sequence omitted]

SEQ ID NO: 825460 - protein, 117 aa, Homo sapiens; identical to SEQ ID NO: 825438

SEQ ID NO: 825461 - protein, 117 aa, Homo sapiens; identical to SEQ ID NO: 825438

SEQ ID NO: 825462 - protein, 117 aa, Homo sapiens; identical to SEQ ID NO: 825438

SEQ ID NO: 825463 - protein, 117 aa, Homo sapiens; identical to SEQ ID NO: 825438

SEQ ID NO: 825464 - protein, 117 aa, Homo sapiens; identical to SEQ ID NO: 825438

SEQ ID NO: 825465 - protein, 142 aa, Homo sapiens
MSGWESYYKTEGDEEAEEEQEENLEASGDYKYSGRDSLIFLVDASKAMFESQSEDELTPFDMSIQCIQSVYISKIISSDRDLLAVVFYGTEKDKNSVNFNRIFTSYRSWIIQLPFRSVARLPGLVLSQLKCVSPELGRVYPT

SEQ ID NO: 825466 - protein, 58 aa, Homo sapiens
MSGWESYYKTEGDEEAEEEQEENLEASETMNIQEIKSITEINANFEKSVRLNKDRQNK

SEQ ID NO: 825467 - protein, 117 aa, Homo sapiens; identical to SEQ ID NO: 825438

SEQ ID NO: 825468 - protein, 46 aa, Homo sapiens
MSGWESYYKTEGDEEAEEEQEENLEASADYQISITTDLLTTHNDLL

SEQ ID NO: 825469 - protein, 155 aa, Homo sapiens
MRGSTHASGLSVEKLRFTYRSDSFENPVLQQHFRNLEALALDLMEPEQAVDLTLPKVEAMNKRLGSLVDEFKELVYPPDYNPEGKVTKRKHDNEGSGSKRPKVEYSEEELKTHISKGTLGKFTVPMLKEACRAYGLKSGLKKQELLEALTKHFQD

SEQ ID NO: 825470 - protein, 262 aa, Homo sapiens [sequence omitted]

SEQ ID NO: 825471 - protein, 262 aa, Homo sapiens [sequence omitted]

SEQ ID NO: 825472 - protein, 262 aa, Homo sapiens [sequence omitted]

SEQ ID NO: 825473 - protein, 262 aa, Homo sapiens [sequence omitted]

SEQ ID NO: 825474 - protein, 262 aa, Homo sapiens [sequence omitted]

SEQ ID NO: 825475 - protein, 262 aa, Homo sapiens [sequence omitted]

SEQ ID NO: 825476 - protein, 262 aa, Homo sapiens [sequence omitted]

SEQ ID NO: 825477 - protein, 220 aa, Homo sapiens
MGFKPLVLLKKHHYLRPSLFVYPEESLVIGSSTLFSALLIKCLEKEVAALCRYTPRRNIPPYFVALVPQEEELDDQKIQVTPPGFQLVFLPFADDKRKMPLEALALDLMEPEQAVDLTLPKVEAMNKRLGSLVDEFKELVYPPDYNPEGKVTKRKHDNEGSGSKRPKVEYSEEELKTHISKGTLGKFTVPMLKEACRAYGLKSGLKKQELLEALTKHFQD

SEQ ID NO: 825478 - protein, 233 aa, Homo sapiens
MGFKPLVLLKKHHYLRPSLFVYPEESLVIGSSTLFSALLIKCLEKEVAALCRYTPRRNIPPYFVALVPQEEELDDQKIQVTPPGFQLVFLPFADDKRKMPFTEKIMATPEQVGKMKAIVEKLRFTYRSDSFENPVLQQHFRNLEALALDLMEPEQAVDLTLPKVEAMNKRLGSLVDEFKELVYPPDYNPEGKVTKRKHAAGSPHQALPGLTRGRASSCPSAVWPGCLALSSAS

SEQ ID NO: 825479 - protein, 168 aa, Homo sapiens
MGFKPLVLLKKHHYLRPSLFVYPEESLVIGSSTLFSALLIKCLEKEVAALCRYTPRRNIPPYFVALVPQEEELDDQKIQVTPPGFQLVFLPFADDKRKMPFTEKIMATPEQVGKMKAIVEKLRFTYRSDSFENPVLQQHFRNLEALALDLMEPEQAVDLTWPQGEAMK

SEQ ID NO: 825480 - protein, 117 aa, Homo sapiens; identical to SEQ ID NO: 825438

SEQ ID NO: 825481 - protein, 157 aa, Homo sapiens [sequence omitted]

SEQ ID NO: 825482 - protein, 117 aa, Homo sapiens; identical to SEQ ID NO: 825438

SEQ ID NO: 825483 - protein, 117 aa, Homo sapiens; identical to SEQ ID NO: 825438

SEQ ID NO: 825484 - protein, 104 aa, Homo sapiens
MSGWESYYKTEGDEEAEEEQEENLEASGDYKYSGRDSLIFLVDASKAMFESQTGSFKHLTVKEAVLNGLVATEVFDVVYVGEIIGKRGIIGYDVEAQSLTSDYI

SEQ ID NO: 825485 - protein, 202 aa, Homo sapiens
AAFLGSGTPGSGSGSRGRLNSFTQGILPIAFSRPTSQNYCSLEQPGQGGSTSAFEQLQRSRRRLISQRSSLETLEDIEENAPLRRCRTLSGSPRPKNFKKIHFIKNMRQHDTRNGRIVLISGRRSFCSIFSVLPYRDSTQVGSGMYMHACFVVLWVKRSHTNVHNVAILSIFKKLPCFDTANSVFVHWNDKKMFHFLFSQKA

SEQ ID NO: 825486 - protein, 117 aa, Homo sapiens
AAFLGSGTPGSGSGSRGRLNSFTQGILPIAFSRPTSQNYCSLEQPGQGGSTSAFEQLQRSRRRLISQRSSLETLEDIEENAPLRRCRTLSGSPRPKNFKKIHFIKNMRQHDTRNGSS

SEQ ID NO: 825487 - protein, 382 aa, Homo sapiens
MSLEWSEASASFLECFLRGAAMQEYMLIFPVRRLISQRSSLETLEDIEENAPLRRCRTLSGSPRPKNFKKIHFIKNMRQHDTRNGRIVLISGRRSFCSIFSVLPYRDSTQVGDLKLDGGRQSTGAVSLKEIIGLEGVELGADGKTVSYTQFLLPTNAFGARRNTIDSTSSFSQFRNLSHRSLSIGRASGTQGSLDTGSDLGDFMDYDPNLLDDPQWPCGKHKRVLIFPSYMTTVIDYVKPSDLKKDMNETFKEKFPHIKLTLSKIRSLKREMRKLAQEDCGLEEPTVAMAFVYFEKLALKGKLNKQNRKLCAGACVLLAAKIGSDLKKHEVKHLIDKLEEKFRLNRRELIAFEFPVLVALEFALHLPEHEVMPHYRRLVQSS

SEQ ID NO: 825488 - protein, 213 aa, Homo sapiens
GLDDNVNDGKCNTRRVLQGGPVETSGTGSDLGDFMDYDPNLLDDPQWPCGKHKRVLIFPSYMTTVIDYVKPSDLKKDMNETFKEKFPHIKLTLSKIRSLKREMRKLAQEDCGLEEPTVAMAFVYFEKLALKGKLNKQNRKLCAGACVLLAAKIGSDLKKHEVKHLIDKLEEKFRLNRRELIAFEFPVLVALEFALHLPEHEVMPHYRRLVQSS

SEQ ID NO: 825489 - protein, 412 aa, Homo sapiens
AAFLGSGTPGSGSGSRGRLNSFTQGILPIAFSRPTSQNYCSLEQPGQGGSTSAFEQLQRSRRRLISQRSSLETLEDIEENAPLRRCRTLSGSPRPKNFKKIHFIKNMRQHDTRNGRIVLISGRRSFCSIFSVLPYRDSTQVGDLKLDGGRQSTGAVSLKEIIGLEGVELGADGKTVSYTQFLLPTNAFGARRNTIDSTSSFSQFRNLSHRSLSIGRASGTQGSLDTGSDLGDFMDYDPNLLDDPQWPCGKHKRVLIFPSYMTTVIDYVKPSDLKKDMNETFKEKFPHIKLTLSKIRSLKREMRKLAQEDCGLEEPTVAMAFVYFEKLALKGKLNKQNRKLCAGACVLLAAKIGSDLKKHEVKHLIDKLEEKFRLNRRELIAFEFPVLVALEFALHLPEHEVMPHYRRLVQSS

SEQ ID NO: 825490 - protein, 145 aa, Homo sapiens
AAFLGSGTPGSGSGSRGRLNSFTQGILPIAFSRPTSQNYCSLEQPGQGGSTSAFEQLQRSRRRLISQRSSLETLEDIEENAPLRRCRTLSGSPRPKNFKKIHFIKNMRQHDTRNGRIVLISGRRSFCSIFSVLPYRDSTQVGSPD

SEQ ID NO: 825491 - protein, 412 aa, Homo sapiens; identical to SEQ ID NO: 825489

SEQ ID NO: 825492 - protein, 412 aa, Homo sapiens; identical to SEQ ID NO: 825489

SEQ ID NO: 825493 - protein, 246 aa, Homo sapiens
AAFLGSGTPGSGSGSRGRLNSFTQGILPIAFSRPTSQNYCSLEQPGQGGSTSAFEQLQRSRRRLISQRSSLETLEDIEENAPLRRCRTLSGSPRPKNFKKIHFIKNMRQHDTRNGRIVLISGRRSFCSIFSVLPYRDSTQVGDLKLDGGRQSTGAVSLKEIIGLEGVELGADGKTVSYTQFLLPTNAFGARRNTIDSTSSFSQFRNLSHRSLSIGRASGTQGSLDTGGDLGDFMDYGEAAVAQVTE

SEQ ID NO: 825494 - protein, 923 aa, Homo sapiens
VASELQSTCELAEVSSDSSPLQPGPTRPHPAPALARRPRPAMGPWSRSLSALLLLLQVSSWLCQEPEPCHPGFDAESYTFTVPRRHLERGRVLGRVNFEDCTGRQRTAYFSLDTRFKVGTDGVITVKRPLRFHNPQIHFLVYAWDSTYRKFSTKVTLNTVGHHHRPPPHQASVSGIQAELLTFPNSSPGLRRQKRDWVIPPISCPENEKGPFPKNLVQIKSNKDKEGKVFYSITGQGADTPPVGVFIIERETGWLKVTEPLDRERIATYTLFSHAVSSNGNAVEDPMEILITVTDQNDNKPEFTQEVFKGSVMEGALPGTSVMEVTATDADDDVNTYNAAIAYTILSQDPELPDKNMFTINRNTGVISVVTTGLDRESFPTYTLVVQAADLQGEGLSTTATAVITVTDTNDNPPIFNPTTYKGQVPENEANVVITTLKVTDADAPNTPAWEAVYTILNDDGGQFVVTTNPVNNDGILKTAKGLDFEAKQQYILHVAVTNVVPFEVSLTTSTATVTVDVLDVNEAPIFVPPEKRVEVSEDFGVGQEITSYTAQEPDTFMEQKITYRIWRDTANWLEINPDTGAISTRAELDREDFEHVKNSTYTALIIATDNGSPVATGTGTLLLILSDVNDNAPIPEPRTIFFCERNPKPQVINIIDADLPPNTSPFTAELTHGASANWTIQYNDPTQESIILKPKMALEVGDYKINLKLMDNQNKDQVTTLEVSVCDCEGAAGVCRKAQPVEAGLQIPAILGILGGILALLILILLLLLFLRRRAVVKEPLLPPEDDTRDNVYYYDEEGGGEEDQDFDLSQLHRGLDARPEVTRNDVAPTLMSVPRYLPRPANPDEIGNFIDENLKAADTDPTAPPYDSLLVFDYEGSGSEAASLSSLNSSESDKDQDYDYLNEWGNRFKKLADMYGGGEDD

SEQ ID NO: 825495 - protein, 945 aa, Homo sapiens
VASELQSTCELAEVSSDSSPLQPGPTRPHPAPALARRPRPAMGPWSRSLSALLLLLQVSSWLCQEPEPCHPGFDAESYTFTVPRRHLERGRVLGRVNFEDCTGRQRTAYFSLDTRFKVGTDGVITVKRPLRFHNPQIHFLVYAWDSTYRKFSTKVTLNTVGHHHRPPPHQASVSGIQAELLTFPNSSPGLRRQKRDWVIPPISCPENEKGPFPKNLVQIKSNKDKEGKVFYSITGQGADTPPVGVFIIERETGWLKVTEPLDRERIATYTLFSHAVSSNGNAVEDPMEILITVTDQNDNKPEFTQEVFKGSVMEGALPGTSVMEVTATDADDDVNTYNAAIAYTILSQDPELPDKNMFTINRNTGVISVVTTGLDRESFPTYTLVVQAADLQGEGLSTTATAVITVTDTNDNPPIFNPTTYKGQVPENEANVVITTLKVTDADAPNTPAWEAVYTILNDDGGQFVVTTNPVNNDGILKTAKVCMDLARCRNWHPHSCSYPCPLGLDFEAKQQYILHVAVTNVVPFEVSLTTSTATVTVDVLDVNEAPIFVPPEKRVEVSEDFGVGQEITSYTAQEPDTFMEQKITYRIWRDTANWLEINPDTGAISTRAELDREDFEHVKNSTYTALIIATDNGSPVATGTGTLLLILSDVNDNAPIPEPRTIFFCERNPKPQVINIIDADLPPNTSPFTAELTHGASANWTIQYNDPTQESIILKPKMALEVGDYKINLKLMDNQNKDQVTTLEVSVCDCEGAAGVCRKAQPVEAGLQIPAILGILGGILALLILILLLLLFLRRRAVVKEPLLPPEDDTRDNVYYYDEEGGGEEDQDFDLSQLHRGLDARPEVTRNDVAPTLMSVPRYLPRPANPDEIGNFIDENLKAADTDPTAPPYDSLLVFDYEGSGSEAASLSSLNSSESDKDQDYDYLNEWGNRFKKLADMYGGGEDD

SEQ ID NO: 825496 - protein, 871 aa, Homo sapiens
VASELQSTCELAEVSSDSSPLQPGPTRPHPAPALARRPRPAMGPWSRSLSALLLLLQVSSWLCQEPEPCHPGFDAESYTFTVPRRHLERGRVLGRVNFEDCTGRQRTAYFSLDTRFKVGTDGVITVKRPLRFHNPQIHFLVYAWDSTYRKFSTKVTLNTVGHHHRPPPHQASVSGIQAELLTFPNSSPGLRRQKRDWVIPPISCPENEKGPFPKNLVQLFSHAVSSNGNAVEDPMEILITVTDQNDNKPEFTQEVFKGSVMEGALPGTSVMEVTATDADDDVNTYNAAIAYTILSQDPELPDKNMFTINRNTGVISVVTTGLDRESFPTYTLVVQAADLQGEGLSTTATAVITVTDTNDNPPIFNPTTYKGQVPENEANVVITTLKVTDADAPNTPAWEAVYTILNDDGGQFVVTTNPVNNDGILKTAKGLDFEAKQQYILHVAVTNVVPFEVSLTTSTATVTVDVLDVNEAPIFVPPEKRVEVSEDFGVGQEITSYTAQEPDTFMEQKITYRIWRDTANWLEINPDTGAISTRAELDREDFEHVKNSTYTALIIATDNGSPVATGTGTLLLILSDVNDNAPIPEPRTIFFCERNPKPQVINIIDADLPPNTSPFTAELTHGASANWTIQYNDPTQESIILKPKMALEVGDYKINLKLMDNQNKDQVTTLEVSVCDCEGAAGVCRKAQPVEAGLQIPAILGILGGILALLILILLLLLFLRRRAVVKEPLLPPEDDTRDNVYYYDEEGGGEEDQDFDLSQLHRGLDARPEVTRNDVAPTLMSVPRYLPRPANPDEIGNFIDENLKAADTDPTAPPYDSLLVFDYEGSGSEAASLSSLNSSESDKDQDYDYLNEWGNRFKKLADMYGGGEDD

SEQ ID NO: 825497 - protein, 656 aa, Homo sapiens
MVYTASHAGVLGASASVTFSVVITTLADQNDNKPEFTQEVFKGSVMEGALPGTSVMEVTATDADDDVNTYNAAIAYTILSQDPELPDKNMFTINRNTGVISVVTTGLDRESFPTYTLVVQAADLQGEGLSTTATAVITVTDTNDNPPIFNPTTYKGQVPENEANVVITTLKVTDADAPNTPAWEAVYTILNDDGGQFVVTTNPVNNDGILKTAKGLDFEAKQQYILHVAVTNVVPFEVSLTTSTATVTVDVLDVNEAPIFVPPEKRVEVSEDFGVGQEITSYTAQEPDTFMEQKITYRIWRDTANWLEINPDTGAISTRAELDREDFEHVKNSTYTALIIATDNGSPVATGTGTLLLILSDVNDNAPIPEPRTIFFCERNPKPQVINIIDADLPPNTSPFTAELTHGASANWTIQYNDPTQESIILKPKMALEVGDYKINLKLMDNQNKDQVTTLEVSVCDCEGAAGVCRKAQPVEAGLQIPAILGILGGILALLILILLLLLFLRRRAVVKEPLLPPEDDTRDNVYYYDEEGGGEEDQDFDLSQLHRGLDARPEVTRNDVAPTLMSVPRYLPRPANPDEIGNFIDENLKAADTDPTAPPYDSLLVFDYEGSGSEAASLSSLNSSESDKDQDYDYLNEWGNRFKKLADMYGGGEDD

SEQ ID NO: 825498 - protein, 568 aa, Homo sapiens
GWARPKVASVPGPDLVVSISLQSFPTYTLVVQAADLQGEGLSTTATAVITVTDTNDNPPIFNPTTYKGQVPENEANVVITTLKVTDADAPNTPAWEAVYTILNDDGGQFVVTTNPVNNDGILKTAKGLDFEAKQQYILHVAVTNVVPFEVSLTTSTATVTVDVLDVNEAPIFVPPEKRVEVSEDFGVGQEITSYTAQEPDTFMEQKITYRIWRDTANWLEINPDTGAISTRAELDREDFEHVKNSTYTALIIATDNGSPVATGTGTLLLILSDVNDNAPIPEPRTIFFCERNPKPQVINIIDADLPPNTSPFTAELTHGASANWTIQYNDPTQESIILKPKMALEVGDYKINLKLMDNQNKDQVTTLEVSVCDCEGAAGVCRKAQPVEAGLQIPAILGILGGILALLILILLLLLFLRRRAVVKEPLLPPEDDTRDNVYYYDEEGGGEEDQDFDLSQLHRGLDARPEVTRNDVAPTLMSVPRYLPRPANPDEIGNFIDENLKAADTDPTAPPYDSLLVFDYEGSGSEAASLSSLNSSESDKDQDYDYLNEWGNRFKKLADMYGGGEDD

SEQ ID NO: 825499 - protein, 375 aa, Homo sapiens
MKPVGDYENDCAGEAYRIWRDTANWLEINPDTGAISTRAELDREDFEHVKNSTYTALIIATDNGSPVATGTGTLLLILSDVNDNAPIPEPRTIFFCERNPKPQVINIIDADLPPNTSPFTAELTHGASANWTIQYNDPTQESIILKPKMALEVGDYKINLKLMDNQNKDQVTTLEVSVCDCEGAAGVCRKAQPVEAGLQIPAILGILGGILALLILILLLLLFLRRRAVVKEPLLPPEDDTRDNVYYYDEEGGGEEDQDFDLSQLHRGLDARPEVTRNDVAPTLMSVPRYLPRPANPDEIGNFIDENLKAADTDPTAPPYDSLLVFDYEGSGSEAASLSSLNSSESDKDQDYDYLNEWGNRFKKLADMYGGGEDD

SEQ ID NO: 825500 - protein, 923 aa, Homo sapiens; identical to SEQ ID NO: 825494

SEQ ID NO: 825501 - protein, 923 aa, Homo sapiens; identical to SEQ ID NO: 825494

SEQ ID NO: 825502 - protein, 844 aa, Homo sapiens
VASELQSTCELAEVSSDSSPLQPGPTRPHPAPALARRPRPAMGPWSRSLSALLLLLQVSSWLCQEPEPCHPGFDAESYTFTVPRRHLERGRVLGRVNFEDCTGRQRTAYFSLDTRFKVGTDGVITVKRPLRFHNPQIHFLVYAWDSTYRKFSTKVTLNTVGHHHRPPPHQASVSGIQAELLTFPNSSPGLRRQKRDWVIPPISCPENEKGPFPKNLVQIKSNKDKEGKVFYSITGQGADTPPVGVFIIERETGWLKVTEPLDRERIATYTLFSHAVSSNGNAVEDPMEILITVTDQNDNKPEFTQEVFKGSVMEGALPGTSVMEVTATDADDDVNTYNAAIAYTILSQDPELPDKNMFTINRNTGVISVVTTGLDRESFPTYTLVVQAADLQGEGLSTTATAVITVTDTNDNPPIFNPTTYKGQVPENEANVVITTLKVTDADAPNTPAWEAVYTILNDDGGQFVVTTNPVNNDGILKTAKGLDFEAKQQYILHVAVTNVVPFEVSLTTSTATVTVDVLDVNEAPIFVPPEKRVEVSEDFGVGQEITSYTAQEPDTFMEQKITYRIWRDTANWLEINPDTGAISTRAELDREDFEHVKNSTYTALIIATDNGSPVATGTGTLLLILSDVNDNAPIPEPRTIFFCERNPKPQVINIIDADLPPNTSPFTAELTHGASANWTIQYNDPTQESIILKPKMALEVGDYKINLKLMDNQNKDQVTTLEVSVCDCEGAAGVCRKAQPVEAGLQIPAILGILGGILALLILILLLLLFLRRRAVVKEPLLPPEDDTRDNVYYYDEEGGGEEDQDFDLSHLPLFGYPFYGVLRVSMQALSGPTLLGLNRQHL

SEQ ID NO: 825503 - protein, 274 aa, Homo sapiens
VASELQSTCELAEVSSDSSPLQPGPTRPHPAPALARRPRPAMGPWSRSLSALLLLLQVSSWLCQEPEPCHPGFDAESYTFTVPRRHLERGRVLGRVNFEDCTGRQRTAYFSLDTRFKVGTDGVITVKRPLRFHNPQIHFLVYAWDSTYRKFSTKVTLNTVGHHHRPPPHQASVSGIQAELLTFPNSSPGLRRQKRDWVIPPISCPENEKGPFPKNLVQIKSNKDKEGKVFYSITGQGADTPPVGVFIIERETGWLKVTEPLDRERIATYTVSIS

SEQ ID NO: 825504 - protein, 429 aa, Homo sapiens
VASELQSTCELAEVSSDSSPLQPGPTRPHPAPALARRPRPAMGPWSRSLSALLLLLQVSSWLCQEPEPCHPGFDAESYTFTVPRRHLERGRVLGRVNFEDCTGRQRTAYFSLDTRFKVGTDGVITVKRPLRFHNPQIHFLVYAWDSTYRKFSTKVTLNTVGHHHRPPPHQASVSGIQAELLTFPNSSPGLRRQKRDWVIPPISCPENEKGPFPKNLVQIKSNKDKEGKVFYSITGQGADTPPVGVFIIERETGWLKVTEPLDRERIATYTLFSHAVSSKKEAPAPPKAEAKAKALKAKKAVLKGVHSHKKKKIRTSPTFRRPKTLRLRRQPKYPRKSAPRRNKLDHYAIIKFPLTTESAMKKIEDNNTLVFIVDVKANKHQIKQAVKKLYDIDVAKVNTLIRPDGEKKAYVRLAPDYDALDVANKIGII

SEQ ID NO: 825505 - protein, 862 aa, Homo sapiens
VASELQSTCELAEVSSDSSPLQPGPTRPHPAPALARRPRPAMGPWSRSLSALLLLLQVSSWLCQEPEPCHPGFDAESYTFTVPRRHLERGRVLGRVNFEDCTGRQRTAYFSLDTRFKVGTDGVITVKRPLRFHNPQIHFLVYAWDSTYRKFSTKVTLNTVGHHHRPPPHQASVSGIQAELLTFPNSSPGLRRQKRDWVIPPISCPENEKGPFPKNLVQIKSNKDKEGKVFYSITGQGADTPPVGVFIIERETGWLKVTEPLDRERIATYTLFSHAVSSNGNAVEDPMEILITVTDQNDNKPEFTQEVFKGSVMEGALPGTSVMEVTATDADDDVNTYNAAIAYTILSQDPELPDKNMFTINRNTGVISVVTTGLDRESFPTYTLVVQAADLQGEGLSTTATAVITVTDTNDNPPIFNPTTGLDFEAKQQYILHVAVTNVVPFEVSLTTSTATVTVDVLDVNEAPIFVPPEKRVEVSEDFGVGQEITSYTAQEPDTFMEQKITYRIWRDTANWLEINPDTGAISTRAELDREDFEHVKNSTYTALIIATDNGSPVATGTGTLLLILSDVNDNAPIPEPRTIFFCERNPKPQVINIIDADLPPNTSPFTAELTHGASANWTIQYNDPTQESIILKPKMALEVGDYKINLKLMDNQNKDQVTTLEVSVCDCEGAAGVCRKAQPVEAGLQIPAILGILGGILALLILILLLLLFLRRRAVVKEPLLPPEDDTRDNVYYYDEEGGGEEDQDFDLSQLHRGLDARPEVTRNDVAPTLMSVPRYLPRPANPDEIGNFIDENLKAADTDPTAPPYDSLLVFDYEGSGSEAASLSSLNSSESDKDQDYDYLNEWGNRFKKLADMYGGGEDD

SEQ ID NO: 825506 - protein, 923 aa, Homo sapiens; identical to SEQ ID NO: 825494

SEQ ID NO: 825507 - protein, 573 aa, Homo sapiens
MNSPIFVKLESHCFTQAAVLWYQSELTVASNSWTQVILLPQPCEGLSTTATAVITVTDTNDNPPIFNPTTYKGQVPENEANVVITTLKVTDADAPNTPAWEAVYTILNDDGGQFVVTTNPVNNDGILKTAKGLDFEAKQQYILHVAVTNVVPFEVSLTTSTATVTVDVLDVNEAPIFVPPEKRVEVSEDFGVGQEITSYTAQEPDTFMEQKITYRIWRDTANWLEINPDTGAISTRAELDREDFEHVKNSTYTALIIATDNGSPVATGTGTLLLILSDVNDNAPIPEPRTIFFCERNPKPQVINIIDADLPPNTSPFTAELTHGASANWTIQYNDPTQESIILKPKMALEVGDYKINLKLMDNQNKDQVTTLEVSVCDCEGAAGVCRKAQPVEAGLQIPAILGILGGILALLILILLLLLFLRRRAVVKEPLLPPEDDTRDNVYYYDEEGGGEEDQDFDLSQLHRGLDARPEVTRNDVAPTLMSVPRYLPRPANPDEIGNFIDENLKAADTDPTAPPYDSLLVFDYEGSGSEAASLSSLNSSESDKDQDYDYLNEWGNRFKKLADMYGGGEDD

SEQ ID NO: 825508 - protein, 134 aa, Homo sapiens
MTISFLLFIVLQPFFSKDFDLSQLHRGLDARPEVTRNDVAPTLMSVPRYLPRPANPDEIGNFIDENLKAADTDPTAPPYDSLLVFDYEGSGSEAASLSSLNSSESDKDQDYDYLNEWGNRFKKLADMYGGGEDD

SEQ ID NO: 825509 - protein, 835 aa, Homo sapiens
VASELQSTCELAEVSSDSSPLQPGPTRPHPAPALARRPRPAMGPWSRSLSALLLLLQVSSWLCQEPEPCHPGFDAESYTFTVPRRHLERGRVLGRVNFEDCTGRQRTAYFSLDTRFKVGTDGVITVKRPLRFHNPQIHFLVYAWDSTYRKFSTKVTLNTVGHHHRPPPHQASVSGIQAELLTFPNSSPGLRRQKRDWVIPPISCPENEKGPFPKNLVQIKSNKDKEGKVFYSITGQGADTPPVGVFIIERETGWLKVTEPLDRERIATYTLFSHAVSSNGNAVEDPMEILITVTDQNDNKPEFTQEVFKGSVMEGALPGTSVMEVTATDADDDVNTYNAAIAYTILSQDPELPDKNMFTINRNTGVISVVTTGLDRESFPTYTLVVQAADLQGEGLSTTATAVITVTDTNDNPPIFNPTTYKGQVPENEANVVITTLKVTDADAPNTPAWEAVYTILNDDGGQFVVTTNPVNNDGILKTAKGLDFEAKQQYILHVAVTNVVPFEVSLTTSTATVTVDVLDVNEAPIFVPPEKRVEVSEDFGVGQEITSYTAQEPDTFMEQKITYRIWRDTANWLEINPDTGAISTRAELDREDFEHVKNSTYTALIIATDNGSPVATGTGTLLLILSDVNDNAPIPEPRTIFFCERNPKPQVINIIDADLPPNTSPFTAELTHGASANWTIQYNDPTQESIILKPKMALEVGDYKINLKLMDNQNKDQVTTLEVSVCDCEGAAGVCRKAQPVEAGLQIPAILGILGGILALLILILLLLLFLRRRAVVKEPLLPPEDDTRDNVYYYDEEGGGEEDQSRLTVSQRHQGAGRIAREIDSRRSCILAS

SEQ ID NO: 825510 - protein, 383 aa, Homo sapiens
VASELQSTCELAEVSSDSSPLQPGPTRPHPAPALARRPRPAMGPWSRSLSALLLLLQVSSWLCQEPEPCHPGFDAESYTFTVPRRHLERGRVLGRVNFEDCTGRQRTAYFSLDTRFKVGTDGVITVKRPLRFHNPQIHFLVYAWDSTYRKFSTKVTLNTVGHHHRPPPHQASVSGIQAELLTFPNSSPGLRRQKRDWVIPPISCPENEKGPFPKNLVQIKSNKDKEGKVFYSITGQGADTPPVGVFIIERETGWLKVTEPLDRERIATYTLFSHAVSSNGNAVEDPMEILITVTDQNDNKPEFTQEVFKGSVMEGALPGTSVMEVTATDADDDVNTYNAAIAYTILSQDPELPDKNMFTINRNTGVISVVTTGLDRESFPTYT

SEQ ID NO: 825511 - protein, 218 aa, Homo sapiens
RAEVAVASRIAKRRGAEAVPLASVYAASFSRRRPLGSHSARDSGPDAARTWTPPAKVPAGPGPFAADGPRLPVVLRLPGSRLRLSVLSVSVHPPRGPSSAPGATDLEAYDGRGVFFARGPDRFLGSLQPPSWSPWDRSEVWFPGARRCSRSLGSVAPSRSRLCRPPRALAGPSGSRCLALDPVRGVEGGSRAEKGSSRSAELPLGSNSARSSACLGVA

SEQ ID NO: 825512 - protein, 220 aa, Homo sapiens
MDSAGQDINLNSPNKGLLSDSMTDVPVDTGVAARTPAVEGLTEAEEEELRAELTKVEEEIVTLRQVLAAKERHCGELKRRLGLSTLGELKQNLSRSWHDVQVSSAYVKTSEKLGEWNEKVTQSDLYKKTQETLSQAGQKTSAALSTVGSAISRKLGDMSSYSIRHSISMPAMRNSATFKSFEDRVGTIKSKVVGDRENGSDNLPSSAGSGDKPLSDPAPF

SEQ ID NO: 825513 - protein, 200 aa, Homo sapiens
MDSAGQDINLNSPNKGLLSDSMTDVPVDTGVAARTPAVEGLTEAEEEELRAELTKVEEEIVTLRQVLAAKERHCGELKRRLGLSTLGELKQNLSRSWHDVQVSSAYKKTQETLSQAGQKTSAALSTVGSAISRKLGDMSSYSIRHSISMPAMRNSATFKSFEDRVGTIKSKVVGDRENGSDNLPSSAGSGDKPLSDPAPF

SEQ ID NO: 825514 - protein, 209 aa, Homo sapiens
MDSAGQDINLNSPNKGLLSDSMTDVPVDTGVAARTPAVEGLTEAEEEELRAELTKVEEEIVTLRQVLAAKERHCGELKRRLGLSTLGELKQNLSRSWHDVQVSSAYKKTQETLSQAGQKTSAALSTVGSAISRKLGDMRAHPFSHSFSSYSIRHSISMPAMRNSATFKSFEDRVGTIKSKVVGDRENGSDNLPSSAGSGDKPLSDPAPF

SEQ ID NO: 825515 - protein, 229 aa, Homo sapiens
MDSAGQDINLNSPNKGLLSDSMTDVPVDTGVAARTPAVEGLTEAEEEELRAELTKVEEEIVTLRQVLAAKERHCGELKRRLGLSTLGELKQNLSRSWHDVQVSSAYVKTSEKLGEWNEKVTQSDLYKKTQETLSQAGQKTSAALSTVGSAISRKLGDMRAHPFSHSFSSYSIRHSISMPAMRNSATFKSFEDRVGTIKSKVVGDRENGSDNLPSSAGSGDKPLSDPAPF

SEQ ID NO: 825516 - protein, 206 aa, Homo sapiens
MDSAGQDINLNSPNKGLLSDSMTDVPVDTGVAARTPAVEGLTEAEEEELRAELTKVEEEIVTLRQVLAAKERHCGELKRRLGLSTLGELKQNLSRSWHDVQVSSAYVKTSEKLGEWNEKVTQSDLYKKTQETLSQAGQKTSAALSTVGSAISRKLGDMRNSATFKSFEDRVGTIKSKVVGDRENGSDNLPSSAGSGDKPLSDPAPF

SEQ ID NO: 825517 - protein, 206 aa, Homo sapiens; identical to SEQ ID NO: 825516

SEQ ID NO: 825518 - protein, 110 aa, Homo sapiens
MTERGRHLPSCTVKGFPVALCDVWTCTLWLLGMADLTFDLGSLRNDLAVSQFCHEILGCCYGTLWRLALTLRPFRVRRAAQPSPLDTDTLPSLFKGTLRPSSRLRTELGP

SEQ ID NO: 825519 - protein, 206 aa, Homo sapiens; identical to SEQ ID NO: 825516

SEQ ID NO: 825520 - protein, 206 aa, Homo sapiens; identical to SEQ ID NO: 825516

SEQ ID NO: 825521 - protein, 187 aa, Homo sapiens
MDSAGQDINLNSPNKGLLSDSMTDVPVDTGVAARTPAVEGLTEAEEEELRAELTKVEEEIVTLRQVLAAKERHCGELKRRLGLSTLGELKQNLSRSWHDVQVSSAYVKTSEKLGEWNEKVTQSDLYKKTQETLSQAGQKTSAALSTVGSAISRKLGDMRNSATFKSFEDRVGTIKVIVPGLFDGLGK

SEQ ID NO: 825522 - protein, 206 aa, Homo sapiens; identical to SEQ ID NO: 825516

SEQ ID NO: 825523 - protein, 186 aa, Homo sapiens
MDSAGQDINLNSPNKGLLSDSMTDVPVDTGVAARTPAVEGLTEAEEEELRAELTKVEEEIVTLRQVLAAKERHCGELKRRLGLSTLGELKQNLSRSWHDVQVSSAYKKTQETLSQAGQKTSAALSTVGSAISRKLGDMRNSATFKSFEDRVGTIKSKVVGDRENGSDNLPSSAGSGDKPLSDPAPF

SEQ ID NO: 825524 - protein, 206 aa, Homo sapiens; identical to SEQ ID NO: 825516

SEQ ID NO: 825525 - protein, 206 aa, Homo sapiens; identical to SEQ ID NO: 825516

SEQ ID NO: 825526 - protein, 206 aa, Homo sapiens; identical to SEQ ID NO: 825516

SEQ ID NO: 825527 - protein, 164 aa, Homo sapiens
TTTKFAAASTKSPSLVSSQLPMAVLSPLPVLCAGQLGVPPVRPREDPGVEFPLGALCGGAGSSLQLLGVGESQLCPSLPSWGCVWILVLTLASFSASAMLPSSSYSIRHSISMPAMRNSATFKSFEDRVGTIKSKVVGDRENGSDNLPSSAGSGDKPLSDPAPF

SEQ ID NO: 825528 - protein, 206 aa, Homo sapiens; identical to SEQ ID NO: 825516

SEQ ID NO: 825529 - protein, 206 aa, Homo sapiens; identical to SEQ ID NO: 825516

SEQ ID NO: 825530 - protein, 224 aa, Homo sapiens
MDSAGQDINLNSPNKGLLSDSMTDVPVDTGVAARTPAVEGLTEAEEEELRAELTKVEEEIVTLRQVLAAKERHCGELKRRLGLSTLGELKQNLSRSWHDVQVSSAYVKTSEKLGEWNEKVTQSDLYKKTQETLSQAGQKTSAALSTVGSAISRKLGDMRTLRHIKSIDNRAGTMIFRCGCSHESTYVTTSRATARIGYKHSLRSDIYKNTQVVIHSRPHTTQTQ

SEQ ID NO: 825531 - protein, 584 aa, Homo sapiens
MTTSSIRRQMKNIVNNYSEAEIKVREATSNDPWGPSSSLMTEIADLTYNVVAFSEIMSMVWKRLNDHGKNWRHVYKALTLLDYLIKTGSERVAQQCRENIFAIQTLKDFQYIDRDGKDQGINVREKSKQLVALLKDEERLKAERAQALKTKERMAQVATGMGSNQITFGRGSSQPNLSTSHSEQEYGKAGGSPASYHGSTSPRVSSELEQARPQTSGEEELQLQLALAMSREVAEQEERLRRGDDLRLQMALEESRRDTVKIPKKKEHGSLPQQTTLLDLMDALPSSGPAAQKAEPWGPSASTNQTNPWGGPAAPASTSDPWPSFGTKPAASIDPWGVPTGATAQSVPKNSDPWAASQQPASSAGKRASDAWGAVSTTKPVSVSGSFELFSNLNGTIKDDFSEFDNLRTSKKTAESVTSLPSQNNGTTSPDPFESQPLTVASSKPSSARKTPESFLGPNAALVNLDSLVTRPAPPAQSLNPFLAPGAPATSAPVNPFQVNQPQPLTLNQLRGSPVLGTSTSFGPGPGVESMAVASMTSAAPQPALGATGSSLTPLGPAMMNMVGSVGIPPSAAQATGTTNPFLL

SEQ ID NO: 825532 - protein, 584 aa, Homo sapiens; identical to SEQ ID NO: 825531

SEQ ID NO: 825533 - protein, 584 aa, Homo sapiens; identical to SEQ ID NO: 825531

SEQ ID NO: 825534 - protein, 584 aa, Homo sapiens; identical to SEQ ID NO: 825531

SEQ ID NO: 825535 - protein, 578 aa, Homo sapiens [sequence omitted]

SEQ ID NO: 825536 - protein, 484 aa, Homo sapiens [sequence omitted]

SEQ ID NO: 825537 - protein, 641 aa, Homo sapiens
MTTSSIRRQMKNIVNNYSEAEIKVREATSNDPWGPSSSLMTEIADLTYNVVAFSEIMSMVWKRLNDHGKNWRHVYKALTLLDYLIKTGSERVAQQCRENIFAIQTLKDFQYIDRDGKDQGINVREKSKQLVALLKDEERLKAERAQALKTKERMAQVATGMGSNQITFGRGSSQPNLSTSHSEQEYGKAGGSPASYHGSPEASLCPQHRTGAPLGQSEELQPLSQRHPFLPHLGLASRPNGDWSQPCLTCDRAARATSPRVSSELEQARPQTSGEEELQLQLALAMSREVAEQEERLRRGDDLRLQMALEESRRDTVKIPKKKEHGSLPQQTTLLDLMDALPSSGPAAQKAEPWGPSASTNQTNPWGGPAAPASTSDPWPSFGTKPAASIDPWGVPTGATAQSVPKNSDPWAASQQPASSAGKRASDAWGAVSTTKPVSVSGSFELFSNLNGTIKDDFSEFDNLRTSKKTAESVTSLPSQNNGTTSPDPFESQPLTVASSKPSSARKTPESFLGPNAALVNLDSLVTRPAPPAQSLNPFLAPGAPATSAPVNPFQVNQPQPLTLNQLRGSPVLGTSTSFGPGPGVESMAVASMTSAAPQPALGATGSSLTPLGPAMMNMVGSVGIPPSAAQATGTTNPFLL

SEQ ID NO: 825538 - protein, 584 aa, Homo sapiens; identical to SEQ ID NO: 825531

SEQ ID NO: 825539 - protein, 584 aa, Homo sapiens; identical to SEQ ID NO: 825531

SEQ ID NO: 825540 - protein, 584 aa, Homo sapiens; identical to SEQ ID NO: 825531

SEQ ID NO: 825541 - protein, 584 aa, Homo sapiens; identical to SEQ ID NO: 825531

SEQ ID NO: 825542 - protein, 216 aa, Homo sapiens
MKSCEMPPVIGFCVHPGSFELFSNLNGTIKDDFSEFDNLRTSKKTAESVTSLPSQNNGTTSPDPFESQPLTVASSKPSSARKTPESFLGPNAALVNLDSLVTRPAPPAQSLNPFLAPGAPATSAPVNPFQVNQPQPLTLNQLRGSPVLGTSTSFGPGPGVESMAVASMTSAAPQPALGATGSSLTPLGPAMMNMVGSVGIPPSAAQATGTTNPFLL

SEQ ID NO: 825543 - protein, 417 aa, Homo sapiens
MTTSSIRRQMKNIVNNYSEAEIKVREATSNDPWGPSSSLMTEIADLTYNVVAFSEIMSMVWKRLNDHGKNWRHVYKALTLLDYLIKTGSERVAQQCRENIFAIQTLKDFQYIDRDGKDQGINVREKSKQLVALLKDEERLKAERAQALKTKERMAQVATGMGSNQITFGRGSSQPNLSTSHSEQEYGKAGGSPASYHGSTSPRVSSELEQARPQTSGEEELQLQLALAMSREVAEQEERLRRGDDLRLQMALEESRRDTVKIPKKKEHGSLPQQTTLLDLMDALPSSGPAAQKAEPWGPSASTNQTNPWGGPAAPASTSDPWPSFGTKPAASIDPWGVPTGATAQSVPKNSDPWAASQQPASSAGKRASDAWGAVSTTKPVSVSGSFELFSNLNGTIKDDFSEFDNLRTSKKTGMYR

SEQ ID NO: 825544 - protein, 413 aa, Homo sapiens
ERPASLPQFAVHPERSGLADSGDGGNMSVAFAAPRQRGKGEITPAAIQKMLDDNNHLIQCIMDSQNKGKTSECSQYQQMLHTNLVYLATIADSNQNMQSLLPAPPTQNMPMGPGGMNQSGPPPPPRSHNMPSDGMVGGGPPAPHMQNQMNGQMPGPNHMPMQGPGPNQLNMTNSSMNMPSSSHGSMGGYNHSVPSSQSMPVQNQMTMSQGQPMGNYGPRPNMSMQPNQGPMMHQQPPSQQYNMPQGGGQHYQGQQPPMGMMGQVNQGNHMMGQRQIPPYRPPQQGPPQQYSGQEDYYGDQYSHGGQGPPEGMNQQYYPDGNSQYGQQQDAYQGPPPQQGYPPQQQQYPGQQGYPGQQQGYGPSQGGPGPQYPNYPQGQGQQYGGYRPTQPGPPQPPQQRPYGYDQGQYGNYQQ

SEQ ID NO: 825545 - protein, 444 aa, Homo sapiens
ERPASLPQFAVHPERSGLADSGDGGNMSVAFAAPRQRGKGEITPAAIQKMLDDNNHLIQCIMDSQNKGKTSECSQYQQMLHTNLVYLATIADSNQNMQSLLPAPPTQNMPMGPGGMNQSGPPPPPRSHNMPSDGMVGGGPPAPHMQNQMNGQMPGPNHMPMQGPGPNQLNMTNSSMNMPSSSHGSMGGYNHSVPSSQSMPVQNQMTMSQGQPMGNYGPRPNMSMQPNQGPMMHQQPPSQQYNMPQGGGQHYQGQQPPMGMMGQVNQGNHMMGQRQIPPYRPPQQGPPQQYSGQEDYYGDQYSHGGQGPPEGMNQQYYPDGHNDYGYQQPSYPEQGYDRPYEDSSQHYYEGGNSQYGQQQDAYQGPPPQQGYPPQQQQYPGQQGYPGQQQGYGPSQGGPGPQYPNYPQGQGQQYGGYRPTQPGPPQPPQQRPYGYDQGQYGNYQQ

SEQ ID NO: 825546 - protein, 444 aa, Homo sapiens; identical to SEQ ID NO: 825545

SEQ ID NO: 825547 - protein, 514 aa, Homo sapiens
ERPASLPQFAVHPERSGLADSGDGGNMSVAFAAPRQRGKGEITPAAIQKMLDDNNHLIQCIMDSQNKGKTSECSQYQQMLHTNLVYLATIADSNQNMQSLLPAPPTQNMPMGPGGMNQSGPPPPPRSHNMPSDGMVGGGPPAPHMQNQMNGQMPGPNHMPMQGPGPNQLNMTNSSMNMPSSSHGSMGGYNHSVPSSQSMPVQNQMTMSQGQPMGNYGPRPNMSMQPNQGPMMHQQPPSQQYNMPQGGGQHYQGQQPPMGMMGQVNQGNHMMGQRQIPPYRPPQQGPPQQYSGQEDYYGDQYSHGGQGPPEGMNQQYYPDGHNDYGYQQPSYPEQGYDRPYEDSSQHYYEGGNSQYGQQQDAYQGPPPQQGYPPQQQQYPGQQGYPGQQQGYGPSQGGPGPQYPNYPQGQGQQYGGYRPTQPGPPQPPQQRPYGYDQIMPKKPAEEGNDSEEVPEASGPQNDGKELCPPGKPTTSEKIHKTSGPKRGKHAWTHRLRERKQLVVYEEISDPEEDDE

SEQ ID NO: 825548 - protein, 305 aa, Homo sapiens [sequence omitted]

SEQ ID NO: 825549 - protein, 448 aa, Homo sapiens
ERPASLPQFAVHPERSGLADSGDGGNMSVAFAAPRQRGKGEITPAAIQKMLDDNNHLIQCIMDSQNKGKTSECSQYQQMLHTNLVYLATIADSNQNMQSLLPAPPTQNMPMGPGGMNQSGPPPPPRSHNMPSDGMVGGGPPAPHMQNQMNGQMPGPNHMPMQGPGPNQLNMTNSSMNMPSSSHGSMGGYNHSVPSSQSMPVQNQMTMSQGQPMGNYGPRPNMSMQPNQGPMMHQQPPSQQYNMPQGGGQHYQGQQPPMGMMGQVNQGNHMMGQRQIPPYRPPQQGPPQQYSGQEDYYGDQYSHGGQGPPEGMNQQYYPDGNSQYGQQQDAYQGPPPQQGYPPQQQQYPGQQGYPGQQQGYGPSQGGPGPQYPNYPQGQGQQYGGYRPTQPGPPQPPQQRPYGYDQDPKGGNMPGPTDCVRESSWWFMKRSATLRKMTSNSPRGYDTCP

SEQ ID NO: 825550 - protein, 700 aa, Homo sapiens
MSKFILTFGRGGKGRKESFIGGQVFLVSDQAGWAVVAPACNPSTLGGRGGWIMRSSVRDRLRQHGETSSLLKIRKLAGHVGGCLQSQLLEKLRQENCLNPGGRRCSEAEIVPLPSSLGNRVRLCLKKKKKKKKKKKVIRQRTERRENEENKNYYKFQGMKRLYNQGLLTKYSKLDFFNFPSSLRNIFQFVTGNRPFSLDQGYQALAKYKRHSSTLLHLACFFILGSVIYHNFGIVNMSLNTKKNSANKGTVFSMPESTHCPFLNAKDGEMGWNFLDYYLYLNLSEVLNLEDTFQPERVDFGPMFECISHPDWFYLRNRKQNILKYLLFLARSNFQYGLINRPALAHLDLQSWGSIFYPCSPQLTVLRGRNESIRQNLKAVYKFNIFTHGKTSRVTELLTVFAFGKEDSNRGWKFNKSIRCVCTYDILKGKNELFLNHLLNKLSLFFKNVYSPRGENMKGNVSYAKGSEVVKNSFFFSETHLNSFAAALGGCQNHILVEVVSVCQIKEEINHPPPPPVVCNKVAHSKLDFTVTNCVMETKQSSDSPCRMVTGKLTRKLRTRRKATWDKFTVFFFCFFVLFCFLQCLSKRQQSALKCLECILNCYRDKYTIARIFCRTVLLEISNPEAEQQWLSPVIPALWEAEAGRSLEAQEFETSLANMVIPVSTKSTKISWAQWWAPVIPATQEAEAGEAPEPRRRRLQ

SEQ ID NO: 825551 - protein, 98 aa, Homo sapiens
LSLLLLNSRPVDDPTRIYDTALALWIPSLLMSAGEAALSGYCCVAALTLRGVGPCRKDGLQGQLEEMTELESPKCKRQENEQLLDQNQEIRASQRSWV

SEQ ID NO: 825552 - protein, 73 aa, Homo sapiens
GAADGMRRCSLCAFERFRGTCGPPGVQEPSSPSTALGPAGTSSGEPALVRCLLPGPPSCCVTHCGQRWPPPYC

SEQ ID NO: 825553 - protein, 203 aa, Homo sapiens
MRVGLALILVGHVNLLLGAVLHGTVLRHVANPRGAVTPEYTVANVISVGSGLLSVSVGLVALLASRNLLRPPLHWVLLALALVNLLLSVACSLGLLLAVSLTVANGGRRLIADCHPGLLDPLVPLDEGPGHTDCPFDPTRIYDTALALWIPSLLMSAGEAALSGYCCVAALTLRGVGPCRKDGLQGQVRKANRKGSFHRDWLC

SEQ ID NO: 825554 - protein, 222 aa, Homo sapiens
MRVGLALILVGHVNLLLGAVLHGTVLRHVANPRGAVTPEYTVANVISVGSGLLSVSVGLVALLASRNLLRPPLHWVLLALALVNLLLSVACSLGLLLAVSLTVANGGRRLIADCHPGLLDPLVPLDEGPGHTDCPFDPTRIYDTALALWIPSLLMSAGEAALSGYCCVAALTLRGVGPCRKDGLQGQLEEMTELESPKCKRQENEQLLDQNQEIRASQRSWV

SEQ ID NO: 825555 - protein, 222 aa, Homo sapiens; identical to SEQ ID NO: 825554

SEQ ID NO: 825556 - protein, 126 aa, Homo sapiens
MADEIAKAQVARPGGDTIFGKIIRKEIPAKIIFEDDRCLAFHDISPQAPTHFLVIPKKHISQISVAEDDDESLLGHLMIVGKKCAADLGLNKGYRMVVNEGSDGGQSVYHVHLHVLGGRQMHWPPG

SEQ ID NO: 825557 - protein, 126 aa, Homo sapiens; identical to SEQ ID NO: 825556

SEQ ID NO: 825558 - protein, 108 aa, Homo sapiens
NSRDRQTVHHLNLHSPPFDNAGSSLLPSLSSGRRAGERPRWQMRLPRLRSLGLVATRSLGRSSARKYQPKIIFEDDRCLAFHDISPQAPNTFSGDTQETYIPDFCGRR

SEQ ID NO: 825559 - protein, 96 aa, Homo sapiens
ILFLGYHQKSGIYVSWVSPTHFLVIPKKHISQISVAEDDDESLLGHLMIVGKKCAADLGLNKGYRMVVNEGSDGGQSVYHVHLHVLGGRQMHWPPG

SEQ ID NO: 825560 - protein, 126 aa, Homo sapiens; identical to SEQ ID NO: 825556

SEQ ID NO: 825561 - protein, 126 aa, Homo sapiens; identical to SEQ ID NO: 825556

SEQ ID NO: 825562 - protein, 126 aa, Homo sapiens; identical to SEQ ID NO: 825556

SEQ ID NO: 825563 - protein, 126 aa, Homo sapiens; identical to SEQ ID NO: 825556

SEQ ID NO: 825564 - protein, 105 aa, Homo sapiens
MRLPRLRSLGLVATRSLGRSSARKYQPPTHFLVIPKKHISQISVAEDDDESLLGHLMIVGKKCAADLGLNKGYRMVVNEGSDGGQSVYHVHLHVLGGRQMHWPPG

SEQ ID NO: 825565 - protein, 105 aa, Homo sapiens; identical to SEQ ID NO: 825564

SEQ ID NO: 825566 - protein, 71 aa, Homo sapiens
NTPQGHSKGWLGLFEPKICGFLPSSEPLLWPPRGREAEMADEIAKAQVARPGGDTIFGKIIRKEIPAQNHF

SEQ ID NO: 825567 - protein, 109 aa, Homo sapiens
  misc_feature (18)..(18): Xaa can be any naturally occurring amino acid
TAYDRCTITTNITKHKKXFCALLSMTFPLKHPTHFLVIPKKHISQISVAEDDDESLLGHLMIVGKKCAADLGLNKGYRMVVNEGSDGGQSVYHVHLHVLGGRQMHWPPG

SEQ ID NO: 825568 - protein, 126 aa, Homo sapiens; identical to SEQ ID NO: 825556

SEQ ID NO: 825569 - protein, 126 aa, Homo sapiens; identical to SEQ ID NO: 825556

SEQ ID NO: 825570 - protein, 126 aa, Homo sapiens; identical to SEQ ID NO: 825556

SEQ ID NO: 825571 - protein, 126 aa, Homo sapiens; identical to SEQ ID NO: 825556

SEQ ID NO: 825572 - protein, 141 aa, Homo sapiens
GGGISNPPKTRFLDSHPNDRGKKSKFSYYSISLAPSPLPTSRLHCPHRPQPREDLARPPSRLRSRSRLCRSDTGKLSQRGKVASQAGQSKANCESLPLHGKNTQIGAGLVRTHTESVSVAKKNRSQAKSSILGDAVELGKE

SEQ ID NO: 825573 - protein, 136 aa, Homo sapiens
QPEGRASPTMAQGTLIRVTPEQPTHAVCVLGTLTQLDICSSAPEDCTSFSINASPGVVVDIAHSPPAKKKSTGSSTWPLDPGVEVTLTMKAASGSTGDQKVQISYYGPKTPPVKALLYLTAVDGVSPCHPGWSAMA

SEQ ID NO: 825574 - protein, 416 aa, Homo sapiens
QPEGRASPTMAQGTLIRVTPEQPTHAVCVLGTLTQLDICSSAPEDCTSFSINASPGVVVDIAHSPPAKKKSTGSSTWPLDPGVEVTLTMKAASGSTGDQKVQISYYGPKTPPVKALLYLTAVEISLCADITRTGKVKPTRAVKDQRTWTWGPCGQGAILLVNCDRDNLESSAMDCEDDEVLDSEDLQDMSLMTLSTKTPKDFFTNHTLVLHVARSEMDKVRVFQATRGKLSSKCSVVLGPKWPSHYLMVPGGKHNMDFYVEALAFPDTDFPGLITLTISLLDTSNLELPEAVVFQDSVVFRVAPWIMTPNTQPPQEVYACSIFENEDFLKSVTTLAMKAKCKLTICPEEENMDDQWMQDEMEIGYIQAPHKTLPVVFDSPRNRGLKEFPIKRVMVPAWGGEGAQLPKPSCLETPSF

SEQ ID NO: 825575 - protein, 416 aa, Homo sapiens; identical to SEQ ID NO: 825574

SEQ ID NO: 825576 - protein, 221 aa, Homo sapiens
MHQALQDFLSAQQVQAPVKLYSDWLSVGHVDEFLSFVPAPDRKGFRLLLASPRSCYKLFQEQQNEGHGEALLFEGIKKKKQQKIKNILSNKTLREHNSFVERCIDWNRELLKRELGLAESDIIDIPQLFKLKEFSKAEAFFPNMVNMLVLGKHLGIPKPFGPVINGRCCLEEKVCSLLEPLGLQCTFINDFFTYHIRHGEVHCGTNVRRKPFSFKWWNMVP

SEQ ID NO: 825577 - protein, 275 aa, Homo sapiens
QPEGRASPTMAQGTLIRVTPEQPTHAVCVLGTLTQLDICSSAPEDCTSFSINASPGVVVDIAHSPPAKKKSTGSSTWPLDPGVEVTLTMKAASGSTGDQKVQISYYGPKTPPVKALLYLTAVEISLCADITRTGKVKPTRAVKDQRTWTWGPCGQGAILLVNCDRDNLESSAMDCEDDEVLDSEDLQDMSLMTLSTKTPKDFFTNHTLVLHVARSEMDKVRVFQATQGAPGSRCPGKRGPPRRSPCCAFHRGPSGSERATWTQDYAALGDSSPLA

SEQ ID NO: 825578 - protein, 672 aa, Homo sapiens
QPEGRASPTMAQGTLIRVTPEQPTHAVCVLGTLTQLDICSSAPEDCTSFSINASPGVVVDIAHSPPAKKKSTGSSTWPLDPGVEVTLTMKAASGSTGDQKVQISYYGPKTPPVKALLYLTAVEISLCADITRTGKVKPTRAVKDQRTWTWGPCGQGAILLVNCDRDNLESSAMDCEDDEVLDSEDLQDMSLMTLSTKTPKDFFTNHTLVLHVARSEMDKVRVFQATRGKLSSKCSVVLGPKWPSHYLMVPGGKHNMDFYVEALAFPDTDFPGLITLTISLLDTSNLELPEAVVFQDSVVFRVAPWIMTPNTQPPQEVYACSIFENEDFLKSVTTLAMKAKCKLTICPEEENMDDQWMQDEMEIGYIQAPHKTLPVVFDSPRNRGLKEFPIKRVMGPDFGYVTRGPQTGGISGLDSFGNLEVSPPVTVRGKEYPLGRILFGDSCYPSNDSRQMHQALQDFLSAQQVQAPVKLYSDWLSVGHVDEFLSFVPAPDRKGFRLLLASPRSCYKLFQEQQNEGHGEALLFEGIKKKKQQKIKNILSNKTLREHNSFVERCIDWNRELLKRELGLAESDIIDIPQLFKLKEFSKAEAFFPNMVNMLVLGKHLGIPKPFGPVINGRCCLEEKVCSLLEPLGLQCTFINDFFTYHIRHGEVHCGTNVRRKPFSFKWWNMVP

SEQ ID NO: 825579 - protein, 136 aa, Homo sapiens; identical to SEQ ID NO: 825573

SEQ ID NO: 825580 - protein, 612 aa, Homo sapiens
QPEGRASPTMAQGTLIRVTPEQPTHAVCVLGTLTQLDICSSAPEDCTSFSINASPGVVVDIAHSPPAKKKSTGSSTWPLDPGVEVTLTMKAASGSTGDQKVQISYYGPKTPPVKALLYLTAVEISLCADITRTGKVKPTRAVKDQRTWTWGPCGQGAILLVNCDRDNLESSAMDCEDDEVLDSEDLQDMSLMTLSTKTPKDFFTNHTLVLHVARSEMDKVRVFQATRAPRGCGVPRQRVFRVAPWIMTPNTQPPQEVYACSIFENEDFLKSVTTLAMKAKCKLTICPEEENMDDQWMQDEMEIGYIQAPHKTLPVVFDSPRNRGLKEFPIKRVMGPDFGYVTRGPQTGGISGLDSFGNLEVSPPVTVRGKEYPLGRILFGDSCYPSNDSRQMHQALQDFLSAQQVQAPVKLYSDWLSVGHVDEFLSFVPAPDRKGFRLLLASPRSCYKLFQEQQNEGHGEALLFEGIKKKKQQKIKNILSNKTLREHNSFVERCIDWNRELLKRELGLAESDIIDIPQLFKLKEFSKAEAFFPNMVNMLVLGKHLGIPKPFGPVINGRCCLEEKVCSLLEPLGLQCTFINDFFTYHIRHGEVHCGTNVRRKPFSFKWWNMVP

SEQ ID NO: 825581 - protein, 237 aa, Homo sapiens
QPEGRASPTMAQGTLIRVTPEQPTHAVCVLGTLTQLDICSSAPEDCTSFSINASPGVVVDIAHSPPAKKKSTGSSTWPLDPGVEVTLTMKAASGSTGDQKVQISYYGPKTPPVKALLYLTAVEISLCADITRTGKVKPTRAVKDQRTWTWGPCGQGAILLVNCDRDNLESSAMDCEDDEVLDSEDLQDMSLMTLSTKTPKDFFTNHTLVLHVARSEMDKVRVFQATHGQSEGVSGHT

SEQ ID NO: 825582 - protein, 109 aa, Homo sapiens [sequence omitted]

SEQ ID NO: 825583 - protein, 358 aa, Homo sapiens
MEAPGLAQAAAAESDSRKVAEETPDGAPALCPSPEALSPEPPVYSLQDFDTLATVGTGTFGRVHLVKEKTAKHFFALKVMSIPDVIRLKQEQHVHNEKSVLKEVSHPFLIRLFWTWHDERFLYMLMEYVPGGELFSYLRNRGRFSSTTGLFYSAEIICAIEYLHSKEIVYRDLKPENILLDRDGHIKLTDFGFAKKLVDRTWTLCGTPEYLAPEVIQSKGHGRAVDWWALGILIFEMLSGFPPFFDDNPFGIYQKILAGKIDFPRHLDFHVKDLIKKLLVVDRTRRLGNMKNGANDVKHHRWFRSVDWEAVPQRKLKPPIVPKIAGDGDTSNFETYPENDWDTAAPVPQKDLEIFKNF

SEQ ID NO: 825584 - protein, 358 aa, Homo sapiens; identical to SEQ ID NO: 825583

SEQ ID NO: 825585 - protein, 358 aa, Homo sapiens; identical to SEQ ID NO: 825583

SEQ ID NO: 825586 - protein, 358 aa, Homo sapiens; identical to SEQ ID NO: 825583

SEQ ID NO: 825587 - protein, 358 aa, Homo sapiens; identical to SEQ ID NO: 825583

SEQ ID NO: 825588 - protein, 358 aa, Homo sapiens; identical to SEQ ID NO: 825583

SEQ ID NO: 825589 - protein, 103 aa, Homo sapiens
MGDQVPREQDLAKRSSPGPSPVLNMCNRQSAWATALSPWYCMHAMLAAPFPSWAPRVSPDPGSQVCSHLHLPHSPPLLVPDTSTPTWSSPIAHKRGGTRDELS

SEQ ID NO: 825590 - protein, 197 aa, Homo sapiens
MMFPQSRHSGSSHLPQQLKFTTSDSCDRIKDEFQLLQAQYHSLKLECDKLASEKSEMQRHYVMYYEMSYGLNIEMHKQAEIVKRLNGICAQVLPYLSQEHQQQVLGAIERAKQVTAPELNSIIRQQLQAHQLSQLQALALPLTPLPVGLQPPSLPAVSAGTGLLSLSALGSQAHLSKEDKNGHDGDTHQEDDGEKSD

SEQ ID NO: 825591 - protein, 197 aa, Homo sapiens; identical to SEQ ID NO: 825590

SEQ ID NO: 825592 - protein, 245 aa, Homo sapiens
QKLCIVRARCNIGRGRSSLYKGAAARRPQQPEPGRTAGAQPAPPAAIDMMFPQSRHSGSSHLPQQLKFTTSDSCDRIKDEFQLLQAQYHSLKLECDKLASEKSEMQRHYVMYYEMSYGLNIEMHKQAEIVKRLNGICAQVLPYLSQEHQQQVLGAIERAKQVTAPELNSIIRQQLQAHQLSQLQALALPLTPLPVGLQPPSLPAVSAGTGLLSLSALGSQAHLSKEDKNGHDGDTHQEDDGEKSD

SEQ ID NO: 825593 - protein, 197 aa, Homo sapiens; identical to SEQ ID NO: 825590

SEQ ID NO: 825594 - protein, 197 aa, Homo sapiens; identical to SEQ ID NO: 825590

SEQ ID NO: 825595 - protein, 215 aa, Homo sapiens
DGIFKAELNEFLTRELAEDGYLELRHSGSSHLPQQLKFTTSDSCDRIKDEFQLLQAQYHSLKLECDKLASEKSEMQRHYVMYYEMSYGLNIEMHKQAEIVKRLNGICAQVLPYLSQEHQQQVLGAIERAKQVTAPELNSIIRQQLQAHQLSQLQALALPLTPLPVGLQPPSLPAVSAGTGLLSLSALGSQAHLSKEDKNGHDGDTHQEDDGEKSD

SEQ ID NO: 825596 - protein, 204 aa, Homo sapiens
FSWIVKEFQVTLIWHSGSSHLPQQLKFTTSDSCDRIKDEFQLLQAQYHSLKLECDKLASEKSEMQRHYVMYYEMSYGLNIEMHKQAEIVKRLNGICAQVLPYLSQEHQQQVLGAIERAKQVTAPELNSIIRQQLQAHQLSQLQALALPLTPLPVGLQPPSLPAVSAGTGLLSLSALGSQAHLSKEDKNGHDGDTHQEDDGEKSD

SEQ ID NO: 825597 - protein, 197 aa, Homo sapiens; identical to SEQ ID NO: 825590

SEQ ID NO: 825598 - protein, 197 aa, Homo sapiens; identical to SEQ ID NO: 825590

SEQ ID NO: 825599 - protein, 345 aa, Homo sapiens
MLVQYRVSPPGAVDMMFPQSRHSGSSHLPQQLKFTTSDSCDRIKDEFQLLQAQYHSLKLECDKLASEKSEMQRHYVMYYEMSCCLNIEMHKQAEIVKRLNAAAAPGAADRRRDKGAAARRPQQPEPGRTAGAQPAPPAAIDMMFPQSRHSGSSHLPQQLKFTTSDSCDRIKDEFQLLQAQYHSLKLECDKLASEKSEMQRHYVMVTSLRPQYYEMSYGLNIEMHKQAEIVKRLNGICAQVLPYLSQEHQQQVLGAIERAKQVTAPELNSIIRQQLQAHQLSQLQALALPLTPLPVGLQPPSLPAVSAGTGLLSLSALGSQAHLSKEDKNGHDGDTHQEDDGEKSD

SEQ ID NO: 825600 - protein, 160 aa, Homo sapiens
DVFTQPVNRLLAWYSLMKDGPVASFTGTVSFVTSGARPVLEAEIVKRLNGICAQVLPYLSQEHQQQVLGAIERAKQVTAPELNSIIRQQLQAHQLSQLQALALPLTPLPVGLQPPSLPAVSAGTGLLSLSALGSQAHLSKEDKNGHDGDTHQEDDGEKSD

SEQ ID NO: 825601 - protein, 197 aa, Homo sapiens; identical to SEQ ID NO: 825590

SEQ ID NO: 825602 - protein, 197 aa, Homo sapiens; identical to SEQ ID NO: 825590

SEQ ID NO: 825603 - protein, 315 aa, Homo sapiens
  misc_feature (46)..(46): Xaa can be any naturally occurring amino acid
DHDVRAPARGGGGTSEPGKKNGLALEYGFSKCNLGPTDLCDYVRGXVRFYNKIKMLVQYRVSPPGAVDMMFPQSRHSGSSHLPQQLKFTTSDSCDRIKDEFQLLQAQYHSLKLECDKLASEKSEMQRHYVMYYEMSCCLNIEMHKQAEIVKRLNAAAAPGAADRRRDKGAAARRPQQPEPGRTAGAQPAPPAAIDMMFPQSRHSGSSHLPQQLKFTTHQQQVLGAIERAKQVTAPELNSIIRQQLQAHQLSQLQALALPLTPLPVGLQPPSLPAVSAGTGLLSLSALGSQAHLSKEDKNGHDGDTHQEDDGEKSD

SEQ ID NO: 825604 - protein, 197 aa, Homo sapiens; identical to SEQ ID NO: 825590

SEQ ID NO: 825605 - protein, 197 aa, Homo sapiens; identical to SEQ ID NO: 825590

SEQ ID NO: 825606 - protein, 197 aa, Homo sapiens; identical to SEQ ID NO: 825590

SEQ ID NO: 825607 - protein, 283 aa, Homo sapiens
MLVQYRVSPPGAVDMMFPQSRHSGSSHLPQQLKFTTSDSCDRIKDEFQLLQAQYHSLKLECDKLASEKSEMQRHYVMYYEMSCCLNIEMHKQAEIVKRLNAAAAPGAADRRRDKGAAARRPQQPEPGRTAGAQPAPPAAIDMMFPQSRHSGSSHLPQQLKFTTSDSCDRIKDEFQLLQAQYHSLKLECDKLASEKSEMQRHYVMYYEMSYGLNIEMHKQAEIVKRLNGICAQVLPYLSQEHQQQVLGAIERAKQVTAPELNSIIRSQGSKTSRSAAAPALPPF

SEQ ID NO: 825608 - protein, 103 aa, Homo sapiens; identical to SEQ ID NO: 825589

SEQ ID NO: 825609 - protein, 215 aa, Homo sapiens
  misc_feature (46)..(46): Xaa can be any naturally occurring amino acid
DHDVRAPARGGGGTSEPGKKNGLALEYGFSKCNLGPTDLCDYVRGXVRFYNKIKMLVQYRVSPPGAVDMMFPQSRHSGSSHLPQQLKFTTSDSCDRIKDEFQLLQAQYHSLKLECDKLASEKSEMQRHYVMYYEMSCCLNIEMHKQAEIVKRLNAAAAPGAADRRRDKGAAARRPQQPEPGRTAGAQPAPPAAIDMMFPQSRHSSPAAWLGGYLP

SEQ ID NO: 825610 - protein, 170 aa, Homo sapiens
MLVQYRVSPPGAVDMMFPQSRHSGSSHLPQQLKFTTSDSCDRIKDEFQLLQAQYHSLKLECDKLASEKSEMQRHYVMYYEMSCCLNIEMHKQAEIVKRLNAAAAPGAADRRRDKGAAARRPQQPEPGRTAGAQPAPPAAIDMMFPQSRHSGSSHLPQQLKFTTFPRFEHV

SEQ ID NO: 825611 - protein, 87 aa, Homo sapiens
QADCRLHMFKTGEGPGATALSPWYCMHAMLAAPFPSWAPRVSPDPGSQVCSHLHLPHSPPLLVPDTSTPTWSSPIAHKRGGTRDELS

SEQ ID NO: 825612 - protein, 270 aa, Homo sapiens
MLVQYRVSPPGAVDMMFPQSRHSGSSHLPQQLKFTTSDSCDRIKDEFQLLQAQYHSLKLECDKLASEKSEMQRHYVMYYEMSCCLNIEMHKQAEIVKRLNAAAAPGAADRRRDKGAAARRPQQPEPGRTAGAQPAPPAAIDMMFPQSRHSGSSHLPQQLKFTTSDSCDRIKDEFQLLQAQYHSLKLECDKLASEKSEMQRHYVMYYEMSYGLNIEMHKQAEIVKRLNGICAQVLPYLSQEHQQQVLGAIERAKQVTAPELNSIIRSMYGD

SEQ ID NO: 825613 - protein, 345 aa, Homo sapiens
  misc_feature (46)..(46): Xaa can be any naturally occurring amino acid
DHDVRAPARGGGGTSEPGKKNGLALEYGFSKCNLGPTDLCDYVRGXVRFYNKIKMLVQYRVSPPGAVDMMFPQSRHSGSSHLPQQLKFTTSDSCDRIKDEFQLLQAQYHSLKLECDKLASEKSEMQRHYVMYYEMSCCLNIEMHKQAEIVKRLNAAAAPGAADRRRDKGAAARRPQQPEPGRTAGAQPAPPAAIDMMFPQSRHSGSSHLPQQLKFTTSDSCDRIKDEFQLLQAQYHSLKLECDKLASEKSEMQRHYVMYYEMSYGLNIEMHKQAEIVKRLNGICAQVLPYLSQEHQQQVLGAIERAKQRAGAGRAGRGRRKRARPGAGGGGGPGSCRSAPGQRRG

SEQ ID NO: 825614 - protein, 261 aa, Homo sapiens
MLVQYRVSPPGAVDMMFPQSRHSGSSHLPQQLKFTTSDSCDRIKDEFQLLQAQYHSLKLECDKLASEKSEMQRHYVMYYEMSCCLNIEMHKQAEIVKRLNAAAAPGAADRRRDKGAAARRPQQPEPGRTAGAQPAPPAAIDMMFPQSRHSGSSHLPQQLKFTTSDSCDRIKDEFQLLQAQYHSLKLECDKLASEKSEMQRHYVMVTSLRPQVQCWGRATGPSTSPPPRAAAPSTPATSPGKREDRGLFSIQPAPAGLSLPR

SEQ ID NO: 825615 - protein, 392 aa, Homo sapiens
  misc_feature (46)..(46): Xaa can be any naturally occurring amino acid
DHDVRAPARGGGGTSEPGKKNGLALEYGFSKCNLGPTDLCDYVRGXVRFYNKIKMLVQYRVSPPGAVDMMFPQSRHSGSSHLPQQLKFTTSDSCDRIKDEFQLLQAQYHSLKLECDKLASEKSEMQRHYVMYYEMSCCLNIEMHKQAEIVKRLNAAAAPGAADRRRDKGAAARRPQQPEPGRTAGAQPAPPAAIDMMFPQSRHSGSSHLPQQLKFTTSDSCDRIKDEFQLLQAQYHSLKLECDKLASEKSEMQRHYVMYYEMSYGLNIEMHKQAEIVKRLNGICAQVLPYLSQEHQQQVLGAIERAKQVTAPELNSIIRQQLQAHQLSQLQALALPLTPLPVGLQPPSLPAVSAGTGLLSLSALGSQAHLSKEDKNGHDGDTHQEDDGEKSD

SEQ ID NO: 825616 - protein, 197 aa, Homo sapiens; identical to SEQ ID NO: 825590

SEQ ID NO: 825617 - protein, 197 aa, Homo sapiens; identical to SEQ ID NO: 825590

SEQ ID NO: 825618 - protein, 262 aa, Homo sapiens
GGITAAFLHNRNILYVSSCLYVSLLCLSESRAKVTEHVRGTRPGRATAGPAASTRAAGSLFFDRWGNRGPAGCRGSSHLPQQLKFTTSDSCDRIKDEFQLLQAQYHSLKLECDKLASEKSEMQRHYVMYYEMSYGLNIEMHKQAEIVKRLNGICAQVLPYLSQEHQQQVLGAIERAKQVTAPELNSIIRQQLQAHQLSQLQALALPLTPLPVGLQPPSLPAVSAGTGLLSLSALGSQAHLSKEDKNGHDGDTHQEDDGEKSD

SEQ ID NO: 825619 - protein, 265 aa, Homo sapiens
  misc_feature (46)..(46): Xaa can be any naturally occurring amino acid
DHDVRAPARGGGGTSEPGKKNGLALEYGFSKCNLGPTDLCDYVRGXVRFYNKIKMLVQYRVSPPGAVDMMFPQSRHSGSSHLPQQLKFTTSDSCDRIKDEFQLLQAQYHSLKLECDKLASEKSEMQRHYVMYYEMSYGLNIEMHKQAEIVKRLNGICAQVLPYLSQEHQQQVLGAIERAKQVTAPELNSIIRQQLQAHQLSQLQALALPLTPLPVGLQPPSLPAVSAGTGLLSLSALGSQAHLSKEDKNGHDGDTHQEDDGEKSD

SEQ ID NO: 825620 - protein, 197 aa, Homo sapiens; identical to SEQ ID NO: 825590

SEQ ID NO: 825621 - protein, 197 aa, Homo sapiens; identical to SEQ ID NO: 825590

SEQ ID NO: 825622 - protein, 197 aa, Homo sapiens; identical to SEQ ID NO: 825590

SEQ ID NO: 825623 - protein, 159 aa, Homo sapiens
PARIPAAPARIPAANSCCSRENSCCSREMSCCLNIEMHKQAEIVKRLNGICAQVLPYLSQEHQQQVLGAIERAKQVTAPELNSIIRQQLQAHQLSQLQALALPLTPLPVGLQPPSLPAVSAGTGLLSLSALGSQAHLSKEDKNGHDGDTHQEDDGEKSD

SEQ ID NO: 825624 - protein, 197 aa, Homo sapiens; identical to SEQ ID NO: 825590

SEQ ID NO: 825625 - protein, 197 aa, Homo sapiens; identical to SEQ ID NO: 825590

SEQ ID NO: 825626 - protein, 261 aa, Homo sapiens
MLVQYRVSPPGAVDMMFPQSRHSGSSHLPQQLKFTTSDSCDRIKDEFQLLQAQYHSLKLECDKLASEKSEMQRHYVMYYEMSCCLNIEMHKQAEIVKRLNAAAAPGAADRRRDKGAAARRPQQPEPGRTAGAQPAPPAAIDMMFPQSRHSGSSHLPQQLKFTTSDSCDRIKDEFQLLQAQYHSLKLECDKLASEKSEMQRHYVMYYEMSYGLNIEMHKQAEIVKRLNGICAQVLPYLSQEHQQQVLGAIERAKQARRERNV

SEQ ID NO: 825627 - protein, 247 aa, Homo sapiens
  misc_feature (46)..(46): Xaa can be any naturally occurring amino acid
DHDVRAPARGGGGTSEPGKKNGLALEYGFSKCNLGPTDLCDYVRGXVRFYNKIKMLVQYRVSPPGAVDMMFPQSRHSGSSHLPQQLKFTTSDSCDRIKDEFQLLQAQYHSLKLECDKLASEKSEMQRHYVMYYEMSCCLNIEMHKQAEIVKRLNAAAAPGAADRRRDKGAAARRPQQPEPGRTAGAQPAPPAAIDMMFPQSRHSGRRRGPQPSLQATSSFLPTPFPASLLLPCSLVRWIPALTCEAS

SEQ ID NO: 825628 - protein, 235 aa, Homo sapiens
MLVQYRVSPPGAVDMMFPQSRHSGSSHLPQQLKFTTSDSCDRIKDEFQLLQAQYHSLKLECDKLASEKSEMQRHYVMYYEMSCCLNIEMHKQAEIVKRLNAAAAPGAADRRRDKGAAARRPQQPEPGRTAGAQPAPPAAIDMMFPQSRHSGSSHLPQQLKFTTSDSCDRIKDEFQLLQAQYHSLKLECDKLASEKSEMQRHYVMYYEMSYGLNIEMHKQAEIVKRLNGICAQVLP

SEQ ID NO: 825629 - protein, 344 aa, Homo sapiens
  misc_feature (46)..(46): Xaa can be any naturally occurring amino acid
DHDVRAPARGGGGTSEPGKKNGLALEYGFSKCNLGPTDLCDYVRGXVRFYNKIKMLVQYRVSPPGAVDMMFPQSRHSGSSHLPQQLKFTTSDSCDRIKDEFQLLQAQYHSLKLECDKLASEKSEMQRHYVMYYEMSCCLNIEMHKQAEIVKRLNAAAAPGAADRRRDKGAAARRPQQPEPGRTAGAQPAPPAAIDMMFPQSRHSGSSHLPQQLKFTTSDSCDRIKDEFQLLQAQYHSLKLECDKLASEKSEMQRHYVMYYEMSYGLNIEMHKQATALSPWYCMHAMLAAPFPSWAPRVSPDPGSQVCSHLHLPHSPPLLVPDTSTPTWSSPIAHKRGGTRDELS

SEQ ID NO: 825630 - protein, 225 aa, Homo sapiens
  misc_feature (46)..(46): Xaa can be any naturally occurring amino acid
DHDVRAPARGGGGTSEPGKKNGLALEYGFSKCNLGPTDLCDYVRGXVRFYNKIKMLVQYRVSPPGAVDMMFPQSRHSGSSHLPQQLKFTTSDSCDRIKDEFQLLQAQYHSLKLECDKLASEKSEMQRHYVMYYEMSCCLNIEMHKQAEIVKRLNAAAAPGAADRRRDKGAAARRPQQPEPGRTAGAQPAPPAAIDMMFPQSRHSSPPTPGPRYAPTSTCPTHHLC

SEQ ID NO: 825631 - protein, 326 aa, Homo sapiens
MLVQYRVSPPGAVDMMFPQSRHSGSSHLPQQLKFTTSDSCDRIKDEFQLLQAQYHSLKLECDKLASEKSEMQRHYVMYYEMSCCLNIEMHKQAEIVKRLNAAAAPGAADRRRDKGAAARRPQQPEPGRTAGAQPAPPAAIDMMFPQSRHSGSSHLPQQLKFTTSDSCDRIKDEFQLLQAQYHSLKLECDKLASEKSEMQRHYVMYYEMSYGLNIEMHKQAEIVKRLNGICAQVLPYLSQEVRARALGRGCEGAPHLPSPCPLQPSWVVCWAPQGTRLPSLDLPGSEHQSRPVQKNPRARDTPGVQACGGRASPCSGIPSWSESCHR

SEQ ID NO: 825632 - protein, 183 aa, Homo sapiens
MLVQYRVSPPGAVDMMFPQSRHSGSSHLPQQLKFTTSDSCDRIKDEFQLLQAQYHSLKLECDKLASEKSEMQRHYVMYYEMSCCLNIEMHKQAEIVKRLNAAAAPGAADRRRDKGAAARRPQQPEPGRTAGAQPAPPAAIDMMFPQSRHSGSSHLPQQLKFTTSDSCDRIKDEFQLLQAQYHR

SEQ ID NO: 825633 - protein, 464 aa, Homo sapiens [sequence omitted]

SEQ ID NO: 825634 - protein, 464 aa, Homo sapiens [sequence omitted]

SEQ ID NO: 825635 - protein, 464 aa, Homo sapiens [sequence omitted]

SEQ ID NO: 825636 - protein, 316 aa, Homo sapiens
MLRRYRPDITSCHGSTAESKGGVVLDVSGRARPLRRTRNSPSPTSLTSSKMSGLDGGNKLPLAQTGGLAAPDHASGDPDLDQCQGLREETEATQVMANTGGGSLETVAEGGASQDPVDCGPALRVPVAGSRGGAATKAGQEDAPPSTKGLEAASAAEAADSSQKNGCQLGEPRGPAGQKALEACGAGGLGSQMIPGKKAKEVTTKKRAISAAVEKEGEAGAAMEEKKVVQKEKKVAGGVKEETRPRAPKINNCMDSLEAIDQELSNVNAQADRAFLQLERKFGRMRRLHMQRRSFIIQNIPGFWVTAFHSEAVLAY

SEQ ID NO: 825637 - protein, 708 aa, Homo sapiens [sequence omitted]

SEQ ID NO: 825638 - protein, 708 aa, Homo sapiens [sequence omitted]

SEQ ID NO: 825639 - protein, 708 aa, Homo sapiens [sequence omitted]

SEQ ID NO: 825640 - protein, 708 aa, Homo sapiens [sequence omitted]

SEQ ID NO: 825641 - protein, 708 aa, Homo sapiens [sequence omitted]

SEQ ID NO: 825642 - protein, 693 aa, Homo sapiens
MSQYTEKEPAAMDQESGKAVWPKPAGGYQTITGRRYGRRHAYVSFKPCMTRHERSLGRAGDDYEVLELDDVPKENSSGSSPLDQVDSSLPSEPIFEKSETEIPTCGSALNQTTESSQSFVAVHHSEEGRDTLGSSTNLHNHSEGEYIPGACSASSVQNGIALVHTDSYDPDGKHGEDNDHLQLSAEVVEGSRYQESLGNTVFELENREAEAYTGLSPPVPSFNCEVRDEFEELDSVPLVKSSAGDTEFVHQNSQEIQRSSQDEMVSTKQQNNTSQERQTEHSPEDAACGPGHICSERNTNDREKNHGSSPEQVVRPKVRKLISSSQVDQETGFNRHEAKQRSVQRWREALEVEESGSDDLLIKCEEYDGEHDCMFLDPPYSRVITQRETENNQMTSESGATAGRQEVDNTFWNGCGDYYQLYDKDEDSSECSDGEWSASLPHRFSGTEKDQSSSDESWETLPGKDENEPELQSDSSGPEEENQELSLQEGEQTSLEEGEIPWLQYNEVNESSSDEGNEPANEFAQPAFMLDGNNNLEDDSSVSEDLDVDWSLFDGFADGLGVAEAISYVDPQFLTYMALEERLAQAMETALAHLESLAVDVEVANPPASKESIDGLPETLVLEDHTAIGQEQCCPICCSEYIKDDIATELPCHHFFHKPCVSIWLQKHLQLLPLSLILMPHLQMTVLQKHPKP

SEQ ID NO: 825643 - protein, 708 aa, Homo sapiens [sequence omitted]

SEQ ID NO: 825644 - protein, 708 aa, Homo sapiens [sequence omitted]

SEQ ID NO: 825645 - protein, 693 aa, Homo sapiens; identical to SEQ ID NO: 825642

SEQ ID NO: 825646 - protein, 406 aa, Homo sapiens
MSQYTEKEPAAMDQESGKAVWPKPAGGYQTITGRRYGRRHAYVSFKPCMTRHERSLGRAGDDYEVLELDDVPKENSSGSSPLDQVDSSLPSEPIFEKSETEIPTCGSALNQTTESSQSFVAVHHSEEGRDTLGSSTNLHNHSEGEYIPGACSASSVQNGIALVHTDSYDPDGKHGEDNDHLQLSAEVVEGSRYQESLGNTVFELENREAEAYTGLSPPVPSFNCEVRDEFEELDSVPLVKSSAGDTEFVHQNSQEIQRSSQDEMVSTKQQNNTSQERQTEHSPEDAACGPGHICSERNTNDREKNHGSSPEQVVRPKVRKLISSSQVDQETGFNRHEAKQRSVQRWREALEVEESGSDDLLIKCEEYDGEHEHRLIFKIKIFLTWVSLLKNQCISHKTPSLRIIEQ

SEQ ID NO: 825647 - protein, 334 aa, Homo sapiens
MNDPDVQAQVQVLSAALRAAQLDCVNEAESKPTAGLKEVSISHPSSASDNQIALAASSSQDELFVARILQSPDPGGPRNGTSDHLETDQRQDPTPLEENKSKLQDVIPQPLLDQYVSMTDPARAQTVDTDIAKHCAYSLPGVALTLGRQNWHCLKDTYETLASDVQWKVRRALAFSIHELAVILGDQLTAADLVPIFNGFLKDLDEVRIGVLRHLYDFLKLLHEDKRRDYLYQLQEFVVTDNSRNWRFRYELAEQLILILELYSPNDVYDYLMHIALKLCADQVSEVRWISFKLVRNQGICSVIFTNRNVDVSSILTLLIFLGLLCQLTYETSF

SEQ ID NO: 825648 - protein, 182 aa, Homo sapiens [sequence omitted]

SEQ ID NO: 825649 - protein, 342 aa, Homo sapiens [sequence omitted]

SEQ ID NO: 825650 - protein, 73 aa, Homo sapiens
PWGRAADPYKQPAGRSLGLWLVCGFRLEDSLGRWPALVETASPRRWRREIIAAPTCWLQRLQVWKNSCKDGEK

SEQ ID NO: 825651 - protein, 73 aa, Homo sapiens; identical to SEQ ID NO: 825650

SEQ ID NO: 825652 - protein, 203 aa, Homo sapiens
MAEGDNRSTNLLAAETASLEEQLQGWGEVMLMADKVLRWERAWFPPAIMGVVSLVFLIIYYLDPSVLSGVSCFVMFLCLADYLVPILAPRIFGSNKWTTEQQQRFHEICSNLVKTRRRAVGWWKRLFTLKEEKPKMYFMTMIVSLAAVAWVGQQVHNLLLTYLIVTSLLLLPGLNQHGIILKYIGMAKREINKLLKQKEKKNE

SEQ ID NO: 825653 - protein, 203 aa, Homo sapiens; identical to SEQ ID NO: 825652

SEQ ID NO: 825654 - protein, 158 aa, Homo sapiens
MGKSLVSTCHHGIIYYLDPSVLSGVSCFVMFLCLADYLVPILAPRIFGSNKWTTEQQQRFHEICSNLVKTRRRAVGWWKRLFTLKEEKPKMYFMTMIVSLAAVAWVGQQVHNLLLTYLIVTSLLLLPGLNQHGIILKYIGMAKREINKLLKQKEKKNE

SEQ ID NO: 825655 - protein, 199 aa, Homo sapiens
MAEGDNRSTNLLAAETASLEEQLQGWGEVMLMADKVLRWERAWFPPAIMGVVSLVFLIIYYLDPSVLSGVSCFVMFLCLADYLVPILAPRIFGSNKWTTEQQQRFHEICSNLVKTRRRAVGWWKRLFTLKEEKPKMYFMTMIVSLAAVAWVGQQVHNLLLTYLIAKPTWNHFEVHWNGQEGDKQTSQTKRKEKRMIHLL

SEQ ID NO: 825656 - protein, 68 aa, Homo sapiens
PWGRAADPYKQPAGRSLGLWLVCGFRLEDSLGRWPALVETASPRRWRREIIAAPTCWLQRLQVWKNDH

SEQ ID NO: 825657 - protein, 162 aa, Homo sapiens
MAEGDNRSTNLLAAETASLEEQLQGWGEVMLMADKVLRWERAWFPPAIMGVVSLVFLIIYYLDPSVLSGVSCFVMFLCLADYLVPILAPRIFGSNKWTTEQQQRFHEICSNLVKTRRRAVGWWKRLFTLKEEKPKMQQQRFHEICSNLVKTRRRAVGRWKRL

SEQ ID NO: 825658 - protein, 175 aa, Homo sapiens
MAEGDNRSTNLLAAETASLEEQLQGWGEVMLMADKVLRWERAWFPPAIMGVVSLVFLIIYYLDPSVLSGVSCFVMFLCLADYLVPILAPRIFGSNKWTTEQQQRFHEICSNLVKTRRRAVGWWKRLFTLKEEKPKMYFMTMIVSLAAVAWVGQQVHNLLLTYLIDPNPGISGTFP

SEQ ID NO: 825659 - protein, 203 aa, Homo sapiens; identical to SEQ ID NO: 825652

SEQ ID NO: 825660 - protein, 203 aa, Homo sapiens; identical to SEQ ID NO: 825652

SEQ ID NO: 825661 - protein, 194 aa, Homo sapiens
MAEGDNRSTNLLAAETASLEEQLQGWGEVMLMADKVLRWERAWFPPAIMGVVSLVFLIIYYLDPSVLSGVSCFVMFLCLADYLVPILAPRIFGSNKWTTEQQQRFHEICSNLVKTRRRAVGWWKRLFTLKEEKPKMGGTTSPQPASHLPDSDFLTIASWTKPTWNHFEVHWNGQEGDKQTSQTKRKEKRMIHLL

SEQ ID NO: 825662 - protein, 83 aa, Homo sapiens
AKPMRWWRGLFTLSGRGPYYVLYSESLSRCTSLAVGIALPISETNDVRDETIVSCYLDLNPRLVPFIGLVFHGHLSTWNSFGL

SEQ ID NO: 825663 - protein, 142 aa, Homo sapiens
MAEGDNRSTNLLAAETASLEEQLQGWGEVMLMADKVLRWERAWFPPAIMGVVSLVFLIIYYLDPSVLSGVSCFVMFLCLADYLVPILAPRIFGSNKWTTEQQQRFHEICSNLVKTRRRAVGWWKRLFTLKEEKPKMMVLFLL

SEQ ID NO: 825664 - protein, 95 aa, Homo sapiens
AFLCGITMAAGTLYTYPENWRAFKALIAAQYSGAQVRVLSAPPHFHFGQTNRTPEFLRKFPAGKVPAFEGDDGFCVFESNAIAYYVSNEECWMLT

SEQ ID NO: 825665 - protein, 409 aa, Homo sapiens
MAAGTLYTYPENWRAFKALIAAQYSGAQVRVLSAPPHFHFGQTNRTPEFLRKFPAGKVPAFEGDDGFCVFESNAIAYYVSNEELRGSTPEGIMHHNKQATENAKEEVRRILGLLDAYLKTRTFLVGERVTLADITVVCTLLWLYKQVLEPSFRQAFPNTNRWFLTCINQPQFRAVLGEVKLCEKMAQFDAKKFAETQPKKDTPRKEKGSREEKQKPQAERKEEKKAAAPAPEEEMDECEQALAAEPKAKDPFAHLPKSTFVLDEFKRKYSNEDTLSVALPYFWEHFDKDGWSLWYSEYRFPEELTQTFMSCNLITGMFQRLDKLRKNAFASVILFGTNNSSSISGVWVFRGQELAFPLSPDWQVDYESYTWRKLDPGSEETQTLVREYFSWEGAFQHVGKAFNQGKIFK

SEQ ID NO: 825666 - protein, 317 aa, Homo sapiens [sequence omitted]

SEQ ID NO: 825667 - protein, 316 aa, Homo sapiens
AFLCGITMAAGTLYTYPENWRAFKALIAAQYSGAQVRVLSAPPHFHFGQTNRTPEFLRKFPAGKVPAFEGDDGFCVFESNAIAYYVSNEELRGSTPEAAAQVVQWVSFADSDIVPPASTWVFPTLGIMHHNKQATENAKEEMDECEQALAAEPKAKDPFAHLPKSTFVLDEFKRKYSNEDTLSVALPYFWEHFDKDGWSLWYSEYRFPEELTQTFMSCNLITGMFQRLDKLRKNAFASVILFGTNNSSSISGVWVFRGQELAFPLSPDWQVDYESYTWRKLDPGSEETQTLVREYFSWEGAFQHVGKAFNQGKIFK

SEQ ID NO: 825668 - protein, 454 aa, Homo sapiens
MAAGTLYTYPENWRAFKALIAAQYSGAQVRVLSAPPHFHFGQTNRTPEFLRKFPAGKVPAFEGDDGFCVFESNAIAYYVSNEELRGSTPEAAAQVVQWVSFADSDIVPPASTWVFPTLGTFNGQPTNHNRGTVQNVATEREMRAEIYSGGMHGMPYFEKHRREFYLGGAKHERVTLADITVVCTLLWLYKQVLEPSFRQAFPNTNRWFLTCINQPQFRAVLGEVKLCEKMAQFDAKKFAETQPKKDTPRKEKGSREEKQKPQAERKEEKKAAAPAPEEEMDECEQALAAEPKAKDPFAHLPKSTFVLDEFKRKYSNEDTLSVALPYFWEHFDKDGWSLWYSEYRFPEELTQTFMSCNLITGMFQRLDKLRKNAFASVILFGTNNSSSISGVWVFRGQELAFPLSPDWQVDYESYTWRKLDPGSEETQTLVREYFSWEGAFQHVGKAFNQGKIFK

SEQ ID NO: 825669 - protein, 380 aa, Homo sapiens
LGHLLTQFHFPQDSPELGHRFMQMRKHANGIVVRPAGKKALEPAYESHNRVQTTVMSANVTGIMHHNKQATENAKEEVRRILGLLDAYLKTRTFLVGERVTLADITVVCTLLWLYKQVLEPSFRQAFPNTNRWFLTCINQPQFRAVLGEVKLCEKMAQFDAKKFAETQPKKDTPRKEKGSREEKQKPQAERKEEKKAAAPAPEEEMDECEQALAAEPKAKDPFAHLPKSTFVLDEFKRKYSNEDTLSVALPYFWEHFDKDGWSLWYSEYRFPEELTQTFMSCNLITGMFQRLDKLRKNAFASVILFGTNNSSSISGVWVFRGQELAFPLSPDWQVDYESYTWRKLDPGSEETQTLVREYFSWEGAFQHVGKAFNQGKIFK

SEQ ID NO: 825670 - protein, 359 aa, Homo sapiens
MAAGTLYTYPENWRAFKALIAAQYSGAQVRVLSAPPHFHFGQTNRTPEFLRKFPAGKVPAFEGDDGFCVFESNAIAYYVSNEELRGSTPEGIMHHNKQATENAKEEVRRILGLLDAYLKTRTFLVGERVTLADITVVCTLLWLYKQVLEPSFRQAFPNTNRWFLTCINQPQFRAVLGEVKLCEKMAQFDAKKFAETQPKKDTPRKEKGSREEKQKPQAERKEEKKAAAPAPEEEMDECEQALAAEPKAKDPFAHLPKSTFVLDEFKRKYSNEDTLSVALPYFWEHFDKDGWSLWYSEYRFPEELTQTFMSCNLITGMFQRLDKLRKNAFASVILFGTNNSSSEGLSEFFREAILLSTTG

SEQ ID NO: 825671 - protein, 400 aa, Homo sapiens
AFLCGITMAAGTLYTYPENWRAFKALIAAQYSGAQVRVLSAPPHFHFGQTNRTPEFLRKFPAGKVPAFEGDDGFCVFESNAIAYYVSNEELRGSTPEAAAQVVQWVSFADSDIVPPASTWVFPTLGIMHHNKQATENAKEEVRRILGLLDAYLKTRTFLVGERVTLADITVVCTLLWLLMLKSLQRPNLKRTHHGKRRVHGKRSRSPRLSEKEEKKAAAPAPEEEMDECEQALAAEPKAKDPFAHLPKSTFVLDEFKRKYSNEDTLSVALPYFWEHFDKDGWSLWYSEYRFPEELTQTFMSCNLITGMFQRLDKLRKNAFASVILFGTNNSSSISGVWVFRGQELAFPLSPDWQVDYESYTWRKLDPGSEETQTLVREYFSWEGAFQHVGKAFNQGKIFK

SEQ ID NO: 825672 - protein, 112 aa, Homo sapiens
  misc_feature (46)..(46): Xaa can be any naturally occurring amino acid
DTNLCAIHAKRVTIMPKDIQLARRIRGERDLRIHYDGKHFILKKKXKKLETERGQELAFPLSPDWQVDYESYTWRKLDPGSEETQTLVREYFSWEGAFQHVGKAFNQGKIFK

SEQ ID NO: 825673 - protein, 437 aa, Homo sapiens
MAAGTLYTYPENWRAFKALIAAQYSGAQVRVLSAPPHFHFGQTNRTPEFLRKFPAGKVPAFEGDDGFCVFESNAIAYYVSNEELRGSTPEAAAQVVQWVSFADSDIVPPASTWVFPTLGIMHHNKQATENAKEEVRRILGLLDAYLKTRTFLVGERVTLADITVVCTLLWLYKQVLEPSFRQAFPNTNRWFLTCINQPQFRAVLGEVKLCEKMAQFDAKKFAETQPKKDTPRKEKGSREEKQKPQAERKEEKKAAAPAPEEEMDECEQALAAEPKAKDPFAHLPKSTFVLDEFKRKYSNEDTLSVALPYFWEHFDKDGWSLWYSEYRFPEELTQTFMSCNLITGMFQRLDKLRKNAFASVILFGTNNSSSISGVWVFRGQELAFPLSPDWQVDYESYTWRKLDPGSEETQTLVREYFSWEGAFQHVGKAFNQGKIFK

SEQ ID NO: 825674 - protein, 321 aa, Homo sapiens
MAAGTLYTYPENWRAFKALIAAQYSGAQVRVLSAPPHFHFGQTNRTPEFLRKFPAGKVPAFEGDDGFCVFESNAIAYYVSNEELRGSTPEAAAQVVQWVSFADSDIVPPASTWVFPTLGIMHHNKQATENAKEEEKKAAAPAPEEEMDECEQALAAEPKAKDPFAHLPKSTFVLDEFKRKYSNEDTLSVALPYFWEHFDKDGWSLWYSEYRFPEELTQTFMSCNLITGMFQRLDKLRKNAFASVILFGTNNSSSISGVWVFRGQELAFPLSPDWQVDYESYTWRKLDPGSEETQTLVREYFSWEGAFQHVGKAFNQGKIFK

SEQ ID NO: 825675 - protein, 420 aa, Homo sapiens
MAAGTLYTYPENWRAFKALIAAQYSGAQVRVLSAPPHFHFGQTNRTPEFLRKFPAGKVPAFEGDDGFCVFESNAIAYYVSNEELRGSTPEAAAQVVQWVSFADSDIVPPASTWVFPTLGIMHHNKQATENAKEEVRRILGLLDAYLKTRTFLVGYKQVLEPSFRQAFPNTNRWFLTCINQPQFRAVLGEVKLCEKMAQFDAKKFAETQPKKDTPRKEKGSREEKQKPQAERKEEKKAAAPAPEEEMDECEQALAAEPKAKDPFAHLPKSTFVLDEFKRKYSNEDTLSVALPYFWEHFDKDGWSLWYSEYRFPEELTQTFMSCNLITGMFQRLDKLRKNAFASVILFGTNNSSSISGVWVFRGQELAFPLSPDWQVDYESYTWRKLDPGSEETQTLVREYFSWEGAFQHVGKAFNQGKIFK

SEQ ID NO: 825676 - protein, 225 aa, Homo sapiens [sequence omitted]

SEQ ID NO: 825677 - protein, 225 aa, Homo sapiens [sequence omitted]

SEQ ID NO: 825678 - protein, 224 aa, Homo sapiens
MAAGTLYTYPENWRAFKALIAAQYSGAQVRVLSAPPHFHFGQTNRTPEFLRKFPAGKVPAFEGDDGFCVFESNAIAYYVSNEELRGSTPEAAAQVVQWVSFADSDIVPPASTWVFPTLGIMHHNKQATENAKEEVRRILGLLDAYLKTRTFLVGERVTLADITVVCTLLWLYKQVLEPSFRQAFPNTNRWFLTCINQPQFRAVLGEVKLCEKMAQFDAKKFAIT

SEQ ID NO: 825679 - protein, 836 aa, Homo sapiens
MTTLAGAVPRMMRPGPGQNYPRSGFPLEVSTPLGQGRVNQLGGVFINGRPLPNHIRHKIVEMAHHGIRPCVISRQLRVSHGCVSKILCRYQETGSIRPGAIGGSKPKQVTTPDVEKKIEEYKRENPGMFSWEIRDKLLKDAVCDRNTVPSVSSISRILRSKFGKGEEEEADLERKEAEESEKKAKHSIDGILSERASAPQSDEGSDIDSEPDLPLKRKQRRSRTTFTAEQLEELERAFERTHYPDIYTREELAQRAKLTEARVQVWFSNRRARWRKQAGANQLMAFNHLIPGGFPPTAMPTLPTYQLSETSYQPTSIPQAVSDPSSTVHRPQPLPPSTVHQSTIPSNPDSSSAYCLPSTRHGFSSYTDSFVPPSGPSNPMNPTIGNGLSPQNSIRHNLSLHSKFIRVQNEGTGKSSWWMLNPEGGKSGKSPRRRAASMDNNSKFAKSRSRAAKKKASLQSGQEGAGDSPGSQFSKWPASPGSHSNDDFDNWSTFRPRTSSNASTISGRLSPIMTEQDDLGEGDVHSMVYPPSAAKMASTLPSLSEISNPENMENLLDNLNLLSSPTSLTVSTQSSPGTMMQQTPCYSFAPPNTSLNSPSPNYQKYTYGQSSMSPLPQMPIQTLQDNKSSYGGMSQYNCAPGLLKELLTSDSPPHNDIMTPVDPGVAQPNSRVLGQNVMMGPNSVMSTYGSQASHNKMMNPSSHTHPGHAQQTSAVNGRPLPHTVSTMPHTSGMNRLTQVKTPVQVPLPHPMQMSALGGYSSVSSCNGYGRMGLLHQEKLPSDLDGMFIERLDCDMESIIRNDLMDGDTLDFNFDNVLPNQSFPHSVKTTTHSWVSG

SEQ ID NO: 825680 - protein, 206 aa, Homo sapiens
MTTLAGAVPRMMRPGPGQNYPRSGFPLEVSTPLGQGRVNQLGGVFINGRPLPNHIRHKIVEMAHHGIRPCVISRQLRVSHGCVSKILCRYQETGSIRPGAIGGSKPKQVTTPDVEKKIEEYKRENPGMFSWEIRDKLLKDAVCDRNTVPSVSSISRILRSKFGKGEEEEADLERKEAEESEKKAKHSIDGILSERGKALVSGVSSH

SEQ ID NO: 825681 - protein, 186 aa, Homo sapiens
MPTLPTYQLSETSYQPTSIPQAVSDPSSTVHRPQPLPPSTVHQSTIPSNPDSSSAYCLPSTRHGFSSYTDSFVPPSGPSNPMNPTIGNGLSPQVMGLLTNHGGVPHQPQTDYALSPLTGGLEPTTTVSASCSQRLDHMKSLDSLPTSQSYCPPTYSTTGYSMDPVTGYQYGQYGQSAFHYLKPDIA

SEQ ID NO: 825682 - protein, 479 aa, Homo sapiens
MTTLAGAVPRMMRPGPGQNYPRSGFPLEVSTPLGQGRVNQLGGVFINGRPLPNHIRHKIVEMAHHGIRPCVISRQLRVSHGCVSKILCRYQETGSIRPGAIGGSKPKQVTTPDVEKKIEEYKRENPGMFSWEIRDKLLKDAVCDRNTVPSVSSISRILRSKFGKGEEEEADLERKEAEESEKKAKHSIDGILSERASAPQSDEGSDIDSEPDLPLKRKQRRSRTTFTAEQLEELERAFERTHYPDIYTREELAQRAKLTEARVQVWFSNRRARWRKQAGANQLMAFNHLIPGGFPPTAMPTLPTYQLSETSYQPTSIPQAVSDPSSTVHRPQPLPPSTVHQSTIPSNPDSSSAYCLPSTRHGFSSYTDSFVPPSGPSNPMNPTIGNGLSPQVMGLLTNHGGVPHQPQTDYALSPLTGGLEPTTTVSASCSQRLDHMKSLDSLPTSQSYCPPTYSTTGYSMDPVTGYQYGQYGQSKPWTF

SEQ ID NO: 825683 - protein, 103 aa, Homo sapiens
MRIGQKTAKLRAAVLCFLFSSSDFSLASLFHLPTVSTPLGQGRVNQLGGVFINGRPLPNHIRHKIVEMAHHGIRPCVISRQLRVSHGCVSKILCRYQETGSIR

SEQ ID NO: 825684 - protein, 215 aa, Homo sapiens
MTTLAGAVPRMMRPGPGQNYPRSGFPLEVSTPLGQGRVNQLGGVFINGRPLPNHIRHKIVEMAHHGIRPCVISRQLRVSHGCVSKILCRYQETGSIRPGAIGGSKPKQVTTPDVEKKIEEYKRENPGMFSWEIRDKLLKDAVCDRNTVPSVSSISRILRSKFGKGEEEEADLERKEAEESEKKAKHSIDGILSERGKRWRLGRRTCWVTWRASAS

SEQ ID NO: 825685 - protein, 484 aa, Homo sapiens
MTTLAGAVPRMMRPGPGQNYPRSGFPLEVSTPLGQGRVNQLGGVFINGRPLPNHIRHKIVEMAHHGIRPCVISRQLRVSHGCVSKILCRYQETGSIRPGAIGGSKPKQVTTPDVEKKIEEYKRENPGMFSWEIRDKLLKDAVCDRNTVPSVSSISRILRSKFGKGEEEEADLERKEAEESEKKAKHSIDGILSERASAPQSDEGSDIDSEPDLPLKRKQRRSRTTFTAEQLEELERAFERTHYPDIYTREELAQRAKLTEARVQVWFSNRRARWRKQAGANQLMAFNHLIPGGFPPTAMPTLPTYQLSETSYQPTSIPQAVSDPSSTVHRPQPLPPSTVHQSTIPSNPDSSSAYCLPSTRHGFSSYTDSFVPPSGPSNPMNPTIGNGLSPQVMGLLTNHGGVPHQPQTDYALSPLTGGLEPTTTVSASCSQRLDHMKSLDSLPTSQSYCPPTYSTTGYSMDPVTGYQYGQYGQSAFHYLKPDIA

SEQ ID NO: 825686 - protein, 391 aa, Homo sapiens
MTTLAGAVPRMMRPGPGQNYPRSGFPLEVSTPLGQGRVNQLGGVFINGRPLPNHIRHKIVEMAHHGIRPCVISRQLRVSHGCVSKILCRYQETGSIRPGAIGGSKPKQVTTPDVEKKIEEYKRENPGMFSWEIRDKLLKDAVCDRNTVPSVSSISRILRSKFGKGEEEEADLERKEAEESEKKAKHSIDGILSERASAPQSDEGSDIDSEPDLPLKRKQRRSRTTFTAEQLEELERAFERTHYPDIYTREELAQRAKLTEARVQVWFSNRRARWRKQAGANQLMAFNHLIPGGFPPTAMPTLPTYQLSETSYQPTSIPQAVSDPSSTVHRPQPLPPSTVHQSTIPSNPDSSSAYCLPSTRHGFSSYTDSFSPLSPGVWNLPPRCRPAAVRD

SEQ ID NO: 825687 - protein, 911 aa, Homo sapiens
MKGSNRNKDHSAEGEGVGKRPKRKCLQWHPLLAKKLLDFSEEEEEEDEEEDIDKVQLLGADGLEQDVGETEDDESPEQRARRPMNAFLLFCKRHRSLVRQEHPRLDNRGATKILADWWAVLDPKEKQKYTDMAKEYKDAFMKANPGYKWCPTTNKPVKSPTPTVNPRKKLWAFPSDSSRDLPSPKKAKTEEMPQLNFGMADPTQMGGLSMLLLAGEHALGTPEVSSGTCRPDVSESPELRQKSPLFQFAEISSSTSHSDASTKQCQTSALFQFAEISSNTSQLGGAEPVKRCGKSALFQLAEMCLASEGMKMEESKLIKAKESDGGRIKELEKGKEEKEIKMEKTDETRLQKEAEFEKSAKENLRDSKELRNFEALQIDDIMAIKMEDPKEIRKEELEEDHKCSHFPDFSYSASSKIIISDVPSRKDHMCHPHGIMIIEDPAALNKPEKLKKKKKKSKMDRHGNDKSTPKKTCKKRQSSESDIESVIYTIEAVAKGDWGIEKLGDTPRKKVRTSSSGKGSILDAKPPKKKVKSREKKMSKEKSSDTTKESRPPDFISISASKNISGETPEGIKAEPLTPMEDALPPSLSGQAKPEDSDCHRKIETCGSRKSERSCKGALYKTLVSEGMLTSLRANVDRGKRSSGKGNSSDHEGCWNEESWTFSQSGTSGSKKFKKTKPKEDCLLGSAKLDEEFEKKFNSLPQYSPVTFDRKCVPVPRKKKKTGNVSSEPTKTSKGSGDKWSNKQLFLDAIHPTEAIFSEDRNTMEPVHKVKNIPSIFNTPEPTTTQEPLVGSQKRKARKTKITHLVRTADGRVSPAGGTLDDKPKEQLQRSLPKATETDCNDKCSHNTEVGETRSSTPEMPAVSAFFSLAALAEVAAMENVHRGQRSTPLTHDGQPKEMPQAPVLISCADQ

SEQ ID NO: 825688 - protein, 911 aa, Homo sapiens; identical to SEQ ID NO: 825687

SEQ ID NO: 825689 - protein, 797 aa, Homo sapiens
MKGSNRNKDHSAEGEGVGKRPKRKCLQWHPLLAKKLLDFSEEEEEEDEEEDIDKVQLLGADGLEQDVGETEDDESPEQRARRPMNAFLLFCKRHRSLVRQEHPRLDNRGATKILADWWAVLDPKEKQKYTDMAKEYKDAFMKANPGYKWCPTTNKPVKSPTPTVNPRKKLWAFPSDSSRDLPSPKKAKTEEMPQLNFGMADPTQMGGLSMLLLAGEHALGTPEVSSGTCRPDVSESPELRQKSPLFQFAEISSSTSHSDASTKQCQTSALFQFAEISSNTSQLGGAEPVKRCGKSALFQLAEMCLASEGMKMEESKLIKAKESDGGRIKELEKGKEEKEIKMEKTDETRLQKEAEFEKSAKENLRDSKELRNFEALQIDDIMAIKMEDPKEIRKEELEEDHKCSHFPDFSYSASSKIIISDVPSRKDHMCHPHGIMIIEDPAALNKPEKLKKKKKKSKMDRHGNDKSTPKKTCKKRQSSESDIESVIYTIEAVAKGDWGIEKLGDTPRKKVRTSSSGKGSILDAKPPKKKVKSREKKMSKEKSSDTTKESRPPDFISISASKNISGETPEGIKAEPLTPMEDALPPSLSGQAKPEDSDCHRKIETCGSRKSERSCKGALYKTLVSEGMLTSLRANVDRGKRSSGKGNSSDHEGCWNEESWTFSQSGTSGSKKFKKTKPKEDCLLGSAKLDEEFEKKFNSLPQYSPVTFDRKCVPVPRKKKKTGNVSSEPTKTSKGSGDKWSNKQLFLDAIHPTEAIFSEDRNTMEPVHKVKNIPSIFNTLHDQRSFLFLSFVFLCQH

SEQ ID NO: 825690 - protein, 483 aa, Homo sapiens
MDRHGNDKSTPKKTCKKRQSSESDIESVIYTIEAVAKGDWGIEKLGDTPRKKVRTSSSGKGSILDAKPPKKKVKSREKKMSKEKSSDTTKESRPPDFISISASKNISGETPEGIKAEPLTPMEDALPPSLSGQAKPEDSDCHRKIETCGSRKSERSCKGALYKTLVSEGMLTSLRANVDRGKRSSGKGNSSDHEGCWNEESWTFSQSGTSGSKKFKKTKPKEDCLLGSAKLDEEFEKKFNSLPQYSPVTFDRKCVPVPRKKKKTGNVSSEPTKTSKGPFQSQKKNLFHKIVSKYKHKKEKPNVPEKGSGDKWSNKQLFLDAIHPTEAIFSEDRNTMEPVHKVKNIPSIFNTPEPTTTQEPLVGSQKRKARKTKITHLVRTADGRVSPAGGTLDDKPKEQLQRSLPKATETDCNDKCSHNTEVGETRSSTPEMPAVSAFFSLAALAEVAAMENVHRGQRSTPLTHDGQPKEMPQAPVLISCADQ

SEQ ID NO: 825691 - protein, 108 aa, Homo sapiens
HGLNPVTSHGASSEQGPRKRRPPWLSSTALSQLQLAPELTQGELQRELEDATETADAMNREVSSLKNKLRRGDLPFVVPRRMARKGAGDGSDEEVDGKADGAEAKPAE

SEQ ID NO: 825692 - protein, 87 aa, Homo sapiens
RPSSYLPTEAKLKKLEEEQIILEDQNCKLAKDKKLEDGKMMADYGIRKGNLLFLASFVLEGDHPGHGVLAGVKKLISFNLLLNEHIF

SEQ ID NO: 825693 - protein, 54 aa, Homo sapiens
MSPRLVTNSWAPAILLPQPPKVLGITGMSHCARPFLIFSRDKVFTILAQADLPG

SEQ ID NO: 825694 - protein, 1855 aa, Homo sapiens
GSRADTFVEKVMQEQGTHPKFQKPKQLKDKADFCIIHYAGKVDYKADEWLMKNMDPLNDNIATLLHQSSDKSVSELWKDVDRIIGLDQVAGMSETALPGAFKTRKGMFRTVGQLYKEQLAKLMATLRNTNPNFVRCIIPNHEKKAGKLDPHLVLDQLRCNGVLEGIRICRQGSPTGWSSRSFGRADLLLEPYNKYRFLSNGHVTIPGQQDKDMFQETMEAMRIMGIPEEEQMGLLRVISGVLQLGNIVFKKERNTDQASMPDNTAAQKVSHLLGINVTDFTRGILTPRIKVGRDYVQKAQTKEQADFAIEALAKATYERMFRWLVLRINKALDKTKRQGASFIGILDIAGFEIFDLNSFEQLCINYTNEKLQQLFNHTMFILEQEEYQREGIEWNFIDFGLDLQPCIDLIEKPAGPPGILALLDEECWFPKATDKSFVEKVMQEQGTHPKFQKPKQLKDKADFCIIHYAGKVDYKADEWLMKNMDPLNDNIATLLHQSSDKFVSELWKDVDRIIGLDQVAGMSETALPGAFKTRKGMFRTVGQLYKEQLAKLMATLRNTNPNFVRCIIPNHEKKAGKLDPHLVLDQLRCNGVLEGIRICRQGFPNRVVFQEFRQRYEILTPNSIPKGFMDGKQACVLMIKALELDSNLYRIGQSKVFFRAGVLAHLEEERDLKITDVIIGFQACCRGYLARKAFAKRQQQLTAMKVLQRNCAAYLKLRNWQWWRLFTKVKPLLQVSRQEEEMMAKEEELVKVREKQLAAENRLTEMETLQSQLMAEKLQLQEQLQAETELCAEAEELRARLTAKKQELEEICHDLEARVEEEEERCQHLQAEKKKMQQNIQELEEQLEEEESARQKLQLEKVTTEAKLKKLEEEQIILEDQNCKLAKEKKLLEDRIAEFTTNLTEEEEKSKSLAKLKNKHEAMITDLEERLRREEKQRQELEKTRRKLEGDSTDLSDQIAELQAQIAELKMQLAKKEEELQAALARVEEEAAQKNMALKKIRELESQISELQEDLESERASRNKAEKQKRDLGEELEALKTELEDTLDSTAAQQELRSKREQEVNILKKTLEEEAKTHEAQIQEMRQKHSQAVEELAEQLEQTKRVKANLEKAKQTLENERGELANEVKVLLQGKGDSEHKRKKVEAQLQELQVKFNEGERVRTELADKVTKLQVELDNVTGLLSQSDSKSSKLTKDFSALESQLQDTQELLQEENRQKLSLSTKLKQVEDEKNSFREQLEEEEEAKHNLEKQIATLHAQVADMKKKMEDSVGCLETAEEVKRKLQKDLEGLSQRHEEKVAAYDKLEKTKTRLQQELDDLLVDLDHQRQSACNLEKKQKKFDQLLAEEKTISAKYAEERDRAEAEAREKETKALSLARALEEAMEQKAELERLNKQFRTEMEDLMSSKDDVGKSVHELEKSKRALEQQVEEMKTQLEELEDELQATEDAKLRLEVNLQAMKAQFERDLQGRDEQSEEKKKQLVRQVREMEAELEDERKQRSMAVAARKKLEMDLKDLEAHIDSANKNRDEAIKQLRKLQAQMKDCMRELDDTRASREEILAQAKENEKKLKSMEAEMIQLQEELAAAERAKRQAQQERDELADEIANSSGKGALALEEKRRLEARIAQLEEELEEEQGNTELINDRLKKANLQIDQINTDLNLERSHAQKNENARQQLERQNKELKVKLQEMEGTVKSKYKASITALEAKIAQLEEQLDNETKERQAACKQVRRTEKKLKDVLLQVDDERRNAEQYKDQADKASTRLKQLKRQLEEAEEEAQRANASRRKLQRELEDATETADAMNREVSSLKNKLRRGDLPFVVPRRMARKGAGDGSDEEVDGKADGAEAKPAE

SEQ ID NO: 825695 - protein, 1751 aa, Homo sapiens
PDIRSVGDSKTYGYAKTVKNENSSRFGKFIRINFDVNGYIVGANIETYLLEKSRAIRQAKEERTFHIFYYLLSGAGEHLKTDLLLEPYNKYRFLSNGHVTIPGQQDKDMFQETMEAMRIMGIPEEEQMGLLRVISGVLQLGNIVFKKERNTDQASMPDNTAAQKVSHLLGINVTDFTRGILTPRIKVGRDYVQKAQTKEQADFAIEALAKATYERMFRWLVLRINKALDKTKRQGASFIGILDIAGFEIFDLNSFEQLCINYTNEKLQQLFNHTMFILEQEEYQREGIEWNFIDFGLDLQPCIDLIEKPAGPPGILALLDEECWFPKATDKSFVEKVMQEQGTHPKFQKPKQLKDKADFCIIHYAGKVDYKADEWLMKNMDPLNDNIATLLHQSSDKFVSELWKDVDRIIGLDQVAGMSETALPGAFKTRKGMFRTVGQLYKEQLAKLMATLRNTNPNFVRCIIPNHEKKAGKLDPHLVLDQLRCNGVLEGIRICRQGFPNRVVFQEFRQRYEILTPNSIPKGFMDGKQACVLMIKALELDSNLYRIGQSKVFFRAGVLAHLEEERDLKITDVIIGFQACCRGYLARKAFAKRQQQLTAMKVLQRNCAAYLKLRNWQWWRLFTKVKPLLQVSRQEEEMMAKEEELVKVREKQLAAENRLTEMETLQSQLMAEKLQLQEQLQAETELCAEAEELRARLTAKKQELEEICHDLEARVEEEEERCQHLQAEKKKMQQNIQELEEQLEEEESARQKLQLEKVTTEAKLKKLEEEQIILEDQNCKLAKEKKLLEDRIAEFTTNLTEEEEKSKSLAKLKNKHEAMITDLEERLRREEKQRQELEKTRRKLEGDSTDLSDQIAELQAQIAELKMQLAKKEEELQAALARVEEEAAQKNMALKKIRELESQISELQEDLESERASRNKAEKQKRDLGEELEALKTELEDTLDSTAAQQELRSKREQEVNILKKTLEEEAKTHEAQIQEMRQKHSQAVEELAEQLEQTKRVKANLEKAKQTLENERGELANEVKVLLQGKGDSEHKRKKVEAQLQELQVKFNEGERVRTELADKVTKLQVELDNVTGLLSQSDSKSSKLTKDFSALESQLQDTQELLQEENRQKLSLSTKLKQVEDEKNSFREQLEEEEEAKHNLEKQIATLHAQVADMKKKMEDSVGCLETAEEVKRKLQKDLEGLSQRHEEKVAAYDKLEKTKTRLQQELDDLLVDLDHQRQSACNLEKKQKKFDQLLAEEKTISAKYAEERDRAEAEAREKETKALSLARALEEAMEQKAELERLNKQFRTEMEDLMSSKDDVGKSVHELEKSKRALEQQVEEMKTQLEELEDELQATEDAKLRLEVNLQAMKAQFERDLQGRDEQSEEKKKQLVRQVREMEAELEDERKQRSMAVAARKKLEMDLKDLEAHIDSANKNRDEAIKQLRKLQAQMKDCMRELDDTRASREEILAQAKENEKKLKSMEAEMIQLQEELAAAERAKRQAQQERDELADEIANSSGKGALALEEKRRLEARIAQLEEELEEEQGNTELINDRLKKANLQIDQINTDLNLERSHAQKNENARQQLERQNKELKVKLQEMEGTVKSKYKASITALEAKIAQLEEQLDNETKERQAACKQVRRTEKKLKDVLLQVDDERRNAEQYKDQADKASTRLKQLKRQLEEAEEEAQRANASRRKLQRELEDATETADAMNREVSSLKNKLRRGDLPFVVPRRMARKGAGDGSDEEVDGKADGAEAKPAE

SEQ ID NO: 825696 - protein, 1271 aa, Homo sapiens
MGCIVGQYRSPNEYRRHSFSNRVVFQEFRQRYEILTPNSIPKGFMDGKQACVLMIKALELDSNLYRIGQSKVFFRAGVLAHLEEERDLKITDVIIGFQACCRGYLARKAFAKRQQQLTAMKVLQRNCAAYLKLRNWQWWRLFTKVKPLLQVSRQEEEMMAKEEELVKVREKQLAAENRLTEMETLQSQLMAEKLQLQEQLQAETELCAEAEELRARLTAKKQELEEICHDLEARVEEEEERCQHLQAEKKKMQQNIQELEEQLEEEESARQKLQLEKVTTEAKLKKLEEEQIILEDQNCKLAKEKKLLEDRIAEFTTNLTEEEEKSKSLAKLKNKHEAMITDLEERLRREEKQRQELEKTRRKLEGDSTDLSDQIAELQAQIAELKMQLAKKEEELQAALARVEEEAAQKNMALKKIRELESQISELQEDLESERASRNKAEKQKRDLGEELEALKTELEDTLDSTAAQQELRSKREQEVNILKKTLEEEAKTHEAQIQEMRQKHSQAVEELAEQLEQTKRVKANLEKAKQTLENERGELANEVKVLLQGKGDSEHKRKKVEAQLQELQVKFNEGERVRTELADKVTKLQVELDNVTGLLSQSDSKSSKLTKDFSALESQLQDTQELLQEENRQKLSLSTKLKQVEDEKNSFREQLEEEEEAKHNLEKQIATLHAQVADMKKKMEDSVGCLETAEEVKRKLQKDLEGLSQRHEEKVAAYDKLEKTKTRLQQELDDLLVDLDHQRQSACNLEKKQKKFDQLLAEEKTISAKYAEERDRAEAEAREKETKALSLARALEEAMEQKAELERLNKQFRTEMEDLMSSKDDVGKSVHELEKSKRALEQQVEEMKTQLEELEDELQATEDAKLRLEVNLQAMKAQFERDLQGRDEQSEEKKKQLVRQVREMEAELEDERKQRSMAVAARKKLEMDLKDLEAHIDSANKNRDEAIKQLRKLQAQMKDCMRELDDTRASREEILAQAKENEKKLKSMEAEMIQLQEELAAAERAKRQAQQERDELADEIANSSGKGALALEEKRRLEARIAQLEEELEEEQGNTELINDRLKKANLQIDQINTDLNLERSHAQKNENARQQLERQNKELKVKLQEMEGTVKSKYKASITALEAKIAQLEEQLDNETKERQAACKQVRRTEKKLKDVLLQVDDERRNAEQYKDQADKASTRLKQLKRQLEEAEEEAQRANASRRKLQRELEDATETADAMNREVSSLKNKLRRGDLPFVVPRRMARKGAGDGSDEEVDGKADGAEAKPAE

SEQ ID NO: 825697 - protein, 1659 aa, Homo sapiens
PDIRSVGDSKTYGYAKTVKNENSSRFGKFIRINFDVNGYIVGANIETYLLEKSRAIRQAKEERTFHIFYYLLSGAGEHLKTDLLLEPYNKYRFLSNGHVTIPGQQDKDMFQETMEAMRIMGIPEEEQMGLLRVISGVLQLGNIVFKKERNTDQASMPDNTAAQKVSHLLGINVTDFTRGILTPRIKVGRDYVQKAQTKEQADFAIEALAKATYERMFRWLVLRINKALDKTKRQGASFIGILDIAGFEIFDLNSFEQLCINYTNEKLQQLFNHTMFILEQEEYQREGIEWNFIDFGLDLQPCIDLIEKPAGPPGILALLDEECWFPKATDKSFVEKVMQEQGTHPKFQKPKQLKDKADFCIIHYAGKVDYKADEWLMKNMDPLNDNIATLLHQSSDKFVSELWKDVDRIIGLDQVAGMSETALPGAFKTRKGMFRTVGQLYKEQLAKLMATLRNTNPNFVRCIIPNHEKKAGKLDPHLVLDQLRCNGVLEGIRICRQGFPNRVVFQEFRQRYEILTPNSIPKGFMDGKQACVLMIKALELDSNLYRIGQSKVFFRAGVLAHLEEERDLKITDVIIGFQACCRGYLARKAFAKRQQQLTAMKVLQRNCAAYLKLRNWQWWRLFTKVKPLLQVSRQEEEMMAKEEELVKVREKQLAAENRLTEMETLQSQLMAEKLQLQEQLQAETELCAEAEELRARLTAKKQELEEICHDLEARVEEEEERCQHLQAEKKKMQQNIQELEEQLEEEESARQKLQLEKVTTEAKLKKLEEEQIILEDQNCKLAKEKKLLEDRIAEFTTNLTEEEEKSKSLAKLKNKHEAMITDLEERLRREEKQRQELEKTRRKLEGDSTDLSDQIAELQAQIAELKMQLAKKEEELQAALARVEEEAAQKNMALKKIRELESQISELQEDLESERASRNKAEKQKRDLGEELEALKTELEDTLDSTAAQQELRSKREQEVNILKKTLEEEAKTHEAQIQEMRQKHSQAVEELAEQLEQTKRVKANLEKAKQTLELLQEENRQKLSLSTKLKQVEDEKNSFREQLEEEEEAKHNLEKQIATLHAQVADMKKKMEDSVGCLETAEEVKRKLQKDLEGLSQRHEEKVAAYDKLEKTKTRLQQELDDLLVDLDHQRQSACNLEKKQKKFDQLLAEEKTISAKYAEERDRAEAEAREKETKALSLARALEEAMEQKAELERLNKQFRTEMEDLMSSKDDVGKSVHELEKSKRALEQQVEEMKTQLEELEDELQATEDAKLRLEVNLQAMKAQFERDLQGRDEQSEEKKKQLVRQVREMEAELEDERKQRSMAVAARKKLEMDLKDLEAHIDSANKNRDEAIKQLRKLQAQMKDCMRELDDTRASREEILAQAKENEKKLKSMEAEMIQLQEELAAAERAKRQAQQERDELADEIANSSGKGALALEEKRRLEARIAQLEEELEEEQGNTELINDRLKKANLQIDQINTDLNLERSHAQKNENARQQLERQNKELKVKLQEMEGTVKSKYKASITALEAKIAQLEEQLDNETKERQAACKQVRRTEKKLKDVLLQVDDERRNAEQYKDQADKASTRLKQLKRQLEEAEEEAQRANASRRKLQRELEDATETADAMNREVSSLKNKLRRGDLPFVVPRRMARKGAGDGSDEEVDGKADGAEAKPAE

SEQ ID NO: 825698 - protein, 1726 aa, Homo sapiens
PDIRSVGDSKTYGYAKTVKNENSSRFGKFIRINFDVNGYIVGANIETYLLEKSRAIRQAKEERTFHIFYYLLSGAGEHLKTDLLLEPYNKYRFLSNGHVTIPGQQDKDMFQETMEAMRIMGIPEEEQMGLLRVISGVLQLGNIVFKKERNTDQASMPDNTAAQKVSHLLGINVTDFTRGILTPRIKVGRDYVQKAQTKEQADFAIEALAKATYERMFRWLVLRINKALDKTKRQGASFIGILDIAGFEIFDLNSFEQLCINYTNEKLQQLFNHTMFILEQEEYQREGIEWNFIDFGLDLQPCIDLIEKPAGPPGILALLDEECWFPKATDKSFVEKVMQEQGTHPKFQKPKQLKDKADFCIIHYAGKVDYKADEWLMKNMDPLNDNIATLLHQSSDKFVSELWKDVDRIIGLDQVAGMSETALPGAFKTRKGMFRTVGQLYKEQLAKLMATLRNTNPNFVRCIIPNHEKKAGKLDPHLVLDQLRCNGVLEGIRICRQGFPNRVVFQEFRQRYEILTPNSIPKGFMDGKQACVLMIKALELDSNLYRIGQSKVFFRAGVLAHLEEERDLKITDVIIGFQACCRGYLARKAFAKRQQQLTAMKVLQRNCAAYLKLRNWQWWRLFTKVKPLLQVSRQEEEMMAKEEELVKVREKQLAAENRLTEMETLQSQLMAEKLQLQEQLQAETELCAEAEELRARLTAKKQELEEICHDLEARVEEEEERCQHLQAEKKKMQQNIQELEEQLEEEESARQKLQLEKVTTEAKLKKLEEEQIILEDQNCKLAKEKKLLEDRIAEFTTNLTEEEEKSKSLAKLKNKHEAMITDLEERLRREEKQRQELEKTRRKLEGDSTDLSDQIAELQAQIAELKMQLAKKEEELQAALARVEEEAAQKNMALKKIRELESQISELQEDLESERASRNKAEKQKRDLGEELEALKTELEDTLDSTAAQQELRSKREQEVNILKKTLEEEAKTHEAQIQEMRQKHSQAVEELAEQLEQTKRVKANLEKAKQTLENERGELANEVKVLLQGKGDSEHKRKKVEAQLQELQVKFNEGERVRTELADKVTKLQVELDNVTGLLSQSDSKSSKLTKDFSALESQLQDTQELLQEENRQKLSLSTKLKQVEDEKNSFREQLEEEEEAKHNLEKQIATLHAQVADMKKKMEDSVGCLETAEEVKRKLQKDLEGLSQRHEEKVAAYDKLEKTKTRLQQELDDLLVDLDHQRQSACNLEKKQKKFDQLLAEEKTISAKYAEERDRAEAEAREKETKALSLARALEEAMEQKAELERLNKQFRTEMEDLMSSKDDVGKSVHELEKSKRALEQQVEEMKTQLEELEDELQATEDAKLRLEVNLQAMKAQFERDLQGREKQRSMAVAARKKLEMDLKDLEAHIDSANKNRDEAIKQLRKLQAQMKDCMRELDDTRASREEILAQAKENEKKLKSMEAEMIQLQEELAAAERAKRQAQQERDELADEIANSSGKGALALEEKRRLEARIAQLEEELEEEQGNTELINDRLKKANLQIDQINTDLNLERSHAQKNENARQQLERQNKELKVKLQEMEGTVKSKYKASITALEAKIAQLEEQLDNETKERQAACKQVRRTEKKLKDVLLQVDDERRNAEQYKDQADKASTRLKQLKRQLEEAEEEAQRANASRRKLQRELEDATETADAMNREVSSLKNKLRRGDLPFVVPRRMARKGAGDGSDEEVDGKADGAEAKPAE

SEQ ID NO: 825699 - protein, 986 aa, Homo sapiens
TAAMDAIKMKMQMLKLDKEKKLLEDRIAEFTTNLTEEEEKSKSLAKLKNKHEAMITDLEERLRREEKQRQELEKTRRKLEGDSTDLSDQIAELQAQIAELKMQLAKKEEELQAALARVEEEAAQKNMALKKIRELESQISELQEDLESERASRNKAEKQKRDLGEELEALKTELEDTLDSTAAQQELRSKREQEVNILKKTLEEEAKTHEAQIQEMRQKHSQAVEELAEQLEQTKRVKANLEKAKQTLENERGELANEVKVLLQGKGDSEHKRKKVEAQLQELQVKFNEGERVRTELADKVTKLQVELDNVTGLLSQSDSKSSKLTKDFSALESQLQDTQELLQEENRQKLSLSTKLKQVEDEKNSFREQLEEEEEAKHNLEKQIATLHAQVADMKKKMEDSVGCLETAEEVKRKLQKDLEGLSQRHEEKVAAYDKLEKTKTRLQQELDDLLVDLDHQRQSACNLEKKQKKFDQLLAEEKTISAKYAEERDRAEAEAREKETKALSLARALEEAMEQKAELERLNKQFRTEMEDLMSSKDDVGKSVHELEKSKRALEQQVEEMKTQLEELEDELQATEDAKLRLEVNLQAMKAQFERDLQGRDEQSEEKKKQLVRQVREMEAELEDERKQRSMAVAARKKLEMDLKDLEAHIDSANKNRDEAIKQLRKLQAQMKDCMRELDDTRASREEILAQAKENEKKLKSMEAEMIQLQEELAAAERAKRQAQQERDELADEIANSSGKGALALEEKRRLEARIAQLEEELEEEQGNTELINDRLKKANLQIDQINTDLNLERSHAQKNENARQQLERQNKELKVKLQEMEGTVKSKYKASITALEAKIAQLEEQLDNETKERQAACKQVRRTEKKLKDVLLQVDDERRNAEQYKDQADKASTRLKQLKRQLEEAEEEAQRANASRRKLQRELEDATETADAMNREVSSLKNKLRRGDLPFVVPRRMARKGAGDGSDEEVDGKADGAEAKPAE

SEQ ID NO: 825700 - protein, 1548 aa, Homo sapiens
PDIRSVGDSKTYGYAKTVKNENSSRFGKFIRINFDVNGYIVGANIETYLLEKSRAIRQAKEERTFHIFYYLLSGAGEHLKTDLLLEPYNKYRFLSNGHVTIPGQQDKDMFQETMEAMRIMGIPEEEQMGLLRVISGVLQLGNIVFKKERNTDQASMPDNTAAQKVSHLLGINVTDFTRGILTPRIKVGRDYVQKAQTKEQADFAIEALAKATYERMFRWLVLRINKALDKTKRQGASFIGILDIAGFEIFDLNSFEQLCINYTNEKLQQLFNHTMFILEQEEYQREGIEWNFIDFGLDLQPCIDLIEKPAGPPGILALLDEECWFPKATDKSFVEKVMQEQGTHPKFQKPKQLKDKADFCIIHYAGKVDYKADEWLMKNMDPLNDNIATLLHQSSDKFVSELWKDVDRIIGLDQVAGMSETALPGAFKTRKGMFRTVGQLYKEQLAKLMATLRNTNPNFVRCIIPNHEKKAGKLDPHLVLDQLRCNGVLEGIRICRQGFPNRVVFQEFRQRYEILTPNSIPKGFMDGKQACVLMIKALELDSNLYRIGQSKVFFRAGVLAHLEEERDLKITDVIIGFQACCRGYLARKAFAKRQQQLTAMKVLQRNCAAYLKLRNWQWWRLFTKVKPLLQVSRQEEEMMAKEEELVKVREKQLAAENRLTEMETLQSQLMAEKLQLQEQLQAETELCAEAEELRARLTAKKQELEEICHDLEARVEEEEERCQHLQAEKKKMQQNIQELEEQLEEEESARQKLQLEKVTTEAKLKKLEEEQIILEDQNCKLAKEKKLLEDRIAEFTTNLTEEEEKSKSLAKLKNKHEAMITDLEERLRREEKQRQELEKTRRKLEGDSTDLSDQIAELQAQIAELKMQLAKKEEELQAALARVEEEAAQKNMALKKIRELESQISELQEDLESERASRNKAEKQKRDLGEELEALKTELEDTLDSTAAQQELRSKREQEVNILKKTLEEEAKTHEAQIQEMRQKHSQAVEELAEQLEQTKRVKANLEKAKQTLENERGELANEVKVLLQGKGDSEHKRKKVEAQLQELQVKFNEGERVRTELADKVTKLQVELDNVTGLLSQSDSKSSKLTKDFSALESQLQDTQELLQEENRQKLSLSTKLKQVEDEKNSFREQLEEEEEAKHNLEVNLQAMKAQFERDLQGRDEQSEEKKKQLVRQVREMEAELEDERKQRSMAVAARKKLEMDLKDLEAHIDSANKNRDEAIKQLRKLQAQMKDCMRELDDTRASREEILAQAKENEKKLKSMEAEMIQLQEELAAAERAKRQAQQERDELADEIANSSGKGALALEEKRRLEARIAQLEEELEEEQGNTELINDRLKKANLQIDQINTDLNLERSHAQKNENARQQLERQNKELKVKLQEMEGTVKSKYKASITALEAKIAQLEEQLDNETKERQAACKQVRRTEKKLKDVLLQVDDERRNAEQYKDQADKASTRLKQLKRQLEEAEEEAQRANASRRKLQRELEDATETADAMNREVSSLKNKLRRGDLPFVVPRRMARKGAGDGSDEEVDGKADGAEAKPAE

SEQ ID NO: 825701 - protein, 1751 aa, Homo sapiens; identical to SEQ ID NO: 825695

SEQ ID NO: 825702 - protein, 1751 aa, Homo sapiens; identical to SEQ ID NO: 825695

SEQ ID NO: 825703 - protein, 1751 aa, Homo sapiens; identical to SEQ ID NO: 825695

SEQ ID NO: 825704 - protein, 817 aa, Homo sapiens
LQCDLEDPQRWSQLQQELRSKREQEVNILKKTLEEEAKTHEAQIQEMRQKHSQAVEELAEQLEQTKRVKANLEKAKQTLENERGELANEVKVLLQGKGDSEHKRKKVEAQLQELQVKFNEGERVRTELADKVTKLQVELDNVTGLLSQSDSKSSKLTKDFSALESQLQDTQELLQEENRQKLSLSTKLKQVEDEKNSFREQLEEEEEAKHNLEKQIATLHAQVADMKKKMEDSVGCLETAEEVKRKLQKDLEGLSQRHEEKVAAYDKLEKTKTRLQQELDDLLVDLDHQRQSACNLEKKQKKFDQLLAEEKTISAKYAEERDRAEAEAREKETKALSLARALEEAMEQKAELERLNKQFRTEMEDLMSSKDDVGKSVHELEKSKRALEQQVEEMKTQLEELEDELQATEDAKLRLEVNLQAMKAQFERDLQGRDEQSEEKKKQLVRQVREMEAELEDERKQRSMAVAARKKLEMDLKDLEAHIDSANKNRDEAIKQLRKLQAQMKDCMRELDDTRASREEILAQAKENEKKLKSMEAEMIQLQEELAAAERAKRQAQQERDELADEIANSSGKGALALEEKRRLEARIAQLEEELEEEQGNTELINDRLKKANLQIDQINTDLNLERSHAQKNENARQQLERQNKELKVKLQEMEGTVKSKYKASITALEAKIAQLEEQLDNETKERQAACKQVRRTEKKLKDVLLQVDDERRNAEQYKDQADKASTRLKQLKRQLEEAEEEAQRANASRRKLQRELEDATETADAMNREVSSLKNKLRRGDLPFVVPRRMARKGAGDGSDEEVDGKADGAEAKPAE

SEQ ID NO: 825705 - protein, 963 aa, Homo sapiens
LLLLQCTRKRRSSRPPGRVEEEAAQKNMALKKIRELESQISELQEDLESERASRNKAEKQKRDLGEELEALKTELEDTLDSTAAQQELRSKREQEVNILKKTLEEEAKTHEAQIQEMRQKHSQAVEELAEQLEQTKRVKANLEKAKQTLENERGELANEVKVLLQGKGDSEHKRKKVEAQLQELQVKFNEGERVRTELADKVTKLQVRPPPGPWCGQWALAAVVAQVPRCMCALCLSLFSNWLSDPHGSACDSGPALPKGDEVGQEQWGWVHGPSVSPRPVQVELDNVTGLLSQSDSKSSKLTKDFSALESQLQDTQELLQEENRQKLSLSTKLKQVEDEKNSFREQLEEEEEAKHNLEKQIATLHAQVADMKKKMEDSVGCLETAEEVKRKLQKDLEGLSQRHEEKVAAYDKLEKTKTRLQQELDDLLVDLDHQRQSACNLEKKQKKFDQLLAEEKTISAKYAEERDRAEAEAREKETKALSLARALEEAMEQKAELERLNKQFRTEMEDLMSSKDDVGKSVHELEKSKRALEQQVEEMKTQLEELEDELQATEDAKLRLEVNLQAMKAQFERDLQGRDEQSEEKKKQLVRQVREMEAELEDERKQRSMAVAARKKLEMDLKDLEAHIDSANKNRDEAIKQLRKLQAQMKDCMRELDDTRASREEILAQAKENEKKLKSMEAEMIQLQEELAAAERAKRQAQQERDELADEIANSSGKGALALEEKRRLEARIAQLEEELEEEQGNTELINDRLKKANLQIDQINTDLNLERSHAQKNENARQQLERQNKELKVKLQEMEGTVKSKYKASITALEAKIAQLEEQLDNETKERQAACKQVRRTEKKLKDVLLQVDDERRNAEQYKDQADKASTRLKQLKRQLEEAEEEAQRANASRRKLQRELEDATETADAMNREVSSLKNKLRRGDLPFVVPRRMARKGAGDGSDEEVDGKADGAEAKPAE

SEQ ID NO: 825706 - protein, 515 aa, Homo sapiens
ACRLTSNRSLASSVACSSSSSSSSCVFISSTKALSLARALEEAMEQKAELERLNKQFRTEMEDLMSSKDDVGKSVHELEKSKRALEQQVEEMKTQLEELEDELQATEDAKLRLEVNLQAMKAQFERDLQGRDEQSEEKKKQLVRQVREMEAELEDERKQRSMAVAARKKLEMDLKDLEAHIDSANKNRDEAIKQLRKLQAQMKDCMRELDDTRASREEILAQAKENEKKLKSMEAEMIQLQEELAAAERAKRQAQQERDELADEIANSSGKGALALEEKRRLEARIAQLEEELEEEQGNTELINDRLKKANLQIDQINTDLNLERSHAQKNENARQQLERQNKELKVKLQEMEGTVKSKYKASITALEAKIAQLEEQLDNETKERQAACKQVRRTEKKLKDVLLQVDDERRNAEQYKDQADKASTRLKQLKRQLEEAEEEAQRANASRRKLQRELEDATETADAMNREVSSLKNKLRRGDLPFVVPRRMARKGAGDGSDEEVDGKADGAEAKPAE

SEQ ID NO: 825707 - protein, 1751 aa, Homo sapiens; identical to SEQ ID NO: 825695

SEQ ID NO: 825708 - protein, 1582 aa, Homo sapiens
PDIRSVGDSKTYGYAKTVKNENSSRFGKFIRINFDVNGYIVGANIETYLLEKSRAIRQAKEERTFHIFYYLLSGAGEHLKTDLLLEPYNKYRFLSNGHVTIPGQQDKDMFQETMEAMRIMGIPEEEQMGLLRVISGVLQLGNIVFKKERNTDQASMPDNTAAQKVSHLLGINVTDFTRGILTPRIKVGRDYVQKAQTKEQADFAIEALAKATYERMFRWLVLRINKALDKTKRQGASFIGILDIAGFEIFDLNSFEQLCINYTNEKLQQLFNHTMFILEQEEYQREGIEWNFIDFGLDLQPCIDLIEKPAGPPGILALLDEECWFPKATDKSFVEKVMQEQGTHPKFQKPKQLKDKADFCIIHYAGKVDYKADEWLMKNMDPLNDNIATLLHQSSDKFVSELWKDVDRIIGLDQVAGMSETALPGAFKTRKGMFRTVGQLYKEQLAKLMATLRNTNPNFVRCIIPNHEKKAGKLDPHLVLDQLRCNGVLEGIRICRQGFPNRVVFQEFRQRYEILTPNSIPKGFMDGKQACVLMIKALELDSNLYRIGQSKVFFRAGVLAHLEEERDLKITDVIIGFQACCRGYLARKAFAKRQQQLTAMKVLQRNCAAYLKLRNWQWWRLFTKVKPLLQVSRQEEEMMAKEEELVKVREKQLAAENRLTEMETLQSQLMAEKLQLQEQLQAETELCAEAEELRARLTAKKQELEEICHDLEARVEEEEERCQHLQAEKKKMQQNIQELEEQLEEEESARQKLQLEKVTTEAKLKKLEEEQIILEDQNCKLAKEKKLLEDRIAEFTTNLTEEEEKSKSLAKLKNKHEAMITDLEERLRREEKQRQELEKTRRKLEGDSTDLSDQIAELQAQIAELKMQLAKKEEELQAALARVEEEAAQKNMALKKIRELESQISELQEDLESERASRNKAEKQKRDLGEELEALKTELEDTLDSTAAQQELRSKREQEVNILKKTLEEEAKTHEAQIQEMRQKHSQAVEELAEQLEQTKRVKANLEKAKQTLENERGELANEVKVLLQGKGDSEHKRKKVEAQLQELQVKFNEGERVRTELADKVTKLQVELDNVTGLLSQSDSKSSKLTKDFSALESQLQDTQELLQEENRQKLSLSTKLKQVEDEKNSFREQLEEEEEAKHNLEKQIATLHAQVADMKKKMEDSVGCLETAEEVKRKLQKDLEGLSQRHEEKVAAYDKLEKTKTRLQQELDDLLVDLDHQRQSACNLEKKQKKFDQLLAEEKTISAKYAEERDRAEAEAREKETKALSLARALEEAMEQKAELERLNKQFRTEMEDLMSSKDDVGKSVHELEKSKRALEQQVEEMKTQLEELEDELQATEDAKLRLEVNLQAMKAQFERDLQGRDEQSEEKKKQLVRQVREMEAELEDERKQRSMAVAARKKLEMDLKDLEAHIDSANKNRDEAIKQLRKLQAQMKDCMRELDDTRASREEILAQAKENEKKLKSMEAEMIQLQEELAAAERAKRQAQQERDELADEIANSSGKGALALEEKRRLEARIAPAQNLIPKRQGPGPGRERPAGSSALSCQKAQDVEASRAGPRGGARVFYESIFLQTEAFW

SEQ ID NO: 825709 - protein, 1751 aa, Homo sapiens; identical to SEQ ID NO: 825695

SEQ ID NO: 825710 - protein, 1751 aa, Homo sapiens; identical to SEQ ID NO: 825695

SEQ ID NO: 825711 - protein, 1631 aa, Homo sapiens
PDIRSVGDSKTYGYAKTVKNENSSRFGKFIRINFDVNGYIVGANIETYLLEKSRAIRQAKEERTFHIFYYLLSGAGEHLKTDLLLEPYNKYRFLSNGHVTIPGQQDKDMFQETMEAMRIMGIPEEEQMGLLRVISGVLQLGNIVFKKERNTDQASMPDNTAAQKVSHLLGINVTDFTRGILTPRIKVGRDYVQKAQTKEQADFAIEALAKATYERMFRWLVLRINKALDKTKRQGASFIGILDIAGFEIFDLNSFEQLCINYTNEKLQQLFNHTMFILEQEEYQREGIEWNFIDFGLDLQPCIDLIEKPAGPPGILALLDEECWFPKATDKSFVEKVMQEQGTHPKFQKPKQLKDKADFCIIHYAGKVDYKADEWLMKNMDPLNDNIATLLHQSSDKFVSELWKDVDRIIGLDQVAGMSETALPGAFKTRKGMFRTVGQLYKEQLAKLMATLRNTNPNFVRCIIPNHEKKAGKLDPHLVLDQLRCNGVLEGIRICRQGFPNRVVFQEFRQRYEILTPNSIPKGFMDGKQACVLMIKALELDSNLYRIGQSKVFFRAGVLAHLEEERDLKITDVIIGFQACCRGYLARKAFAKRQQQLTAMKVLQRNCAAYLKLRNWQWWRLFTKVKPLLQVSRQEEEMMAKEEELVKVREKQLAAENRLTEMETLQSQLMAEKLQLQEQLQAETELCAEAEELRARLTAKKQELEEICHDLEARVEEEEERCQHLQAEKKKMQQNIQELEEQLEEEESARQKLQLEKVTTEAKLKKLEEEQIILEDQNCKLAKEKKLLEDRIAEFTTNLTEEEEKSKSLAKLKNKHEAMITDLEERLRREEKQRQELEKTRRKLEGDSTDLSDQIAELQAQIAELKMQLAKKEEELQAALARVEEEAAQKNMALKKIRELESQISELQEDLESERASRNKAEKQKRDLGEELEALKTELEDTLDSTAAQQELRSKREQEVNILKKTLEEEAKTHEAQIQEMRQKHSQAVEELAEQLEQTKRVKANLEKAKQTLENERGELANEVKVLLQGKGDSEHKRKKVEAQLQELQVKFNEGERVRTELADKVTKLQVELDNVTGLLSQSDSKSSKLTKDFSALESQLQDTQELLQEENRQKLSLSTKLKQVEDEKNSFREQLEEEEEAKHNLEKQIATLHAQVADMKKKMEDSVGCLETAEEVKRKLQKDLEGLSQRHEEKVAAYDKLEKTKTRLQQELDDLLVDLDHQRQSACNLEKKQKKFDQLLAEEKTISAKYAEERDRAEAEAREKETKALSLARALEEAMEQKAELERLNKQFRTEMEDLMSSKDDVGKSVHELEKSKRALEQQVEEMKTQLEELEDELQATEDAKLRLEVNLQAMKAQFERDLQGRDEQSEEKKKQLVRQVREMEAELEDERKQRSMAVAARKKLEMDLKDLEAHIDSANKNRDEAIKQLRKLQAQMKDCMRELDDTRASREEILAQAKENEKKLKSMEAEMIQLQEELAAAERAKRQAQQERDELADEIANSSGKGALALEEKRRLEARIAQLEEELEEEQGNTELINDRLKKANLQIDQINTDLNLERSHAQKNENARQQLERQNKELKVKLQEMEGTVKSKYKASITALEAKIAQLEEQLDNETKGQRPSQAILCLL

SEQ ID NO: 825712 - protein, 1402 aa, Homo sapiens
PDIRSVGDSKTYGYAKTVKNENSSRFGKFIRINFDVNGYIVGANIETYLLEKSRAIRQAKEERTFHIFYYLLSGAGEHLKTDLLLEPYNKYRFLSNGHVTIPGQQDKDMFQETMEAMRIMGIPEEEQMGLLRVISGVLQLGNIVFKKERNTDQASMPDNTAAQKVSHLLGINVTDFTRGILTPRIKVGRDYVQKAQTKEQADFAIEALAKATYERMFRWLVLRINKALDKTKRQGASFIGILDIAGFEIFDLNSFEQLCINYTNEKLQQLFNHTMFILEQEEYQREGIEWNFIDFGLDLQPCIDLIEKPAGPPGILALLDEECWFPKATDKSFVEKVMQEQGTHPKFQKPKQLKDKADFCIIHYAGKVDYKADEWLMKNMDPLNDNIATLLHQSSDKFVSELWKDVDRIIGLDQVAGMSETALPGAFKTRKGMFRTVGQLYKEQLAKLMATLRNTNPNFVRCIIPNHEKKAGKLDPHLVLDQLRCNGVLEGIRICRQGFPNRVVFQEFRQRYEILTPNSIPKGFMDGKQACVLMIKALELDSNLYRIGQSKVFFRAGVLAHLEEERDLKITDVIIGFQACCRGYLARKAFAKRQQQLTAMKVLQRNCAAYLKLRNWQWWRLFTKVKPLLQVSRQEEEMMAKEEELVKVREKQLAAENRLTEMETLQSQLMAEKLQLQEQLQAETELCAEAEELRARLTAKKQELEEICHDLEARVEEEEERCQHLQAEKKKMQQNIQELEEQLEEEESARQKLQLEKVTTEAKLKKLEEEQIILEDQNCKLAKEKKLLEDRIAEFTTNLTEEEEKSKSLAKLKNKHEAMITDLEERLRREEKQRQELEKTRRKLEGDSTDLSDQIAELQAQIAELKMQLAKKEEELQAALARVEEEAAQKNMALKKIRELESQISELQEDLESERASRNKAEKQKRDLGEELEALKTELEDTLDSTAAQQELRSKREQEVNILKKTLEEEAKTHEAQIQEMRQKHSQAVEELAEQLEQTKRVKANLEKAKQTLENERGELANEVKVLLQGKGDSEHKRKKVEAQLQELQVKFNEGERVRTELADKVTKLQVELDNVTGLLSQSDSKSSKLTKDFSALESQLQDTQELLQEENRQKLSLSTKLKQVEDEKNSFREQLEEEEEAKHNLEKQIATLHAQVADMKKKMEDSVGCLETAEEVKRKLQKDLEGLSQRHEEKVAAYDKLEKTKTRLQQELDDLLVDLDHQRQSACNLEKKQKKFDQLLAEEKTISAKYAEERDRAEAEAREKETKALSLARALEEAMEQKAELERLNKQFRTEMEDLMSSKDDVGKSVHELEKSKRALEQQVEEMKTQLEELEDELQATEDAKLRLEVNLQAMKAQFERDLQGRDEQSEEKKKQLVRQVREMEAELEDERQRHCPLSPS

SEQ ID NO: 825713 - protein, 118 aa, Homo sapiens
LVLGLVLDRELRTSNAEQYKDQADKASTRLKQLKRQLEEAEEEAQRANASRRKLQRELEDATETADAMNREVSSLKNKLRRGDLPFVVPRRMARKGAGDGSDEEVDGKADGAEAKPAE

SEQ ID NO: 825714 - protein, 1738 aa, Homo sapiens
PDIRSVGDSKTYGYAKTVKNENSSRFGKFIRINFDVNGYIVGANIETYLLEKSRAIRQAKEERTFHIFYYLLSGAGEHLKTDLLLEPYNKYRFLSNGHVTIPGQQDKDMFQETMEAMRIMGIPEEEQMGLLRVISGVLQLGNIVFKKERNTDQASMPDNTAAQKVSHLLGINVTDFTRGILTPRIKVGRDYVQKAQTKEQADFAIEALAKATYERMFRWLVLRINKALDKTKRQGASFIGILDIAGFEIFDLNSFEQLCINYTNEKLQQLFNHTMFILEQEEYQREGIEWNFIDFGLDLQPCIDLIEKPAGPPGILALLDEECWFPKATDKSFVEKVMQEQGTHPKFQKPKQLKDKADFCIIHYAGKVDYKADEWLMKNMDPLNDNIATLLHQSSDKFVSELWKDVDRIIGLDQVAGMSETALPGAFKTRKGMFRTVGQLYKEQLAKLMATLRNTNPNFVRCIIPNHEKKAGKLDPHLVLDQLRCNGVLEGIRICRQGFPNRVVFQEFRQRYEILTPNSIPKGFMDGKQACVLMIKALELDSNLYRIGQSKVFFRAGVLAHLEEERDLKITDVIIGFQACCRGYLARKAFAKRQQQLTAMKVLQRNCAAYLKLRNWQWWRLFTKVKPLLQVSRQEEEMMAKEEELVKVREKQLAAENRLTEMETLQSQLMAEKLQLQEQLQAETELCAEAEELRARLTAKKQELEEICHDLEARVEEEEERCQHLQAEKKKMQQNIQELEEQLEEEESARQKLQLEKVTTEAKLKKLEEEQIILEDQNCKLAKEKKLLEDRIAEFTTNLTEEEEKSKSLAKLKNKHEAMITDLEERLRREEKQRQELEKTRRKLEGDSTDLSDQIAELQAQIAELKMQLAKKEEELQAALARVEEEAAQKNMALKKIRELESQISELQEDLESERASRNKAEKQKRDLGEELEALKTELEDTLDSTAAQQELRSKREQEVNILKKTLEEEAKTHEAQIQEMRQKHSQAVEELAEQLEQTKRVKANLEKAKQTLENERGELANEVKVLLQGKGDSEHKRKKVEAQLQELQVKFNEGERVRTELADKVTKLQVELDNVTGLLSQSDSKSSKLTKDFSALESQLQDTQELLQEENRQKLSLSTKLKQVEDEKNSFREQLEEEEEAKHNLEKQIATLHAQVADMKKKMEDSVGCLETAEEVKRKLQKDLEGLSQRHEEKVAAYDKLEKTKTRLQQELDDLLVDLDHQRQSACNLEKKQKKFDQLLAEEKTISAKYAEERDRAEAEAREKETKALSLARALEEAMEQKAELERLNKQFRTEMEDLMSSKDDVGKSVHELEKSKRALEQQVEEMKTQLEELEDELQATEDAKLRLEVNLQAMKAQFERDLQGRDEQSEEKKKQLVRQVREMEAELEDERKQRSMAVAARKKLEMDLKDLEAHIDSANKNRDEAIKQLRKLQAQMKDCMRELDDTRASREEILAQAKENEKKLKSMEAEMIQLQEELAAAERAKRQAQQERDELADEIANSSGKGALALEEKRRLEARIAQLEEELEEEQGNTELINDRLKKANLQIDQINTDLNLERSHAQKNENARQQLERQNKELKVKLQEMEGTVKSKYKASITALEAKIAQLEEQLDNETKERQAACKQVRRTEKKLKDVLLQVDDERRNAEQYKDQADKASTRLKQLKRQLEEAEEEAQRANASRRKLQRELEDATETADAMNREVSSLKNKLSPQKLGLSQPHAQQCQPCPEPKGSPR

SEQ ID NO: 825715 - protein, 1591 aa, Homo sapiens
PDIRSVGDSKTYGYAKTVKNENSSRFGKFIRINFDVNGYIVGANIETYLLEKSRAIRQAKEERTFHIFYYLLSGAGEHLKTDLLLEPYNKYRFLSNGHVTIPGQQDKDMFQETMEAMRIMGIPEEEQMGLLRVISGVLQLGNIVFKKERNTDQASMPDNTAAQKVSHLLGINVTDFTRGILTPRIKVGRDYVQKAQTKEQADFAIEALAKATYERMFRWLVLRINKALDKTKRQGASFIGILDIAGFEIFDLNSFEQLCINYTNEKLQQLFNHTMFILEQEEYQREGIEWNFIDFGLDLQPCIDLIEKPAGPPGILALLDEECWFPKATDKSFVEKVMQEQGTHPKFQKPKQLKDKADFCIIHYAGKVDYKADEWLMKNMDPLNDNIATLLHQSSDKFVSELWKDVDRIIGLDQVAGMSETALPGAFKTRKGMFRTVGQLYKEQLAKLMATLRNTNPNFVRCIIPNHEKKAGKLDPHLVLDQLRCNGVLEGIRICRQGFPNRVVFQEFRQRYEILTPNSIPKGFMDGKQACVLMIKALELDSNLYRIGQSKVFFRAGVLAHLEEERDLKITDVIIGFQACCRGYLARKAFAKRQQQLTAMKVLQRNCAAYLKLRNWQWWRLFTKVKPLLQVSRQEEEMMAKEEELVKVREKQLAAENRLTEMETLQSQLMAEKLQLQEQLQAETELCAEAEELRARLTAKKQELEEICHDLEARVEEEEERCQHLQAEKKKMQQNIQELEEQLEEEESARQKLQLEKVTTEAKLKKLEEEQIILEDQNCKLAKEKKLLEDRIAEFTTNLTEEEEKSKSLAKLKNKHEAMITDLEERLRREEKQRQELEKTRRKLEGDSTDLSDQIAELQAQIAELKMQLAKKEEELQAALARVEEEAAQKNMALKKIRELESQISELQEDLESERASRNKAEKQKRDLGEELEALKTELEDTLDSTAAQQELRSKREQEVNILKKTLEEEAKTHEAQIQEMRQKHSQAVEELAEQLEQTKRVKANLEKAKQTLENERGELANEVKVLLQGKGDSEHKRKKVEAQLQELQVKFNEGERVRTELADKVTKLQVELDNVTGLLSQSDSKSSKLTKDFSALESQLQDTQELLQEENRQKLSLSTKLKQVEDEKNSFREQLEEEEEAKHNLEKQIATLHAQVADMKKKMEDSVGCLETAEEVKRKLQKDLEGLSQRHEEKVAAYDKLEKTKTRLQQELDDLLVDLDHQRQSACNLEKKQKKFDQLLAEEKTISAKYAEERDRAEAEAREKETKALSLARALEEAMEQKAELERLNKQFRTEMEDLMSSKDDVGKSVHELEKSKRALEQQVEEMKTQLEELEDELQATEDAKLRLEVNLQAMKAQFERDLQGRDEQSEEKKKQLVRQVREMEAELEDERKQRSMAVAARKKLEMDLKDLEAHIDSANKNRDEAIKQLRKLQAQMKDCMRELDDTRASREEILAQAKENEKKLKSMEAEMIQLQEELAAAERAKRQAQQERDELADEIANSSGKGALALEEKRRLEARIAQLEEELEEEQGNTELINDRLKKANLQIDQINTDLNLERSHAQKNENARQQLERQGALVAWPFLDRLKS

SEQ ID NO: 825716 - protein, 1448 aa, Homo sapiens
PDIRSVGDSKTYGYAKTVKNENSSRFGKFIRINFDVNGYIVGANIETYLLEKSRAIRQAKEERTFHIFYYLLSGAGEHLKTDLLLEPYNKYRFLSNGHVTIPGQQDKDMFQETMEAMRIMGIPEEEQMGLLRVISGVLQLGNIVFKKERNTDQASMPDNTAAQKVSHLLGINVTDFTRGILTPRIKVGRDYVQKAQTKEQADFAIEALAKATYERMFRWLVLRINKALDKTKRQGASFIGILDIAGFEIFDLNSFEQLCINYTNEKLQQLFNHTMFILEQEEYQREGIEWNFIDFGLDLQPCIDLIEKPAGPPGILALLDEECWFPKATDKSFVEKVMQEQGTHPKFQKPKQLKDKADFCIIHYAGKVDYKADEWLMKNMDPLNDNIATLLHQSSDKFVSELWKDVDRIIGLDQVAGMSETALPGAFKTRKGMFRTVGQLYKEQLAKLMATLRNTNPNFVRCIIPNHEKKAGKLDPHLVLDQLRCNGVLEGIRICRQGFPNRVVFQEFRQRYEILTPNSIPKGFMDGKQACVLMIKALELDSNLYRIGQSKVFFRAGVLAHLEEERDLKITDVIIGFQACCRGYLARKAFAKRQQQLTAMKVLQRNCAAYLKLRNWQWWRLFTKVKPLLQVSRQEEEMMAKEEELVKVREKQLAAENRLTEMETLQSQLMAEKLQLQEQLQAETELCAEAEELRARLTAKKQELEEICHDLEARVEEEEERCQHLQAEKKKMQQNIQELEEQLEEEESARQKLQLEKVTTEAKLKKLEEEQIILEDQNCKLAKEKKLLEDRIAEFTTNLTEEEEKSKSLAKLKNKHEAMITDLEERLRREEKQRQELEKTRRKLEGDSTDLSDQIAELQAQIAELKMQLAKKEEELQAALARVEEEAAQKNMALKKIRELESQISELQEDLESERASRNKAEKQKRDLGEELEALKTELEDTLDSTAAQQELRSKREQEVNILKKTLEEEAKTHEAQIQEMRQKHSQAVEELAEQLEQTKRVKANLEKAKQTLENERGELANEVKVLLQGKGDSEHKRKKVEAQLQELQVKFNEGERVRTELADKVTKLQVELDNVTGLLSQSDSKSSKLTKDFSALESQLQDTQELLQEENRQKLSLSTKLKQVEDEKNSFREQLEEEEEAKHNLEKQIATLHAQVADMKKKMEDSVGCLETAEEVKRKLQKDLEGLSQRHEEKVAAYDKLEKTKTRLQQELDDLLVDLDHQRQSACNLEKKQKKFDQLLAEEKTISAKYAEERDRAEAEAREKETKALSLARALEEAMEQKAELERLNKQFRTEMEDLMSSKDDVGKSVHELEKSKRALEQQVEEMKTQLEELEDELQATEDAKLRLEVNLQAMKAQFERDLQGRDEQSEEKKKQLVRQVREMEAELEDERKQRSMAVAARKKLEMDLKDLEAHIDSANKNRDEAIKQLRKLQAPDDRTCMRESRD

SEQ ID NO: 825717 - protein, 1392 aa, Homo sapiens
PDIRSVGDSKTYGYAKTVKNENSSRFGKFIRINFDVNGYIVGANIETYLLEKSRAIRQAKEERTFHIFYYLLSGAGEHLKTDLLLEPYNKYRFLSNGHVTIPGQQDKDMFQETMEAMRIMGIPEEEQMGLLRVISGVLQLGNIVFKKERNTDQASMPDNTAAQKVSHLLGINVTDFTRGILTPRIKVGRDYVQKAQTKEQADFAIEALAKATYERMFRWLVLRINKALDKTKRQGASFIGILDIAGFEIFDLNSFEQLCINYTNEKLQQLFNHTMFILEQEEYQREGIEWNFIDFGLDLQPCIDLIEKPAGPPGILALLDEECWFPKATDKSFVEKVMQEQGTHPKFQKPKQLKDKADFCIIHYAGKVDYKADEWLMKNMDPLNDNIATLLHQSSDKFVSELWKDVDRIIGLDQVAGMSETALPGAFKTRKGMFRTVGQLYKEQLAKLMATLRNTNPNFVRCIIPNHEKKAGKLDPHLVLDQLRCNGVLEGIRICRQGFPNRVVFQEFRQRYEILTPNSIPKGFMDGKQACVLMIKALELDSNLYRIGQSKVFFRAGVLAHLEEERDLKITDVIIGFQACCRGYLARKAFAKRQQQLTAMKVLQRNCAAYLKLRNWQWWRLFTKVKPLLQVSRQEEEMMAKEEELVKVREKQLAAENRLTEMETLQSQLMAEKLQLQEQLQAETELCAEAEELRARLTAKKQELEEICHDLEARVEEEEERCQHLQAEKKKMQQNIQELEEQLEEEESARQKLQLEKVTTEAKLKKLEEEQIILEDQNCKLAKEKKLLEDRIAEFTTNLTEEEEKSKSLAKLKNKHEAMITDLEERLRREEKQRQELEKTRRKLEGDSTDLSDQIAELQAQIAELKMQLAKKEEELQAALARVEEEAAQKNMALKKIRELESQISELQEDLESERASRNKAEKQKRDLGEELEALKTELEDTLDSTAAQQELRSKREQEVNILKKTLEEEAKTHEAQIQEMRQKHSQAVEELAEQLEQTKRVKANLEKAKQTLENERGELANEVKVLLQGKGDSEHKRKKVEAQLQELQVKFNEGERVRTELADKVTKLQVELDNVTGLLSQSDSKSSKLTKDFSALESQLQDTQELLQEENRQKLSLSTKLKQVEDEKNSFREQLEEEEEAKHNLEKQIATLHAQVADMKKKMEDSVGCLETAEEVKRKLQKDLEGLSQRHEEKVAAYDKLEKTKTRLQQELDDLLVDLDHQRQSACNLEKKQKKFDQLLAEEKTISAKYAEERDRAEAEAREKETKALSLARALEEAMEQKAELERLNKQFRTEMEDLMSSKDDVGKSVHELEKSKRALEQQVEEMKTQLEELEDELQATEDAKLRLEVNLQAMKAQFERDLQGRDAMLTAMGTTKPALRGPTKPTVNYK

SEQ ID NO: 825718 - protein, 118 aa, Homo sapiens; identical to SEQ ID NO: 825713

SEQ ID NO: 825719 - protein, 1196 aa, Homo sapiens
PDIRSVGDSKTYGYAKTVKNENSSRFGKFIRINFDVNGYIVGANIETYLLEKSRAIRQAKEERTFHIFYYLLSGAGEHLKTDLLLEPYNKYRFLSNGHVTIPGQQDKDMFQETMEAMRIMGIPEEEQMGLLRVISGVLQLGNIVFKKERNTDQASMPDNTAAQKVSHLLGINVTDFTRGILTPRIKVGRDYVQKAQTKEQADFAIEALAKATYERMFRWLVLRINKALDKTKRQGASFIGILDIAGFEIFDLNSFEQLCINYTNEKLQQLFNHTMFILEQEEYQREGIEWNFIDFGLDLQPCIDLIEKPAGPPGILALLDEECWFPKATDKSFVEKVMQEQGTHPKFQKPKQLKDKADFCIIHYAGKVDYKADEWLMKNMDPLNDNIATLLHQSSDKFVSELWKDVDRIIGLDQVAGMSETALPGAFKTRKGMFRTVGQLYKEQLAKLMATLRNTNPNFVRCIIPNHEKKAGKLDPHLVLDQLRCNGVLEGIRICRQGFPNRVVFQEFRQRYEILTPNSIPKGFMDGKQACVLMIKALELDSNLYRIGQSKVFFRAGVLAHLEEERDLKITDVIIGFQACCRGYLARKAFAKRQQQLTAMKVLQRNCAAYLKLRNWQWWRLFTKVKPLLQVSRQEEEMMAKEEELVKVREKQLAAENRLTEMETLQSQLMAEKLQLQEQLQAETELCAEAEELRARLTAKKQELEEICHDLEARVEEEEERCQHLQAEKKKMQQNIQELEEQLEEEESARQKLQLEKVTTEAKLKKLEEEQIILEDQNCKLAKEKKLLEDRIAEFTTNLTEEEEKSKSLAKLKNKHEAMITDLEERLRREEKQRQELEKTRRKLEGDSTDLSDQIAELQAQIAELKMQLAKKEEELQAALARVEEEAAQKNMALKKIRELESQISELQEDLESERASRNKAEKQKRDLGEELEALKTELEDTLDSTAAQQELRSKREQEVNILKKTLEEEAKTHEAQIQEMRQKHSQAVEELAEQLEQTKRVKANLEKAKQTLENERGELANEVKVLLQGKGDSEHKRKKVEAQLQELQVKFNEGERVRTELADKVTKLQVELDNVTGLLSQSDSKSSKLTKDFSALESQLQDTQELLQEENRQKLSLSTKLKQVEDEKNSFREQLEEEEEAKHNLEKQIATLHAQVATWTRRWRTCGCRDLLGGKQELPRRGPDRARQGALKGET

SEQ ID NO: 825720 - protein, 995 aa, Homo sapiens
PDIRSVGDSKTYGYAKTVKNENSSRFGKFIRINFDVNGYIVGANIETYLLEKSRAIRQAKEERTFHIFYYLLSGAGEHLKTDLLLEPYNKYRFLSNGHVTIPGQQDKDMFQETMEAMRIMGIPEEEQMGLLRVISGVLQLGNIVFKKERNTDQASMPDNTAAQKVSHLLGINVTDFTRGILTPRIKVGRDYVQKAQTKEQADFAIEALAKATYERMFRWLVLRINKALDKTKRQGASFIGILDIAGFEIFDLNSFEQLCINYTNEKLQQLFNHTMFILEQEEYQREGIEWNFIDFGLDLQPCIDLIEKPAGPPGILALLDEECWFPKATDKSFVEKVMQEQGTHPKFQKPKQLKDKADFCIIHYAGKVDYKADEWLMKNMDPLNDNIATLLHQSSDKFVSELWKDVDRIIGLDQVAGMSETALPGAFKTRKGMFRTVGQLYKEQLAKLMATLRNTNPNFVRCIIPNHEKKAGKLDPHLVLDQLRCNGVLEGIRICRQGFPNRVVFQEFRQRYEILTPNSIPKGFMDGKQACVLMIKALELDSNLYRIGQSKVFFRAGVLAHLEEERDLKITDVIIGFQACCRGYLARKAFAKRQQQLTAMKVLQRNCAAYLKLRNWQWWRLFTKVKPLLQVSRQEEEMMAKEEELVKVREKQLAAENRLTEMETLQSQLMAEKLQLQEQLQAETELCAEAEELRARLTAKKQELEEICHDLEARVEEEEERCQHLQAEKKKMQQNIQELEEQLEEEESARQKLQLEKVTTEAKLKKLEEEQIILEDQNCKLAKEKKLLEDRIAEFTTNLTEEEEKSKSLAKLKNKHEAMITDLEERLRREEKQRQELEKTRRKLEGDSTDLSDQIAELQAQIAELKMQLAKKEEELQAALARVEEEAAQKNMALKKIRELESQISELQEDLESERASRNKAEKQKRDLGEELEALKTELEDTLDSTAAQQELRSKGEQEVTILIPGSPSDPLFSDSARPGWGRGWPSPTAAPLPS

SEQ ID NO: 825721 - protein, 631 aa, Homo sapiens
PDIRSVGDSKTYGYAKTVKNENSSRFGKFIRINFDVNGYIVGANIETYLLEKSRAIRQAKEERTFHIFYYLLSGAGEHLKTDLLLEPYNKYRFLSNGHVTIPGQQDKDMFQETMEAMRIMGIPEEEQMGLLRVISGVLQLGNIVFKKERNTDQASMPDNTAAQKVSHLLGINVTDFTRGILTPRIKVGRDYVQKAQTKEQADFAIEALAKATYERMFRWLVLRINKALDKTKRQGASFIGILDIAGFEIFDLNSFEQLCINYTNEKLQQLFNHTMFILEQEEYQREGIEWNFIDFGLDLQPCIDLIEKPAGPPGILALLDEECWFPKATDKSFVEKVMQEQGTHPKFQKPKQLKDKADFCIIHYAGKVDYKADEWLMKNMDPLNDNIATLLHQSSDKFVSELWKDVDRIIGLDQVAGMSETALPGAFKTRKGMFRTVGQLYKEQLAKLMATLRNTNPNFVRCIIPNHEKKAGKLDPHLVLDQLRCNGVLEGIRICRQGFPNRVVFQEFRQRYEILTPNSIPKGFMDGKQACVLMIKALELDSNLYRIGQSKVFFRAGVLAHLEEERDLKITDVIIGFQACCRGYLARKAFAKRQQQLTAMKVLQRNCAAYLKLRNWQWWRLFTKVRARRAS

SEQ ID NO: 825722 - protein, 588 aa, Homo sapiens
PDIRSVGDSKTYGYAKTVKNENSSRFGKFIRINFDVNGYIVGANIETYLLEKSRAIRQAKEERTFHIFYYLLSGAGEHLKTDLLLEPYNKYRFLSNGHVTIPGQQDKDMFQETMEAMRIMGIPEEEQMGLLRVISGVLQLGNIVFKKERNTDQASMPDNTAAQKVSHLLGINVTDFTRGILTPRIKVGRDYVQKAQTKEQADFAIEALAKATYERMFRWLVLRINKALDKTKRQGASFIGILDIAGFEIFDLNSFEQLCINYTNEKLQQLFNHTMFILEQEEYQREGIEWNFIDFGLDLQPCIDLIEKPAGPPGILALLDEECWFPKATDKSFVEKVMQEQGTHPKFQKPKQLKDKADFCIIHYAGKVDYKADEWLMKNMDPLNDNIATLLHQSSDKFVSELWKDVDRIIGLDQVAGMSETALPGAFKTRKGMFRTVGQLYKEQLAKLMATLRNTNPNFVRCIIPNHEKKAGKLDPHLVLDQLRCNGVLEGIRICRQGFPNRVVFQEFRQRYEILTPNSIPKGFMDGKQACVLMIKALELDSNLYRIGQSKVFFRAGVLAHLEEERDLKITDVIIGFQACCRGYLARK

SEQ ID NO: 825723 - protein, 390 aa, Homo sapiens
PDIRSVGDSKTYGYAKTVKNENSSRFGKFIRINFDVNGYIVGANIETYLLEKSRAIRQAKEERTFHIFYYLLSGAGEHLKTDLLLEPYNKYRFLSNGHVTIPGQQDKDMFQETMEAMRIMGIPEEEQMGLLRVISGVLQLGNIVFKKERNTDQASMPDNTAAQKVSHLLGINVTDFTRGILTPRIKVGRDYVQKAQTKEQADFAIEALAKATYERMFRWLVLRINKALDKTKRQGASFIGILDIAGFEIFDLNSFEQLCINYTNEKLQQLFNHTMFILEQEEYQREGIEWNFIDFGLDLQPCIDLIEKPAGPPGILALLDEECWFPKATDKSFVEKVMQEQGTHPKFQKPKQLKDKADFCIIHYAGKVRSTHGEVLARSSQERWSRANCW

SEQ ID NO: 825724 - protein, 348 aa, Homo sapiens
PDIRSVGDSKTYGYAKTVKNENSSRFGKFIRINFDVNGYIVGANIETYLLEKSRAIRQAKEERTFHIFYYLLSGAGEHLKTDLLLEPYNKYRFLSNGHVTIPGQQDKDMFQETMEAMRIMGIPEEEQMGLLRVISGVLQLGNIVFKKERNTDQASMPDNTAAQKVSHLLGINVTDFTRGILTPRIKVGRDYVQKAQTKEQADFAIEALAKATYERMFRWLVLRINKALDKTKRQGASFIGILDIAGFEIFDLNSFEQLCINYTNEKLQQLFNHTMFILEQEEYQREGIEWNFIDFGLDLQPCIDLIEKPARIPLAPARIPLAPARIPLAPARIPLAPARIPLAPARIP

SEQ ID NO: 825725 - protein, 98 aa, Homo sapiens
PDIRSVGDSKTYGYAKTVKNENSSRFGKFIRINFDVNGYIVGANIETYLLEKSRAIRQAKEERTFHIFYYLLSGAGEHLKTDLLCGACVVMIEPRSQI

SEQ ID NO: 825726 - protein, 49 aa, Homo sapiens
MLTRLCHRPPSRQGRLGSPGRCPAFTASLGSLQGELERQLLQANPILEA

SEQ ID NO: 825727 - protein, 42 aa, Homo sapiens
RNKAEKQKRDLGEELEALKTELEDTLDSTAAQQELRCALGPS

SEQ ID NO: 825728 - protein, 142 aa, Homo sapiens [sequence omitted]

SEQ ID NO: 825729 - protein, 76 aa, Homo sapiens
EKFDCLKPSSLNSSKSFSIQLCSVAGEELREKTLEEEAKTHEAQIQEMRQKHSQAVEELAEQLEQTKRVRSLPETA

SEQ ID NO: 825730 - protein, 1751 aa, Homo sapiens; identical to SEQ ID NO: 825695

SEQ ID NO: 825731 - protein, 1751 aa, Homo sapiens; identical to SEQ ID NO: 825695

SEQ ID NO: 825732 - protein, 1827 aa, Homo sapiens
PDIRSVGDSKTYGYAKTVKNENSSRFGKFIRINFDVNGYIVGANIETYLLEKSRAIRQAKEERTFHIFYYLLSGAGEHLKTDLLLEPYNKYRFLSNGHVTIPGQQDKDMFQETMEAMRIMGIPEEEQMGLLRVISGVLQLGNIVFKKERNTDQASMPDNTAAQKVSHLLGINVTDFTRGILTPRIKVGRDYVQKAQTKEQADFAIEALAKATYERMFRWLVLRINKALDKTKRQGASFIGILDIAGFEIFDLNSFEQLCINYTNEKLQQLFNHTMFILEQEEYQREGIEWNFIDFGLDLQPCIDLIEKPAGPPGILALLDEECWFPKATDKSFVEKVMQEQGTHPKFQKPKQLKDKADFCIIHYAGKVDYKADEWLMKNMDPLNDNIATLLHQSSDKFVSELWKDVDRIIGLDQVAGMSETALPGAFKTRKGMFRTVGQLYKEQLAKLMATLRNTNPNFVRCIIPNHEKKAGKLDPHLVLDQLRCNGVLEGIRICRQGFPNRVVFQEFRQRYEILTPNSIPKGFMDGKQACVLMIKALELDSNLYRIGQSKVFFRAGVLAHLEEERDLKITDVIIGFQACCRGYLARKAFAKRQQQLTAMKVLQRNCAAYLKLRNWQWWRLFTKVKPLLQVSRQEEEMMAKEEELVKVREKQLAAENRLTEMETLQSQLMAEKLQLQEQLQAETELCAEAEELRARLTAKKQELEEICHDLEARVEEEEERCQHLQAEKKKMQQNIQELEEQLEEEESARQKLQLEKVTTEAKLKKLEEEQIILEDQNCKLAKEKKLLEDRIAEFTTNLTEEEEKSKSLAKLKNKHEAMITDLEERLRREEKQRQELEKTRRKLEGDSTDLSDQIAELQAQIAELKMQLAKKEEELQAALARVEEEAAQKNMALKKIRELESQISELQEDLESERASRNKAEKQKRDLGEELEALKTELEDTLDSTAAQQELRSKREQEVNILKKTLEEEAKTHEAQIQEMRQKHSQAVEELAEQLEQTKRVKANLEKAKQTLENERGELANEVKVLLQGKGDSEHKRKKVEAQLQELQVKFNEGERVRTELADKVTKLQVRPPPGPWCGQWALAAVVAQVPRCMCALCLSLFSNWLSDPHGSACDSGPALPKGDEVGQEQWGWVHGPSVSPRPVQVELDNVTGLLSQSDSKSSKLTKDFSALESQLQDTQELLQEENRQKLSLSTKLKQVEDEKNSFREQLEEEEEAKHNLEKQIATLHAQVADMKKKMEDSVGCLETAEEVKRKLQKDLEGLSQRHEEKVAAYDKLEKTKTRLQQELDDLLVDLDHQRQSACNLEKKQKKFDQLLAEEKTISAKYAEERDRAEAEAREKETKALSLARALEEAMEQKAELERLNKQFRTEMEDLMSSKDDVGKSVHELEKSKRALEQQVEEMKTQLEELEDELQATEDAKLRLEVNLQAMKAQFERDLQGRDEQSEEKKKQLVRQVREMEAELEDERKQRSMAVAARKKLEMDLKDLEAHIDSANKNRDEAIKQLRKLQAQMKDCMRELDDTRASREEILAQAKENEKKLKSMEAEMIQLQEELAAAERAKRQAQQERDELADEIANSSGKGALALEEKRRLEARIAQLEEELEEEQGNTELINDRLKKANLQIDQINTDLNLERSHAQKNENARQQLERQNKELKVKLQEMEGTVKSKYKASITALEAKIAQLEEQLDNETKERQAACKQVRRTEKKLKDVLLQVDDERRNAEQYKDQADKASTRLKQLKRQLEEAEEEAQRANASRRKLQRELEDATETADAMNREVSSLKNKLRRGDLPFVVPRRMARKGAGDGSDEEVDGKADGAEAKPAE

SEQ ID NO: 825733 - protein, 1751 aa, Homo sapiens; identical to SEQ ID NO: 825695

SEQ ID NO: 825734 - protein, 944 aa, Homo sapiens
HEAQIQEMRQKHSQAVEERLRREEKQRQELEKTRRKLEGDSTDLSDQIAELQAQIAELKMQLAKKEEELQAALARVEEEAAQKNMALKKIRELESQISELQEDLESERASRNKAEKQKRDLGEELEALKTELEDTLDSTAAQQELRSKREQEVNILKKTLEEEAKTHEAQIQEMRQKHSQAVEELAEQLEQTKRVKANLEKAKQTLENERGELANEVKVLLQGKGDSEHKRKKVEAQLQELQVKFNEGERVRTELADKVTKLQVELDNVTGLLSQSDSKSSKLTKDFSALESQLQDTQELLQEENRQKLSLSTKLKQVEDEKNSFREQLEEEEEAKHNLEKQIATLHAQVADMKKKMEDSVGCLETAEEVKRKLQKDLEGLSQRHEEKVAAYDKLEKTKTRLQQELDDLLVDLDHQRQSACNLEKKQKKFDQLLAEEKTISAKYAEERDRAEAEAREKETKALSLARALEEAMEQKAELERLNKQFRTEMEDLMSSKDDVGKSVHELEKSKRALEQQVEEMKTQLEELEDELQATEDAKLRLEVNLQAMKAQFERDLQGRDEQSEEKKKQLVRQVREMEAELEDERKQRSMAVAARKKLEMDLKDLEAHIDSANKNRDEAIKQLRKLQAQMKDCMRELDDTRASREEILAQAKENEKKLKSMEAEMIQLQEELAAAERAKRQAQQERDELADEIANSSGKGALALEEKRRLEARIAQLEEELEEEQGNTELINDRLKKANLQIDQINTDLNLERSHAQKNENARQQLERQNKELKVKLQEMEGTVKSKYKASITALEAKIAQLEEQLDNETKERQAACKQVRRTEKKLKDVLLQVDDERRNAEQYKDQADKASTRLKQLKRQLEEAEEEAQRANASRRKLQRELEDATETADAMNREVSSLKNKLRRGDLPFVVPRRMARKGAGDGSDEEVDGKADGAEAKPAE

SEQ ID NO: 825735 - protein, 535 aa, Homo sapiens
GLQVDLQPQLGIFGGLQLVLQLFQLRLPPPISAKYAEERDRAEAEAREKETKALSLARALEEAMEQKAELERLNKQFRTEMEDLMSSKDDVGKSVHELEKSKRALEQQVEEMKTQLEELEDELQATEDAKLRLEVNLQAMKAQFERDLQGRDEQSEEKKKQLVRQVREMEAELEDERKQRSMAVAARKKLEMDLKDLEAHIDSANKNRDEAIKQLRKLQAQMKDCMRELDDTRASREEILAQAKENEKKLKSMEAEMIQLQEELAAAERAKRQAQQERDELADEIANSSGKGALALEEKRRLEARIAQLEEELEEEQGNTELINDRLKKANLQIDQINTDLNLERSHAQKNENARQQLERQNKELKVKLQEMEGTVKSKYKASITALEAKIAQLEEQLDNETKERQAACKQVRRTEKKLKDVLLQVDDERRNAEQYKDQADKASTRLKQLKRQLEEAEEEAQRANASRRKLQRELEDATETADAMNREVSSLKNKLRRGDLPFVVPRRMARKGAGDGSDEEVDGKADGAEAKPAE

SEQ ID NO: 825736 - protein, 1751 aa, Homo sapiens; identical to SEQ ID NO: 825695

SEQ ID NO: 825737 - protein, 1751 aa, Homo sapiens; identical to SEQ ID NO: 825695

SEQ ID NO: 825738 - protein, 1343 aa, Homo sapiens
MTNSSRFGKFIRINFDVNGYIVGANIETYLLEKSRAIRQAKEERTFHIFYYLLSGAGEHLKTDLLLEPYNKYRFLSNGHVTIPGQQDKDMFQETMEAMRIMGIPEEEQMGLLRVISGVLQLGNIVFKKERNTDQASMPDNTAAQKVSHLLGINVTDFTRGILTPRIKVGRDYVQKAQTKEQADFAIEALAKATYERMFRWLVLRINKALDKTKRQGASFIGILDIAGFEIFDLNSFEQLCINYTNEKLQQLFNHTMFILEQEEYQREGIEWNFIDFGLDLQPCIDLIEKPAGPPGILALLDEECWFPKATDKSFVEKVMQEQGTHPKFQKPKQLKDKADFCIIHYAGKVDYKADEWLMKNMDPLNDNIATLLHQSSDKFVSELWKDVDRIIGLDQVAGMSETALPGAFKTRKGMFRTVGQLYKEQLAKLMATLRNTNPNFVRCIIPNHEKKAGKLDPHLVLDQLRCNGVLEGIRICRQGFPNRVVFQEFRQRYEILTPNSIPKGFMDGKQACVLMIKALELDSNLYRIGQSKVFFRAGVLAHLEEERDLKITDVIIGFQACCRGYLARKAFAKRQQQLTAMKVLQRNCAAYLKLRNWQWWRLFTKVKPLLQVSRQEEEMMAKEEELVKVREKQLAAENRLTEMETLQSQLMAEKLQLQEQLQAETELCAEAEELRARLTAKKQELEEICHDLEARVEEEEERCQHLQAEKKKMQQNIQELEEQLEEEESARQKLQLEKVTTEAKLKKLEEEQIILEDQNCKLAKEKKLLEDRIAEFTTNLTEEEEKSKSLAKLKNKHEAMITDLEERLRREEKQRQELEKTRRKLEGDSTDLSDQIAELQAQIAELKMQLAKKEEELQAALARVEEEAAQKNMALKKIRELESQISELQEDLESERASRNKAEKQKRDLGEELEALKTELEDTLDSTAAQQELRSKREQEVNILKKTLEEEAKTHEAQIQEMRQKHSQAVEELAEQLEQTKRVKANLEKAKQTLENERGELANEVKVLLQGKGDSEHKRKKVEAQLQELQVKFNEGERVRTELADKVTKLQVELDNVTGLLSQSDSKSSKLTKDFSALESQLQDTQELLQEENRQKLSLSTKLKQVEDEKNSFREQLEEEEEAKHNLEKQIATLHAQVADMKKKMEDSVGCLETAEEVKRKLQKDLEGLSQRHEEKVAAYDKLEKTKTRLQQELDDLLVDLDHQRQSACNLEKKQKKFDQLLAEEKTISAKYAEERDRAEAEAREKETKALSLARALEEAMEQKAELERLNKQFRTEMEDLMSSKDDVGKSVHELEKSKRALEQQVEEMKTAPSPHPVSLQVLLRAFGFLCCIPFQLPPLLRI

SEQ ID NO: 825739 - protein, 222 aa, Homo sapiens
PRVRTCPKSDSQSVRGASLQIDQINTDLNLERSHAQKNENARQQLERQNKELKVKLQEMEGTVKSKYKASITALEAKIAQLEEQLDNETKERQAACKQVRRTEKKLKDVLLQVDDERRNAEQYKDQADKASTRLKQLKRQLEEAEEEAQRANASRRKLQRELEDATETADAMNREVSSLKNKLRRGDLPFVVPRRMARKGAGDGSDEEVDGKADGAEAKPAE

SEQ ID NO: 825740 - protein, 141 aa, Homo sapiens
GIRGSLEAKERQAACKQVRRTEKKLKDVLLQVDDERRNAEQYKDQADKASTRLKQLKRQLEEAEEEAQRANASRRKLQRELEDATETADAMNREVSSLKNKLRRGDLPFVVPRRMARKGAGDGSDEEVDGKADGAEAKPAE

SEQ ID NO: 825741 - protein, 1751 aa, Homo sapiens; identical to SEQ ID NO: 825695

SEQ ID NO: 825742 - protein, 1660 aa, Homo sapiens
PDIRSVGDSKTYGYAKTVKNENSSRFGKFIRINFDVNGYIVGANIETYLLEKSRAIRQAKEERTFHIFYYLLSGAGEHLKTDLLLEPYNKYRFLSNGHVTIPGQQDKDMFQETMEAMRIMGIPEEEQMGLLRVISGVLQLGNIVFKKERNTDQASMPDNTAAQKVSHLLGINVTDFTRGILTPRIKVGRDYVQKAQTKEQADFAIEALAKATYERMFRWLVLRINKALDKTKRQGASFIGILDIAGFEIFDLNSFEQLCINYTNEKLQQLFNHTMFILEQEEYQREGIEWNFIDFGLDLQPCIDLIEKPAGPPGILALLDEECWFPKATDKSFVEKVMQEQGTHPKFQKPKQLKDKADFCIIHYAGKVDYKADEWLMKNMDPLNDNIATLLHQSSDKFVSELWKDVDRIIGLDQVAGMSETALPGAFKTRKGMFRTVGQLYKEQLAKLMATLRNTNPNFVRCIIPNHEKKAGKLDPHLVLDQLRCNGVLEGIRICRQGFPNRVVFQEFRQRYEILTPNSIPKGFMDGKQACVLMIKALELDSNLYRIGQSKVFFRAGVLAHLEEERDLKITDVIIGFQACCRGYLARKAFAKRQQQLTAMKVLQRNCAAYLKLRNWQWWRLFTKVKPLLQVSRQEEEMMAKEEELVKVREKQLAAENRLTEMETLQSQLMAEKLQLQEQLQAETELCAEAEELRARLTAKKQELEEICHDLEARVEEEEERCQHLQAEKKKMQQNIQELEEQLEEEESARQKLQLEKVTTEAKLKKLEEEQIILEDQNCKLAKEKKLLEDRIAEFTTNLTEEEEKSKSLAKLKNKHEAMITDLEERLRREEKQRQELEKTRRKLEGDSTDLSDQIAELQAQIAELKMQLAKKEEELQAALARVEEEAAQKNMALKKIRELESQISELQEDLESERASRNKAEKQKRDLGEELEALKTELEDTLDSTAAQQELRSKREQEVNILKKTLEEEAKTHEAQIQEMRQKHSQAVEELAEQLEQTKRVKANLEKAKQTLENERGELANEVKVLLQGKGDSEHKRKKVEAQLQELQVKFNEGERVRTELADKVTKLQVELDNVTGLLSQSDSKSSKLTKDFSALESQLQDTQELLQEENRQKLSLSTKLKQVEDEKNSFREQLEEEEEAKHNLEKQIATLHAQVADMKKKMEDSVGCLETAEEVKRKLQKDLEGLSQRHEEKVAAYDKLEKTKTRLQQELDDLLVDLDHQRQSACNLEKKQKKFDQLLAEEKTISAKYAEERDRAEAEAREKETKALSLARALEEAMEQKAELERLNKQFRTEMEDLMSSKDDVGKSVHELEKSKRALEQQVEEMKTQLEELEDELQATEDAKLRLEVNLQAMKAQFERDLQGRDEQSEEKKKQLVRQVREMEAELEDERKQRSMAVAARKKLEMDLKDLEAHIDSANKNRDEAIKQLRKLQAQMKDCMRELDDTRASREEILAQAKENEKKLKSMEAEMIQLQEELAAAERAKRQAQQERDELADEIANSSGKGALALEEKRRLEARIAQLEEELEEEQGNTELINDRLKKANLQIDQINTDLNLERSHAQKNENARQQLERQNKELKVKLQEMEGTVKSKYKASITALEAKIAQLEEQLDNETKERQAACKQVRRTEKKLKDVLLQVDDERRNAEQYKDQVWALV

SEQ ID NO: 825743 - protein, 1021 aa, Homo sapiens
PDIRSVGDSKTYGYAKTVKNENSSRFGKFIRINFDVNGYIVGANIETYLLEKSRAIRQAKEERTFHIFYYLLSGAGEHLKTDLLLEPYNKYRFLSNGHVTIPGQQDKDMFQETMEAMRIMGIPEEEQMGLLRVISGVLQLGNIVFKKERNTDQASMPDNTAAQKVSHLLGINVTDFTRGILTPRIKVGRDYVQKAQTKEQADFAIEALAKATYERMFRWLVLRINKALDKTKRQGASFIGILDIAGFEIFDLNSFEQLCINYTNEKLQQLFNHTMFILEQEEYQREGIEWNFIDFGLDLQPCIDLIEKPAGPPGILALLDEECWFPKATDKSFVEKVMQEQGTHPKFQKPKQLKDKADFCIIHYAGKVDYKADEWLMKNMDPLNDNIATLLHQSSDKFVSELWKDVDRIIGLDQVAGMSETALPGAFKTRKGMFRTVGQLYKEQLAKLMATLRNTNPNFVRCIIPNHEKKAGKLDPHLVLDQLRCNGVLEGIRICRQGFPNRVVFQEFRQRYEILTPNSIPKGFMDGKQACVLMIKALELDSNLYRIGQSKVFFRAGVLAHLEEERDLKITDVIIGFQACCRGYLARKAFAKRQQQLTAMKVLQRNCAAYLKLRNWQWWRLFTKVKPLLQVSRQEEEMMAKEEELVKVREKQLAAENRLTEMETLQSQLMAEKLQLQEQLQAETELCAEAEELRARLTAKKQELEEICHDLEARVEEEEERCQHLQAEKKKMQQNIQELEEQLEEEESARQKLQLEKVTTEAKLKKLEEEQIILEDQNCKLAKEKKLLEDRIAEFTTNLTEEEEKSKSLAKLKNKHEAMITDLEERLRREEKQRQELEKTRRKLEGDSTDLSDQIAELQAQIAELKMQLAKKEEELQAALARVEEEAAQKNMALKKIRELESQISELQEDLESERASRNKAEKQKRDLGEELEALKTELEDTLDSTAAQQELRSKREQEVNILKKTLEEEAKTHEAQIQEMRQKHSQPASATARLSGSSWKGQQPSSGFSQHSWGPNIFNG

SEQ ID NO: 825744 - protein, 1415 aa, Homo sapiens
PDIRSVGDSKTYGYAKTVKNENSSRFGKFIRINFDVNGYIVGANIETYLLEKSRAIRQAKEERTFHIFYYLLSGAGEHLKTDLLLEPYNKYRFLSNGHVTIPGQQDKDMFQETMEAMRIMGIPEEEQMGLLRVISGVLQLGNIVFKKERNTDQASMPDNTAAQKVSHLLGINVTDFTRGILTPRIKVGRDYVQKAQTKEQADFAIEALAKATYERMFRWLVLRINKALDKTKRQGASFIGILDIAGFEIFDLNSFEQLCINYTNEKLQQLFNHTMFILEQEEYQREGIEWNFIDFGLDLQPCIDLIEKPAGPPGILALLDEECWFPKATDKSFVEKVMQEQGTHPKFQKPKQLKDKADFCIIHYAGKVDYKADEWLMKNMDPLNDNIATLLHQSSDKFVSELWKDVDRIIGLDQVAGMSETALPGAFKTRKGMFRTVGQLYKEQLAKLMATLRNTNPNFVRCIIPNHEKKAGKLDPHLVLDQLRCNGVLEGIRICRQGFPNRVVFQEFRQRYEILTPNSIPKGFMDGKQACVLMIKALELDSNLYRIGQSKVFFRAGVLAHLEEERDLKITDVIIGFQACCRGYLARKAFAKRQQQLTAMKVLQRNCAAYLKLRNWQWWRLFTKVKPLLQVSRQEEEMMAKEEELVKVREKQLAAENRLTEMETLQSQLMAEKLQLQEQLQAETELCAEAEELRARLTAKKQELEEICHDLEARVEEEEERCQHLQAEKKKMQQNIQELEEQLEEEESARQKLQLEKVTTEAKLKKLEEEQIILEDQNCKLAKEKKLLEDRIAEFTTNLTEEEEKSKSLAKLKNKHEAMITDLEERLRREEKQRQELEKTRRKLEGDSTDLSDQIAELQAQIAELKMQLAKKEEELQAALARVEEEAAQKNMALKKIRELESQISELQEDLESERASRNKAEKQKRDLGEELEALKTELEDTLDSTAAQQELRSKREQEVNILKKTLEEEAKTHEAQIQEMRQKHSQAVEELAEQLEQTKRVKANLEKAKQTLENERGELANEVKVLLQGKGDSEHKRKKVEAQLQELQVKFNEGERVRTELADKVTKLQVELDNVTGLLSQSDSKSSKLTKDFSALESQLQDTQELLQEENRQKLSLSTKLKQVEDEKNSFREQLEEEEEAKHNLEKQIATLHAQVADMKKKMEDSVGCLETAEEVKRKLQKDLEGLSQRHEEKVAAYDKLEKTKTRLQQELDDLLVDLDHQRQSACNLEKKQKKFDQLLAEEKTISAKYAEERDRAEAEAREKETKALSLARALEEAMEQKAELERLNKQFRTEMEDLMSSKDDVGKSVHELEKSKRALEQQVEEMKTQLEELEDELQATEDAKLRLEVNLQAMKAQFERDLQGRDESKPREGKADLENERGELANEVKVLLQGKGDSEHSTIKWRPGSSRSP

SEQ ID NO: 825745 - protein, 215 aa, Homo sapiens
PDIRSVGDSKTYGYAKTVKNENSSRFGKFIRINFDVNGYIVGANIETYLLEKSRAIRQAKEERTFHIFYYLLSGAGEHLKTDLLLEPYNKYRFLSNGHVTIPGQQDKDMFQETMEAMRIMGIPEEEQMGLLRVISGVLQLGNIVFKKDGFLPTLSQAAPLSAVSLLILKCLKCNAPSPPLPRTACLCHSKAVGVKLERPAAFQWLLPTLLGTKYI

SEQ ID NO: 825746 - protein, 1213 aa, Homo sapiens
PDIRSVGDSKTYGYAKTVKNENSSRFGKFIRINFDVNGYIVGANIETYLLEKSRAIRQAKEERTFHIFYYLLSGAGEHLKTDLLLEPYNKYRFLSNGHVTIPGQQDKDMFQETMEAMRIMGIPEEEQMGLLRVISGVLQLGNIVFKKERNTDQASMPDNTAAQKVSHLLGINVTDFTRGILTPRIKVGRDYVQKAQTKEQADFAIEALAKATYERMFRWLVLRINKALDKTKRQGASFIGILDIAGFEIFDLNSFEQLCINYTNEKLQQLFNHTMFILEQEEYQREGIEWNFIDFGLDLQPCIDLIEKPAGPPGILALLDEECWFPKATDKSFVEKVMQEQGTHPKFQKPKQLKDKADFCIIHYAGKVDYKADEWLMKNMDPLNDNIATLLHQSSDKFVSELWKDVDRIIGLDQVAGMSETALPGAFKTRKGMFRTVGQLYKEQLAKLMATLRNTNPNFVRCIIPNHEKKAGKLDPHLVLDQLRCNGVLEGIRICRQGFPNRVVFQEFRQRYEILTPNSIPKGFMDGKQACVLMIKALELDSNLYRIGQSKVFFRAGVLAHLEEERDLKITDVIIGFQACCRGYLARKAFAKRQQQLTAMKVLQRNCAAYLKLRNWQWWRLFTKVKPLLQVSRQEEEMMAKEEELVKVREKQLAAENRLTEMETLQSQLMAEKLQLQEQLQAETELCAEAEELRARLTAKKQELEEICHDLEARVEEEEERCQHLQAEKKKMQQNIQELEEQLEEEESARQKLQLEKVTTEAKLKKLEEEQIILEDQNCKLAKEKKLLEDRIAEFTTNLTEEEEKSKSLAKLKNKHEAMITDLEERLRREEKQRQELEKTRRKLEGDSTDLSDQIAELQAQIAELKMQLAKKEEELQAALARVEEEAAQKNMALKKIRELESQISELQEDLESERASRNKAEKQKRDLGEELEALKTELEDTLDSTAAQQELRSKREQEVNILKKTLEEEAKTHEAQIQEMRQKHSQAVEELAEQLEQTKRVKANLEKAKQTLENERGELANEVKVLLQGKGDSEHKRKKVEAQLQELQVKFNEGERVRTELADKVTKLQVELDNVTGLLSQSDSKSSKLTKDFSALESQLQDTQELLQEENRQKLSLSTKLKQVEDEKNSFREQLEEEEEAKHNLEKQIATLHAQVWRPGGPAGLCRLGSCWPGTGLGTAGQPCPLGRPIAALPLGSQPCSPTSVLSRKGIQ

SEQ ID NO: 825747 - protein, 748 aa, Homo sapiens
MTNSSRFGKFIRINFDVNGYIVGANIETYLLEKSRAIRQAKEERTFHIFYYLLSGAGEHLKTDLLLEPYNKYRFLSNGHVTIPGQQDKDMFQETMEAMRIMGIPEEEQMGLLRVISGVLQLGNIVFKKERNTDQASMPDNTAAQKVSHLLGINVTDFTRGILTPRIKVGRDYVQKAQTKEQADFAIEALAKATYERMFRWLVLRINKALDKTKRQGASFIGILDIAGFEIFDLNSFEQLCINYTNEKLQQLFNHTMFILEQEEYQREGIEWNFIDFGLDLQPCIDLIEKPAGPPGILALLDEECWFPKATDKSFVEKVMQEQGTHPKFQKPKQLKDKADFCIIHYAGKVDYKADEWLMKNMDPLNDNIATLLHQSSDKFVSELWKDVDRIIGLDQVAGMSETALPGAFKTRKGMFRTVGQLYKEQLAKLMATLRNTNPNFVRCIIPNHEKKAGKLDPHLVLDQLRCNGVLEGIRICRQGFPNRVVFQEFRQRYEILTPNSIPKGFMDGKQACVLMIKALELDSNLYRIGQSKVFFRAGVLAHLEEERDLKITDVIIGFQACCRGYLARKAFAKRQQQLTAMKVLQRNCAAYLKLRNWQWWRLFTKVKPLLQVSRQEEEMMAKEEELVKVREKQLAAENRLTEMETLQSQLMAEKLQLQEQLQAETELCAEAEELRARLTAKKQELEEICHDLEARVEEEEERCQHLQANFCKHKGKRIRPSKSMNAFITPSANNTYNTAGTPLWTNPL

SEQ ID NO: 825748 - protein, 612 aa, Homo sapiens
PDIRSVGDSKTYGYAKTVKNENSSRFGKFIRINFDVNGYIVGANIETYLLEKSRAIRQAKEERTFHIFYYLLSGAGEHLKTDLLLEPYNKYRFLSNGHVTIPGQQDKDMFQETMEAMRIMGIPEEEQMGLLRVISGVLQLGNIVFKKERNTDQASMPDNTAAQKVSHLLGINVTDFTRGILTPRIKVGRDYVQKAQTKEQADFAIEALAKATYERMFRWLVLRINKALDKTKRQGASFIGILDIAGFEIFDLNSFEQLCINYTNEKLQQLFNHTMFILEQEEYQREGIEWNFIDFGLDLQPCIDLIEKPAGPPGILALLDEECWFPKATDKSFVEKVMQEQGTHPKFQKPKQLKDKADFCIIHYAGKVDYKADEWLMKNMDPLNDNIATLLHQSSDKFVSELWKDVDRIIGLDQVAGMSETALPGAFKTRKGMFRTVGQLYKEQLAKLMATLRNTNPNFVRCIIPNHEKKAGKLDPHLVLDQLRCNGVLEGIRICRQGFPNRVVFQEFRQRYEILTPNSIPKGFMDGKQACVLMIKALELDSNLYRIGQSKVFFRAGVLAHLQQRLDLGEEPPPLPVPQLQVGSAVPLEDLHGGKLLLPLGKCFPGQVAPAA

SEQ ID NO: 825749 - protein, 322 aa, Homo sapiens
PDIRSVGDSKTYGYAKTVKNENSSRFGKFIRINFDVNGYIVGANIETYLLEKSRAIRQAKEERTFHIFYYLLSGAGEHLKTDLLLEPYNKYRFLSNGHVTIPGQQDKDMFQETMEAMRIMGIPEEEQMGLLRVISGVLQLGNIVFKKERNTDQASMPDNTAAQKVSHLLGINVTDFTRGILTPRIKVGRDYVQKAQTKEQADFAIEALAKATYERMFRWLVLRINKALDKTKRQGASFIGILDIAGFEIFDLNSFEQLCINYTNEKLQQLFNHTMFILEQEEYQREGIEWNFIDFGLDLQPCIDLIEKPAGPPAFLITEIFY

SEQ ID NO: 825750 - protein, 194 aa, Homo sapiens
PDIRSVGDSKTYGYAKTVKNENSSRFGKFIRINFDVNGYIVGANIETYLLEKSRAIRQAKEERTFHIFYYLLSGAGEHLKTDLLLEPYNKYRFLSNGHVTIPGQQDKDMFQETMEAMRIMGIPEEEQMGLLRVISGVLQLGNIVFKKERNTDQASMPDNTGNTRGLSLEIMGQVLGHGFAQEGRSCGNSGHYSF

SEQ ID NO: 825751 - protein, 136 aa, Homo sapiens
ARTLVRAVGPSSSCGPGPQVHVCSLSLSLLKLAPQTLMVQLVTQVQLYLKEMRWGRSSGGGSMVLCVSPPGAGGAGQRDRASQPVRQQVQQAHQGLLRAGVPAAGHSGRGGARFPEGGPLQKGLCVHATLASEPIG

SEQ ID NO: 825752 - protein, 846 aa, Homo sapiens
RSRQTPSPDVVLRGSSDGRGSDSESDLPHRKLPDVKKDDMSARRTSHGEPKSAVPFNQYLPNKSNQTAYVPAPLRKKKAEREEYRKSWSTATSPLGGERPFRYGPRTPVSDDAESTSMFDMRCEEEAAVQPHSRARQEQLQLINNQLREEDDKWQDDLARWKSRRRSVSQDLIKKEEERKKMEKLLAGEDGTSERRKSIKTYREIVQEKERRERELHEAYKNARSQEEAEGILQQYIERFTISEAVLERLEMPKILERSHSTEPNLSSFLNDPNPMKYLRQQSLPPPKFTATVETTIARASVLDTSMSAGSGSPSKTVTPKAVPMLTPKPYSQPKNSQDVLKTFKVDGKVSVNGETVHREEEKERECPTVAPAHSLTKSQMFEGVARVHGSPLELKQDNGSIEINIKKPNSVPQELAATTEKTEPNSQEDKNDGGKSRKGNIELASSEPQHFTTTVTRCSPTVAFVEFPSSPQLKNDVSEEKDQKKPENEMSGKVELVLSQKVVKPKSPEPEATLTFPFLDKMPEANQLHLPNLNSQVDSPSSEKSPVMTPFKFWAWDPEEERRRQEKWQQEQERLLQERYQKEQDKLKEEWEKAQKEVEEEERRYYEEERKIIEDTVVPFTVSSSSADQLSTSSSMTEGSGTMNKIDLGNCQDEKQDRRWKKSFQGDDSDLLLKTRESDRLEEKGSLTEGALAHSGNPVSKGVHEDHQLDTEAGAPHCGTNPQLAQDPSQNQQTSNPTHSSEDVKPKTLPLDKSINHQIESPSERRKSISGKKLCSSCGLPLGKGAAMIIETLNLYFHIQCFRCGICKGQLGDAVSGTDVRIRNGLLNCNDCYMRSRSAGQPTTL

SEQ ID NO: 825753 - protein, 686 aa, Homo sapiens
  misc_feature (2)..(4): Xaa can be any naturally occurring amino acid
QXXXRPFWPGDLIKKEEERKKMEKLLAGEDGTSERRKSIKTYREIVQEKERRERELHEAYKNARSQEEAEGILQQYIERFTISEAVLERLEMPKILERSHSTEPNLSSFLNDPNPMKYLRQQSLPPPKFTATVETTIARASVLDTSMSAGSGSPSKTVTPKAVPMLTPKPYSQPKNSQDVLKTFKVDGKVSVNGETVHREEEKERECPTVAPAHSLTKSQMFEGVARVHGSPLELKQDNGSIEINIKKPNSVPQELAATTEKTEPNSQEDKNDGGKSRKGNIELASSEPQHFTTTVTRCSPTVAFVEFPSSPQLKNDVSEEKDQKKPENEMSGKVELVLSQKVVKPKSPEPEATLTFPFLDKMPEANQLHLPNLNSQVDSPSSEKSPVMTPFKFWAWDPEEERRRQEKWQQEQERLLQERYQKEQDKLKEEWEKAQKEVEEEERRYYEEERKIIEDTVVPFTVSSSSADQLSTSSSMTEGSGTMNKIDLGNCQDEKQDRRWKKSFQGDDSDLLLKTRESDRLEEKGSLTEGALAHSGNPVSKGVHEDHQLDTEAGAPHCGTNPQLAQDPSQNQQTSNPTHSSEDVKPKTLPLDKSINHQIESPSERRKSISGKKLCSSCGLPLGKGAAMIIETLNLYFHIQCFRCGICKGQLGDAVSGTDVRIRNGLLNCNDCYMRSRSAGQPTTL

SEQ ID NO: 825754 - protein, 298 aa, Homo sapiens [sequence omitted]

SEQ ID NO: 825755 - protein, 846 aa, Homo sapiens; identical to SEQ ID NO: 825752

SEQ ID NO: 825756 - protein, 846 aa, Homo sapiens; identical to SEQ ID NO: 825752

SEQ ID NO: 825757 - protein, 729 aa, Homo sapiens
MFDMRCEEEAAVQPHSRARQEQLQLINNQLREEDDKWQDDLARWKSRRRSVSQDLIKKEEERKKMEKLLAGEDGTSERRKSIKTYREIVQEKERRERELHEAYKNARSQEEAEGILQQYIERFTISEAVLERLEMPKILERSHSTEPNLSSFLNDPNPMKYLRQQSLPPPKFTATVETTIARASVLDTSMSAGSGSPSKTVTPKAVPMLTPKPYSQPKNSQDVLKTFKVDGKVSVNGETVHREEEKERECPTVAPAHSLTKSQMFEGVARVHGSPLELKQDNGSIEINIKKPNSVPQELAATTEKTEPNSQEDKNDGGKSRKGNIELASSEPQHFTTTVTRCSPTVAFVEFPSSPQLKNDVSEEKDQKKPENEMSGKVELVLSQKVVKPKSPEPEATLTFPFLDKMPEANQLHLPNLNSQVDSPSSEKSPVMTPFKFWAWDPEEERRRQEKWQQEQERLLQERYQKEQDKLKEEWEKAQKEVEEEERRYYEEERKIIEDTVVPFTVSSSSADQLSTSSSMTEGSGTMNKIDLGNCQDEKQDRRWKKSFQGDDSDLLLKTRESDRLEEKGSLTEGALAHSGNPVSKGVHEDHQLDTEAGAPHCGTNPQLAQDPSQNQQTSNPTHSSEDVKPKTLPLDKSINHQIESPSERRKSISGKKLCSSCGLPLGKGAAMIIETLNLYFHIQCFRCGICKGQLGDAVSGTDVRIRNGLLNCNDCYMRSRSAGQPTTL

SEQ ID NO: 825758 - protein, 150 aa, Homo sapiens
MFDMRCEEEAAVQPHSRARQEQLQLINNQLREEDDKWQDDLARWKSRRRSVSQDLIKKEEERKKMEKLLAGEDGTSERRKSIKTYREIVQEKERRERELHEAYKNARSQEEAEGILQQYIERFTISEAVLERLEMPKILERKERVLSLQG

SEQ ID NO: 825759 - protein, 729 aa, Homo sapiens; identical to SEQ ID NO: 825757

SEQ ID NO: 825760 - protein, 846 aa, Homo sapiens; identical to SEQ ID NO: 825752

SEQ ID NO: 825761 - protein, 356 aa, Homo sapiens
MSGKVELVLSQKVVKPKSPEPEATLTFPFLDKMPEANQLHLPNLNSQVDSPSSEKSPVMTPFKFWAWDPEEERRRQEKWQQEQERLLQERYQKEQDKLKEEWEKAQKEVEEEERRYYEEERKIIEDTVVPFTVSSSSADQLSTSSSMTEGSGTMNKIDLGNCQDEKQDRRWKKSFQGDDSDLLLKTRESDRLEEKGSLTEGALAHSGNPVSKGVHEDHQLDTEAGAPHCGTNPQLAQDPSQNQQTSNPTHSSEDVKPKTLPLDKSINHQIESPSERRKSISGKKLCSSCGLPLGKGAAMIIETLNLYFHIQCFRCGICKGQLGDAVSGTDVRIRNGLLNCNDCYMRSRSAGQPTTL

SEQ ID NO: 825762 - protein, 480 aa, Homo sapiens
MFDMRCEEEAAVQPHSRARQEQLQLINNQLREEDDKWQDDLARWKSRRRSVSQDLIKKEEERKKMEKLLAGEDGTSERRKSIKTYREIVQEKERRERELHEAYKNARSQEEAEGILQQYIERFTISEAVLERLEMPKILERSHSTEPNLSSFLNDPNPMKYLRQQSLPPPKFTATVETTIARASVLDTSMSAGSGSPSKTVTPKAVPMLTPKPYSQPKNSQDVLKTFKVDGKVSVNGETVHREEEKERECPTVAPAHSLTKSQMFEGVARVHGSPLELKQDNGSIEINIKKPNSVPQELAATTEKTEPNSQEDKNDGGKSRKGNIELASSEPQHFTTTVTRCSPTVAFVEFPSSPQLKNDVSEEKDQKKPENEMSGKVELVLSQKVVKPKSPEPEATLTFPFLDKMPEANQLHLPNLNSQVDSPSSEKSPVMTPFKFWAWDPEEERRRQEKWQQEQERLLQERYQKGHRPWRSSSEAPSE

SEQ ID NO: 825763 - protein, 792 aa, Homo sapiens
MQGEDARYLKRKVKGGNIDVHPSEKALIVHYEVEATILGEMGDPMLGERKECQKIIRLKSLNANTDITSLARKVVEECKLIHPSKLNEVEQLLYYLQNRRDSLSGKEKKEKSSKPKDPPPFEGMEIDEVANINDMDEYIELLYEDIPDKVRGSALILQLARNPDNLEELLLNETALGALARVLREDWKQSVELATNIIYIFFCFSSFSQFHGLITHYKIGALCMNIIDHELKRHELWQEELSKKKKAVDEDPENQTLRKDYEKTFKKYQGLVVKQEQLLRVALYLLLNLAEDTRTELKMRNKNIVHMLVKALDRDNFELLILVVSFLKKLSIFMENKNDMVEMDIVEKLVKMIPCEHEDLLNITLRLLLNLSFDTGLRNKMVQVGLLPKLTALLGNDNYKQIAMCVLYHISMDDRFKSMFAYTDCIPQLMKMLFECSDERIDLELISFCINLAANKRNVQLICEGNGLKMLMKRALKFKDPLLMKMIRNISQHDGPTKNLFIDYVGDLAAQISNDEEEEFVIECLGTLANLTIPDLDWELVLKEYKLVPYLKDKLKPGAAEDDLVLEVVIMIGTVSMDDSCAALLAKSGIIPALIELLNAQQEDDEFVCQIIYVFYQMVFHQATRDVIIKETQAPAYLIDLMHDKNNEIRKVCDNTLDIIAEYDEEWAKKIQSEKFRWHNSQWLEMVESRQMDESEQYLYGDDRIEPYIHEGDILERPDLFYNSDGLIASEGAISPDFFNDYHLQNGDVVGQHSFPGSLGMDGFGQPVGILGRPATAYGFRPDEPYYYGYGS

SEQ ID NO: 825764 - protein, 807 aa, Homo sapiens
MALIASGYGLLGPHWPFDGIPKAITRKVKGGNIDVHPSEKALIVHYEVEATILGEMGDPMLGERKECQKIIRLKSLNANTDITSLARKVVEECKLIHPSKLNEVEQLLYYLQNRRDSLSGKEKKEKSSKPKDPPPFEGMEIDEVANINDMDEYIELLYEDIPDKVRGSALILQLARNPDNLEELLLNETALGALARVLREDWKQSVELATNIIYIFFCFSSFSQFHGLITHYKIGALCMNIIDHELKRHELWQEELSKKKKAVDEDPENQTLRKDYEKTFKKYQGLVVKQEQLLRVALYLLLNLAEDTRTELKMRNKNIVHMLVKALDRDNFELLILVVSFLKKLSIFMENKNDMVEMDIVEKLVKMIPCEHEDLLNITLRLLLNLSFDTGLRNKMVQVGLLPKLTALLGNDNYKQIAMCVLYHISMDDRFKSMFAYTDCIPQLMKMLFECSDERIDLELISFCINLAANKRNVQLICEGNGLKMLMKRALKFKDPLLMKMIRNISQHDGPTKNLFIDYVGDLAAQISNDEEEEFVIECLGTLANLTIPDLDWELVLKEYKLVPYLKDKLKPGAAEDDLVLEVVIMIGTVSMDDSCAALLAKSGIIPALIELLNAQQEDDEFVCQIIYVFYQMVFHQATRDVIIKETQAPAYLIDLMHDKNNEIRKVCDNTLDIIAEYDEEWAKKIQSEKFRWHNSQWLEMVESRQMDESEQYLYGDDRIEPYIHEGDILERPDLFYNSDGLIASEGAISPDFFNDYHLQNGDVVGQHSFPGSLGMDGFGQPVGILGRPATAYGFRPDEPYYYGYGS

SEQ ID NO: 825765 - protein, 772 aa, Homo sapiens
MQGEDARYLKRKVKGGNIDVHPSEKALIVHYEVEATILGEMGDPMLGERKECQKIIRLKSLNANTDITSLARKVVEECKLIHPSKLNEVEQLLYYLQNRRDSLSGKEKKEKSSKPKDPPPFEGMEIDEVANINDMDEYIELLYEDIPDKVRGSALILQLARNPDNLEELLLNETALGALARVLREDWKQSVELATNIIYIFFCFSSFSQFHGLITHYKIGALCMNIIDHELKRHELWQEELSKKKKAVDEDPENQTLRKDYEKTFKKYQGLVVKQEQLLRVALYLLLNLAEDTRTELKMRNKNIVHMLVKALDRDNFELLILVVSFLKKLSIFMENKNDMVEMDIVEKLVKMIPCEHEDLLNITLRLLLNLSFDTGLRNKMVQVGLLPKLTALLGNDNYKQIAMCVLYHISMDDRFKSMFAYTDCIPQLMKMLFECSDERIDLELISFCINLAANKRNVQLICEGNGLKMLMKRALKFKDPLLMKMIRNISQHDGPTKNLFIDYVGDLAAQISNDEEEEFVIECLGTLANLTIPDLDWELVLKEYKLVPYLKDKLKPGAAEDDLVLEVVIMIGTVSMDDSCAALLAKSGIIPALIELLNAQQEDDEFVCQIIYVFYQMVFHQATRDVIIKETQAPAYLIDLMHDKNNEIRKVCDNTLDIIAEYDEEWAKKIQSEKFRWHNSQWLEMVESRQMDESEQYLYGDDRIEPYIHEGDILERPDLFYNSDGLIASEGAISPDFFNDYHLQNGDVVGQHSFPGSTFHPRISKCFTNTH

SEQ ID NO: 825766 - protein, 792 aa, Homo sapiens; identical to SEQ ID NO: 825763

SEQ ID NO: 825767 - protein, 792 aa, Homo sapiens; identical to SEQ ID NO: 825763

SEQ ID NO: 825768 - protein, 697 aa, Homo sapiens
MQGEDARYLKRKVKGGNIDVHPSEKALIVHYEVEATILGEMGDPMLGERKECQKIIRLKSLNANTDITSLARKVVEECKLIHPSKLNEVEQLLYYLQNRRDSLSGKEKKEKSSKPKDPPPFEGMEIDEVANINDMDEYIELLYEDIPDKVRGSALILQLARNPDNLEELLLNETALGALARVLREDWKQSVELATNIIYIFFCFSSFSQFHGLITHYKIGALCMNIIDHELKRHELWQEELSKKKKAVDEDPENQTLRKDYEKTFKKYQGLVVKQEQLLRVALYLLLNLAEDTRTELKMRNKNIVHMLVKALDRDNFELLILVVSFLKKLSIFMENKNDMVEMDIVEKLVKMIPCEHEDLLNITLRLLLNLSFDTGLRNKMVQVGLLPKLTALLGNDNYKQIAMCVLYHISMDDRFKSMFAYTDCIPQLMKMLFECSDERIDLELISFCINLAANKRNVQLICEGNGLKMLMKRALKFKDPLLMKMIRNISQHDGPTKNLFIDYVGDLAAQISNDEEEEFVIECLGTLANLTIPDLDWELVLKEYKLVPYLKDKLKPGAAEDDLVLEVVIMIGTVSMDDSCAALLAKSGIIPALIELLNAQQEDDEFVCQIIYVFYQMVFHQATRDVIIKETQAPAYLIDLMHDKNNEIRKVCDNTLDIIAEYDEEWAKKIQSEKFRWHNSQWLEMVEIIKPHLDAK

SEQ ID NO: 825769 - protein, 580 aa, Homo sapiens
RRRRCRAVARAPRHLRQFPSGPSRHFLAACVARWLRGSVLVSEALSGSAMDGIVTEVAVGVKRGSDELLSGSVLSSPNSNMSSMVVTANGNDSKKFKGEDKMDGAPSRVLHIRKLPGEVTETEVIALGLPFGKVTNILMLKGKNQAFLELATEEAAITMVNYYSAVTPHLRNQPIYIQYSNHKELKTDNTLNQRAQAVLQAVTAVQTANTPLSGTTVSESAVTPAQSPVLRIIIDNMYYPVTLDVLHQIFSKFGAVLKIITFTKNNQFQALLQYGDPVNAQQAKLALDGQNIYNACCTLRIDFSKLVNLNVKYNNDKSRDYTRPDLPSGDGQPALDPAIAAAFAKETSLLAVPGALSPLAIPNAAAAAAAAAAGRVGMPGVSAGGNTVLLVSNLNEEMVTPQSLFTLFGVYGDVQRVKILYNKKDSALIQMADGNQSQLAMNHLNGQKMYGKIIRVTLSKHQTVQLPREGLDDQGLTKDFGNSPLHRFKKPGSKNFQNIFPPSATLHLSNIPPSVAEEDLRTLFANTGGTVKAFKFFQDHKMALLQMATVEEAIQALIDLHNYNLGENHHLRVSFSKSTI

SEQ ID NO: 825770 - protein, 302 aa, Homo sapiens
MLYSLLQALDGQNIYNACCTLRIDFSKLVNLNVKYNNDKSRDYTRPDLPSGDGQPALDPAIAAAFAKETSLLAVPGALSPLAIPNAAAAAAAAAAGRVGMPGVSAGGNTVLLVSNLNEEMVTPQSLFTLFGVYGDVQRVKILYNKKDSALIQMADGNQSQLAMNHLNGQKMYGKIIRVTLSKHQTVQLPREGLDDQGLTKDFGNSPLHRFKKPGSKNFQNIFPPSATLHLSNIPPSVAEEDLRTLFANTGGTVKAFKFFQDHKMALLQMATVEEAIQALIDLHNYNLGENHHLRVSFSKSTI

SEQ ID NO: 825771 - protein, 547 aa, Homo sapiens
APPLSVGYVDDTPVRALRQRVTEGAAGVKRGSDELLSGSVLSSPNSNMSSMVVTANGNDSKKFKGEDKMDGAPSRVLHIRKLPGEVTETEVIALGLPFGKVTNILMLKGKNQAFLELATEEAAITMVNYYSAVTPHLRNQPIYIQYSNHKELKTDNTLNQRAQAVLQAVTAVQTANTPLSGTTVSESAVTPAQSPVLRIIIDNMYYPVTLDVLHQIFSKFGAVLKIITFTKNNQFQALLQYGDPVNAQQAKLALDGQNIYNACCTLRIDFSKLVNLNVKYNNDKSRDYTRPDLPSGDGQPALDPAIAAAFAKETSLLAVPGALSPLAIPNAAAAAAAAAAGRVGMPGVSAGGNTVLLVSNLNEEMVTPQSLFTLFGVYGDVQRVKILYNKKDSALIQMADGNQSQLAMNHLNGQKMYGKIIRVTLSKHQTVQLPREGLDDQGLTKDFGNSPLHRFKKPGSKNFQNIFPPSATLHLSNIPPSVAEEDLRTLFANTGGTVKAFKFFQDHKMALLQMATVEEAIQALIDLHNYNLGENHHLRVSFSKSTI

SEQ ID NO: 825772 - protein, 580 aa, Homo sapiens; identical to SEQ ID NO: 825769

SEQ ID NO: 825773 - protein, 505 aa, Homo sapiens
NQPKPEGSETSVLRGEPLTAGVPRPPSLLATLQRWGTTQPKSPCLTALDTTGKAVYTLTYGKLWSRSLKLAYTLLNKLTSKNEPLLKPGDRVALVFPNSDPVMFMVAFYGCLLAELVPVPIEVPLTRKDAGSQQVGFLLGSCGVFLALTTDACQKGLPKAQTGEVAAFKGWPPLSWLVIDGKHLAKPPKDWHPLAQDTGTGTAYIEYKTSKEGSTVGVTVSHASLLAQCRALTQACGYSEAETLTNVLDFKRDAGLWHGVLTSVMNRMHVVSVPYALMKANPLSWIQKVCFYKARAALVKSRDMHWSLLAQRGQRDVSLSSLRMLIVADGANPWSISSCDAFLNVFQSRGLRPEVICPCASSPEALTVAIRRPPDLGGPPPRKAVLSMNGLSYGVIRVDTEEKLSVLTVQDVGQVMPGANVCVVKLEGTPYLCKTDEVGEICVSSSATGTAYYGLLGITKNVFEAVPVTTGGAPIFDRPFTRTGLLGFIGPVSMSSCTSTGSQRR

SEQ ID NO: 825774 - protein, 703 aa, Homo sapiens
NQPKPEGSETSVLRGEPLTAGVPRPPSLLATLQRWGTTQPKSPCLTALDTTGKAVYTLTYGKLWSRSLKLAYTLLNKLTSKNEPLLKPGDRVALVFPNSDPVMFMVAFYGCLLAELVPVPIEVPLTRKDAGSQQVGFLLGSCGVFLALTTDACQKGLPKAQTGEVAAFKGWPPLSWLVIDGKHLAKPPKDWHPLAQDTGTGTAYIEYKTSKEGSTVGVTVSHASLLAQCRALTQACGYSEAETLTNVLDFKRDAGLWHGVLTSVMNRMHVVSVPYALMKANPLSWIQKVCFYKARAALVKSRDMHWSLLAQRGQRDVSLSSLRMLIVADGANPWSISSCDAFLNVFQSRGLRPEVICPCASSPEALTVAIRRPPDLGGPPPRKAVLSMNGLSYGVIRVDTEEKLSVLTVQDVGQVMPGANVCVVKLEGTPYLCKTDEVGEICVSSSATGTAYYGLLGITKNVFEAVPVTTGGAPIFDRPFTRTGLLGFIGPDNLVFIVGKLDGLMVTGVRRHNADDVVATALAVEPMKFVYRGRIAVFSVTVLHDDRIVLVAEQRPDASEEDSFQWMSRVLQAIDSIHQVGVYCLALVPANTLPKAPLGGIHISETKQRFLEGTLHPCNVLMCPHTCVTNLPKPRQKQPEVGPASMIVGNLVAGKRIAQASGRELAHLEDSDQARKFLFLADVLQWRAHTTPDHPLFLLLNAK

SEQ ID NO: 825775 - protein, 78 aa, Homo sapiens
MALVEWGADIKIPKNVGVTLDLGNRQSRNSFGAQASGRELAHLEDSDQARKFLFLADVLQWRAHTTPDHPLFLLLNAK

SEQ ID NO: 825776 - protein, 534 aa, Homo sapiens
NQPKPEGSETSVLRGEPLTAGVPRPPSLLATLQRWGTTQPKSPCLTALDTTGKAVYTLTYGKLWSRSLKLAYTLLNKLTSKNEPLLKPGDRVALVFPNSDPVMFMVAFYGCLLAELVPVPIEVPLTRKDAGSQQVGFLLGSCGVFLALTTDACQKGLPKAQTGEVAAFKGWPPLSWLVIDGKHLAKPPKDWHPLAQDTGTGTAYIEYKTSKEGSTVGVTVSHASLLAQCRALTQACGYSEAETLTNVLDFKRDAGLWHGVLTSVMNRMHVVSVPYALMKANPLSWIQKVCFYKARAALVKSRDMHWSLLAQRGQRDVSLSSLRMLIVADGANPWSISSCDAFLNVFQSRGLRPEVICPCASSPEALTVAIRRPPDLGGPPPRKAVLSMNGLSYGVIRVDTEEKLSVLTVQDVGQVMPGANVCVVKLEGTPYLCKTDEVGEICVSSSATGTAYYGLLGITKNVFEAVPVTTGGAPIFDRPFTRTGLLGFIGPDNLVFIVGKLDGLMVTGVRRHNADDVVATALAVEPMKFVYRGR

SEQ ID NO: 825777 - protein, 781 aa, Homo sapiens
MSSECDGGSKAVMNGLAPGSNGQDKATADPLRARSISAVKIIPVKTVKNASGLVLPTDMDPTKICTGKGAVTLRASSSYRETPSSSPASPQETRQHESKPGLEPEPSSADEWRLSSSADANGNAQPSSLAAKGYRSVHPNLPSDKSQDSSPLLNEVSSSLIGTDSQAFPSVSKPSSAYPSTTIVNPTIVLLQHNREQQKRLSSLSDPVSERRVGEQDSAPTQEKPTSPGKAIEKRAKDDSRRVVKSTQDLSDVSMDEVGIPLRNTERSKDWYKTMFKQIHKLNRDDDSDLYSPRYSFSEDTKSPLSVPRSKSEMSYIDGEKVVKRSATLPLPARSSSLKSSSERNDWEPPDKKVDTRKYRAEPKSIYEYQPGKSSVLTNEKMSSAISPTPEISSETPGYIYSSNFHAVKRESDGAPGDLTSLENERQIYKSVLEGGDIPLQGLSGLKRPSSSASTKDSESPRHFIPADYLESTEEFIRRRHDDKEKLLADQRRLKREQEEADIAARRHTGVIPTHHQFITNERFGDLLNIDDTAKRKSGSEMRPARAKFDFKAQTLKELPLQKGDIVYIYKQIDQNWYEGEHHGRVGIFPRTYIELLPPAEKAQPKKLTPVQVLEYGEAIAKFNFNGDTQVEMSFRKGERITLLRQVDENWYEGRIPGTSRQGIFPITYVDVIKRPLVKNPVDYMDLPFSSSPSRSATASPQQPQAQQRRVTPDRSQTSQDLFSYQALYSYIPQNDDELELRDGDIVDVMEKCDDGWFVGTSRRTKQFGTFPGNYVKPLYL

SEQ ID NO: 825778 - protein, 816 aa, Homo sapiens
MSSECDGGSKAVMNGLAPGSNGQDKDMDPTKICTGKGAVTLRASSSYRETPSSSPASPQETRQHESKPGLEPEPSSADEWRLSSSADANGNAQPSSLAAKGYRSVHPNLPSDKSQDATSSSAAQPEVIVVPLYLVNTDRGQEGTARPPTPLGPLGCVPTIPATASAASPLTFPTLDDFIPPHLQRWPHHSQPARASGSFAPISQTPPSFSPPPPLVPPAPEDLRRVSEPDLTGAVSSTDSSPLLNEVSSSLIGTDSQAFPSVSKPSSAYPSTTIVNPTIVLLQHNREQQKRLSSLSDPVSERRVGEQDSAPTQEKPTSPGKAIEKRAKDDSRRVVKSTQDLSDVSMDEVGIPLRNTERSKDWYKTMFKQIHKLNRDDDSDLYSPRYSFSEDTKSPLSVPRSKSEMSYIDGEKVVKRSATLPLPARSSSLKSSSERNDWEPPDKKVDTRKYRAEPKSIYEYQPGKSSVLTNEKMSSAISPTPEISSETPGYIYSSNFHAVKRESDGAPGDLTSLENERQIYKSVLEGGDIPLQGLSGLKRPSSSASTKDSESPRHFIPADYLESTEEFIRRRHDDKEMRPARAKFDFKAQTLKELPLQKGDIVYIYKQIDQNWYEGEHHGRVGIFPRTYIELLPPAEKAQPKKLTPVQVLEYGEAIAKFNFNGDTQVEMSFRKGERITLLRQVDENWYEGRIPGTSRQGIFPITYVDVIKRPLVKNPVDYMDLPFSSSPSRSATASPQQPQAQQRRVTPDRSQTSQDLFSYQALYSYIPQNDDELELRDGDIVDVMEKCDDGWFVGTSRRTKQFGTFPGNYVKPLYL

SEQ ID NO: 825779 - protein, 533 aa, Homo sapiens
MISSSSVHSRTFNTSNALGPVCKHKKPLSAAKACISEILPSKFKPRLSAPSALLQEQKSILLPSEKAQSCENLCVSGSLNDSKRGLPLQVGGSIENLLMRSRRDYDSKSSSTMSLQEYSTSGRRPCPLSRKAGMQFTMLYRDMHQINRSGLFLGSISSSSSVRDLASHFEKSSLALSRGELGPSQEGSEHIPKHTVSSRITAFEQLIQRSRSMPSLDLSGRLSKSPTPVLSRGSLTSARSAESLLESTKLHPKEMDGMNSSGVYASPTCSNMAHHALSFRGLVPSEPLSTCSDDVDRCSNISTDSREGSGGSVHGDFPKHRLNKCKGTCPASYTRFTTIRKHEQQQTSRQPEWRLDARGDKSTLLRNIYLMSPLPFRLKKPLHHHPRQPSPGDSSGLLVGQKPDLPSQPHQDQPPSGGKPVVPTRLSSRHTMARLSRSSEPSQERPTALEDYPRAINNGNSVPYSDHSLDRNNNPQSELAPSRGGGILCVCLVSPARPSTLLALSRPPLCPWCSFSGLSFVFCLFCLAINHGS

SEQ ID NO: 825780 - protein, 851 aa, Homo sapiens
CCSDLEDPDGGRRPGLVSRTAGTGKPPPAPPPDPPKLFFDIRKDAVNRGESPSLGTQASFPDVRPPVLGPRVTSDPENRKSKESYLLQPSYPAKDATSSSAAQPEVIVVPLYLVNTDRGQEGTARPPTPLGPLGCVPTIPATASAASPLTFPTLDDFIPPHLQRWPHHSQPARASGSFAPISQTPPSFSPPPPLVPPAPEDLRRVSEPDLTGAVSSTDSSPLLNEVSSSLIGTDSQAFPSVSKPSSAYPSTTIVNPTIVLLQHNREQQKRLSSLSDPVSERRVGEQDSAPTQEKPTSPGKAIEKRAKDDSRRVVKSTQDLSDVSMDEVGIPLRNTERSKDWYKTMFKQIHKLNRDDDSDLYSPRYSFSEDTKSPLSVPRSKSEMSYIDGEKVVKRSATLPLPARSSSLKSSSERNDWEPPDKKVDTRKYRAEPKSIYEYQPGKSSVLTNEKMSSAISPTPEISSETPGYIYSSNFHAVKRESDGAPGDLTSLENERQIYKSVLEGGDIPLQGLSGLKRPSSSASTKDSESPRHFIPADYLESTEEFIRRRHDDKEKLLADQRRLKREQEEADIAARRHTGVIPTHHQFITNERFGDLLNIDDTAKRKSGSEMRPARAKFDFKAQTLKELPLQKGDIVYIYKQIDQNWYEGEHHGRVGIFPRTYIELLPPAEKAQPKKLTPVQVLEYGEAIAKFNFNGDTQVEMSFRKGERITLLRQVDENWYEGRIPGTSRQGIFPITYVDVIKRPLVKNPVDYMDLPFSSSPSRSATASPQQPQAQQRRVTPDRSQTSQDLFSYQALYSYIPQNDDELELRDGDIVDVMEKCDDGWFVGTSRRTKQFGTFPGNYVKPLYL

SEQ ID NO: 825781 - protein, 1161 aa, Homo sapiens
EEASFMNRSLQTTCPATTMSSECDGGSKAVMNGLAPGSNGQDKATADPLRARSISAVKIIPVKTVKNASGLVLPTDMDPTKICTGKGAVTLRASSSYRETPSSSPASPQETRQHESKPGLEPEPSSADEWRLSSSADANGNAQPSSLAAKGYRSVHPNLPSDKSQVLSPPRPPLPQKDRFAWQSPTIHNTYKDSLYLSSPKPYVPLGTPRQQNPSQPQPISVLLAAGSAPKGVVCPGSLLPDSTFPSASSQPQQRYAATRTVYHKNVSSNPCHEAVGIKKVSSLYVPCLSNNICLAASENSSRVARDPAEGTPLEAAGTRAPAPGLVSRTAGTGKPPPAPPPDPPKLFFDIRKDAVNRGESPSLGTQASFPDVRPPVLGPRVTSDPENRKSKESYLLQPSYPAKDATSSSAAQPEVIVVPLYLVNTDRGQEGTARPPTPLGPLGCVPTIPATASAASPLTFPTLDDFIPPHLQRWPHHSQPARASGSFAPISQTPPSFSPPPPLVPPAPEDLRRVSEPDLTGAVSSTDSSPLLNEVSSSLIGTDSQAFPSVSKPSSAYPSTTIVNPTIVLLQHNREQQKRLSSLSDPVSERRVGEQDSAPTQEKPTSPGKAIEKRAKDDSRRVVKSTQDLSDVSMDEVGIPLRNTERSKDWYKTMFKQIHKLNRDDDSDLYSPRYSFSEDTKSPLSVPRSKSEMSYIDGEKVVKRSATLPLPARSSSLKSSSERNDWEPPDKKVDTRKYRAEPKSIYEYQPGKSSVLTNEKMSSAISPTPEISSETPGYIYSSNFHAVKRESDGAPGDLTSLENERQIYKSVLEGGDIPLQGLSGLKRPSSSASTKDSESPRHFIPADYLESTEEFIRRRHDDKEKLLADQRRLKREQEEADIAARRHTGVIPTHHQFITNERFGDLLNIDDTAKRKSGSEMRPARAKFDFKAQTLKELPLQKGDIVYIYKQIDQNWYEGEHHGRVGIFPRTYIELLPPAEKAQPKKLTPVQVLEYGEAIAKFNFNGDTQVEMSFRKGERITLLRQVDENWYEGRIPGTSRQGIFPITYVDVIKRPLVKNPVDYMDLPFSSSPSRSATASPQQPQAQQRRVTPDRSQTSQDLFSYQALYSYIPQNDDELELRDGDIVDVMEKCDDGWFVGTSRRTKQFGTFPGNYVKPLYL

SEQ ID NO: 825782 - protein, 1161 aa, Homo sapiens; identical to SEQ ID NO: 825781

SEQ ID NO: 825783 - protein, 1161 aa, Homo sapiens; identical to SEQ ID NO: 825781

SEQ ID NO: 825784 - protein, 590 aa, Homo sapiens
EEASFMNRSLQTTCPATTMSSECDGGSKAVMNGLAPGSNGQDKATADPLRARSISAVKIIPVKTVKNASGLVLPTDMDPTKICTGKGAVTLRASSSYRETPSSSPASPQETRQHESKPGLEPEPSSADEWRLSSSADANGNAQPSSLAAKGYRSVHPNLPSDKSQVLSPPRPPLPQKDRFAWQSPTIHNTYKDSLYLSSPKPYVPLGTPRQQNPSQPQPISVLLAAGSAPKGVVCPGSLLPDSTFPSASSQPQQRYAATRTVYHKNVSSNPCHEAVGIKKVSSLYVPCLSNNICLAASENSSRVARDPAEGTPLEAAGTRAPAPGLVSRTAGTGKPPPAPPPDPPKLFFDIRKDAVNRGESPSLGTQASFPDVRPPVLGPRVTSDPENRKSKESYLLQPSYPAKDATSSSAAQPEVIVVPLYLVNTDRGQEGTARPPTPLGPLGCVPTIPATASAASPLTFPTLDDFIPPHLQRWPHHSQPARASGSFAPISQTPPSFSPPPPLVPPAPEDLRRVSEPDLTGAVSSTDSSPLLNEVSSSLIGTDSQAFPSVSKPSSAYPSTTIVNPTIVLLQHNRGKRGLCPTPSPLEST

SEQ ID NO: 825785 - protein, 799 aa, Homo sapiens
EEASFMNRSLQTTCPATTMSSECDGGSKAVMNGLAPGSNGQDKATADPLRARSISAVKIIPVKTVKNASGLVLPTDMDPTKICTGKGAVTLRASSSYRETPSSSPASPQETRQHESKPGLEPEPSSADEWRLSSSADANGNAQPSSLAAKGYRSVHPNLPSDKSQVLSPPRPPLPQKDRFAWQSPTIHNTYKDSLYLSSPKPYVPLGTPRQQNPSQPQPISVLLAAGSAPKGVVCPGSLLPDSTFPSASSQPQQRYAATRTVYHKNVSSNPCHEAVGIKKVSSLYVPCLSNNICLAASENSSRVARDPAEGTPLEAAGTRAPAPGLVSRTAGTGKPPPAPPPDPPKLFFDIRKDAVNRGESPSLGTQASFPDVRPPVLGPRVTSDPENRKSKESYLLQPSYPAKDATSSSAAQPEVIVVPLYLVNTDRGQEGTARPPTPLGPLGCVPTIPATASAASPLTFPTLDDFIPPHLQRWPHHSQPARASGSFAPISQTPPSFSPPPPLVPPAPEDLRRVSEPDLTGAVSSTDSSPLLNEVSSSLIGTDSQAFPSVSKPSSAYPSTTIVNPTIVLLQHNREQQKRLSSLSDPVSERRVGEQDSAPTQEKPTSPGKAIEKRAKDDSRRVVKSTQDLSDVSMDEVGIPLRNTERSKDWYKTMFKQIHKLNRDDDSDLYSPRYSFSEDTKSPLSVPRSKSEMSYIDGEKVVKRSATLPLPARSSSLKSSSERNDWEPPDKKVDTRKYRAEPKSIYEYQPGKSSVLTNEKMVMCILKLFCLTVPMFFNQNALCSWITFFPLEIDLTLF

SEQ ID NO: 825786 - protein, 838 aa, Homo sapiens
EEASFMNRSLQTTCPATTMSSECDGGSKAVMNGLAPGSNGQDKATADPLRARSISAVKIIPVKTVKNASGLVLPTDMDPTKICTGKGAVTLRASSSYRETPSSSPASPQETRQHESKPGLEPEPSSADEWRLSSSADANGNAQPSSLAAKGYRSVHPNLPSDKSQVLSPPRPPLPQKDRFAWQSPTIHNTYKDSLYLSSPKPYVPLGTPRQQNPSQPQPISVLLAAGSAPKGVVCPGSLLPDSTFPSASSQPQQRYAATRTVYHKNVSSNPCHEAVGIKKVSSLYVPCLSNNICLAASENSSRVARDPAEGTPLEAAGTRAPAPGLVSRTAGTGKPPPAPPPDPPKLFFDIRKDAVNRGESPSLGTQASFPDVRPPVLGPRVTSDPENRKSKESYLLQPSYPAKDATSSSAAQPEVIVVPLYLVNTDRGQEGTARPPTPLGPLGCVPTIPATASAASPLTFPTLDDFIPPHLQRWPHHSQPARASGSFAPISQTPPSFSPPPPLVPPAPEDLRRVSEPDLTGAVSSTDSSPLLNEVSSSLIGTDSQAFPSVSKPSSAYPSTTIVNPTIVLLQHNREQQKRLSSLSDPVSERRVGEQDSAPTQEKPTSPGKAIEKRAKDDSRRVVKSTQDLSDVSMDEVGIPLRNTERSKDWYKTMFKQIHKLNRDDDSDLYSPRYSFSEDTKSPLSVPRSKSEMSYIDGEKVVKRSATLPLPARSSSLKSSSERNDWEPPDKKVDTRKYRAEPKSIYEYQPGKSSVLTNEKMSSAISPTPEISSETPGYIYSSNFHAVKRESDGAPGDLTSLENERQIYKSVLEGGDIPLQGLSGLKRPSSSASTKGN

SEQ ID NO: 825787 - protein, 554 aa, Homo sapiens
EEASFMNRSLQTTCPATTMSSECDGGSKAVMNGLAPGSNGQDKATADPLRARSISAVKIIPVKTVKNASGLVLPTDMDPTKICTGKGAVTLRASSSYRETPSSSPASPQETRQHESKPGLEPEPSSADEWRLSSSADANGNAQPSSLAAKGYRSVHPNLPSDKSQVLSPPRPPLPQKDRFAWQSPTIHNTYKDSLYLSSPKPYVPLGTPRQQNPSQPQPISVLLAAGSAPKGVVCPGSLLPDSTFPSASSQPQQRYAATRTVYHKNVSSNPCHEAVGIKKVSSLYVPCLSNNICLAASENSSRVARDPAEGTPLEAAGTRAPAPGLVSRTAGTGKPPPAPPPDPPKLFFDIRKDAVNRGESPSLGTQASFPDVRPPVLGPRVTSDPENRKSKESYLLQPSYPAKDATSSSAAQPEVIVVPLYLVNTDRGQEGTARPPTPLGPLGCVPTIPATASAASPLTFPTLDDFIPPHLQRWPHHSQPARASGSFAPISQTPPSFSPPPPLVPPAPEDLRRVSEPDLTGAVSSTVSLLDSPPHGFSECLLPAVTFPFSLKH

SEQ ID NO: 825788 - protein, 35 aa, Homo sapiens
MGESNGRRGGCYLPGSGEISGRKRFSDSLVDLVSK

SEQ ID NO: 825789 - protein, 265 aa, Homo sapiens
MSSECDGGSKAVMNGLAPGSNGQDKDMDPTKICTGKGAVTLRASSSYRETPSSSPASPQETRQHESKPGLEPEPSSADEWRLSSSADANGNAQPSSLAAKGYRSVHPNLPSDKSQDATSSSAAQPEVIVVPLYLVNTDRGQEGTARPPTPLGPLGCVPTIPATASAASPLTFPTLDDFIPPHLQRWPHHSQPARASGSFAPISQTPPSFSPPPPLVPPAPEDLRRVSEPDLTGAVSSTVSLLDSPPHGFSECLLPAVTFPFSLKH

SEQ ID NO: 825790 - protein, 1161 aa, Homo sapiens; identical to SEQ ID NO: 825781

SEQ ID NO: 825791 - protein, 1038 aa, Homo sapiens
EEASFMNRSLQTTCPATTMSSECDGGSKAVMNGLAPGSNGQDKATADPLRARSISAVKIIPVKTVKNASGLVLPTDMDPTKICTGKGAVTLRASSSYRETPSSSPASPQETRQHESKPGLEPEPSSADEWRLSSSADANGNAQPSSLAAKGYRSVHPNLPSDKSQVLSPPRPPLPQKDRFAWQSPTIHNTYKDSLYLSSPKPYVPLGTPRQQNPSQPQPISVLLAAGSAPKGVVCPGSLLPDSTFPSASSQPQQRYAATRTVYHKNVSSNPCHEAVGIKKVSSLYVPCLSNNICLAASENSSRVARDPAEGTPLEAAGTRAPAPGLVSRTAGTGKPPPAPPPDPPKLFFDIRKDAVNRGESPSLGTQASFPDVRPPVLGPRVTSDPENRKSKESYLLQPSYPAKDSSPLLNEVSSSLIGTDSQAFPSVSKPSSAYPSTTIVNPTIVLLQHNREQQKRLSSLSDPVSERRVGEQDSAPTQEKPTSPGKAIEKRAKDDSRRVVKSTQDLSDVSMDEVGIPLRNTERSKDWYKTMFKQIHKLNRDDDSDLYSPRYSFSEDTKSPLSVPRSKSEMSYIDGEKVVKRSATLPLPARSSSLKSSSERNDWEPPDKKVDTRKYRAEPKSIYEYQPGKSSVLTNEKMSSAISPTPEISSETPGYIYSSNFHAVKRESDGAPGDLTSLENERQIYKSVLEGGDIPLQGLSGLKRPSSSASTKDSESPRHFIPADYLESTEEFIRRRHDDKEKLLADQRRLKREQEEADIAARRHTGVIPTHHQFITNERFGDLLNIDDTAKRKSGSEMRPARAKFDFKAQTLKELPLQKGDIVYIYKQIDQNWYEGEHHGRVGIFPRTYIELLPPAEKAQPKKLTPVQVLEYGEAIAKFNFNGDTQVEMSFRKGERITLLRQVDENWYEGRIPGTSRQGIFPITYVDVIKRPLVKNPVDYMDLPFSSSPSRSATASPQQPQAQQRRVTPDRSQTSQDLFSYQALYSYIPQNDDELELRDGDIVDVMEKCDDGWFVGTSRRTKQFGTFPGNYVKPLYL

SEQ ID NO: 825792 - protein, 1161 aa, Homo sapiens; identical to SEQ ID NO: 825781

SEQ ID NO: 825793 - protein, 1161 aa, Homo sapiens; identical to SEQ ID NO: 825781

SEQ ID NO: 825794 - protein, 928 aa, Homo sapiens
EEASFMNRSLQTTCPATTMSSECDGGSKAVMNGLAPGSNGQDKATADPLRARSISAVKIIPVKTVKNASGLVLPTDMDPTKICTGKGAVTLRASSSYRETPSSSPASPQETRQHESKPGLEPEPSSADEWRLSSSADANGNAQPSSLAAKGYRSVHPNLPSDKSQVLSPPRPPLPQKDRFAWQSPTIHNTYKDSLYLSSPKPYVPLGTPRQQNPSQPQPISVLLAAGSAPKGVVCPGSLLPDSTFPSASSQPQQRYAATRTVYHKNVSSNPCHEAVGIKKVSSLYVPCLSNNICLAASENSSRVARDPAEGTPLEAAGTRAPAPGLVSRTAGTGKPPPAPPPDPPKLFFDIRKDAVNRGESPSLGTQASFPDVRPPVLGPRVTSDPENRKSKESYLLQPSYPAKDATSSSAAQPEVIVVPLYLVNTDRGQEGTARPPTPLGPLGCVPTIPATASAASPLTFPTLDDFIPPHLQRWPHHSQPARASGSFAPISQTPPSFSPPPPLVPPAPEDLRRVSEPDLTGAVSSTDSSPLLNEVSSSLIGTDSQAFPSVSKPSSAYPSTTIVNPTIVLLQHNREQQKRLSSLSDPVSERRVGEQDSAPTQEKPTSPGKAIEKRAKDDSRRVVKSTQDLSDVSMDEVGIPLRNTERSKDWYKTMFKQIHKLNRDDDSDLYSPRYSFSEDTKSPLSVPRSKSEMSYIDGEKVVKRSATLPLPARSSSLKSSSERNDWEPPDKKVDTRKYRAEPKSIYEYQPGKSSVLTNEKMSSAISPTPEISSETPGYIYSSNFHAVKRESDGAPGDLTSLENERQIYKSVLEGGDIPLQGLSGLKRPSSSASTKDSESPRHFIPADYLESTEEFIRRRHDDKEKLLADQRRLKREQEEADIAARRHTGVIPTHHQFITNERFGDLLNIDDTAKRKSGSEKKKKKKK

SEQ ID NO: 825795 - protein, 805 aa, Homo sapiens
EEASFMNRSLQTTCPATTMSSECDGGSKAVMNGLAPGSNGQDKATADPLRARSISAVKIIPVKTVKNASGLVLPTDMDPTKICTGKGAVTLRASSSYRETPSSSPASPQETRQHESKPGLEPEPSSADEWRLSSSADANGNAQPSSLAAKGYRSVHPNLPSDKSQVLSPPRPPLPQKDRFAWQSPTIHNTYKDSLYLSSPKPYVPLGTPRQQNPSQPQPISVLLAAGSAPKGVVCPGSLLPDSTFPSASSQPQQRYAATRTVYHKNVSSNPCHEAVGIKKVSSLYVPCLSNNICLAASENSSRVARDPAEGTPLEAAGTRAPAPGLVSRTAGTGKPPPAPPPDPPKLFFDIRKDAVNRGESPSLGTQASFPDVRPPVLGPRVTSDPENRKSKESYLLQPSYPAKDATSSSAAQPEVIVVPLYLVNTDRGQEGTARPPTPLGPLGCVPTIPATASAASPLTFPTLDDFIPPHLQRWPHHSQPARASGSFAPISQTPPSFSPPPPLVPPAPEDLRRVSEPDLTGAVSSTDSSPLLNEVSSSLIGTDSQAFPSVSKPSSAYPSTTIVNPTIVLLQHNREQQKRLSSLSDPVSERRVGEQDSAPTQEKPTSPGKAIEKRAKDDSRRVVKSTQDLSDVSMDEVGIPLRNTERSKDWYKTMFKQIHKLNRDDDSDLYSPRYSFSEDTKSPLSVPRSKSEMSYIDGEKVVKRSATLPLPARSSSLKSSSERNDWEPPDKKVDTRKYRAEPKSIYEYQPGKSSVLTNEKMSSAISPTPEISSETPGYIYSSNFHAVKRVSIYGERKKWQRVEE

SEQ ID NO: 825796 - protein, 554 aa, Homo sapiens; identical to SEQ ID NO: 825787

SEQ ID NO: 825797 - protein, 444 aa, Homo sapiens
EEASFMNRSLQTTCPATTMSSECDGGSKAVMNGLAPGSNGQDKATADPLRARSISAVKIIPVKTVKNASGLVLPTDMDPTKICTGKGAVTLRASSSYRETPSSSPASPQETRQHESKPGLEPEPSSADEWRLSSSADANGNAQPSSLAAKGYRSVHPNLPSDKSQVLSPPRPPLPQKDRFAWQSPTIHNTYKDSLYLSSPKPYVPLGTPRQQNPSQPQPISVLLAAGSAPKGVVCPGSLLPDSTFPSASSQPQQRYAATRTVYHKNVSSNPCHEAVGIKKVSSLYVPCLSNNICLAASENSSRVARDPAEGTPLEAAGTRAPAPGLVSRTAGTGKPPPAPPPDPPKLFFDIRKDAVNRGESPSLGTQASFPDVRPPVLGPRVTSDPENRKSKESYLLQPSYPAKDATSSSAAQPEVIVVPLYLVNTDRGQEGRAVAGIVGTQPR

SEQ ID NO: 825798 - protein, 104 aa, Homo sapiens
MAGKAHRLSAEERDQLLPNLRAVGWNELEGRDAIFKQFHFKDFNRAFGFMTRVALQAEKLDHHPEWFNVYNKVHITLSTHECAGLSERDINLASFIEQVAVSMT

SEQ ID NO: 825799 - protein, 104 aa, Homo sapiens; identical to SEQ ID NO: 825798

SEQ ID NO: 825800 - protein, 104 aa, Homo sapiens; identical to SEQ ID NO: 825798

SEQ ID NO: 825801 - protein, 104 aa, Homo sapiens
MAGKAHRLSAEERDQLLPNLRAVGWNELEGRDAIFKQFHFKDFNRAFGFMTRVALQAEKLDHHPEWFNVYNKVSRLQASGVQQYHLLSWFSSLPTTDLGTCQPP

SEQ ID NO: 825802 - protein, 104 aa, Homo sapiens; identical to SEQ ID NO: 825798

SEQ ID NO: 825803 - protein, 239 aa, Homo sapiens
GGGAYDLPGPGKTVVEESTDLVPLVARFCFILGWEREGGRVCALVCVPVRCPFPLALWVRGLPGTHALRRYAGPRASPRAGLRPVPGHGGLVALEQPSSRELPPPTPGAGAGAGPLLCCKLASFIRPFLVHRPSEQAGKAHRLSAEERDQLLPNLRAVGWNELEGRDAIFKQFHFKDFNRAFGFMTRVALQAEKLDHHPEWFNVYNKVHITLSTHECAGLSERDINLASFIEQVAVSMT

SEQ ID NO: 825804 - protein, 380 aa, Homo sapiens
MLVIPPGLSEEEEALQKKFNKLKKKKKALLALKKQSSSSTTSQGGVKRSLSEQPVMDTATATEQAKQLVKSGAISAIKAETKNSGFKRSRTLEGKLKDPEKGPVPTFQPFQRSISADDDLQESSRRPQRKSLYESFVSSSDRLRELGPDGEEAEGPGAGDGPPRSFDWGYEERSGAHSSASPPRSRSRDRSHERNRDRDRDRERDRDRDRDRDRERDRDRDRDRDRDRERDRDRERDRDRDREGPFRRSDSFPERRAPRKGNTLYVYGEDMTPTLLRGAFSPFGNIIDLSMDPPRNCAFVTYEKMESADQAVAELNGTQVESVQLKVNIARKQPMLDAATGKSVWGSLAVQNSPKGCHRDKRTQIVYSDDVYKENLVDGF

SEQ ID NO: 825805 - protein, 380 aa, Homo sapiens; identical to SEQ ID NO: 825804

SEQ ID NO: 825806 - protein, 380 aa, Homo sapiens; identical to SEQ ID NO: 825804

SEQ ID NO: 825807 - protein, 336 aa, Homo sapiens
MLVIPPGLSEEEEALQKKFNKLKKKKKALLALKKQSSSSTTSQGGVKRSLSEQPVMDTATATEQAKQLVKSGAISAIKAETKNSGFKRSRTLEGKLKDPEKGPVPTFQPFQRSISADDDLQESSRRPQRKSLYESFVSSSDRLRELGPDGEEAEGPGAGDGPPRSFDWGYEERSGAHSSASPPRSRSRDRSHERNRDRDRDRERDRDRDRDRDRERDRDRDRDRDRDRERDRDRERDRDRDREGPFRRSDSFPERRAPRKGNTLYVYGEDMTPTLLRGAFSPFGNIIDLSMDPPRNCAFVTYEKMESADQAVAEVGTSQICSSHRFCCSHVFSSKY

SEQ ID NO: 825808 - protein, 437 aa, Homo sapiens
MLVIPPGLSEEEEALQKKFNKLKKKKKALLALKKQSSSSTTSQGGVKRSLSEQPVMDTATATEQAKQLVKSGAISAIKAETKNSGFKRSRTLEGKLKDPEKGPVPTFQPFQRSISADDDLQESSRRPQRKSLYERLESRDKAGPIWWSGLPESLGGLGCRSWAIEGILSLHRVCGEKVKPPFDLQSASPQLCFVSSSDRLRELGPDGEEAEGPGAGDGPPRSFDWGYEERSGAHSSASPPRSRSRDRSHERNRDRDRDRERDRDRDRDRDRERDRDRDRDRDRDRERDRDRERDRDRDREGPFRRSDSFPERRAPRKGNTLYVYGEDMTPTLLRGAFSPFGNIIDLSMDPPRNCAFVTYEKMESADQAVAELNGTQVESVQLKVNIARKQPMLDAATGKSVWGSLAVQNSPKGCHRDKRTQIVYSDDVYKENLVDGF

SEQ ID NO: 825809 - protein, 220 aa, Homo sapiens
MLVIPPGLSEEEEALQKKFNKLKKKKKALLALKKQSSSSTTSQGGVKRSLSEQPVMDTATATEQAKQLVKSGAISAIKAETKNSGFKRSRTLEGKLKDPEKGPVPTFQPFQRSISADDDLQESSRRPQRKSLYESFVSSSDRLRELGPDGEEAEGPGAGDGPPRSFDWGYEERSGAHSSASPPRSRSRDRSHERNRDRDRDRAGSRPRPRGSFPQVGFIP

SEQ ID NO: 825810 - protein, 380 aa, Homo sapiens
MLVIPPGLSEEEEALQKKFNKLKKKKKALLALKKQSSSSTTSQGGVKRSLSEQPVMDTATATEQAKQLVKSGAISAIKAETKNSGFKRSRTLEGKLKDPEKGPVPTFQPFQRSISADDDLQESSRRPQRKSLYESFVSSSDRLRELGPDGEEAEGPGAGDGPPRSFDWGYEERSGAHSSASPPRSRSRDRSHERNRDRDRDRERDRDRDRDSERFWLEVKVTLTEVYGVLLSEMWHGLCLVTMICAPRSDSFPERRAPRKGNTLYVYGEDMTPTLLRGAFSPFGNIIDLSMDPPRNCAFVTYEKMESADQAVAELNGTQVESVQLKVNIARKQPMLDAATGKSVWGSLAVQNSPKGCHRDKRTQIVYSDDVYKENLVDGF

SEQ ID NO: 825811 - protein, 140 aa, Homo sapiens
MLVIPPGLSEEEEALQKKFNKLKKKKKALLALKKQSSSSTTSQGGVKRSLSEQPVMDTATATEQAKQLVKSGAISAIKAETKNSGFKRSRTLEGKLKDPEKGPVPTFQPFQRSISADDDLQESSRRPQRKSLYESCPEQP

SEQ ID NO: 825812 - protein, 346 aa, Homo sapiens
ARGVAAPSGATMLVIPPGLSEEEEALQKKFNKLKKKKKALLALKKQSSSSTTSQGGVKRSLSEQPVMDTATATEQAKQLVKSGAISAIKAETKNSGFKRSRTLEGKLKDPEKGPVPTFQPFQRSISADDDLQESSRRPQRKSLYESFVSSSDRLRELGPDGEEAEGPGAGDGPPRSFDWGYEERSGAHSSASPPRSRSRDRSHERNRDRDRDRGSDSFPERRAPRKGNTLYVYGEDMTPTLLRGAFSPFGNIIDLSMDPPRNCAFVTYEKMESADQAVAELNGTQVESVQLKVNIARKQPMLDAATGKSVWGSLAVQNSPKGCHRDKRTQIVYSDDVYKENLVDGF

SEQ ID NO: 825813 - protein, 380 aa, Homo sapiens; identical to SEQ ID NO: 825804

SEQ ID NO: 825814 - protein, 380 aa, Homo sapiens; identical to SEQ ID NO: 825804

SEQ ID NO: 825815 - protein, 337 aa, Homo sapiens
MLVIPPGLSEEEEALQKKFNKLKKKKKALLALKKQSSSSTTSQGGVKRSLSEQPVMDTATATEQAKQLVKSGAISAIKAETKNSGFKRSRTLEGKLKDPEKGPVPTFQPFQRSISADDDLQESSRRPQRKSLYESFVSSSDRLRELGPDGEEAEGPGAGDGPPRSFDWGYEERSGAHSSASPPRSRSRDRSHERNRDRDRDRERDRDRDRDRDRERDRDRDRDRDRDRERDRDRERDRDRDREGPFRRSDSFPERRAPRKGNTLYVYGEDMTPTLLRGAFSPFGNIIDLSMDPPRNCAFVTYEKMESADQAVAEVGTSQICSSHRFCMFSCCSPQNT

SEQ ID NO: 825816 - protein, 437 aa, Homo sapiens; identical to SEQ ID NO: 825808

SEQ ID NO: 825817 - protein, 213 aa, Homo sapiens
MLVIPPGLSEEEEALQKKFNKLKKKKKALLALKKQSSSSTTSQGGVKRSLSEQPVMDTATATEQAKQLVKSGAISAIKAETKNSGFKRSRTLEGKLKDPEKGPVPTFQPFQRSISADDDLQESSRRPQRKSLYESFVSSSDRLRELGPDGEEAEGPGAGDGPPRSFDWGYEERSGAHSSASPPRSRSRDRSHERNRDRDRDRERDRDRDRDSE

SEQ ID NO: 825818 - protein, 260 aa, Homo sapiens
MPDPLFSAVQGKDEILHKALCFCPWLGKGGMEPLRLLILLFVTELSGAHNTTVFQGVAGQSLQVSCPYDSMKHWGRRKAWCRQLGEKGPCQRVVSTHNLWLLSFLRRWNGSTAITDDTLGGTLTITLRNLQPHDAGLYQCQSLHGSEADTLRKVLVEVLADPLDHRDAGDLWFPGESESFEDAHVEHSISRSLLEGEIPFPPTSILLLLACIFLIKILAASALWAAAWHGQKPGTHPPSELDCGHDPGYQLQTLPGLRDT

SEQ ID NO: 825819 - protein, 276 aa, Homo sapiens
MPDPLFSAVQGKDEILHKALCFCPWLGKGGMEPLRLLILLFVTELSGAHNTTVFQGVAGQSLQVSCPYDSMKHWGRRKAWCRQLGEKGPCQRVVSTHNLWLLSFLRRWNGSTAITDDTLGGTLTITLRNLQPHDAGLYQCQSLHGSEADTLRKVLVEVLADPLDHRDAGDLWFPGESESFEDAHVEHSISRPSQGSHLPSCLSKEPLSLLEGEIPFPPTSILLLLACIFLIKILAASALWAAAWHGQKPGTHPPSELDCGHDPGYQLQTLPGLRDT

SEQ ID NO: 825820 - protein, 249 aa, Homo sapiens
MPDPLFSAVQGKDEILHKALCFCPWLGKGGMEPLRLLILLFVTELSGAHNTTVFQGVAGQSLQVSCPYDSMKHWGRRKAWCRQLGEKGPCQRVVSTHNLWLLSFLRRWNGSTAITDDTLGGTLTITLRNLQPHDAGLYQCQSLHGSEADTLRKVLVEVLADPLDHRDAGDLWFPGESESFEDAHVEHSISRAERHVKEDDGRKSPGEVPPGTSPACILATWPPGLLVLLWQETTLPEHCFSWTLEAGTG

SEQ ID NO: 825821 - protein, 116 aa, Homo sapiens
MDRSQGHIHPVNWTVAMTQGISSKLCQVGLESTAIKGGLGRDGRRCREGPHESLDYCRAERHVKEDDGRKSPGEVPPGTSPACILATWPPGLLVLLWQETTLPEHCFSWTLEAGTG

SEQ ID NO: 825822 - protein, 120 aa, Homo sapiens
WIRTPAIIYSVHTMTTLIPILSTFLFEDFSKASGFKGQRPETSLLQVRQDLPSPSDFYSTPLQPGGQSGFLPSGAPAQQMLLPMVDSQLPVVNFGSLPPAPPPDVDTRAYFTSATIIIAS

SEQ ID NO: 825823 - protein, 2212 aa, Homo sapiens
EPARFELQVLRCELLTQGRAANSGAELLTQARAAKGKDGKKYSSLNLFDTYKGKSLEIQKPAVAPRHGLQSLGKVAIARRMPPPANLPSLKAENKGNDPNVSLVPKDGTGWASKQEQSDPKSSDASTAQPPESQPLPASQTPASNQPKRPPAAPENTPLVPSGVKSWAQASVTHGAHGDGGRASSLLSRFSREEFPTLQAAGDQDKAAKERESAEQSSGPGPSLRPQNSTTWRDGGGRGPDELEGPDSKLHHGHDPRGGLQPSGPPQFPPYRGMMPPFMYPPYLPFPPPYGPQGPYRYPTPDGPRRAIQVWVCGWGQGKLIGGGDGFLARRLSLDQSRMWLYNMPYFIFFFVYSRFPRVAGPRGSGPPMRLVEPVGRPSILKEDNLKEFDQLDQENDDGWAGAHEEVDYTEKLKFSDEEDGRDSDEEGAEGHRDSQSASGEERPPEADGKKGNSPNSEPPTPKTAWAETSRPPETEPGPPAPKPPLPPPHRGPAGNWGPPGDYPDRGGPPCKPPAPEDEDEAWRQRRKQSSSEISLAVERARRRREEEERRMQEERRAACAEKLKRLDEKFGAPDKRLKAEPAAPPAAPSTPAPPPAVPKELPAPPAPPPASAPTPEKEPEEPAQAPPAQSTPTPGVAAAPTLWNHNCPQKRVLNHQKRFLLLPHPQFQRWNPRVMGLVPPASPLVRAWATPNIRSRCLLVSSGSSSEQLLKQQQQHQWQQHQQGSAPPTPVPPSPPQPVTLGAVPAPQAPPPPPKALYPGALGRPPPMPPMNFDPRWMMIPPYVDPRLLQGRPPLDFYPPGVHPSGLVPRERSDSGGSSSEPFDRHAPAMLRERGTPPVDPKLAWVGDVFTATPAEPRPLTSPLRQAADEDDKGMRSETPPVPPPPPYLASYPGFPENGAPGPPISRFPLEEPGPRPLPWPPGSDEVAKIQTPPPKKEPPKEETAQLTGPEAGRKPARGVGSGGQGPPPPRRESRTETRWGPRPGSSRRGIPPEEPGAPPRRAGPIKKPPPPTKVEELPPKPLEQGDETPKPPKPDPLKITKGKLGGPKETPPNGNLSPAPRLRRDYSYERVGPTSCRGRGRGEYFARGRGFRGTYGGRGRGARSREFRSYREFRGDDGRGGGTGGPNHPPAPRGRTASETRSEGSEYEEIPKRRRQRGSETGSETHESDLAPSDKEAPTPKEGTLTQVPLAPPPPGAPPSPAPARFTARGGRVFTPRGVPSRRGRGGGRPPPQVCPGWSPPAKSLAPKKPPTGPLPPSKEPLKEKLIPGPLSPVARGGSNGGSNVGMEDGERPRRRRHGRAQQQDKPPRFRRLKQERENAARGSEGKPSLTLPASAPGPEEALTTVTVAPAPRRAAAKSPDLSNQNSDQANEEWETASESSDFTSERRGDKEAPPPVLLTPKAVGTPGGGGGGAVPGISAMSRGDLSQRAKDLSKRSFSSQRPGMERQNRRPGPGGKAGSSGSSSGGGGGGPGGRTGPGRGDKRSWPSPKNRSRPPEERPPGLPLPPPPPSSSAVFRLDQVIHSNPAGIQQALAQLSSRQGSVTAPGGHPRHKPGPPQAPQGPSPRPPTRYEPQRVNSGLSSDPHFEEPGPMVRGVGGTPRDSAGVSPFPPKRRERPPRKPELLQEESLPPPHSSGFLGSKPEGPGPQAESRDTGTEALTPHIWNRLHTATSRKSYRPSSMEPWMEPLSPFEDVAGTEMSQSDSGVDLSGDSQVSSGPCSQRSSPDGGLKGAAEGPPKRPGGSSPLNAVPCEGPPGSEPPRRPPPAPHDGDRKELPREQPLPPGPIGTERSQRTDRGTEPGPIRPSHRPGPPVQFGTSDKDSDLRLVVGDSLKAEKELTASVTEAIPVSRDWELLPSAAASAEPQSKNLDSGHCVPEPSSSGQRLYPEVFYGSAGPSSSQISGGAMDSQLHPNSGGFRPGTPSLHPYRSQPLYLPPGPAPPSALLSGVALKGQFLDFSTMQATELGKLPAGGVLYPPPSFLYSPAFCPSPLPDTSLLQVRQDLPSPSDFYSTPLQPGGQSGFLPSGAPAQQMLLPMVDSQLPVVNFGSLPPAPPPAPPPLSLLPVGPALQPPSLAVRPPPAPATRVLPSPARPFPASLGRAELHPVELKPFQDYQKLSSNLGGPGSSRTPPTGRSFSGLNSRLKATPSTYSGVFRTQRVDLYQQASPPDALRWIPKPWERTGPPPREGPSRRAEEPGSRGDKEPGLPPPR

SEQ ID NO: 825824 - protein, 2296 aa, Homo sapiens
EPARFELQVLRCELLTQGRAANSGAELLTQARAAKGKDGKKYSSLNLFDTYKGKSLEIQKPAVAPRHGLQSLGKVAIARRMPPPANLPSLKAENKGNDPNVSLVPKDGTGWASKQEQSDPKSSDASTAQPPESQPLPASQTPASNQPKRPPAAPENTPLVPSGVKSWAQASVTHGAHGDGGRASSLLSRFSREEFPTLQAAGDQDKAAKERESAEQSSGPGPSLRPQNSTTWRDGGGRGPDELEGPDSKLHHGHDPRGGLQPSGPPQFPPYRGMMPPFMYPPYLPFPPPYGPQGPYRYPTPDGPRRAIQVWVCGWGQGKLIGGGDGFLARRLSLDQSRMWLYNMPYFIFFFVYSRFPRVAGPRGSGPPMRLVEPVGRPSILKEDNLKEFDQLDQENDDGWAGAHEEVDYTEKLKFSDEEDGRDSDEEGAEGHRDSQSASGEERPPEADGKKGNSPNSEPPTPKTAWAETSRPPETEPGPPAPKPPLPPPHRGPAGNWGPPGDYPDRGGPPCKPPAPEDEDEAWRQRRKQSSSEISLAVERARRRREEEERRMQEERRAACAEKLKRLDEKFGAPDKRLKAEPAAPPAAPSTPAPPPAVPKELPAPPAPPPASAPTPEKEPEEPAQAPPAQSTPTPGVAAAPTLVSGGGSTSSTSSGSFEASPVEPQLPSKEGPEPPEEVPPPTTPPVPKVEPKGDGIGPTRQPPSQGLGYPKYQKSLPPRFQRQQQEQLLKQQQQHQWQQHQQGSAPPTPVPPSPPQPVTLGAVPAPQAPPPPPKALYPGALGRPPPMPPMNFDPRWMMIPPYVDPRLLQGRPPLDFYPPGVHPSGLVPRERSDSGGSSSEPFDRHAPAMLRERGTPPVDPKLAWVGDVFTATPAEPRPLTSPLRQAADEDDKGMRSETPPVPPPPPYLASYPGFPENGAPGPPISRFPLEEPGPRPLPWPPGSDEVAKIQTPPPKKEPPKEETAQLTGPEAGRKPARGVGSGGQGPPPPRRESRTETRWGPRPGSSRRGIPPEEPGAPPRRAGPIKKPPPPTKVEELPPKPLEQGDETPKPPKPDPLKITKGKLGGPKETPPNGNLSPAPRLRRDYSYERVGPTSCRGRGRGEYFARGRGFRGTYGGRGRGARSREFRSYREFRGDDGRGGGTGGPNHPPAPRGRTASETRSEGSEYEEIPKRRRQRGSETGSETHESDLAPSDKEAPTPKEGTLTQVPLAPPPPGAPPSPAPARFTARGGRVFTPRGVPSRRGRGGGRPPPQVCPGWSPPAKSLAPKKPPTGPLPPSKEPLKEKLIPGPLSPVARGGSNGGSNVGMEDGERPRRRRHGRAQQQDKPPRFRRLKQERENAARGSEGKPSLTLPASAPGPEEALTTVTVAPAPRRAAAKSPDLSNQNSDQANEEWETASESSDFTSERRGDKEAPPPVLLTPKAVGTPGGGGGGAVPGISAMSRGDLSQRAKDLSKRSFSSQRPGMERQNRRPGPGGKAGSSGSSSGGGGGGPGGRTGPGRGDKRSWPSPKNRSRPPEERPPGLPLPPPPPSSSAVFRLDQVIHSNPAGIQQALAQLSSRQGSVTAPGGHPRHKPGPPQAPQGPSPRPPTRYEPQRVNSGLSSDPHFEEPGPMVRGVGGTPRDSAGVSPFPPKRRERPPRKPELLQEESLPPPHSSGFLGSKPEGPGPQAESRDTGTEALTPHIWNRLHTATSRKSYRPSSMEPWMEPLSPFEDVAGTEVSEGGRVCLSWDFFEHWSYPPPALGESGAVLSLGCPLSAVCMCASVRYWGAFYPDLTSSFSSSSQMSQSDSGVDLSGDSQVSSGPCSQRSSPDGGLKGAAEGPPKRPGGSSPLNAVPCEGPPGSEPPRRPPPAPHDGDRKELPREQPLPPGPIGTERSQRTDRGTEPGPIRPSHRPGPPVQFGTSDKDSDLRLVVGDSLKAEKELTASVTEAIPVSRDWELLPSAAASAEPQSKNLDSGHCVPEPSSSGQRLYPEVFYGSAGPSSSQISGGAMDSQLHPNSGGFRPGTPSLHPYRSQPLYLPPGPAPPSALLSGVALKGQFLDFSTMQATELGKLPAGGVLYPPPSFLYSPAFCPSPLPDTSLLQVRQDLPSPSDFYSTPLQPGGQSGFLPSGAPAQQMLLPMVDSQLPVVNFGSLPPAPPPAPPPLSLLPVGPALQPPSLAVRPPPAPATRVLPSPARPFPASLGRAELHPVELKPFQDYQKLSSNLGGPGSSRTPPTGRSFSGLNSRLKATPSTYSGVFRTQRVDLYQQASPPDALRWIPKPWERTGPPPREGPSRRAEEPGSRGDKEPGLPPPR

SEQ ID NO: 825825 - protein, 2216 aa, Homo sapiens
EPARFELQVLRCELLTQGRAANSGAELLTQARAAKGKDGKKYSSLNLFDTYKGKSLEIQKPAVAPRHGLQSLGKVAIARRMPPPANLPSLKAENKGNDPNVSLVPKDGTGWASKQEQSDPKSSDASTAQPPESQPLPASQTPASNQPKRPPAAPENTPLVPSGVKSWAQASVTHGAHGDGGRASSLLSRFSREEFPTLQAAGDQDKAAKERESAEQSSGPGPSLRPQNSTTWRDGGGRGPDELEGPDSKLHHGHDPRGGLQPSGPPQFPPYRGMMPPFMYPPYLPFPPPYGPQGPYRYPTPDGPRRAIQVWVCGWGQGKLIGGGDGFLARRLSLDQSRMWLYNMPYFIFFFVYSRFPRVAGPRGSGPPMRLVEPVGRPSILKEDNLKEFDQLDQENDDGWAGAHEEVDYTEKLKFSDEEDGRDSDEEGAEGHRDSQSASGEERPPEADGKKGNSPNSEPPTPKTAWAETSRPPETEPGPPAPKPPLPPPHRGPAGNWGPPGDYPDRGGPPCKPPAPEDEDEAWRQRRKQSSSEISLAVERARRRREEEERRMQEERRAACAEKLKRLDEKFGAPDKRLKAEPAAPPAAPSTPAPPPAVPKELPAPPAPPPASAPTPEKEPEEPAQAPPAQSTPTPGVAAAPTLVSGGGSTSSTSSGSFEASPVEPQLPSKEGPEPPEEVPPPTTPPVPKVEPKGDGIGPTRQPPSQGLGYPKYQKSLPPRFQRQQQEQLLKQQQQHQWQQHQQGSAPPTPVPPSPPQPVTLGAVPAPQAPPPPPKALYPGALGRPPPMPPMNFDPRWMMIPPYVDPRLLQGRPPLDFYPPGVHPSGLVPRERSDSGGSSSEPFDRHAPAMLRERGTPPVDPKLAWVGDVFTATPAEPRPLTSPLRQAADEDDKGMRSETPPVPPPPPYLASYPGFPENGAPGPPISRFPLEEPGPRPLPWPPGSDEVAKIQTPPPKKEPPKEETAQLTGPEAGRKPARGVGSGGQGPPPPRRESRTETRWGPRPGSSRRGIPPEEPGAPPRRAGPIKKPPPPTKVEELPPKPLEQGDETPKPPKPDPLKITKGKLGGPKETPPNGNLSPAPRLRRDYSYERVGPTSCRGRGRGEYFARGRGFRGTYGGRGRGARSREFRSYREFRGDDGRGGGTGGPNHPPAPRGRTASETRSEGSEYEEIPKRRRQRGSETGSETHESDLAPSDKEAPTPKEGTLTQVPLAPPPPGAPPSPAPARFTARGGRVFTPRGVPSRRGRGGGRPPPQVCPGWSPPAKSLAPKKPPTGPLPPSKEPLKEKLIPGPLSPVARGGSNGGSNVGMEDGERPRRRRHGRAQQQDKPPRFRRLKQERENAARGSEGKPSLTLPASAPGPEEALTTVTVAPAPRRAAAKSPDLSNQNSDQANEEWETASESSDFTSERRGDKEAPPPVLLTPKAVGTPGGGGGGAVPGISAMSRGDLSQRAKDLSKRSFSSQRPGMERQNRRPGPGGKAGSSGSSSGGGGGGPGGRTGPGRGDKRSWPSPKNRSRPPEERPPGLPLPPPPPSSSAVFRLDQVIHSNPAGIQQALAQLSSRQGSVTAPGGHPRHKPGPPQAPQGPSPRPPTRYEPQRVNSGLSSDPHFEEPGPMVRGVGGTPRDSAGVSPFPPKRRERPPRKPELLQEESLPPPHSSGFLGSKPEGPGPQAESRDTGTEALTPHIWNRLHTATSRKSYRPSSMEPWMEPLSPFEDVAGTEVSSGPCSQRSSPDGGLKGAAEGPPKRPGGSSPLNAVPCEGPPGSEPPRRPPPAPHDGDRKELPREQPLPPGPIGTERSQRTDRGTEPGPIRPSHRPGPPVQFGTSDKDSDLRLVVGDSLKAEKELTASVTEAIPVSRDWELLPSAAASAEPQSKNLDSGHCVPEPSSSGQRLYPEVFYGSAGPSSSQISGGAMDSQLHPNSGGFRPGTPSLHPYRSQPLYLPPGPAPPSALLSGVALKGQFLDFSTMQATELGKLPAGGVLYPPPSFLYSPAFCPSPLPDTSLLQVRQDLPSPSDFYSTPLQPGGQSGFLPSGAPAQQMLLPMVDSQLPVVNFGSLPPAPPPAPPPLSLLPVGPALQPPSLAVRPPPAPATRVLPSPARPFPASLGRAELHPVELKPFQDYQKLSSNLGGPGSSRTPPTGRSFSGLNSRLKATPSTYSGVFRTQRVDLYQQASPPDALRWIPKPWERTGPPPREGPSRRAEEPGSRGDKEPGLPPPR

SEQ ID NO: 825826 - protein, 2272 aa, Homo sapiens
EPARFELQVLRCELLTQGRAANSGAELLTQARAAKGKDGKKYSSLNLFDTYKGKSLEIQKPAVAPRHGLQSLGKVAIARRMPPPANLPSLKAENKGNDPNVSLVPKDGTGWASKQEQSDPKSSDASTAQPPESQPLPASQTPASNQPKRPPAAPENTPLVPSGVKSWAQASVTHGAHGDGGRASSLLSRFSREEFPTLQAAGDQDKAAKERESAEQSSGPGPSLRPQNSTTWRDGGGRGPDELEGPDSKLHHGHDPRGGLQPSGPPQFPPYRGMMPPFMYPPYLPFPPPYGPQGPYRYPTPDGPRRAIQVWVCGWGQGKLIGGGDGFLARRLSLDQSRMWLYNMPYFIFFFVYSRFPRVAGPRGSGPPMRLVEPVGRPSILKEDNLKEFDQLDQENDDGWAGAHEEVDYTEKLKFSDEEDGRDSDEEGAEGHRDSQSASGEERPPEADGKKGNSPNSEPPTPKTAWAETSRPPETEPGPPAPKPPLPPPHRGPAGNWGPPGDYPDRGGPPCKPPAPEDEDEAWRQRRKQSSSEISLAVERARRRREEEERRMQEERRAACAEKLKRLDEKFGAPDKRLKAEPAAPPAAPSTPAPPPAVPKELPAPPAPPPASAPTPEKEPEEPAQAPPAQSTPTPGVAAAPTLVSGGGSTSSTSSGSFEASPVEPQLPSKEGPEPPEEVPPPTTPPVPKVEPKGDGIGPTRQPPSQGLGYPKYQKSLPPRFQRQQQEQLLKQQQQHQWQQHQQGSAPPTPVPPSPPQPVTLGAVPAPQAPPPPPKALYPGALGRPPPMPPMNFDPRWMMIPPYVDPRLLQGRPPLDFYPPGVHPSGLVPRERSDSGGSSSEPFDRHAPAMLRERGTPPVDPKLAWVGDVFTATPAEPRPLTSPLRQAADEDDKGMRSETPPVPPPPPYLASYPGFPENGAPGPPISRFPLEEPGPRPLPWPPGSDEVAKIQTPPPKKEPPKEETAQLTGPEAGRKPARGVGSGGQGPPPPRRESRTETRWGPRPGSSRRGIPPEEPGAPPRRAGPIKKPPPPTKVEELPPKPLEQGDETPKPPKPDPLKITKGKLGGPKETPPNGNLSPAPRLRRDYSYERVGPTSCRGRGRGEYFARGRGFRGTYGGRGRGARSREFRSYREFRGDDGRGGGTGGPNHPPAPRGRTASETRSEGSEYEEIPKRRRQRGSETGSETHESDLAPSDKEAPTPKEGTLTQVPLAPPPPGAPPSPAPARFTARGGRVFTPRGVPSRRGRGGGRPPPQVCPGWSPPAKSLAPKKPPTGPLPPSKEPLKEKLIPGPLSPVARGGSNGGSNVGMEDGERPRRRRHGRAQQQDKPPRFRRLKQERENAARGSEGKPSLTLPASAPGPEEALTTVTVAPAPRRAAAKSPDLSNQNSDQANEEWETASESSDFTSERRGDKEAPPPVLLTPKAVGTPGGGGGGAVPGISAMSRGDLSQRAKDLSKRSFSSQRPGMERQNRRPGPGGKAGSSGSSSGGGGGGPGGRTGPGRGDKRSWPSPKNRSRPPEERPPGLPLPPPPPSSSAVFRLDQVIHSNPAGIQQALAQLSSRQGSVTAPGGHPRHKPGPPQAPQGPSPRPPTRYEPQRVNSGLSSDPHFEEPGPMVRGVGGTPRDSAGVSPFPPKRRERPPRKPELLQEESLPPPHSSGFLGSKPEGPGPQAESRDTGTEALTPHIWNRLHTATSRKSYRPSSMEPWMEPLSPFEDVAGTEMSQSDSGVDLSGDSQVSSGPCSQRSSPDGGLKGAAEGPPKRPGGSSPLNAVPCEGPPGSEPPRRPPPAPHDGDRKELPREQPLPPGPIGTERSQRTDRGTEPGPIRPSHRPGPPVQFGTSDKDSDLRLVVGDSLKAEKELTASVTEAIPVSRDWELLPSAAASAEPQSKNLDSGHCVPEPSSSGQRLYPEVFYGSAGPSSSQISGGAMDSQLHPNSGGFRPGTPSLHPYRSQPLYLPPGPAPPSALLSGVALKGQFLDFSTMQATELGKLPAGGVLYPPPSFLYSPAFCPSPLPDTSLLQVRQDLPSPSDFYSTPLQPGGQSGFLPSGAPAQQVYCIFTLPLHLISLSIAGFDFPWFSDIPPCPQHAHPNFLLQMLLPMVDSQLPVVNFGSLPPAPPPAPPPLSLLPVGPALQPPSLAVRPPPAPATRVLPSPARPFPASLGRAELHPVELKPFQDYQKLSSNLGGPGSSRTPPTGRSFSGLNSRLKATPSTYSGVFRTQRVDLYQQASPPDALRWIPKPWERTGPPPREGPSRRAEEPGSRGDKEPGLPPPR

SEQ ID NO: 825827 - protein, 1695 aa, Homo sapiens
EPARFELQVLRCELLTQGRAANSGAELLTQARAAKGKDGKKYSSLNLFDTYKGKSLEIQKPAVAPRHGLQSLGKVAIARRMPPPANLPSLKAENKGNDPNVSLVPKDGTGWASKQEQSDPKSSDASTAQPPESQPLPASQTPASNQPKRPPAAPENTPLVPSGVKSWAQASVTHGAHGDGGRASSLLSRFSREEFPTLQAAGDQDKAAKERESAEQSSGPGPSLRPQNSTTWRDGGGRGPDELEGPDSKLHHGHDPRGGLQPSGPPQFPPYRGMMPPFMYPPYLPFPPPYGPQGPYRYPTPDGPRRAIQVWVCGWGQGKLIGGGDGFLARRLSLDQSRMWLYNMPYFIFFFVYSRFPRVAGPRGSGPPMRLVEPVGRPSILKEDNLKEFDQLDQENDDGWAGAHEEVDYTEKLKFSDEEDGRDSDEEGAEGHRDSQSASGEERPPEADGKKGNSPNSEPPTPKTAWAETSRPPETEPGPPAPKPPLPPPHRGPAGNWGPPGDYPDRGGPPCKPPAPEDEDEAWRQRRKQSSSEISLAVERARRRREEEERRMQEERRAACAEKLKRLDEKFGAPDKRLKAEPAAPPAAPSTPAPPPAVPKELPAPPAPPPASAPTPEKEPEEPAQAPPAQSTPTPGVAAAPTLVSGGGSTSSTSSGSFEASPVEPQLPSKEGPEPPEEVPPPTTPPVPKVEPKGDGIGPTRQPPSQGLGYPKYQKSLPPRFQRQQQEQLLKQQQQHQWQQHQQGSAPPTPVPPSPPQPVTLGAVPAPQAPPPPPKALYPGALGRPPPMPPMNFDPRWMMIPPYVDPRLLQGRPPLDFYPPGVHPSGLVPRERSDSGGSSSEPFDRHAPAMLRERGTPPVDPKLAWVGDVFTATPAEPRPLTSPLRQAADEDDKGMRSETPPVPPPPPYLASYPGFPENGAPGPPISRFPLEEPGPRPLPWPPGSDEVAKIQTPPPKKEPPKEETAQLTGPEAGRKPARGVGSGGQGPPPPRRESRTETRWGPRPGSSRRGIPPEEPGAPPRRAGPIKKPPPPTKVEELPPKPLEQGDETPKPPKPDPLKITKGKLGGPKETPPNGNLSPAPRLRRDYSYERVGPTSCRGRGRGEYFARGRGFRGTYGGRGRGARSREFRSYREFRGDDGRGGGTGGPNHPPAPRGRTASETRSEGSEYEEIPKRRRQRGSETGSETHESDLAPSDKEAPTPKEGTLTQVPLAPPPPGAPPSPAPARFTARGGRVFTPRGVPSRRGRGGGRPPPQVCPGWSPPAKSLAPKKPPTGPLPPSKEPLKEKLIPGPLSPVARGGSNGGSNVGMEDGERPRRRRHGRAQQQDKPPRFRRLKQERENAARGSEGKPSLTLPASAPGPEEALTTVTVAPAPRRAAAKSPDLSNQNSDQANEEWETASESSDFTSERRGDKEAPPPVLLTPKAVGTPGGGGGGAVPGISAMSRGDLSQRAKDLSKRSFSSQRPGMERQNRRPGPGGKAGSSGSSSGGGGGGPGGRTGPGRGDKRSWPSPKNRSRPPEERPPGLPLPPPPPSSSAVFRLDQVIHSNPAGIQQALAQLSSRQGSVTAPGGHPRHKPGPPQAPQGPSPRPPTRYEPQRVNSGLSSDPHFEEPGPMVRGVGGTPRDSAGVSPFPPKRRERPPRKPELLQEESLPPPHSSGFLGSKPEGPGPQAESRDTGTEALTPHIWRLLTPECCSL

SEQ ID NO: 825828 - protein, 2303 aa, Homo sapiens
EPARFELQVLRCELLTQGRAANSGAELLTQARAAKGKDGKKYSSLNLFDTYKGKSLEIQKPAVAPRHGLQSLGKVAIARRMPPPANLPSLKAENKGNDPNVSLVPKDGTGWASKQEQSDPKSSDASTAQPPESQPLPASQTPASNQPKRPPAAPENTPLVPSGVKSWAQASVTHGAHGDGGRASSLLSRFSREEFPTLQAAGDQDKAAKERESAEQSSGPGPSLRPQNSTTWRDGGGRGPDELEGPDSKLHHGHDPRGGLQPSGPPQFPPYRGMMPPFMYPPYLPFPPPYGPQGPYRYPTPDGPRRAIQVWVCGWGQGKLIGGGDGFLARRLSLDQSRMWLYNMPYFIFFFVYSRFPRVAGPRGSGPPMRLVEPVGRPSILKEDNLKEFDQLDQENDDGWAGAHEEVDYTEKLKFSDEEDGRDSDEEGAEGHRDSQSASGEERPPEADGKKGNSPNSEPPTPKTAWAETSRPPETEPGPPAPKPPLPPPHRGPAGNWGPPGDYPDRGGPPCKPPAPEDEDEAWRQRRKQSSSEISLAVERARRRREEEERRMQEERRAACAEKLKRLDEKFGAPDKRLKAEPAAPPAAPSTPAPPPAVPKELPAPPAPPPASAPTPEKEPEEPAQAPPAQSTPTPGVAAAPTLVSGGGSTSSTSSGSFEASPVEPQLPSKEGPEPPEEVPPPTTPPVPKVEPKGDGIGPTRQPPSQGLGYPKYQKSLPPRFQRQQQEQLLKQQQQHQWQQHQQGSAPPTPVPPSPPQPVTLGAVPAPQAPPPPPKALYPGALGRPPPMPPMNFDPRWMMIPPYVDPRLLQGRPPLDFYPPGVHPSGLVPRERSDSGGSSSEPFDRHAPAMLRERGTPPVDPKLAWVGDVFTATPAEPRPLTSPLRQAADEDDKGMRSETPPVPPPPPYLASYPGFPENGAPGPPISRFPLEEPGPRPLPWPPGSDEVAKIQTPPPKKEPPKEETAQLTGPEAGRKPARGVGSGGQGPPPPRRESRTETRWGPRPGSSRRGIPPEEPGAPPRRAGPIKKPPPPTKVEELPPKPLEQGDETPKPPKPDPLKITKGKLGGPKETPPNGNLSPAPRLRRDYSYERVGPTSCRGRGRGEYFARGRGFRGTYGGRGRGARSREFRSYREFRGDDGRGGGTGGPNHPPAPRGRTASETRSEGSEYEEIPKRRRQRGSETGSETHESDLAPSDKEAPTPKEGTLTQVPLAPPPPGAPPSPAPARFTARGGRVFTPRGVPSRRGRGGGRPPPQVCPGWSPPAKSLAPKKPPTGPLPPSKEPLKEKLIPGPLSPVARGGSNGGSNVGMEDGERPRRRRHGRAQQQDKPPRFRRLKQERENAARGSEGKPSLTLPASAPGPEEALTTVTVAPAPRRAAAKSPDLSNQNSDQANEEWETASESSDFTSERRGDKEAPPPVLLTPKAVGTPGGGGGGAVPGISAMSRGDLSQRAKDLSKRSFSSQRPGMERQNRRPGPGGKAGSSGSSSGGGGGGPGGRTGPGRGDKRSWPSPKNRSRPPEERPPGLPLPPPPPSSSAVFRLDQVIHSNPAGIQQALAQLSSRQGSVTAPGGHPRHKPGPPQAPQGPSPRPPTRYEPQRVNSGLSSDPHFEEPGPMVRGVGGTPRDSAGVSPFPPKRRERPPRKPELLQEESLPPPHSSGFLGSKPEGPGPQAESRDTGTEALTPHIWNRLHTATSRKSYRPSSMEPWMEPLSPFEDVAGTEMSQSDSGVDLSGDSQVSSGPCSQRSSPDGGLKGAAEGPPKRPGGSSPLNAVPCEGPPGSEPPRRPPPAPHDGDRKELPREQPLPPGPIGTERSQRTDRGTEPGPIRPSHRPGPPVQFGTSDKDSDLRLVVGDSLKAEKELTASVTEAIPVSRDWELLPSAAASAEPQSKNLDSGHCVPEPSSSGQRLYPEVFYGSAGPSSSQVGPASHCMTPSVNNNFFLPGMFYNQAFLRCRVVRYHFVTSFFSLLFASMGGMVIFFLDHRYYSCFNRAPLLQISGGAMDSQLHPNSGGFRPGTPSLHPYRSQPLYLPPGPAPPSALLSGVALKGQFLDFSTMQATELGKLPAGGVLYPPPSFLYSPAFCPSPLPDTSLLQVRQDLPSPSDFYSTPLQPGGQSGFLPSGAPAQQMLLPMVDSQLPVVNFGSLPPAPPPAPPPLSLLPVGPALQPPSLAVRPPPAPATRVLPSPARPFPASLGRAELHPVELKPFQDYQKLSSNLGGPGSSRTPPTGRSFSGLNSRLKATPSTYSGVFRTQRVDLYQQASPPDALRWIPKPWERTGPPPREGPSRRAEEPGSRGDKEPGLPPPR

SEQ ID NO: 825829 - protein, 2195 aa, Homo sapiens
EPARFELQVLRCELLTQGRAANSGAELLTQARAAKGKDGKKYSSLNLFDTYKGKSLEIQKPAVAPRHGLQSLGKVAIARRMPPPANLPSLKAENKGNDPNVSLVPKDGTGWASKQEQSDPKSSDASTAQPPESQPLPASQTPASNQPKRPPAAPENTPLVPSGVKSWAQASVTHGAHGDGGRASSLLSRFSREEFPTLQAAGDQDKAAKERESAEQSSGPGPSLRPQNSTTWRDGGGRGPDELEGPDSKLHHGHDPRGGLQPSGPPQFPPYRGMMPPFMYPPYLPFPPPYGPQGPYRYPTPDGPRRAIQVWVCGWGQGKLIGGGDGFLARRLSLDQSRMWLYNMPYFIFFFVYSRFPRVAGPRGSGPPMRLVEPVGRPSILKEDNLKEFDQLDQENDDGWAGAHEEVDYTEKLKFSDEEDGRDSDEEGAEGHRDSQSASGEERPPEADGKKGNSPNSEPPTPKTAWAETSRPPETEPGPPAPKPPLPPPHRGPAGNWGPPGDYPDRGGPPCKPPAPEDEDEAWRQRRKQSSSEISLAVERARRRREEEERRMQEERRAACAEKLKRLDEKFGAPDKRLKAEPAAPPAAPSTPAPPPAVPKELPAPPAPPPASAPTPEKEPEEPAQAPPAQSTPTPGVAAAPTLVSGGGSTSSTSSGSFEASPVEPQLPSKEGPEPPEEVPPPTTPPVPKVEPKGDGIGPTRQPPSQGLGYPKYQKSLPPRFQRQQQEQLLKQQQQHQWQQHQQGSAPPTPVPPSPPQPVTLGAVPAPQAPPPPPKALYPGALGRPPPMPPMNFDPRWMMIPPYVDPRLLQGRPPLDFYPPGVHPSGLVPRERSDSGGSSSEPFDRHAPAMLRERGTPPVDPKLAWVGDVFTATPAEPRPLTSPLRQAADEDDKGMRSETPPVPPPPPYLASYPGFPENGAPGPPISRFPLEEPGPRPLPWPPGSDEVAKIQTPPPKKEPPKEETAQLTGPEAGRKPARGVGSGGQGPPPPRRESRTETRWGPRPGSSRRGIPPEEPGAPPRRAGPIKKPPPPTKVEELPPKPLEQGDETPKPPKPDPLKITKGKLGGPKETPPNGNLSPAPRLRRDYSYERVGPTSCRGRGRGEYFARGRGFRGTYGGRGRGARSREFRSYREFRGDDGRGGGTGGPNHPPAPRGRTASETRSEGSEYEEIPKRRRQRGSETGSETHESDLAPSDKEAPTPKEGTLTQVPLAPPPPGAPPSPAPARFTARGGRVFTPRGVPSRRGRGGGRPPPQVCPGWSPPAKSLAPKKPPTGPLPPSKEPLKEKLIPGPLSPVARGGSNGGSNVGMEDGERPRRRRHGRAQQQDKPPRFRRLKQERENAARGSEGKPSLTLPASAPGPEEALTTVTVAPAPRRAAAKSPDLSNQNSDQANEEWETASESSDFTSERRGDKEAPPPVLLTPKAVGTPGGGGGGAVPGISAMSRGDLSQRAKDLSKRSFSSQRPGMERQNRRPGPGGKAGSSGSSSGGGGGGPGGRTGPGRGDKRSWPSPKNRSRPPEERPPGLPLPPPPPSSSAVFRLDQVIHSNPAGIQQALAQLSSRQGSVTAPGGHPRHKPGPPQAPQGPSPRPPTRYEPQRVNSGLSSDPHFEEPGPMVRGVGGTPRDSAGVSPFPPKRRERPPRKPELLQEESLPPPHSSGFLGSKPEGPGPQAESRDTGTEALTPHIWNRLHTATSRKSYRPSSMEPWMEPLSPFEDVAGTEMSQSDSGVDLSGDSQVSSGPCSQRSSPDGGLKGAAEGPPKRPGGSSPLNAVPCEGPPGSEPPRRPPPAPHDGDRKELPREQPLPPGPIGTERSQRTDRGTEPGPIRPSHRPGPPVQFGTSDKDSDLRLVVGDSLKAEKELTASVTEAIPVSRDWELLPSAAASAEPQSKNLDSGHCVPEPSSSGQRLYPEVFYGSAGPSSSQISGGAMDSQLHPNSGGFRPGTPSLHPYRSQPLYLPPGPAPPSALLSGVALKGQFLDFSTMQATELGKLPAGGVLYPPPSFLYSPAFCPSPLPDTSLLQVRQDLPSPSDFYSTPLQPGGQSGFLPSGAPAQQMLLPMVDSQLPVVNFGSLPPAPPPAPPPLSLLPVGPALQPPSLAVRPPPAPATRVLPSPARPFPASLGRAELHPVELKPFQDYQKLSSNLGGPGSSRTPPTGRSFSGLNSRLKATPSTYSGVFRTQRVDLYQQVKEKPLWPQL

SEQ ID NO: 825830 - protein, 2155 aa, Homo sapiens
EPARFELQVLRCELLTQGRAANSGAELLTQARAAKGKDGKKYSSLNLFDTYKGKSLEIQKPAVAPRHGLQSLGKVAIARRMPPPANLPSLKAENKGNDPNVSLVPKDGTGWASKQEQSDPKSSDASTAQPPESQPLPASQTPASNQPKRPPAAPENTPLVPSGVKSWAQASVTHGAHGDGGRASSLLSRFSREEFPTLQAAGDQDKAAKERESAEQSSGPGPSLRPQNSTTWRDGGGRGPDELEGPDSKLHHGHDPRGGLQPSGPPQFPPYRGMMPPFMYPPYLPFPPPYGPQGPYRYPTPDGPRRAIQVWVCGWGQGKLIGGGDGFLARRLSLDQSRMWLYNMPYFIFFFVYSRFPRVAGPRGSGPPMRLVEPVGRPSILKEDNLKEFDQLDQENDDGWAGAHEEVDYTEKLKFSDEEDGRDSDEEGAEGHRDSQSASGEERPPEADGKKGNSPNSEPPTPKTAWAETSRPPETEPGPPAPKPPLPPPHRGPAGNWGPPGDYPDRGGPPCKPPAPEDEDEAWRQRRKQSSSEISLAVERARRRREEEERRMQEERRAACAEKLKRLDEKFGAPDKRLKAEPAAPPAAPSTPAPPPAVPKELPAPPAPPPASAPTPEKEPEEPAQAPPAQSTPTPGVAAAPTLVSGGGSTSSTSSGSFEASPVEPQLPSKEGPEPPEEVPPPTTPPVPKVEPKGDGIGPTRQPPSQGLGYPKYQKSLPPRFQRQQQEQLLKQQQQHQWQQHQQGSAPPTPVPPSPPQPVTLGAVPAPQAPPPPPKALYPGALGRPPPMPPMNFDPRWMMIPPYVDPRLLQGRPPLDFYPPGVHPSGLVPRERSDSGGSSSEPFDRHAPAMLRERGTPPVDPKLAWVGDVFTATPAEPRPLTSPLRQAADEDDKGMRSETPPVPPPPPYLASYPGFPENGAPGPPISRFPLEEPGPRPLPWPPGSDEVAKIQTPPPKKEPPKEETAQLTGPEAGRKPARGVGSGGQGPPPPRRESRTETRWGPRPGSSRRGIPPEEPGAPPRRAGPIKKPPPPTKVEELPPKPLEQGDETPKPPKPDPLKITKGKLGGPKETPPNGNLSPAPRLRRDYSYERVGPTSCRGRGRGEYFARGRGFRGTYGGRGRGARSREFRSYREFRGDDGRGGGTGGPNHPPAPRGRTASETRSEGSEYEEIPKRRRQRGSETGSETHESDLAPSDKEAPTPKEGTLTQVPLAPPPPGAPPSPAPARFTARGGRVFTPRGVPSRRGRGGGRPPPQVCPGWSPPAKSLAPKKPPTGPLPPSKEPLKEKLIPGPLSPVARGGSNGGSNVGMEDGERPRRRRHGRAQQQDKPPRFRRLKQERENAARGSEGKPSLTLPASAPGPEEALTTVTVAPAPRRAAAKSPDLSNQNSDQANEEWETASESSDFTSERRGDKEAPPPVLLTPKAVGTPGGGGGGAVPGISAMSRGDLSQRAKDLSKRSFSSQRPGMERQNRRPGPGGKAGSSGSSSGGGGGGPGGRTGPGRGDKRSWPSPKNRSRPPEERPPGLPLPPPPPSSSAVFRLDQVIHSNPAGIQQALAQLSSRQGSVTAPGGHPRHKPGPPQAPQGPSPRPPTRYEPQRVNSGLSSDPHFEEPGPMVRGVGGTPRDSAGVSPFPPKRRERPPRKPELLQEESLPPPHSSGFLGSKPEGPGPQAESRDTGTEALTPHIWNRLHTATSRKSYRPSSMEPWMEPLSPFEDVAGTEMSQSDSGVDLSGDSQVSSGPCSQRSSPDGGLKGAAEGPPKRPGGSSPLNAVPCEGPPGSEPPRRPPPAPHDGDRKELPREQPLPPGPIGTERSQRTDRGTEPGPIRPSHRPGPPVQFGTSDKDSDLRLVVGDSLKAEKELTASVTEAIPVSRDWELLPSAAASAEPQSKNLDSGHCVPEPSSSGQRLYPEVFYGSAGPSSSQISGGAMDSQLHPNSGGFRPGTPSLHPYRSQPLYLPPGPAPPSALLSGVALKGQFLDFSTMQATELGKLPAGGVLYPPPSFLYSPAFCPSPLPDTSLLQVRQDLPSPSDFYSTPLQPGGQSGFLPSGAPAQQMLLPMVDSQLPVVNFGSLPPAPPPAPPPLSLLPVGPALQPPSLAVRPPPAPATRVLPSPARPFPASLGRAELHPVELKPFQDYQKLSSNLGGPGSSRTPPTGR

SEQ ID NO: 825831 - protein, 2028 aa, Homo sapiens
EPARFELQVLRCELLTQGRAANSGAELLTQARAAKGKDGKKYSSLNLFDTYKGKSLEIQKPAVAPRHGLQSLGKVAIARRMPPPANLPSLKAENKGNDPNVSLVPKDGTGWASKQEQSDPKSSDASTAQPPESQPLPASQTPASNQPKRPPAAPENTPLVPSGVKSWAQASVTHGAHGDGGRASSLLSRFSREEFPTLQAAGDQDKAAKERESAEQSSGPGPSLRPQNSTTWRDGGGRGPDELEGPDSKLHHGHDPRGGLQPSGPPQFPPYRGMMPPFMYPPYLPFPPPYGPQGPYRYPTPDGPRRAIQVWVCGWGQGKLIGGGDGFLARRLSLDQSRMWLYNMPYFIFFFVYSRFPRVAGPRGSGPPMRLVEPVGRPSILKEDNLKEFDQLDQENDDGWAGAHEEVDYTEKLKFSDEEDGRDSDEEGAEGHRDSQSASGEERPPEADGKKGNSPNSEPPTPKTAWAETSRPPETEPGPPAPKPPLPPPHRGPAGNWGPPGDYPDRGGPPCKPPAPEDEDEAWRQRRKQSSSEISLAVERARRRREEEERRMQEERRAACAEKLKRLDEKFGAPDKRLKAEPAAPPAAPSTPAPPPAVPKELPAPPAPPPASAPTPEKEPEEPAQAPPAQSTPTPGVAAAPTLVSGGGSTSSTSSGSFEASPVEPQLPSKEGPEPPEEVPPPTTPPVPKVEPKGDGIGPTRQPPSQGLGYPKYQKSLPPRFQRQQQEQLLKQQQQHQWQQHQQGSAPPTPVPPSPPQPVTLGAVPAPQAPPPPPKALYPGALGRPPPMPPMNFDPRWMMIPPYVDPRLLQGRPPLDFYPPGVHPSGLVPRERSDSGGSSSEPFDRHAPAMLRERGTPPVDPKLAWVGDVFTATPAEPRPLTSPLRQAADEDDKGMRSETPPVPPPPPYLASYPGFPENGAPGPPISRFPLEEPGPRPLPWPPGSDEVAKIQTPPPKKEPPKEETAQLTGPEAGRKPARGVGSGGQGPPPPRRESRTETRWGPRPGSSRRGIPPEEPGAPPRRAGPIKKPPPPTKVEELPPKPLEQGDETPKPPKPDPLKITKGKLGGPKETPPNGNLSPAPRLRRDYSYERVGPTSCRGRGRGEYFARGRGFRGTYGGRGRGARSREFRSYREFRGDDGRGGGTGGPNHPPAPRGRTASETRSEGSEYEEIPKRRRQRGSETGSETHESDLAPSDKEAPTPKEGTLTQVPLAPPPPGAPPSPAPARFTARGGRVFTPRGVPSRRGRGGGRPPPQVCPGWSPPAKSLAPKKPPTGPLPPSKEPLKEKLIPGPLSPVARGGSNGGSNVGMEDGERPRRRRHGRAQQQDKPPRFRRLKQERENAARGSEGKPSLTLPASAPGPEEALTTVTVAPAPRRAAAKSPDLSNQNSDQANEEWETASESSDFTSERRGDKEAPPPVLLTPKAVGTPGGGGGGAVPGISAMSRGDLSQRAKDLSKRSFSSQRPGMERQNRRPGPGGKAGSSGSSSGGGGGGPGGRTGPGRGDKRSWPSPKNRSRPPEERPPGLPLPPPPPSSSAVFRLDQVIHSNPAGIQQALAQLSSRQGSVTAPGGHPRHKPGPPQAPQGPSPRPPTRYEPQRVNSGLSSDPHFEEPGPMVRGVGGTPRDSAGVSPFPPKRRERPPRKPELLQEESLPPPHSSGFLGSKPEGPGPQAESRDTGTEALTPHIWNRLHTATSRKSYRPSSMEPWMEPLSPFEDVAGTEMSQSDSGVDLSGDSQVSSGPCSQRSSPDGGLKGAAEGPPKRPGGSSPLNAVPCEGPPGSEPPRRPPPAPHDGDRKELPREQPLPPGPIGTERSQRTDRGTEPGPIRPSHRPGPPVQFGTSDKDSDLRLVVGDSLKAEKELTASVTEAIPVSRDWELLPSAAASAEPQSKNLDSGHCVPEPSSSGQRLYPEVFYGSAGPSSSQISGGAMDSQLHPNSGGFRPGTPSLHPYRSQPLYLPPGPAPPSALLSGVALKGQFLDFSTMQATELGKLPAGGVLYPPPSFLYSPAFCPNLPGPSPLAWGEQSCIQWN

SEQ ID NO: 825832 - protein, 1966 aa, Homo sapiens
EPARFELQVLRCELLTQGRAANSGAELLTQARAAKGKDGKKYSSLNLFDTYKGKSLEIQKPAVAPRHGLQSLGKVAIARRMPPPANLPSLKAENKGNDPNVSLVPKDGTGWASKQEQSDPKSSDASTAQPPESQPLPASQTPASNQPKRPPAAPENTPLVPSGVKSWAQASVTHGAHGDGGRASSLLSRFSREEFPTLQAAGDQDKAAKERESAEQSSGPGPSLRPQNSTTWRDGGGRGPDELEGPDSKLHHGHDPRGGLQPSGPPQFPPYRGMMPPFMYPPYLPFPPPYGPQGPYRYPTPDGPRRAIQVWVCGWGQGKLIGGGDGFLARRLSLDQSRMWLYNMPYFIFFFVYSRFPRVAGPRGSGPPMRLVEPVGRPSILKEDNLKEFDQLDQENDDGWAGAHEEVDYTEKLKFSDEEDGRDSDEEGAEGHRDSQSASGEERPPEADGKKGNSPNSEPPTPKTAWAETSRPPETEPGPPAPKPPLPPPHRGPAGNWGPPGDYPDRGGPPCKPPAPEDEDEAWRQRRKQSSSEISLAVERARRRREEEERRMQEERRAACAEKLKRLDEKFGAPDKRLKAEPAAPPAAPSTPAPPPAVPKELPAPPAPPPASAPTPEKEPEEPAQAPPAQSTPTPGVAAAPTLVSGGGSTSSTSSGSFEASPVEPQLPSKEGPEPPEEVPPPTTPPVPKVEPKGDGIGPTRQPPSQGLGYPKYQKSLPPRFQRQQQEQLLKQQQQHQWQQHQQGSAPPTPVPPSPPQPVTLGAVPAPQAPPPPPKALYPGALGRPPPMPPMNFDPRWMMIPPYVDPRLLQGRPPLDFYPPGVHPSGLVPRERSDSGGSSSEPFDRHAPAMLRERGTPPVDPKLAWVGDVFTATPAEPRPLTSPLRQAADEDDKGMRSETPPVPPPPPYLASYPGFPENGAPGPPISRFPLEEPGPRPLPWPPGSDEVAKIQTPPPKKEPPKEETAQLTGPEAGRKPARGVGSGGQGPPPPRRESRTETRWGPRPGSSRRGIPPEEPGAPPRRAGPIKKPPPPTKVEELPPKPLEQGDETPKPPKPDPLKITKGKLGGPKETPPNGNLSPAPRLRRDYSYERVGPTSCRGRGRGEYFARGRGFRGTYGGRGRGARSREFRSYREFRGDDGRGGGTGGPNHPPAPRGRTASETRSEGSEYEEIPKRRRQRGSETGSETHESDLAPSDKEAPTPKEGTLTQVPLAPPPPGAPPSPAPARFTARGGRVFTPRGVPSRRGRGGGRPPPQVCPGWSPPAKSLAPKKPPTGPLPPSKEPLKEKLIPGPLSPVARGGSNGGSNVGMEDGERPRRRRHGRAQQQDKPPRFRRLKQERENAARGSEGKPSLTLPASAPGPEEALTTVTVAPAPRRAAAKSPDLSNQNSDQANEEWETASESSDFTSERRGDKEAPPPVLLTPKAVGTPGGGGGGAVPGISAMSRGDLSQRAKDLSKRSFSSQRPGMERQNRRPGPGGKAGSSGSSSGGGGGGPGGRTGPGRGDKRSWPSPKNRSRPPEERPPGLPLPPPPPSSSAVFRLDQVIHSNPAGIQQALAQLSSRQGSVTAPGGHPRHKPGPPQAPQGPSPRPPTRYEPQRVNSGLSSDPHFEEPGPMVRGVGGTPRDSAGVSPFPPKRRERPPRKPELLQEESLPPPHSSGFLGSKPEGPGPQAESRDTGTEALTPHIWNRLHTATSRKSYRPSSMEPWMEPLSPFEDVAGTEMSQSDSGVDLSGDSQVSSGPCSQRSSPDGGLKGAAEGPPKRPGGSSPLNAVPCEGPPGSEPPRRPPPAPHDGDRKELPREQPLPPGPIGTERSQRTDRGTEPGPIRPSHRPGPPVQFGTSDKDSDLRLVVGDSLKAEKELTASVTEAIPVSRDWELLPSAAASAEPQSKNLDSGHCVPEPSSSGQRLYPEVFYGSAGPSSSQISGGAMDSQLHPNSGGFRPGTPSLHPYRSQPHRRCPASQCIKDLN

SEQ ID NO: 825833 - protein, 2072 aa, Homo sapiens
EPARFELQVLRCELLTQGRAANSGAELLTQARAAKGKDGKKYSSLNLFDTYKGKSLEIQKPAVAPRHGLQSLGKVAIARRMPPPANLPSLKAENKGNDPNVSLVPKDGTGWASKQEQSDPKSSDASTAQPPESQPLPASQTPASNQPKRPPAAPENTPLVPSGVKSWAQASVTHGAHGDGGRASSLLSRFSREEFPTLQAAGDQDKAAKERESAEQSSGPGPSLRPQNSTTWRDGGGRGPDELEGPDSKLHHGHDPRGGLQPSGPPQFPPYRGMMPPFMYPPYLPFPPPYGPQGPYRYPTPDGPRRAIQVWVCGWGQGKLIGGGDGFLARRLSLDQSRMWLYNMPYFIFFFVYSRFPRVAGPRGSGPPMRLVEPVGRPSILKEDNLKEFDQLDQENDDGWAGAHEEVDYTEKLKFSDEEDGRDSDEEGAEGHRDSQSASGEERPPEADGKKGNSPNSEPPTPKTAWAETSRPPETEPGPPAPKPPLPPPHRGPAGNWGPPGDYPDRGGPPCKPPAPEDEDEAWRQRRKQSSSEISLAVERARRRREEEERRMQEERRAACAEKLKRLDEKFGAPDKRLKAEPAAPPAAPSTPAPPPAVPKELPAPPAPPPASAPTPEKEPEEPAQAPPAQSTPTPGVAAAPTLVSGGGSTSSTSSGSFEASPVEPQLPSKEGPEPPEEVPPPTTPPVPKVEPKGDGIGPTRQPPSQGLGYPKYQKSLPPRFQRQQQEQLLKQQQQHQWQQHQQGSAPPTPVPPSPPQPVTLGAVPAPQAPPPPPKALYPGALGRPPPMPPMNFDPRWMMIPPYVDPRLLQGRPPLDFYPPGVHPSGLVPRERSDSGGSSSEPFDRHAPAMLRERGTPPVDPKLAWVGDVFTATPAEPRPLTSPLRQAADEDDKGMRSETPPVPPPPPYLASYPGFPENGAPGPPISRFPLEEPGPRPLPWPPGSDEVAKIQTPPPKKEPPKEETAQLTGPEAGRKPARGVGSGGQGPPPPRRESRTETRWGPRPGSSRRGIPPEEPGAPPRRAGPIKKPPPPTKVEELPPKPLEQGDETPKPPKPDPLKITKGKLGGPKETPPNGNLSPAPRLRRDYSYERVGPTSCRGRGRGEYFARGRGFRGTYGGRGRGARSREFRSYREFRGDDGRGGGTGGPNHPPAPRGRTASETRSEGSEYEEIPKRRRQRGSETGSETHESDLAPSDKEAPTPKEGTLTQVPLAPPPPGAPPSPAPARFTARGGRVFTPRGVPSRRGRGGGRPPPQVCPGWSPPAKSLAPKKPPTGPLPPSKEPLKEKLIPGPLSPVARGGSNGGSNVGMEDGERPRRRRHGRAQQQDKPPRFRRLKQERENAARGSEGKPSLTLPASAPGPEEALTTVTVAPAPRRAAAKSPDLSNQNSDQANEEWETASESSDFTSERRGDKEAPPPVLLTPKAVGTPGGGGGGAVPGISAMSRGDLSQRAKDLSKRSFSSQRPGMERQNRRPGPGGKAGSSGSSSGGGGGGPGGRTGPGRGDKRSWPSPKNRSRPPEERPPGLPLPPPPPSSSAVFRLDQVIHSNPAGIQQALAQLSSRQGSVTAPGGHPRHKPGPPQAPQGPSPRPPTRYEPQRVNSGLSSDPHFEEPGPMVRGVGGTPRDSAGVSPFPPKRRERPPRKPELLQEESLPPPHSSGFLGSKPEGPGPQAESRDTGTEALTPHIWNRLHTATSRKSYRPSSMEPWMEPLSPFEDVAGTEMSQSDSGVDLSGDSQVSSGPCSQRSSPDGGLKGAAEGPPKRPGGSSPLNAVPCEGPPGSEPPRRPPPAPHDGDRKELPREQPLPPGPIGTERSQRTDRGTEPGPIRPSHRPGPPVQFGTSDKDSDLRLVVGDSLKAEKELTASVTEAIPVSRDWELLPSAAASAEPQSKNLDSGHCVPEPSSSGQRLYPEVFYGSAGPSSSQISGGAMDSQLHPNSGGFRPGTPSLHPYSITAFYPAALLACSRELSGVWSPMRYELGVAVGVSTPLLSLRFARLACLVFGRRSASPRIYLLSRWGKGSPRAPAAMSPGDSVLGTWSCADTLPLLFCTVAVWPRCGATVCIGVLTAASVWGGV

SEQ ID NO: 825834 - protein, 301 aa, Homo sapiens
CSLLREGLGPGTPSLHPYRSQPLYLPPGPAPPSALLSGVALKGQFLDFSTMQATELGKLPAGGVLYPPPSFLYSPAFCPSPLPDTSLLQVRQDLPSPSDFYSTPLQPGGQSGFLPSGAPAQQMLLPMVDSQLPVVNFGSLPPAPPPAPPPLSLLPVGPALQPPSLAVRPPPAPATRVLPSPARPFPASLGRAELHPVELKPFQDYQKLSSNLGGPGSSRTPPTGRSFSGLNSRLKATPSTYSGVFRTQRVDLYQQASPPDALRWIPKPWERTGPPPREGPSRRAEEPGSRGDKEPGLPPPR

SEQ ID NO: 825835 - protein, 1777 aa, Homo sapiens
EPARFELQVLRCELLTQGRAANSGAELLTQARAAKGKDGKKYSSLNLFDTYKGKSLEIQKPAVAPRHGLQSLGKVAIARRMPPPANLPSLKAENKGNDPNVSLVPKDGTGWASKQEQSDPKSSDASTAQPPESQPLPASQTPASNQPKRPPAAPENTPLVPSGVKSWAQASVTHGAHGDGGRASSLLSRFSREEFPTLQAAGDQDKAAKERESAEQSSGPGPSLRPQNSTTWRDGGGRGPDELEGPDSKLHHGHDPRGGLQPSGPPQFPPYRGMMPPFMYPPYLPFPPPYGPQGPYRYPTPDGPRRAIQVWVCGWGQGKLIGGGDGFLARRLSLDQSRMWLYNMPYFIFFFVYSRFPRVAGPRGSGPPMRLVEPVGRPSILKEDNLKEFDQLDQENDDGWAGAHEEVDYTEKLKFSDEEDGRDSDEEGAEGHRDSQSASGEERPPEADGKKGNSPNSEPPTPKTAWAETSRPPETEPGPPAPKPPLPPPHRGPAGNWGPPGDYPDRGGPPCKPPAPEDEDEAWRQRRKQSSSEISLAVERARRRREEEERRMQEERRAACAEKLKRLDEKFGAPDKRLKAEPAAPPAAPSTPAPPPAVPKELPAPPAPPPASAPTPEKEPEEPAQAPPAQSTPTPGVAAAPTLVSGGGSTSSTSSGSFEASPVEPQLPSKEGPEPPEEVPPPTTPPVPKVEPKGDGIGPTRQPPSQGLGYPKYQKSLPPRFQRQQQEQLLKQQQQHQWQQHQQGSAPPTPVPPSPPQPVTLGAVPAPQAPPPPPKALYPGALGRPPPMPPMNFDPRWMMIPPYVDPRLLQGRPPLDFYPPGVHPSGLVPRERSDSGGSSSEPFDRHAPAMLRERGTPPVDPKLAWVGDVFTATPAEPRPLTSPLRQAADEDDKGMRSETPPVPPPPPYLASYPGFPENGAPGPPISRFPLEEPGPRPLPWPPGSDEVAKIQTPPPKKEPPKEETAQLTGPEAGRKPARGVGSGGQGPPPPRRESRTETRWGPRPGSSRRGIPPEEPGAPPRRAGPIKKPPPPTKVEELPPKPLEQGDETPKPPKPDPLKITKGKLGGPKETPPNGNLSPAPRLRRDYSYERVGPTSCRGRGRGEYFARGRGFRGTYGGRGRGARSREFRSYREFRGDDGRGGGTGGPNHPPAPRGRTASETRSEGSEYEEIPKRRRQRGSETGSETHESDLAPSDKEAPTPKEGTLTQVPLAPPPPGAPPSPAPARFTARGGRVFTPRGVPSRRGRGGGRPPPQVCPGWSPPAKSLAPKKPPTGPLPPSKEPLKEKLIPGPLSPVARGGSNGGSNVGMEDGERPRRRRHGRAQQQDKPPRFRRLKQERENAARGSEGKPSLTLPASAPGPEEALTTVTVAPAPRRAAAKSPDLSNQNSDQANEEWETASESSDFTSERRGDKEAPPPVLLTPKAVGTPGGGGGGAVPGISAMSRGDLSQRAKDLSKRSFSSQRPGMERQNRRPGPGGKAGSSGSSSGGGGGGPGGRTGPGRGDKRSWPSPKNRSRPPEERPPGLPLPPPPPSSSAVFRLDQVIHSNPAGIQQALAQLSSRQGSVTAPGGHPRHKPGPPQAPQGPSPRPPTRYEPQRVNSGLSSDPHFEEPGPMVRGVGGTPRDSAGVSPFPPKRRERPPRKPELLQEESLPPPHSSGFLGSKPEGPGPQAESRDTGTEALTPHIWNRLHTATSRKSYRPSSMEPWMEPLSPFEDVAGTEMSQSDSGVDLSGDSQVSSGPCSQRSSPDGGLKGAAEGPPKRHPLQLCASRSTHAQLFH

SEQ ID NO: 825836 - protein, 175 aa, Homo sapiens [sequence omitted]

SEQ ID NO: 825837 - protein, 896 aa, Homo sapiens
EPARFELQVLRCELLTQGRAANSGAELLTQARAAKGKDGKKYSSLNLFDTYKGKSLEIQKPAVAPRHGLQSLGKVAIARRMPPPANLPSLKAENKGNDPNVSLVPKDGTGWASKQEQSDPKSSDASTAQPPESQPLPASQTPASNQPKRPPAAPENTPLVPSGVKSWAQASVTHGAHGDGGRASSLLSRFSREEFPTLQAAGDQDKAAKERESAEQSSGPGPSLRPQNSTTWRDGGGRGPDELEGPDSKLHHGHDPRGGLQPSGPPQFPPYRGMMPPFMYPPYLPFPPPYGPQGPYRYPTPDGPRRAIQVWVCGWGQGKLIGGGDGFLARRLSLDQSRMWLYNMPYFIFFFVYSRFPRVAGPRGSGPPMRLVEPVGRPSILKEDNLKEFDQLDQENDDGWAGAHEEVDYTEKLKFSDEEDGRDSDEEGAEGHRDSQSASGEERPPEADGKKGNSPNSEPPTPKTAWAETSRPPETEPGPPAPKPPLPPPHRGPAGNWGPPGDYPDRGGPPCKPPAPEDEDEAWRQRRKQSSSEISLAVERARRRREEEERRMQEERRAACAEKLKRLDEKFGAPDKRLKAEPAAPPAAPSTPAPPPAVPKELPAPPAPPPASAPTPEKEPEEPAQAPPAQSTPTPGVAAAPTLVSGGGSTSSTSSGSFEASPVEPQLPSKEGPEPPEEVPPPTTPPVPKVEPKGDGIGPTRQPPSQGLGYPKYQKSLPPRFQRQQQEQLLKQQQQHQWQQHQQGSAPPTPVPPSPPQPVTLGAVPAPQAPPPPPKALYPGALGRPPPMPPMNFDPRWMMIPPYVDPRLLQGRPPLDFYPPGVHPSGLVPRERSDSGGSSSEPFDRHAPAMLRERGTPPVDPKLAWVGDVFTATPAEPRPLTSPLRQAADEDDKGMR

SEQ ID NO: 825838 - protein, 765 aa, Homo sapiens
EPARFELQVLRCELLTQGRAANSGAELLTQARAAKGKDGKKYSSLNLFDTYKGKSLEIQKPAVAPRHGLQSLGKVAIARRMPPPANLPSLKAENKGNDPNVSLVPKDGTGWASKQEQSDPKSSDASTAQPPESQPLPASQTPASNQPKRPPAAPENTPLVPSGVKSWAQASVTHGAHGDGGRASSLLSRFSREEFPTLQAAGDQDKAAKERESAEQSSGPGPSLRPQNSTTWRDGGGRGPDELEGPDSKLHHGHDPRGGLQPSGPPQFPPYRGMMPPFMYPPYLPFPPPYGPQGPYRYPTPDGPRRAIQVWVCGWGQGKLIGGGDGFLARRLSLDQSRMWLYNMPYFIFFFVYSRFPRVAGPRGSGPPMRLVEPVGRPSILKEDNLKEFDQLDQENDDGWAGAHEEVDYTEKLKFSDEEDGRDSDEEGAEGHRDSQSASGEERPPEADGKKGNSPNSEPPTPKTAWAETSRPPETEPGPPAPKPPLPPPHRGPAGNWGPPGDYPDRGGPPCKPPAPEDEDEAWRQRRKQSSSEISLAVERARRRREEEERRMQEERRAACAEKLKRLDEKFGAPDKRLKAEPAAPPAAPSTPAPPPAVPKELPAPPAPPPASAPTPEKEPEEPAQAPPAQSTPTPGVAAAPTLVSGGGSTSSTSSGSFEASPVEPQLPSKEGPEPPEEVPPPTTPPVPKVEPKGDGIGPTRQPPSQGLGYPKYQKSLPPRFQRQQQVKSSCLPSKGCFSSWLRSLILFISYLLGPFASLSSCLHC

SEQ ID NO: 825839 - protein, 305 aa, Homo sapiens
EPARFELQVLRCELLTQGRAANSGAELLTQARAAKGKDGKKYSSLNLFDTYKGKSLEIQKPAVAPRHGLQSLGKVAIARRMPPPANLPSLKAENKGNDPNVSLVPKDGTGWASKQEQSDPKSSDASTAQPPESQPLPASQTPASNQPKRPPAAPENTPLVPSGVKSWAQASVTHGAHGDGGRASSLLSRFSREEFPTLQAAGDQDKAAKERESAEQSSGPGPSLRPQNSTTWRDGGGRGPDELEGPDSKLHHGHDPRGGLQPSGPPQFPPYRGMMPPFMYPPYLPFPPPYGPQGPYRYPTPDGPR

SEQ ID NO: 825840 - protein, 175 aa, Homo sapiens [sequence omitted]

SEQ ID NO: 825841 - protein, 2231 aa, Homo sapiens
EPARFELQVLRCELLTQGRAANSGAELLTQARAAKGKDGKKYSSLNLFDTYKGKSLEIQKPAVAPRHGLQSLGKVAIARRMPPPANLPSLKAENKGNDPNVSLVPKDGTGWASKQEQSDPKSSDASTAQPPESQPLPASQTPASNQPKRPPAAPENTPLVPSGVKSWAQASVTHGAHGDGGRASSLLSRFSREEFPTLQAAGDQDKAAKERESAEQSSGPGPSLRPQNSTTWRDGGGRGPDELEGPDSKLHHGHDPRGGLQPSGPPQFPPYRGMMPPFMYPPYLPFPPPYGPQGPYRYPTPDGPRRAIQVWVCGWGQGKLIGGGDGFLARRLSLDQSRMWLYNMPYFIFFFVYSRFPRVAGPRGSGPPMRLVEPVGRPSILKEDNLKEFDQLDQENDDGWAGAHEEVDYTEKLKFSDEEDGRDSDEEGAEGHRDSQSASGEERPPEADGKKGNSPNSEPPTPKTAWAETSRPPETEPGPPAPKPPLPPPHRGPAGNWGPPGDYPDRGGPPCKPPAPEDEDEAWRQRRKQSSSEISLAVERARRRREEEERRMQEERRAACAEKLKRLDEKFGAPDKRLKAEPAAPPAAPSTPAPPPAVPKELPAPPAPPPASAPTPEKEPEEPAQAPPAQSTPTPGVAAAPTLVSGGGSTSSTSSGSFEASPVEPQLPSKEGPEPPEEVPPPTTPPVPKVEPKGDGIGPTRQPPSQGLGYPKYQKSLPPRFQRQQQEQLLKQQQQHQWQQHQQGSAPPTPVPPSPPQPVTLGAVPAPQAPPPPPKALYPGALGRPPPMPPMNFDPRWMMIPPYVDPRLLQGRPPLDFYPPGVHPSGLVPRERSDSGGSSSEPFDRHAPAMLRERGTPPVDPKLAWVGDVFTATPAEPRPLTSPLRQAADEDDKGMRSETPPVPPPPPYLASYPGFPENGAPGPPISRFPLEEPGPRPLPWPPGSDEVAKIQTPPPKKEPPKEETAQLTGPEAGRKPARGVGSGGQGPPPPRRESRTETRWGPRPGSSRRGIPPEEPGAPPRRAGPIKKPPPPTKVEELPPKPLEQGDETPKPPKPDPLKITKGKLGGPKETPPNGNLSPAPRLRRDYSYERVGPTSCRGRGRGEYFARGRGFRGTYGGRGRGARSREFRSYREFRGDDGRGGGTGGPNHPPAPRGRTASETRSEGSEYEEIPKRRRQRGSETGSETHESDLAPSDKEAPTPKEGTLTQVPLAPPPPGAPPSPAPARFTARGGRVFTPRGVPSRRGRGGGRPPPQVCPGWSPPAKSLAPKKPPTGPLPPSKEPLKEKLIPGPLSPVARGGSNGGSNVGMEDGERPRRRRHGRAQQQDKPPRFRRLKQERENAARGSEGKPSLTLPASAPGPEEALTTVTVAPAPRRAAAKSPDLSNQNSDQANEEWETASESSDFTSERRGDKEAPPPVLLTPKAVGTPGGGGGGAVPGISAMSRGDLSQRAKDLSKRSFSSQRPGMERQNRRPGPGGKAGSSGSSSGGGGGGPGGRTGPGRGDKRSWPSPKNRSRPPEERPPGLPLPPPPPSSSAVFRLDQVIHSNPAGIQQALAQLSSRQGSVTAPGGHPRHKPGPPQAPQGPSPRPPTRYEPQRVNSGLSSDPHFEEPGPMVRGVGGTPRDSAGVSPFPPKRRERPPRKPELLQEESLPPPHSSGFLGSKPEGPGPQAESRDTGTEALTPHIWNRLHTATSRKSYRPSSMEPWMEPLSPFEDVAGTEMSQSDSGVDLSGDSQVSSGPCSQRSSPDGGLKGAAEGPPKRPGGSSPLNAVPCEGPPGSEPPRRPPPAPHDGDRKELPREQPLPPGPIGTERSQRTDRGTEPGPIRPSHRPGPPVQFGTSDKDSDLRLVVGDSLKAEKELTASVTEAIPVSRDWELLPSAAASAEPQSKNLDSGHCVPEPSSSGQRLYPEVFYGSAGPSSSQISGGAMDSQLHPNSGGFRPGTPSLHPYRSQPLYLPPGPAPPSALLSGVALKGQFLDFSTMQATELGKLPAGGVLYPPPSFLYSPAFCPSPLPDTSLLQVRQDLPSPSDFYSTPLQPGGQSGFLPSGAPAQQMLLPMVDSQLPVVNFGSLPPAPPPAPPPLSLLPVGPALQPPSLAVRPPPAPATRVLPSPARPFPASLGRAELHPVELKPFQDYQKLSSNLGGPGSSRTPPTGRSFSGLNSRLKATPSTYSGVFRTQRVDLYQQASPPDALRWIPKPWERTGPPPREGPSRRAEEPGSRGDKEPGLPPPR

SEQ ID NO: 825842 - protein, 1470 aa, Homo sapiens
EPARFELQVLRCELLTQGRAANSGAELLTQARAAKGKDGKKYSSLNLFDTYKGKSLEIQKPAVAPRHGLQSLGKVAIARRMPPPANLPSLKAENKGNDPNVSLVPKDGTGWASKQEQSDPKSSDASTAQPPESQPLPASQTPASNQPKRPPAAPENTPLVPSGVKSWAQASVTHGAHGDGGRASSLLSRFSREEFPTLQAAGDQDKAAKERESAEQSSGPGPSLRPQNSTTWRDGGGRGPDELEGPDSKLHHGHDPRGGLQPSGPPQFPPYRGMMPPFMYPPYLPFPPPYGPQGPYRYPTPDGPRRAIQVWVCGWGQGKLIGGGDGFLARRLSLDQSRMWLYNMPYFIFFFVYSRFPRVAGPRGSGPPMRLVEPVGRPSILKEDNLKEFDQLDQENDDGWAGAHEEVDYTEKLKFSDEEDGRDSDEEGAEGHRDSQSASGEERPPEADGKKGNSPNSEPPTPKTAWAETSRPPETEPGPPAPKPPLPPPHRGPAGNWGPPGDYPDRGGPPCKPPAPEDEDEAWRQRRKQSSSEISLAVERARRRREEEERRMQEERRAACAEKLKRLDEKFGAPDKRLKAEPAAPPAAPSTPAPPPAVPKELPAPPAPPPASAPTPEKEPEEPAQAPPAQSTPTPGVAAAPTLVSGGGSTSSTSSGSFEASPVEPQLPSKEGPEPPEEVPPPTTPPVPKVEPKGDGIGPTRQPPSQGLGYPKYQKSLPPRFQRQQQEQLLKQQQQHQWQQHQQGSAPPTPVPPSPPQPVTLGAVPAPQAPPPPPKALYPGALGRPPPMPPMNFDPRWMMIPPYVDPRLLQGRPPLDFYPPGVHPSGLVPRERSDSGGSSSEPFDRHAPAMLRERGTPPVDPKLAWVGDVFTATPAEPRPLTSPLRQAADEDDKGMRSETPPVPPPPPYLASYPGFPENGAPGPPISRFPLEEPGPRPLPWPPGSDEVAKIQTPPPKKEPPKEETAQLTGPEAGRKPARGVGSGGQGPPPPRRESRTETRWGPRPGSSRRGIPPEEPGAPPRRAGPIKKPPPPTKVEELPPKPLEQGDETPKPPKPDPLKITKGKLGGPKETPPNGNLSPAPRLRRDYSYERVGPTSCRGRGRGEYFARGRGFRGTYGGRGRGARSREFRSYREFRGDDGRGGGTGGPNHPPAPRGRTASETRSEGSEYEEIPKRRRQRGSETGSETHESDLAPSDKEAPTPKEGTLTQVPLAPPPPGAPPSPAPARFTARGGRVFTPRGVPSRRGRGGGRPPPQVCPGWSPPAKSLAPKKPPTGPLPPSKEPLKEKLIPGPLSPVARGGSNGGSNVGMEDGERPRRRRHGRAQQQDKPPRFRRLKQERENAARGSEGKPSLTLPASAPGPEEALTTVTVAPAPRRAAAKSPDLSNQNSDQANEEWETASESSDFTSERRGDKEAPPPVLLTPKAVGTPGGGGGGAVPGISAMSSAWTKLSTATLLASNRLWPSLVAVKGV

SEQ ID NO: 825843 - protein, 851 aa, Homo sapiens
RAQCYQSSVYSSLAALYYIQSSDFTSERRGDKEAPPPVLLTPKAVGTPGGGGGGAVPGISAMSRGDLSQRAKDLSKRSFSSQRPGMERQNRRPGPGGKAGSSGSSSGGGGGGPGGRTGPGRGDKRSWPSPKNRSRPPEERPPGLPLPPPPPSSSAVFRLDQVIHSNPAGIQQALAQLSSRQGSVTAPGGHPRHKPGPPQAPQGPSPRPPTRYEPQRVNSGLSSDPHFEEPGPMVRGVGGTPRDSAGVSPFPPKRRERPPRKPELLQEESLPPPHSSGFLGSKPEGPGPQAESRDTGTEALTPHIWNRLHTATSRKSYRPSSMEPWMEPLSPFEDVAGTEMSQSDSGVDLSGDSQVSSGPCSQRSSPDGGLKGAAEGPPKRPGGSSPLNAVPCEGPPGSEPPRRPPPAPHDGDRKELPREQPLPPGPIGTERSQRTDRGTEPGPIRPSHRPGPPVQFGTSDKDSDLRLVVGDSLKAEKELTASVTEAIPVSRDWELLPSAAASAEPQSKNLDSGHCVPEPSSSGQRLYPEVFYGSAGPSSSQISGGAMDSQLHPNSGGFRPGTPSLHPYRSQPLYLPPGPAPPSALLSGVALKGQFLDFSTMQATELGKLPAGGVLYPPPSFLYSPAFCPSPLPDTSLLQVRQDLPSPSDFYSTPLQPGGQSGFLPSGAPAQQMLLPMVDSQLPVVNFGSLPPAPPPAPPPLSLLPVGPALQPPSLAVRPPPAPATRVLPSPARPFPASLGRAELHPVELKPFQDYQKLSSNLGGPGSSRTPPTGRSFSGLNSRLKATPSTYSGVFRTQRVDLYQQASPPDALRWIPKPWERTGPPPREGPSRRAEEPGSRGDKEPGLPPPR

SEQ ID NO: 825844 - protein, 2128 aa, Homo sapiens
EPARFELQVLRCELLTQGRAANSGAELLTQARAAKGKDGKKYSSLNLFDTYKGKSLEIQKPAVAPRHGLQSLGKVAIARRMPPPANLPSLKAENKGNDPNVSLVPKDGTGWASKQEQSDPKSSDASTAQPPESQPLPASQTPASNQPKRPPAAPENTPLVPSGVKSWAQASVTHGAHGDGGRASSLLSRFSREEFPTLQAAGDQDKAAKERESAEQSSGPGPSLRPQNSTTWRDGGGRGPDELEGPDSKLHHGHDPRGGLQPSGPPQFPPYRGMMPPFMYPPYLPFPPPYGPQGPYRYPTPDGPRRAIQVWVCGWGQGKLIGGGDGFLARRLSLDQSRMWLYNMPYFIFFFVYSRFPRVAGPRGSGPPMRLVEPVGRPSILKEDNLKEFDQLDQENDDGWAGAHEEVDYTEKLKFSDEEDGRDSDEEGAEGHRDSQSASGEERPPEADGKKGNSPNSEPPTPKTAWAETSRPPETEPGPPAPKPPLPPPHRGPAGNWGPPGDYPDRGGPPCKPPAPEDEDEAWRQRRKQSSSEISLAVERARRRREEEERRMQEERRAACAEKLKRLDEKFGAPDKRLKAEPAAPPAAPSTPAPPPAVPKELPAPPAPPPASAPTPEKEPEEPAQAPPAQSTPTPGVAAAPTLVSGGGSTSSTSSGSFEASPVEPQLPSKEGPEPPEEVPPPTTPPVPKVEPKGDGIGPTRQPPSQGLGYPKYQKSLPPRFQRQQQEQLLKQQQQHQWQQHQQGSAPPTPVPPSPPQPVTLGAVPAPQAPPPPPKALYPGALGRPPPMPPMNFDPRWMMIPPYVDPRLLQGRPPLDFYPPGVHPSGLVPRERSDSGGSSSEPFDRHAPAMLRERGTPPVDPKLAWVGDVFTATPAEPRPLTSPLRQAADEDDKGMRSETPPVPPPPPYLASYPGFPENGAPGPPISRFPLEEPGPRPLPWPPGSDEVAKIQTPPPKKEPPKEETAQLTGPEAGRKPARGVGSGGQGPPPPRRESRTETRWGPRPGSSRRGIPPEEPGAPPRRAGPIKKPPPPTKVEELPPKPLEQGDETPKPPKPDPLKITKGKLGGPKETPPNGNLSPAPRLRRDYSYERVGPTSCRGRGRGEYFARGRGFRGTYGGRGRGARSREFRSYREFRGDDGRGGGTGGPNHPPAPRGRTASETRSEGSEYEEIPKRRRQRGSETGSETHESDLAPSDKEAPTPKEGTLTQVPLAPPPPGAPPSPAPARFTARGGRVFTPRGVPSRRGRGGGRPPPQVCPGWSPPAKSLAPKKPPTGPLPPSKEPLKEKLIPGPLSPVARGGSNGGSNVGMEDGERPRRRRHGRAQQQDKPPRFRRLKQERENAARGSEGKPSLTLPASAPGPEEALTTVTVAPAPRRAAAKSPDLSNQNSDQANEEWETASESSDFTSERRGDKEAPPPVLLTPKAVGTPGGGGGGAVPGISAMSRGDLSQRAKDLSKRSFSSQRPGMERQNRRPGPGGKAGSSGSSSGGGGGGPGGRTGPGRGDKRSWPSPKNRSRPPEERPPGLPLPPPPPSSSAVFRLDQVIHSNPAGIQQALAQLSSRQGSVTAPGGHPRHKPGPPQAPQGPSPRPPTRYEPQRVNSGLSSDPHFEEPGPMVRGVGGTPRDSAGVSPFPPKRRERPPRKPELLQEESLPPPHSSGFLGSKPEGPGPQAESRDTGTEALTPHIWNRLHTATSRKSYRPSSMEPWMEPLSPFEDVAGTEMSQSDSGVDLSGDSQVSSGPCSQRSSPDGGLKGAAEGPPKRPGGSSPLNAVPCEGPPGSEPPRRPPPAPHDGDRKELPREQPLPPGPIGTERSQRTDRGTEPGPIRPSHRPGPPVQFGTSDKDSDLRLVVGDSLKAEKELTASVTEAIPVSRDWELLPSAAASAEPQSKNLDSGHCVPEPSSSGQRLYPEVFYGSAGPSSSQISGGAMDSQLHPNSGGFRPGTPSLHPYRSQPLYLPPGPAPPSALLSGVALKGQFLDFSTMQATELGKLPAGGVLYPPPSFLYSPAFCPSPLPDTSLLQVRQDLPSPSDFYSTPLQPGGQSGFLPSGAPAQQMLLPMVDSQLPVVNFGSLPPAPPPAPPPLSLLPVGPALQPPSLAVRPPPAPATRVLPSPARPFPASLGRAEVRYRN

SEQ ID NO: 825845 - protein, 766 aa, Homo sapiens
MERQNRRPGPGGKAGSSGSSSGGGGGGPGGRTGPGRGDKRSWPSPKNRSRPPEERPPGLPLPPPPPSSSAVFRLDQVIHSNPAGIQQALAQLSSRQGSVTAPGGHPRHKPGPPQAPQGPSPRPPTRYEPQRVNSGLSSDPHFEEPGPMVRGVGGTPRDSAGVSPFPPKRRERPPRKPELLQEESLPPPHSSGFLGSKPEGPGPQAESRDTGTEALTPHIWNRLHTATSRKSYRPSSMEPWMEPLSPFEDVAGTEMSQSDSGVDLSGDSQVSSGPCSQRSSPDGGLKGAAEGPPKRPGGSSPLNAVPCEGPPGSEPPRRPPPAPHDGDRKELPREQPLPPGPIGTERSQRTDRGTEPGPIRPSHRPGPPVQFGTSDKDSDLRLVVGDSLKAEKELTASVTEAIPVSRDWELLPSAAASAEPQSKNLDSGHCVPEPSSSGQRLYPEVFYGSAGPSSSQISGGAMDSQLHPNSGGFRPGTPSLHPYRSQPLYLPPGPAPPSALLSGVALKGQFLDFSTMQATELGKLPAGGVLYPPPSFLYSPAFCPSPLPDTSLLQVRQDLPSPSDFYSTPLQPGGQSGFLPSGAPAQQMLLPMVDSQLPVVNFGSLPPAPPPAPPPLSLLPVGPALQPPSLAVRPPPAPATRVLPSPARPFPASLGRAELHPVELKPFQDYQKLSSNLGGPGSSRTPPTGRSFSGLNSRLKATPSTYSGVFRTQRVDLYQQASPPDALRWIPKPWERTGPPPREGPSRRAEEPGSRGDKEPGLPPPR

SEQ ID NO: 825846 - protein, 2237 aa, Homo sapiens
EPARFELQVLRCELLTQGRAANSGAELLTQARAAKGKDGKKYSSLNLFDTYKGKSLEIQKPAVAPRHGLQSLGKVAIARRMPPPANLPSLKAENKGNDPNVSLVPKDGTGWASKQEQSDPKSSDASTAQPPESQPLPASQTPASNQPKRPPAAPENTPLVPSGVKSWAQASVTHGAHGDGGRASSLLSRFSREEFPTLQAAGDQDKAAKERESAEQSSGPGPSLRPQNSTTWRDGGGRGPDELEGPDSKLHHGHDPRGGLQPSGPPQFPPYRGMMPPFMYPPYLPFPPPYGPQGPYRYPTPDGPRRAIQVWVCGWGQGKLIGGGDGFLARRLSLDQSRMWLYNMPYFIFFFVYSRFPRVAGPRGSGPPMRLVEPVGRPSILKEDNLKEFDQLDQENDDGWAGAHEEVDYTEKLKFSDEEDGRDSDEEGAEGHRDSQSASGEERPPEADGKKGNSPNSEPPTPKTAWAETSRPPETEPGPPAPKPPLPPPHRGPAGNWGPPGDYPDRGGPPCKPPAPEDEDEAWRQRRKQSSSEISLAVERARRRREEEERRMQEERRAACAEKLKRLDEKFGAPDKRLKAEPAAPPAAPSTPAPPPAVPKELPAPPAPPPASAPTPEKEPEEPAQAPPAQSTPTPGVAAAPTLVSGGGSTSSTSSGSFEASPVEPQLPSKEGPEPPEEVPPPTTPPVPKVEPKGDGIGPTRQPPSQGLGYPKYQKSLPPRFQRQQQEQLLKQQQQHQWQQHQQGSAPPTPVPPSPPQPVTLGAVPAPQAPPPPPKALYPGALGRPPPMPPMNFDPRWMMIPPYVDPRLLQGRPPLDFYPPGVHPSGLVPRERSDSGGSSSEPFDRHAPAMLRERGTPPVDPKLAWVGDVFTATPAEPRPLTSPLRQAADEDDKGMRSETPPVPPPPPYLASYPGFPENGAPGPPISRFPLEEPGPRPLPWPPGSDEVAKIQTPPPKKEPPKEETAQLTGPEAGRKPARGVGSGGQGPPPPRRESRTETRWGPRPGSSRRGIPPEEPGAPPRRAGPIKKPPPPTKVEELPPKPLEQGDETPKPPKPDPLKITKGKLGGPKETPPNGNLSPAPRLRRDYSYERVGPTSCRGRGRGEYFARGRGFRGTYGGRGRGARSREFRSYREFRGDDGRGGGTGGPNHPPAPRGRTASETRSEGSEYEEIPKRRRQRGSETGSETHESDLAPSDKEAPTPKEGTLTQVPLAPPPPGAPPSPAPARFTARGGRVFTPRGVPSRRGRGGGRPPPQVCPGWSPPAKSLAPKKPPTGPLPPSKEPLKEKLIPGPLSPVARGGSNGGSNVGMEDGERPRRRRHGRAQQQDKPPRFRRLKQERENAARGSEGKPSLTLPASAPGPEEALTTVTVAPAPRRAAAKSPDLSNQNSDQANEEWETASESSDFTSERRGDKEAPPPVLLTPKAVGTPGGGGGGAVPGISAMSRGDLSQRAKDLSKRSFSSQRPGMERQNRRPGPGGKAGSSGSSSGGGGGGPGGRTGPGRGDKRSWPSPKNRSRPPEERPPGLPLPPPPPSSSAVFRLDQVIHSNPAGIQQALAQLSSRQGSVTAPGGHPRHKPGPPQAPQGPSPRPPTRYEPQRVNSGLSSDPHFEEPGPMVRGVGGTPRDSAGVSPFPPKRRERPPRKPELLQEESLPPPHSSGFLGSKPEGPGPQAESRDTGTEALTPHIWNRLHTATSRKSYRPSSMEPWMEPLSPFEDVAGTEMSQSDSGVDLSGDSQVSSGPCSQRSSPDGGLKGAAEGPPKRPGGSSPLNAVPCEGPPGSEPPRRPPPAPHDGDRKELPREQPLPPGPIGTERSQRTDRGTEPGPIRPSHRPGPPVQFGTSDKDSDLRLVVGDSLKAEKELTASVTEAIPVSRDWELLPSAAASAEPQSKNLDSGHCVPEPSSSGQRLYPEVFYGSAGPSSSQISGGAMDSQLHPNSGGFRPGTPSLHPYRSQPLYLPPGPAPPSALLSGVALKGQFLDFSTMQATELGKLPAGGVLYPPPSFLYSPAFCPSPLPDTSLLQVRQDLPSPSDFYSTPLQPGGQSGFLPSGAPAQQMLLPMVDSQLPVVNFGSLPPAPPPAPPPLSLLPVGPALQPPSLAVRPPPAPATRVLPSPARPFPASLGRAELHPVELKPFQDYQKLSSNLGGPGSSRTPPTGRRPSSLRSFSGLNSRLKATPSTYSGVFRTQRVDLYQQASPPDALRWIPKPWERTGPPPREGPSRRAEEPGSRGDKEPGLPPPR

SEQ ID NO: 825847 - protein, 2128 aa, Homo sapiens; identical to SEQ ID NO: 825844

SEQ ID NO: 825848 - protein, 1812 aa, Homo sapiens
EPARFELQVLRCELLTQGRAANSGAELLTQARAAKGKDGKKYSSLNLFDTYKGKSLEIQKPAVAPRHGLQSLGKVAIARRMPPPANLPSLKAENKGNDPNVSLVPKDGTGWASKQEQSDPKSSDASTAQPPESQPLPASQTPASNQPKRPPAAPENTPLVPSGVKSWAQASVTHGAHGDGGRASSLLSRFSREEFPTLQAAGDQDKAAKERESAEQSSGPGPSLRPQNSTTWRDGGGRGPDELEGPDSKLHHGHDPRGGLQPSGPPQFPPYRGMMPPFMYPPYLPFPPPYGPQGPYRYPTPDGPRRAIQVWVCGWGQGKLIGGGDGFLARRLSLDQSRMWLYNMPYFIFFFVYSRFPRVAGPRGSGPPMRLVEPVGRPSILKEDNLKEFDQLDQENDDGWAGAHEEVDYTEKLKFSDEEDGRDSDEEGAEGHRDSQSASGEERPPEADGKKGNSPNSEPPTPKTAWAETSRPPETEPGPPAPKPPLPPPHRGPAGNWGPPGDYPDRGGPPCKPPAPEDEDEAWRQRRKQSSSEISLAVERARRRREEEERRMQEERRAACAEKLKRLDEKFGAPDKRLKAEPAAPPAAPSTPAPPPAVPKELPAPPAPPPASAPTPEKEPEEPAQAPPAQSTPTPGVAAAPTLVSGGGSTSSTSSGSFEASPVEPQLPSKEGPEPPEEVPPPTTPPVPKVEPKGDGIGPTRQPPSQGLGYPKYQKSLPPRFQRQQQEQLLKQQQQHQWQQHQQGSAPPTPVPPSPPQPVTLGAVPAPQAPPPPPKALYPGALGRPPPMPPMNFDPRWMMIPPYVDPRLLQGRPPLDFYPPGVHPSGLVPRERSDSGGSSSEPFDRHAPAMLRERGTPPVDPKLAWVGDVFTATPAEPRPLTSPLRQAADEDDKGMRSETPPVPPPPPYLASYPGFPENGAPGPPISRFPLEEPGPRPLPWPPGSDEVAKIQTPPPKKEPPKEETAQLTGPEAGRKPARGVGSGGQGPPPPRRESRTETRWGPRPGSSRRGIPPEEPGAPPRRAGPIKKPPPPTKVEELPPKPLEQGDETPKPPKPDPLKITKGKLGGPKETPPNGNLSPAPRLRRDYSYERVGPTSCRGRGRGEYFARGRGFRGTYGGRGRGARSREFRSYREFRGDDGRGGGTGGPNHPPAPRGRTASETRSEGSEYEEIPKRRRQRGSETGSETHESDLAPSDKEAPTPKEGTLTQVPLAPPPPGAPPSPAPARFTARGGRVFTPRGVPSRRGRGGGRPPPQVCPGWSPPAKSLAPKKPPTGPLPPSKEPLKEKLMPLSPFEDVAGTEMSQSDSGVDLSGDSQVSSGPCSQRSSPDGGLKGAAEGPPKRPGGSSPLNAVPCEGPPGSEPPRRPPPAPHDGDRKELPREQPLPPGPIGTERSQRTDRGTEPGPIRPSHRPGPPVQFGTSDKDSDLRLVVGDSLKAEKELTASVTEAIPVSRDWELLPSAAASAEPQSKNLDSGHCVPEPSSSGQRLYPEVFYGSAGPSSSQISGGAMDSQLHPNSGGFRPGTPSLHPYRSQPLYLPPGPAPPSALLSGVALKGQFLDFSTMQATELGKLPAGGVLYPPPSFLYSPAFCPSPLPDTSLLQVRQDLPSPSDFYSTPLQPGGQSGFLPSGAPAQQMLLPMVDSQLPVVNFGSLPPAPPPAPPPLSLLPVGPALQPPSLAVRPPPAPATRVLPSPARPFPASLGRAELHPVELKPFQDYQKLSSNLGGPGSSRTPPTGRSFSGLNSRLKATPSTYSGVFRTQRVDLYQQASPPDALRWIPKPWERTGPPPREGPSRRAEEPGSRGDKEPGLPPPR

SEQ ID NO: 825849 - protein, 1353 aa, Homo sapiens
EPARFELQVLRCELLTQGRAANSGAELLTQARAAKGKDGKKYSSLNLFDTYKGKSLEIQKPAVAPRHGLQSLGKVAIARRMPPPANLPSLKAENKGNDPNVSLVPKDGTGWASKQEQSDPKSSDASTAQPPESQPLPASQTPASNQPKRPPAAPENTPLVPSGVKSWAQASVTHGAHGDGGRASSLLSRFSREEFPTLQAAGDQDKAAKERESAEQSSGPGPSLRPQNSTTWRDGGGRGPDELEGPDSKLHHGHDPRGGLQPSGPPQFPPYRGMMPPFMYPPYLPFPPPYGPQGPYRYPTPDGPRRAIQVWVCGWGQGKLIGGGDGFLARRLSLDQSRMWLYNMPYFIFFFVYSRFPRVAGPRGSGPPMRLVEPVGRPSILKEDNLKEFDQLDQENDDGWAGAHEEVDYTEKLKFSDEEDGRDSDEEGAEGHRDSQSASGEERPPEADGKKGNSPNSEPPTPKTAWAETSRPPETEPGPPAPKPPLPPPHRGPAGNWGPPGDYPDRGGPPCKPPAPEDEDEAWRQRRKQSSSEISLAVERARRRREEEERRMQEERRAACAEKLKRLDEKFGAPDKRLKAEPAAPPAAPSTPAPPPAVPKELPAPPAPPPASAPTPEKEPEEPAQAPPAQSTPTPGVAAAPTLVSGGGSTSSTSSGSFEASPVEPQLPSKEGPEPPEEVPPPTTPPVPKVEPKGDGIGPTRQPPSQGLGYPKYQKSLPPRFQRQQQEQLLKQQQQHQWQQHQQGSAPPTPVPPSPPQPVTLGAVPAPQAPPPPPKALYPGALGRPPPMPPMNFDPRWMMIPPYVDPRLLQGRPPLDFYPPGVHPSGLVPRERSDSGGSSSEPFDRHAPAMLRERGTPPVDPKLAWVGDVFTATPAEPRPLTSPLRQAADEDDKGMRSETPPVPPPPPYLASYPGFPENGAPGPPISRFPLEEPGPRPLPWPPGSDEVAKIQTPPPKKEPPKEETAQLTGPEAGRKPALRSREWRPGPPTTTQRVNSGLSSDPHFEEPGPMVRGVGGTPRDSAGVSPFPPKRRERPPRKPELLQEESLPPPHSSGFLGSKPEGPGPQAESRDTGTEALTPHIWNRLHTVSGVALKGQFLDFSTMQATELGKLPAGGVLYPPPSFLYSPAFCPSPLPDTSLLQVRQDLPSPSDFYSTPLQPGGQSGFLPSGAPAQQMLLPMVDSQLPVVNFGSLPPAPPPAPPPLSLLPVGPALQPPSLAVRPPPAPATRVLPSPARPFPASLGRAELHPVELKPFQDYQKLSSNLGGPGSSRTPPTGRSFSGLNSRLKATPSTYSGVFRTQRVDLYQQASPPDALRWIPKPWERTGPPPREGPSRRAEEPGSRGDKEPGLPPPR

SEQ ID NO: 825850 - protein, 285 aa, Homo sapiens
CALLDHRGPQLQRSQGCLSVSGVALKGQFLDFSTMQATELGKLPAGGVLYPPPSFLYSPAFCPSPLPDTSLLQVRQDLPSPSDFYSTPLQPGGQSGFLPSGAPAQQMLLPMVDSQLPVVNFGSLPPAPPPAPPPLSLLPVGPALQPPSLAVRPPPAPATRVLPSPARPFPASLGRAELHPVELKPFQDYQKLSSNLGGPGSSRTPPTGRSFSGLNSRLKATPSTYSGVFRTQRVDLYQQASPPDALRWIPKPWERTGPPPREGPSRRAEEPGSRGDKEPGLPPPR

SEQ ID NO: 825851 - protein, 1711 aa, Homo sapiens
EPARFELQVLRCELLTQGRAANSGAELLTQARAAKGKDGKKYSSLNLFDTYKGKSLEIQKPAVAPRHGLQSLGKVAIARRMPPPANLPSLKAENKGNDPNVSLVPKDGTGWASKQEQSDPKSSDASTAQPPESQPLPASQTPASNQPKRPPAAPENTPLVPSGVKSWAQASVTHGAHGDGGRASSLLSRFSREEFPTLQAAGDQDKAAKERESAEQSSGPGPSLRPQNSTTWRDGGGRGPDELEGPDSKLHHGHDPRGGLQPSGPPQFPPYRGMMPPFMYPPYLPFPPPYGPQGPYRYPTPDGPRRAIQVWVCGWGQGKLIGGGDGFLARRLSLDQSRMWLYNMPYFIFFFVYSRFPRVAGPRGSGPPMRLVEPVGRPSILKEDNLKEFDQLDQENDDGWAGAHEEVDYTEKLKFSDEEDGRDSDEEGAEGHRDSQSASGEERPPEADGKKGNSPNSEPPTPKTAWAETSRPPETEPGPPAPKPPLPPPHRGPAGNWGPPGDYPDRGGPPCKPPAPEDEDEAWRQRRKQSSSEISLAVERARRRREEEERRMQEERRAACAEKLKRLDEKFGAPDKRLKAEPAAPPAAPSTPAPPPAVPKELPAPPAPPPASAPTPEKEPEEPAQAPPAQSTPTPGVAAAPTLVSGGGSTSSTSSGSFEASPVEPQLPSKEGPEPPEEVPPPTTPPVPKVEPKGDGIGPTRQPPSQGLGYPKYQKSLPPRFQRQQQEQLLKQQQQHQWQQHQQGSAPPTPVPPSPPQPVTLGAVPAPQAPPPPPKALYPGALGRPPPMPPMNFDPRWMMIPPYVDPRLLQGRPPLDFYPPGVHPSGLVPRERSDSGGSSSEPFDRHAPAMLRERGTPPVDPKLAWVGDVFTATPAEPRPLTSPLRQAADEDDKGMRSETPPVPPPPPYLASYPGFPENGAPGPPISRFPLEEPGPRPLPWPPGSDEVAKIQTPPPKKEPPKEETAQLTGPEAGRKPARGVGSGGQGPPPPRRESRTETRWGPRPGSSRRGIPPEEPGAPPRRAGPIKKPPPPTKVEELPPKPLEQGDETPKPPKPDPLKITKGKLGGPKETPPNGNLSPAPRLRRDYSYERVGPTSCRGRGRGEYFARGRGFRGTYGGRGRGARSREFRSYREFRGDDGRGGGTGGPNHPPAPRGRTASETRSEGSEYEEIPKRRRQRGSETGSETHESDLAPSDKEAPTPKEGTLTQVPLAPPPPGAPPSPAPARFTARGGRVFTPRGVPSRRGRGGGRPPPQVCPGWSPPAKSLAPKKPPTGPLPPSKEPLKEKLIPGPLSPVARGGSNGGSNVGMEDGERPRRRRHGRAQQQDKPPRFRRLKQERENAARGSEGKPSLTLPASAPGPEEALTTVTVAPAPRRAAAKSPDLSNQNSDQANEEWETASESSDFTSERRGDKEAPPPVLLTPKAVGTPGGGGGGAVPGISAMSRGDLSQRAKDLSKRSFSSQRPGMERQNRRPGPGGKAGSSGSSSGGGGGGPGGRTGPGRGDKRSWPSPKNRSRPPEERPPGLPLPPPPPSSSAVFRLDQVIHSNPAGIQQALAQLSSRQGSVTAPGGHPRHKPGPPQAPQGPSPRPPTRYEPQRVNSGLSSDPHFEEPGPMVRGVGGTPRDSAGVSPFPPKRRERPPRKPELLQEESLPPPHSSGFLGSKPEGPGPQAESRDTGTEALTPHIWNRLHTATSRKSYRPSSISTTLRFEQR

SEQ ID NO: 825852 - protein, 688 aa, Homo sapiens
EPARFELQVLRCELLTQGRAANSGAELLTQARAAKGKDGKKYSSLNLFDTYKGKSLEIQKPAVAPRHGLQSLGKVAIARRMPPPANLPSLKAENKGNDPNVSLVPKDGTGWASKQEQSDPKSSDASTAQPPESQPLPASQTPASNQPKRPPAAPENTPLVPSGVKSWAQASVTHGAHGDGGRASSLLSRFSREEFPTLQAAGDQDKAAKERESAEQSSGPGPSLRPQNSTTWRDGGGRGPDELEGPDSKLHHGHDPRGGLQPSGPPQFPPYRGMMPPFMYPPYLPFPPPYGPQGPYRYPTPDGPRRAIQVWVCGWGQGKLIGGGDGFLARRLSLDQSRMWLYNMPYFIFFFVYSRFPRVAGPRGSGPPMRLVEPVGRPSILKEDNLKEFDQLDQENDDGWAGAHEEVDYTEKLKFSDEEDGRDSDEEGAEGHRDSQSASGEERPPEADGKKGNSPNSEPPTPKTAWAETSRPPETEPGPPAPKPPLPPPHRGPAGNWGPPGDYPDRGGPPCKPPAPEDEDEAWRQRRKQSSSEISLAVERARRRREEEERRMQEERRAACAEKLKRLDEKFGAPDKRLKAEPAAPPAAPSTPAPPPAVPKELPAPPAPPPASAPTPEKEPEEPAQAPPAQSTPTPGVAAAPTLVSGGGSTSSTSSGSFEASPVEPQLPSKEGPEPPEEVPPPTTGACI

SEQ ID NO: 825853 - protein, 691 aa, Homo sapiens
EPARFELQVLRCELLTQGRAANSGAELLTQARAAKGKDGKKYSSLNLFDTYKGKSLEIQKPAVAPRHGLQSLGKVAIARRMPPPANLPSLKAENKGNDPNVSLVPKDGTGWASKQEQSDPKSSDASTAQPPESQPLPASQTPASNQPKRPPAAPENTPLVPSGVKSWAQASVTHGAHGDGGRASSLLSRFSREEFPTLQAAGDQDKAAKERESAEQSSGPGPSLRPQNSTTWRDGGGRGPDELEGPDSKLHHGHDPRGGLQPSGPPQFPPYRGMMPPFMYPPYLPFPPPYGPQGPYRYPTPDGPRRAIQVWVCGWGQGKLIGGGDGFLARRLSLDQSRMWLYNMPYFIFFFVYSRFPRVAGPRGSGPPMRLVEPVGRPSILKEDNLKEFDQLDQENDDGWAGAHEEVDYTEKLKFSDEEDGRDSDEEGAEGHRDSQSASGEERPPEADGKKGNSPNSEPPTPKTAWAETSRPPETEPGPPAPKPPLPPPHRGPAGNWGPPGDYPDRGGPPCKPPAPEDEDEAWRQRRKQSSSEISLAVERARRRREEEERRMQEERRAACAEKLKRLDEKFGAPDKRLKAEPAAPPAAPSTPAPPPAVPKELPAPPAPPPASAPTPEKEPEEPAQAPPAQSTPTPGVAAAPTLVSGGGSTSSTSSGSFEASPGMEMGIGTTRCQITASRCLKVQGGKAGDK

SEQ ID NO: 825854 - protein, 69 aa, Homo sapiens
VPRERSDSGGSSSEPFDRHAPAMLRERGTPPVDPKLAWVGDVFTATPAEPRPLTSPLRQAADEDDKGMR

SEQ ID NO: 825855 - protein, 151 aa, Homo sapiens
MSKNTVSSARFRKVDVDEYDENKFVDEEDGGDGQAGPDEGEVDSCLRQGNMTAALQAALKNPPINTKSQAVKDRAGSIVLKVLISFKANDIEKAVQSLDKNGVDLLMKYIYKGFESPSDNSSAMLLQWHEKALAAGGVGSIVRVLTARKTV

SEQ ID NO: 825856 - protein, 151 aa, Homo sapiens; identical to SEQ ID NO: 825855

SEQ ID NO: 825857 - protein, 151 aa, Homo sapiens; identical to SEQ ID NO: 825855

SEQ ID NO: 825858 - protein, 151 aa, Homo sapiens; identical to SEQ ID NO: 825855

SEQ ID NO: 825859 - protein, 151 aa, Homo sapiens; identical to SEQ ID NO: 825855

SEQ ID NO: 825860 - protein, 151 aa, Homo sapiens; identical to SEQ ID NO: 825855

SEQ ID NO: 825861 - protein, 139 aa, Homo sapiens
GPREQALGSVEVVGVTSASPAPVPASRCPSRSCLRQGNMTAALQAALKNPPINTKSQAVKDRAGSIVLKVLISFKANDIEKAVQSLDKNGVDLLMKYIYKGFESPSDNSSAMLLQWHEKALAAGGVGSIVRVLTARKTV

SEQ ID NO: 825862 - protein, 151 aa, Homo sapiens; identical to SEQ ID NO: 825855

SEQ ID NO: 825863 - protein, 151 aa, Homo sapiens; identical to SEQ ID NO: 825855

SEQ ID NO: 825864 - protein, 151 aa, Homo sapiens; identical to SEQ ID NO: 825855

SEQ ID NO: 825865 - protein, 146 aa, Homo sapiens
MHLSDQLNLTFHEYDENKFVDEEDGGDGQAGPDEGEVDSCLRQGNMTAALQAALKNPPINTKSQAVKDRAGSIVLKVLISFKANDIEKAVQSLDKNGVDLLMKYIYKGFESPSDNSSAMLLQWHEKALAAGGVGSIVRVLTARKTV

SEQ ID NO: 825866 - protein, 107 aa, Homo sapiens
  misc_feature (21)..(21): Xaa can be any naturally occurring amino acid
VAARGRVGGGRGDRDRSLLPXTQHGGRGDRAGSIVLKVLISFKANDIEKAVQSLDKNGVDLLMKYIYKGFESPSDNSSAMLLQWHEKALAAGGVGSIVRVLTARKTV

SEQ ID NO: 825867 - protein, 217 aa, Homo sapiens
MTSSYGHVLERQPALGGRLDSPGNLDTLQAKKNFSVSHLLDLEEAGDMVAAQADENVGEAGRSLLESPGLTSGSDTPQQDNDQLNSEEKKKRKQRRNRTTFNSSQLQALERVFERTHYPDAFVREDLARRVNLTEARVQVWFQNRRAKFRRNERAMLANKNASLLKSYSGDVTAVEQPIVPRPAPRPTDYLSWGTASPYRSSSLPRCCLHEGLHNGF

SEQ ID NO: 825868 - protein, 245 aa, Homo sapiens
MTSSYGHVLERQPALGGRLDSPGNLDTLQAKKNFSVSHLLDLEEAGDMVAAQADENVGEAGRSLLESPGLTSGSDTPQQDNDQLNSEEKKKRKQRRNRTTFNSSQLQALERVFERTHYPDAFVREDLARRVNLTEARVQVWFQNRRAKFRRNERAMLANKNASLLKSYSGDVTAVEQPIVPRPAPRPTDYLSWGTASPYSAMATYSATCANNSPAQGINMANSIANLRLKAKEYSLQRNQVPTVN

SEQ ID NO: 825869 - protein, 217 aa, Homo sapiens; identical to SEQ ID NO: 825867

SEQ ID NO: 825870 - protein, 245 aa, Homo sapiens; identical to SEQ ID NO: 825868

SEQ ID NO: 825871 - protein, 200 aa, Homo sapiens
MTSSYGHVLERQPALGGRLDSPGNLDTLQAKKNFSVSHLLDLEEAGDMVAAQADENVGEAGRSLLESPGLTSGSDTPQQDNDQLNSEEKKKRKQRRNRTTFNSSQLQALERVFERTHYPDAFVREDLARRVNLTEARVQVWFQNRRAKFRRNERAMLANKNASLLKSYSGDVTAVEQPIVPRPAPRPTDYLSWGTASPYR

SEQ ID NO: 825872 - protein, 241 aa, Homo sapiens
GFRQVGGEGDAEADKMAAAAVQGGRSGGSGGCSGAGGASNCGTGSGRSGLLDKWKIDDKPVKIDKWDGSAVKNSLDDSAKKVLLEKYKYVENFGLIDGRLTICTISCFFAIVALIWDYMHPFPESKPVLALCVISYFVMMGILTIYTSYKEKSIFLVAHRKDPTGMDPDDIWQLSSSLKRFDDKYTLKLTFISGRTKQQREAEFTKSIAKFFDHSGTLVMDAYEPEISRLHDSLAIERKIK

SEQ ID NO: 825873 - protein, 241 aa, Homo sapiens; identical to SEQ ID NO: 825872

SEQ ID NO: 825874 - protein, 241 aa, Homo sapiens; identical to SEQ ID NO: 825872

SEQ ID NO: 825875 - protein, 241 aa, Homo sapiens; identical to SEQ ID NO: 825872

SEQ ID NO: 825876 - protein, 123 aa, Homo sapiens
MHPFPESKPVLALCVISYFVMMGILTIYTSYKEKSIFLVAHRKDPTGMDPDDIWQLSSSLKRFDDKYTLKLTFISGRTKQQREAEFTKSIAKFFDHSGTLVMDAYEPEISRLHDSLAIERKIK

SEQ ID NO: 825877 - protein, 137 aa, Homo sapiens
MILPKSIVALIWDYMHPFPESKPVLALCVISYFVMMGILTIYTSYKEKSIFLVAHRKDPTGMDPDDIWQLSSSLKRFDDKYTLKLTFISGRTKQQREAEFTKSIAKFFDHSGTLVMDAYEPEISRLHDSLAIERKIK

SEQ ID NO: 825878 - protein, 157 aa, Homo sapiens
MAAAAVQGGRSGGSGGCSGAGGASNCGTGSGRSGLLDKWKIDDKPVKIDKWDGSAVKNSLDDSAKKEKSIFLVAHRKDPTGMDPDDIWQLSSSLKRFDDKYTLKLTFISGRTKQQREAEFTKSIAKFFDHSGTLVMDAYEPEISRLHDSLAIERKIK

SEQ ID NO: 825879 - protein, 138 aa, Homo sapiens
  misc_feature (58)..(58): Xaa can be any naturally occurring amino acid
MQKLSSGRVLGVFEDYQGLKRLLWLEGPGRVRIAGGEVRVQRALGLGEVLTPVIPALXDAEADKMAAAAVQGGRSGGSGGCSGAGGASNCGTGSGRSGLLDKWKIDDKPVKIDKWDGSAVKNSLDDSAKKERSYRNGS

SEQ ID NO: 825880 - protein, 272 aa, Homo sapiens
MAAAAVQGGRSGGSGGCSGAGGASNCGTGSGRSGLLDKLCKHRIDSSLVQTWTSARMDQARAQRLFGMISAKNRKLLGTQYQIMVRAHYRIVELEWLAVDTSWYEVSVVVVLHTRWTYASWAYELVRLAYMRRSAPKARSLAFCSVHKSYMLMDDRGDILTRLYDAFISIGTKELVCSTMDPSTRNDSLPVNGSPWMTMLVRLCPPDLYKRFDDKYTLKLTFISGRTKQQREAEFTKSIAKFFDHSGTLVMDAYEPEISRLHDSLAIERKIK

SEQ ID NO: 825881 - protein, 278 aa, Homo sapiens
MAAAAVQGGRSGGSGGCSGAGGASNCGTGSGRSGLLDKWKIDDKPVKIDKWDGSAVKNSLDDSAKKVLLEKYKYVENFGLIDGRLTICTISCFFAIVALIWDYMHPFPESKPVLALCVISYFVMMGILTIYTSYKEKSIFLVAHRKDPTGMDPDDIWQLSSSLKRFDDKYTLKLTFISGRTKQQREAEFTKSIAETNEIAMATPVRQIRKLIRDGLIIRKPCDGPFRARLPEKHLGPRKGRPWARYGRYSMADARGPCGDRGFGVKTGLKKVLLRRGS

SEQ ID NO: 825882 - protein, 226 aa, Homo sapiens
MAAAAVQGGRSGGSGGCSGAGGASNCGTGSGRSGLLDKWKIDDKPVKIDKWDGSAVKNSLDDSAKKVLLEKYKYVENFGLIDGRLTICTISCFFAIVALIWDYMHPFPESKPVLALCVISYFVMMGILTIYTSYKEKSIFLVAHRKDPTGMDPDDIWQLSSSLKRFDDKYTLKLTFISGRTKQQREAEFTKSIAKFFDHSGTLVMDAYEPEISRLHDSLAIERKIK

SEQ ID NO: 825883 - protein, 241 aa, Homo sapiens; identical to SEQ ID NO: 825872

SEQ ID NO: 825884 - protein, 257 aa, Homo sapiens
MAAAAVQGGRSGGSGGCSGAGGASNCGTGSGRSGLLDKRQALTILPRLDSSSWAQAVLPPQPPKYLGWQWKIDDKPVKIDKWDGSAVKNSLDDSAKKVLLEKYKYVENFGLIDGRLTICTISCFFAIVALIWDYMHPFPESKPVLALCVISYFVMMGILTIYTSYKEKSIFLVAHRKDPTGMDPDDIWQLSSSLKRFDDKYTLKLTFISGRTKQQREAEFTKSIAKFFDHSGTLVMDAYEPEISRLHDSLAIERKIK

SEQ ID NO: 825885 - protein, 303 aa, Homo sapiens
TAVERLRDPRGARRRASLLTGTSPPQTPRRLKRRRRQAKDTGQWFRKVTSMKKPKGLVGAQAERRESLKATSFEFKGKKESRRENQVDLPGHILDQAFLLKHHCVRKPSDLCTINWKIDDKPVKIDKWDGSAVKNSLDDSAKKVLLEKYKYVENFGLIDGRLTICTISCFFAIVALIWDYMHPFPESKPVLALCVISYFVMMGILTIYTSYKEKSIFLVAHRKDPTGMDPDDIWQLSSSLKRFDDKYTLKLTFISGRTKQQREAEFTKSIAKFFDHSGTLVMDAYEPEISRLHDSLAIERKIK

SEQ ID NO: 825886 - protein, 127 aa, Homo sapiens
TIQLGPTPPESKPVLALCVISYFVMMGILTIYTSYKEKSIFLVAHRKDPTGMDPDDIWQLSSSLKRFDDKYTLKLTFISGRTKQQREAEFTKSIAKFFDHSGTLVMDAYEPEISRLHDSLAIERKIK

SEQ ID NO: 825887 - protein, 241 aa, Homo sapiens; identical to SEQ ID NO: 825872

SEQ ID NO: 825888 - protein, 241 aa, Homo sapiens; identical to SEQ ID NO: 825872

SEQ ID NO: 825889 - protein, 223 aa, Homo sapiens
MTQRRTRWRRQLYRAGAGGASNCGTGSGRSGLLDKWKIDDKPVKIDKWDGSAVKNSLDDSAKKVLLEKYKYVENFGLIDGRLTICTISCFFAIVALIWDYMHPFPESKPVLALCVISYFVMMGILTIYTSYKEKSIFLVAHRKDPTGMDPDDIWQLSSSLKRFDDKYTLKLTFISGRTKQQREAEFTKSIAKFFDHSGTLVMDAYEPEISRLHDSLAIERKIK

SEQ ID NO: 825890 - protein, 189 aa, Homo sapiens
MPNSEPASLLELFNSIATQGELVRSLKAGNASKDEIDSAVKMLVSLKMSYKAAAGEDYKADCPPGNPAPTSNHGPDATEAEEDFVDPWTVQTSSAKGIDYDKLIVRFGSSKIDKELINRIERATGQRPHHFLRRGIFFSHRDMNQVLDAYENKKPFYLYTGRGPSSEAMHVGHLIPFIFTKSWLPGMLF

SEQ ID NO: 825891 - protein, 471 aa, Homo sapiens
MPNSEPASLLELFNSIATQGELVRSLKAGNASKDEIDSAVKMLVSLKMSYKAAAGEDYKADCPPGNPAPTSNHGPDATEAEEDFVDPWTVQTSSAKGIDYDKLIVRFGSSKIDKELINRIERATGQRPHHFLRRGIFFSHRDMNQVLDAYENKKPFYLYTGRGPSSEAMHVGHLIPFIFTKWLQDVFNVPLVIQMTDDEKYLWKDLTLDQAYSYAVENAKDIIACGFDINKTFIFSDLDYMGMSSGFYKNVVKIQKHVTFNQVKGIFGFTDSDCIGKISFPAIQAAPSFSNSFPQIFRDRTDIQCLIPCAIDQDPYFRMTRDVAPRIGYPKPALLHSTFFPALQGAQTKMSASDPNSSIFLTDTAKQIKTKVNKHAFSGGRDTIEEHRQFGGNCDVDVSFMYLTFFLEDDDKLEQIRKDYTSGAMLTGELKKALIEVLQPLIAEHQARRKEVTDEIVKEFMTPRKLSFDFQ

SEQ ID NO: 825892 - protein, 471 aa, Homo sapiens; identical to SEQ ID NO: 825891

SEQ ID NO: 825893 - protein, 471 aa, Homo sapiens; identical to SEQ ID NO: 825891

SEQ ID NO: 825894 - protein, 471 aa, Homo sapiens; identical to SEQ ID NO: 825891

SEQ ID NO: 825895 - protein, 471 aa, Homo sapiens; identical to SEQ ID NO: 825891

SEQ ID NO: 825896 - protein, 471 aa, Homo sapiens; identical to SEQ ID NO: 825891

SEQ ID NO: 825897 - protein, 471 aa, Homo sapiens; identical to SEQ ID NO: 825891

SEQ ID NO: 825898 - protein, 471 aa, Homo sapiens; identical to SEQ ID NO: 825891

SEQ ID NO: 825899 - protein, 430 aa, Homo sapiens
MLVSLKMSYKAAAGEDYKADCPPGNPAPTSNHGPDATEAEEDFVDPWTVQTSSAKGIDYDKLIVRFGSSKIDKELINRIERATGQRPHHFLRRGIFFSHRDMNQVLDAYENKKPFYLYTGRGPSSEAMHVGHLIPFIFTKWLQDVFNVPLVIQMTDDEKYLWKDLTLDQAYSYAVENAKDIIACGFDINKTFIFSDLDYMGMSSGFYKNVVKIQKHVTFNQVKGIFGFTDSDCIGKISFPAIQAAPSFSNSFPQIFRDRTDIQCLIPCAIDQDPYFRMTRDVAPRIGYPKPALLHSTFFPALQGAQTKMSASDPNSSIFLTDTAKQIKTKVNKHAFSGGRDTIEEHRQFGGNCDVDVSFMYLTFFLEDDDKLEQIRKDYTSGAMLTGELKKALIEVLQPLIAEHQARRKEVTDEIVKEFMTPRKLSFDFQ

SEQ ID NO: 825900 - protein, 430 aa, Homo sapiens; identical to SEQ ID NO: 825899

SEQ ID NO: 825901 - protein, 471 aa, Homo sapiens; identical to SEQ ID NO: 825891

SEQ ID NO: 825902 - protein, 411 aa, Homo sapiens
MLVSLKMSYKAAAGEDYKADCPPGNPAPTSNHGPDATEAEEDFVDPWTVQTSSAKGIDYDKLIVRFEVVQFLPQGIFFSHRDMNQVLDAYENKKPFYLYTGRGPSSEAMHVGHLIPFIFTKWLQDVFNVPLVIQMTDDEKYLWKDLTLDQAYSYAVENAKDIIACGFDINKTFIFSDLDYMGMSSGFYKNVVKIQKHVTFNQVKGIFGFTDSDCIGKISFPAIQAAPSFSNSFPQIFRDRTDIQCLIPCAIDQDPYFRMTRDVAPRIGYPKPALLHSTFFPALQGAQTKMSASDPNSSIFLTDTAKQIKTKVNKHAFSGGRDTIEEHRQFGGNCDVDVSFMYLTFFLEDDDKLEQIRKDYTSGAMLTGELKKALIEVLQPLIAEHQARRKEVTDEIVKEFMTPRKLSFDFQ

SEQ ID NO: 825903 - protein, 471 aa, Homo sapiens; identical to SEQ ID NO: 825891

SEQ ID NO: 825904 - protein, 217 aa, Homo sapiens
QHHVFFLHVIGLRGYCENDGVGKISFPAIQAAPSFSNSFPQIFRDRTDIQCLIPCAIDQDPYFRMTRDVAPRIGYPKPALLHSTFFPALQGAQTKMSASDPNSSIFLTDTAKQIKTKVNKHAFSGGRDTIEEHRQFGGNCDVDVSFMYLTFFLEDDDKLEQIRKDYTSGAMLTGELKKALIEVLQPLIAEHQARRKEVTDEIVKEFMTPRKLSFDFQ

SEQ ID NO: 825905 - protein, 386 aa, Homo sapiens
MPNSEPASLLELFNSIATQGELVRSLKAGNASKDEIDSAVKMLVSLKMSYKAAAGEDYKADCPPGNPAPTSNHGPDATEAEEDFVDPWTVQTSSAKGIDYDKLIVRFGSSKIDKELINRIERATGQRPHHFLRRGIFFSHRDMNQVLDAYENKKPFYLYTGRGPSSEAMHVGHLIPFIFTKWLQDVFNVPLVIQMTDDEKYLWKDLTLDQAYSYAVENAKDIIACGFDINKTFIFSDLDYMGMSSGFYKNVVKIQKHVTFNQVKGIFGFTDSDCIGKISFPAIQAAPSFSNSFPQIFRDRTDIQCLIPCAIDQDPYFRMTRDVAPRIGYPKPALLHSTFFPALQGAQTKMSASDPNSSIFLTDTAKQIKTKKSCSLPLAHQCSPAK

SEQ ID NO: 825906 - protein, 455 aa, Homo sapiens [sequence omitted]

SEQ ID NO: 825907 - protein, 533 aa, Homo sapiens
MPNSEPASLLELFNSIATQGELVRSLKAGNASKDEIDSAVKMLVSLKMSYKAAAGEDYKADCPPGNPAPTSNHGPDATEAEEDFVDPWTVQTSSAKGIDYDKLIVRFGSSKIDKELINRIERATGQRPHHFLRRGIFFSHRDMNQVLDAYENKKPFYLYTGRGPSSEAMHVGHLIPFIFTKWLQDVFNVPLVIQMTDDEKYLWKDLTLDQAYSYAVENAKDIIACGFDINKTFIFSDLDYMGMSSGFYKNVVKIQKHVTFNQVKGIFGFTDSDCIGKISFPAIQAAPSFSNSFPQIFRDRTDIQCLIPCAIDQDPYFRMTRDVAPRIGYPKPALLHSTFFPALQGAQTKMSASDPNSSIFLTDTAKQIKTKVNKHAFSGGRDTIEEHRQFGGNCDVDVSFMYLTFFLEDDDKLEQIRKDYTREPGHGSSRSTHKVLEAWSGSPGLGMRSRGIGQEMIPEGPRIQDARYYAVQSVVEGKSGTKNSHVGLAWIWRLSGCRNDAGTTISNRYGDRGEMATQRGAGRRNKSERGRRR

SEQ ID NO: 825908 - protein, 409 aa, Homo sapiens
MPNSEPASLLELFNSIATQGELVRSLKAGNASKDEIDSAVKMLVSLKMSYKAAAGEDYKADCPPGNPAPTSNHGPDATEAEEDFVDPWTVQTSSAKGIDYDKLIVRFGSSKIDKELINRIERATGQRPHHFLRRGIFFSHRDMNQVLDAYENKKPFYLYTGRGPSSEAMHVGHLIPFIFTKWLQDVFNVPLVIQMTDDEKYLWKDLTLDQAYSYAVENAKDIIACGFDINKTFIFSDLDYMGMSSGFYKNVVKIQKHVTFNQVKGIFGFTDSDCIGKISFPAIQAAPSFSNSFPQIFRDRTDIQCLIPCAIDQDPYFRMTRDVAPRIGYPKPALLHSTFFPALQGAQTKMSASDPNSSIFLTDTAKQIKTKGEQWPRQRAASGIRNMPWGAHAHTHHCTVLWASATQPP

SEQ ID NO: 825909 - protein, 274 aa, Homo sapiens [sequence omitted]

SEQ ID NO: 825910 - protein, 232 aa, Homo sapiens
MPNSEPASLLELFNSIATQGELVRSLKAGNASKDEIDSAVKMLVSLKMSYKAAAGEDYKADCPPGNPAPTSNHGPDATEAEEDFVDPWTVQTSSAKGIDYDKLIVRFGSSKIDKELINRIERATGQRPHHFLRRGIFFSHRDMNQVLDAYENKKPFYLYTGRGPSSEAMHVGHLIPFIFTKWLQDVFNVPLVIQMTDDEKYLWKSKAKSQGSPWLMYLGLLWSTLPSCHPVE

SEQ ID NO: 825911 - protein, 34 aa, Homo sapiens
MCQRLCVVLHLVPSTVMLAGFSMPIPQMRKPKGK

SEQ ID NO: 825912 - protein, 181 aa, Homo sapiens
MPNSEPASLLELFNSIATQGELVRSLKAGNASKDEIDSAVKMLVSLKMSYKAAAGEDYKADCPPGNPAPTSNHGPDATEAEEDFVDPWTVQTSSAKGIDYDKLIVRFGSSKIDKELINRIERATGQRPHHFLRRGIFFSHRDMNQVLDAYENKKPFYLYTGRGPSSEAMHVGHLIPFIFTK

SEQ ID NO: 825913 - protein, 471 aa, Homo sapiens; identical to SEQ ID NO: 825891

SEQ ID NO: 825914 - protein, 471 aa, Homo sapiens; identical to SEQ ID NO: 825891

SEQ ID NO: 825915 - protein, 471 aa, Homo sapiens; identical to SEQ ID NO: 825891

SEQ ID NO: 825916 - protein, 471 aa, Homo sapiens; identical to SEQ ID NO: 825891

SEQ ID NO: 825917 - protein, 430 aa, Homo sapiens; identical to SEQ ID NO: 825899

SEQ ID NO: 825918 - protein, 471 aa, Homo sapiens; identical to SEQ ID NO: 825891

SEQ ID NO: 825919 - protein, 229 aa, Homo sapiens
MSSGFYKNVVKIQKHVTFNQVKGIFGFTDSDCIGKISFPAIQAAPSFSNSFPQIFRDRTDIQCLIPCAIDQDPYFRMTRDVAPRIGYPKPALLHSTFFPALQGAQTKMSASDPNSSIFLTDTAKQIKTKVNKHAFSGGRDTIEEHRQFGGNCDVDVSFMYLTFFLEDDDKLEQIRKDYTSGAMLTGELKKALIEVLQPLIAEHQARRKEVTDEIVKEFMTPRKLSFDFQ

SEQ ID NO: 825920 - protein, 471 aa, Homo sapiens; identical to SEQ ID NO: 825891

SEQ ID NO: 825921 - protein, 277 aa, Homo sapiens [sequence omitted]

SEQ ID NO: 825922 - protein, 471 aa, Homo sapiens; identical to SEQ ID NO: 825891

SEQ ID NO: 825923 - protein, 471 aa, Homo sapiens; identical to SEQ ID NO: 825891

SEQ ID NO: 825924 - protein, 455 aa, Homo sapiens [sequence omitted]

SEQ ID NO: 825925 - protein, 381 aa, Homo sapiens
MPNSEPASLLELFNSIATQGELVRSLKAGNASKDEIDSAVKMLVSLKMSYKAAAGEDYKADCPPGNPAPTSNHGPDATEAEEDFVDPWTVQTSSAKGIDYDKLIVRFGSSKIDKELINRIERATGQRPHHFLRRGIFFSHRDMNQVLDAYENKKPFYLYTGRGPSSEAMHVGHLIPFIFTKWLQDVFNVPLVIQMTDDEKYLWKDLTLDQAYSYAVENAKDIIACGFDINKTFIFSDLDYMGMSSGFYKNVVKIQKHVTFNQVKGIFGFTDSDCIGKISFPAIQAAPSFSNSFPQIFRDRTDIQCLIPCAIDQDMQALKEVFKEYLIELFILQHFQGNIMDFLAFKKKHYAPLQAYLRQNDLDIEEQEEEEEEEEEKSEVI

SEQ ID NO: 825926 - protein, 247 aa, Homo sapiens
MPNSEPASLLELFNSIATQGELVRSLKAGNASKDEIDSAVKMLVSLKMSYKAAAGEDYKADCPPGNPAPTSNHGPDATEAEEDFVDPWTVQTSSAKGIDYDKLIVRFGSSKIDKELINRIERATGQRPHHFLRRGIFFSHRDMNQVLDAYENKKPFYLYTGRGPSSEAMHVGHLIPFIFTKWLQDVFNVPLVIQMTDDEKYLWKDLTLDQAYTVEVSTEQCPGCVPGRVDLAREKVEAAALEALTDV

SEQ ID NO: 825927 - protein, 390 aa, Homo sapiens
MPNSEPASLLELFNSIATQGELVRSLKAGNASKDEIDSAVKMLVSLKMSYKAAAGEDYKADCPPGNPAPTSNHGPDATEAEEDFVDPWTVQTSSAKGIDYDKLIVRFEVVQFLPQGIFFSHRDMNQVLDAYENKKPFYLYTGRGPSSEAMHVGHLIPFIFTKWLQDVFNVPLVIQMTDDEKYLWKDLTLDQAYSYAVENAKDIIACGFDINKTFIFSDLDYMGMSSGFYKNVVKIQKHVTFNQVKGIFGFTDSDCIGKISFPAIQAAPSFSNSFPQIFRDRTDIQCLIPCAIDQDPYFRMTRDVAPRIGYPKPALLHSTFFPALQGAQTKMSASDPNSSIFLTDTAKQIKTKGEQWPRQRAASGIRNMPWGAHAHTHHCTVLWASATQPP

SEQ ID NO: 825928 - protein, 415 aa, Homo sapiens
AGSGAGARVPGFPPRLCAAAGSGSRADMGAAAWARPLSVSFLLLLLPLPGMPAGSWDPAGYLLYCPCMGRFGNQADHFLGSLAFAKLLNRTLAVPPWIEYQHHKPPFTNLHVSYQKYFKLEPLQAYHRVISLEDFMEKLAPTHWPPEKRVAYCFEVAAQRSPDKKTCPMKEGNPFGPFWDQFHVSFNKSELFTGISFSASYREQWSQRFSPKEHPVLALPGAPAQFPVLEEHRPLQKYMVWSDEMVKTGEAQIHAHLVRPYVGIHLRIGSDWKNACAMLKDGTAGSHFMASPQCVGYSRSTAAPLTMTMCLPDLKEIQRAVKLWVRSLDAQSVYVATDSESYVPELQQLFKGKVKVVSLKPEVAQVDLYILGQADHFIGNCVSSFTAFVKRERDLQGRPSSFFGMDRPPKLRDEF

SEQ ID NO: 825929 - protein, 221 aa, Homo sapiens
AGSGAGARVPGFPPRLCAAAGSGSRADMGAAAWARPLSVSFLLLLLPLPGMPAGSWDPAGYLLYCPCMGRFGNQADHFLGSLAFAKLLNRTLAVPPWIEYQHHKPPFTNLHVSYQKYFKLEPLQAYHRVISLEDFMEKLAPTHWPPEKRVAYCFEVAAQRSPDKKTCPMKEGNPFGPFWDQFHVSFNKSELFTGISFSASYREQWSQRRENHSCVTLLFPR

SEQ ID NO: 825930 - protein, 415 aa, Homo sapiens; identical to SEQ ID NO: 825928

SEQ ID NO: 825931 - protein, 415 aa, Homo sapiens; identical to SEQ ID NO: 825928

SEQ ID NO: 825932 - protein, 415 aa, Homo sapiens; identical to SEQ ID NO: 825928

SEQ ID NO: 825933 - protein, 221 aa, Homo sapiens; identical to SEQ ID NO: 825929

SEQ ID NO: 825934 - protein, 280 aa, Homo sapiens
MEKLAPTHWPPEKRVAYCFEVAAQRSPDKKTCPMKEGNPFGPFWDQFHVSFNKSELFTGISFSASYREQWSQRFSPKEHPVLALPGAPAQFPVLEEHRPLQKYMVWSDEMVKTGEAQIHAHLVRPYVGIHLRIGSDWKNACAMLKDGTAGSHFMASPQCVGYSRSTAAPLTMTMCLPDLKEIQRAVKLWVRSLDAQSVYVATDSESYVPELQQLFKGKVKVVSLKPEVAQVDLYILGQADHFIGNCVSSFTAFVKRERDLQGRPSSFFGMDRPPKLRDEF

SEQ ID NO: 825935 - protein, 415 aa, Homo sapiens; identical to SEQ ID NO: 825928

SEQ ID NO: 825936 - protein, 415 aa, Homo sapiens; identical to SEQ ID NO: 825928

SEQ ID NO: 825937 - protein, 415 aa, Homo sapiens; identical to SEQ ID NO: 825928

SEQ ID NO: 825938 - protein, 444 aa, Homo sapiens
AGSGAGARVPGFPPRLCAAAGSGSRADMGAAAWARPLSVSFLLLLLPLPGMPAGSWDPAGYLLYCPCMGRFGNQADHFLGSLAFAKLLNRTLAVPPWIEYQHHKPPFTNLHVSYQKYFKLEPLQAYHRVISLEDFMEKLAPTHWPPEKRVAYCFEVAAQRSPDKKTCPMKEGNPFGPFWDQFHVSFNKSELFTGISFSASYREQWSQRFSPKEHPVLALPGAPAQFPVLEEHRPLQKYMVWSDEMVKTGEAQIHAHLVRPYVGIHLRIGSDWKNACAMLKDGTAGSHFMASPQCVGYSRSTAAPLTMTMCLPDLKEIQRAVKLWVRSLDAQSVYVATDSESYVPELQQLFKGKDVWAKWECSRKGMKGGARMVPLPTACFTGSPTSLLPGPTIPLQFLPSFKPQLRGLLRSLSRFSSTPGAHVSLLGPSWPYIISSLGHFLDCM

SEQ ID NO: 825939 - protein, 111 aa, Homo sapiens
MVCEKCEKKLGTVITPDTWKDGARNTTESGGRKLNENKALTSKKARFDPYGKNKFSTCRICKSSVHQPGSHYCQGCAYKKGICAMCGNKGFGYQKLQANICLDVLMEFLAF

SEQ ID NO: 825940 - protein, 111 aa, Homo sapiens; identical to SEQ ID NO: 825939

SEQ ID NO: 825941 - protein, 118 aa, Homo sapiens
MCVAITIVKIARLCVTVVSIPDTLQRWLLGTSTAQSGGRKLNENKALTSKKARFDPYGKNKFSTCRICKSSVHQPGSHYCQGCAYKKGICAMCGNKGFGYQKLQANICLDVLMEFLAF

SEQ ID NO: 825942 - protein, 111 aa, Homo sapiens; identical to SEQ ID NO: 825939

SEQ ID NO: 825943 - protein, 662 aa, Homo sapiens
MSHVAVENALGLDQQFAGLDLNSSDNQSGGSTASKGRYIPPHLRNREATKGFYDKDSSGWSSSKDKDAYSSFGSRSDSRGKSSFFSDRGSGSRGRFDDRGRSDYDGIGSRGDRSGFGKFERGGNSRWCDKSDEDDWSKPLPPSERLEQELFSGGNTGINFEKYDDIPVEATGNNCPPHIESFSDVEMGEIIMGNIELTRYTRPTPVQKHAIPIIKEKRDLMACAQTGSGKTAAFLLPILSQIYSDGPGEALRAMKENGRYGRRKQYPISLVLAPTRELAVQIYEEARKFSYRSRVRPCVVYGGADIGQQIRDLERGCHLLVATPGRLVDMMERGKIGLDFCKYLVLDEADRMLDMGFEPQIRRIVEQDTMPPKGVRHTMMFSATFPKEIQMLARDFLDEYIFLAVGRVGSTSENITQKVVWVEESDKRSFLLDLLNATGKDSLTLVFVETKKGADSLEDFLYHEGYACTSIHGDRSQRDREEALHQFRSGKSPILVATAVAARGLDISNVKHVINFDLPSDIEEYVHRIGRTGRVGNLGLATSFFNERNINITKDLLDLLVEAKQEVPSWLENMAYEHHYKGSSRGRSKSSRFSGGFGARDYRQSSGASSSSFSSSRASSSRSGGGGHGSSRGFGGGGYGGFYNSDGYGGNYNSQGVDWWGN

SEQ ID NO: 825944 - protein, 662 aa, Homo sapiens; identical to SEQ ID NO: 825943

SEQ ID NO: 825945 - protein, 83 aa, Homo sapiens
MAYEHHYKGSSRGRSKSSRFSGGFGARDYRQSSGASSSSFSSSRASSSRSGGGGHGSSRGFGGGSTTSYWSRIIVQIAAQSTT

SEQ ID NO: 825946 - protein, 662 aa, Homo sapiens; identical to SEQ ID NO: 825943

SEQ ID NO: 825947 - protein, 573 aa, Homo sapiens
MLVLFRFDDRGRSDYDGIGSRGDRSGFGKFERGGNSRWCDKSDEDDWSKPLPPSERLEQELFSGGNTGINFEKYDDIPVEATGNNCPPHIESFSDVEMGEIIMGNIELTRYTRPTPVQKHAIPIIKEKRDLMACAQTGSGKTAAFLLPILSQIYSDGPGEALRAMKENGRYGRRKQYPISLVLAPTRELAVQIYEEARKFSYRSRVRPCVVYGGADIGQQIRDLERGCHLLVATPGRLVDMMERGKIGLDFCKYLVLDEADRMLDMGFEPQIRRIVEQDTMPPKGVRHTMMFSATFPKEIQMLARDFLDEYIFLAVGRVGSTSENITQKVVWVEESDKRSFLLDLLNATGKDSLTLVFVETKKGADSLEDFLYHEGYACTSIHGDRSQRDREEALHQFRSGKSPILVATAVAARGLDISNVKHVINFDLPSDIEEYVHRIGRTGRVGNLGLATSFFNERNINITKDLLDLLVEAKQEVPSWLENMAYEHHYKGSSRGRSKSSRFSGGFGARDYRQSSGASSSSFSSSRASSSRSGGGGHGSSRGFGGGGYGGFYNSDGYGGNYNSQGVDWWGN

SEQ ID NO: 825948 - protein, 662 aa, Homo sapiens; identical to SEQ ID NO: 825943

SEQ ID NO: 825949 - protein, 657 aa, Homo sapiens
MSHVAVENALGLDQQFAGLDLNSSDNQSGGSTASKGRYIPPHLRNREATKGFYDKDSSGWSSSKDKDAYSSFGSRSDSRGKSSFFSDRGSGSRGRFDDRGRSDYDGIGSRGDRSGFGKFERGGNSRWCDKSDEDDWSKPLPPSERLEQELFSGGNTGINFEKYDDIPVEATGNNCPPHIESFSDVEMGEIIMGNIELTRYTRPTPVQKHAIPIIKEKRDLMACAQTGSGKTAAFLLPILSQIYSDGPGEALRAMKENGRYGRRKQYPISLVLAPTRELAVQIYEEARKFSYRSRVRPCVVYGGADIGQQIRDLERGCHLLVATPGRLVDMMERGKIGLDFCKYLVLDEADRMLDMGFEPQIRRIVEQDTMPPKGVRHTMMFSATFPKEIQMLARDFLDEYIFLAVGRVGSTSENITQKVVWVEESDKRSFLLDLLNATGKDSLTLVFVETKKGADSLEDFLYHEGYACTSIHGDRSQRDREEALHQFRSGKSPILVATAVAARGLDISNVKHVINFDLPSDIEEYVHRIGRTGRVGNLGLATSFFNERNINITKDLLDLLVEAKQEVPSWLENMAYEHHYKGSSRGRSKSSRFSGGFGARDYRQSSGASSSSFSSSRASSSRSGGGGHGSSRGFGGGSSRSQEEMKGTISSPVQKVV

SEQ ID NO: 825950 - protein, 639 aa, Homo sapiens
MSHVAVENALGLDQQFAGLDLNSSDNQSGGSTASKGRYIPPHLRNREATKGFYDKDSSGWSSSKDKDAYSSFGSRSDSRGKSSFFSDRGSGSRGRFDDRGRSDYDGIGSRGDRSGFGKFERGGNSRWCDKSDEDDWSKPLPPSERLEQELFSGGNTGINFEKYDDIPVEATGNNCPPHIESFSDVEMGEIIMGNIELTRYTRPTPVQKHAIPIIKEKRDLMACAQTGSGKTAAFLLPILSQIYSDGPGEALRAMKENGRYGRRKQYPISLVLAPTRELAVQIYEEARKFSYRSRVRPCVVYGGADIGQQIRDLERGCHLLVATPGRLVDMMERGKIGLDFCKYLVLDEADRMLDMGFEPQIRRIVEQDTMPPKGVRHTMMFSATFPKEIQMLARDFLDEYIFLAVGRVGSTSENITQKVVWVEESDKRSFLLDLLNATGKDSLTLVFVETKKGADSLEDFLYHEGYACTSIHGDRSQRDREEALHQFRSGKSPILVATAVAARGLDISNVKHVINFDLPSDIEEYVHRIGRTGRVGNLGLATSFFNERNINITKDLLDLLVEAKQEVPSWLDSRFSGGFGARDYRQSSGASSSSFSSSRASSSRSGGGGHGSSRGFGGGSSRSQEEMKGTISSPVQKVV

SEQ ID NO: 825951 - protein, 459 aa, Homo sapiens
MSHVAVENALGLDQQFAGLDLNSSDNQSGGSTASKGRYIPPHLRNREATKGFYDKDSSGWSSSKDKDAYSSFGSRSDSRGKSSFFSDRGSGSRGRFDDRGRSDYDGIGSRGDRSGFGKFERGGNSRWCDKSDEDDWSKPLPPSERLEQELFSGGNTGINFEKYDDIPVEATGNNCPPHIESFSDVEMGEIIMGNIELTRYTRPTPVQKHAIPIIKEKRDLMACAQTGSGKTAAFLLPILSQIYSDGPGEALRAMKENGRYGRRKQYPISLVLAPTRELAVQIYEEARKFSYRSRVRPCVVYGGADIGQQIRDLERGCHLLVATPGRLVDMMERGKIGLDFCKYLVLDEADRMLDMGFEPQIRRIVEQDTMPPKGVRHTMMFSATFPKEIQLVANFKRKFFLVFEKWPTLETSTQGFWGKSTTGILLPLKAGRVLPLVWGPKGSILGSFPEGPGAHLGTF

SEQ ID NO: 825952 - protein, 662 aa, Homo sapiens; identical to SEQ ID NO: 825943

SEQ ID NO: 825953 - protein, 662 aa, Homo sapiens; identical to SEQ ID NO: 825943

SEQ ID NO: 825954 - protein, 662 aa, Homo sapiens; identical to SEQ ID NO: 825943

SEQ ID NO: 825955 - protein, 662 aa, Homo sapiens; identical to SEQ ID NO: 825943

SEQ ID NO: 825956 - protein, 169 aa, Homo sapiens
GRAQPGKQLEDGYMAHVTDVINFDLPSDIEEYVHRIGRTGRVGNLGLATSFFNERNINITKDLLDLLVEAKQEVPSWLENMAYEHHYKGSSRGRSKSSRFSGGFGARDYRQSSGASSSSFSSSRASSSRSGGGGHGSSRGFGGGGYGGFYNSDGYGGNYNSQGVDWWGN

SEQ ID NO: 825957 - protein, 662 aa, Homo sapiens; identical to SEQ ID NO: 825943

SEQ ID NO: 825958 - protein, 457 aa, Homo sapiens
MATRVLSMSARLGPVPQPPAPQDEPVFAQLKPVLGAANPARDAALFPGEELKHAHHRPQAQPAPAQAPQPAQPPATGPRLPPEDLVQTRCEMEKYLTPQLPPVPIIPEHKKYRRDSASVVDQFFTDTEGLPYSINMNVFLPDITHLRTGLYKSQRPCVTHIKTEPVAIFSHQSETTAPPPAPTQALPEFTSIFSSHQTAAPEVNNIFIKQELPTPDLHLSVPTQQGHLYQLLNTPDLDMPSSTNQTAAMDTLNVSMSAAMAGLNTHTSAVPQTAVKQFQGMPPCTYTMPSQFLPQQATYFPPSPPSSEPGSPDRQAEMLQNLTPPPSYAATIASKLAIHNPNLPTTLPVNSQNIQPVRYNRRSNPDLEKRRIHYCDYPGCTKVYTKSSHLKAHLRTHTGEKPYKCTWEGCDWRFARSDELTRHYRKHTGAKPFQCGVCNRSFSRSDHLALHMKRHQN

SEQ ID NO: 825959 - protein, 457 aa, Homo sapiens; identical to SEQ ID NO: 825958

SEQ ID NO: 825960 - protein, 366 aa, Homo sapiens
MEKYLTPQLPPVPIIPEHKKYRRDSASVVDQFFTDTEGLPYSINMNVFLPDITHLRTGLYKSQRPCVTHIKTEPVAIFSHQSETTAPPPAPTQALPEFTSIFSSHQTAAPEVNNIFIKQELPTPDLHLSVPTQQGHLYQLLNTPDLDMPSSTNQTAAMDTLNVSMSAAMAGLNTHTSAVPQTAVKQFQGMPPCTYTMPSQFLPQQATYFPPSPPSSEPGSPDRQAEMLQNLTPPPSYAATIASKLAIHNPNLPTTLPVNSQNIQPVRYNRRSNPDLEKRRIHYCDYPGCTKVYTKSSHLKAHLRTHTGEKPYKCTWEGCDWRFARSDELTRHYRKHTGAKPFQCGVCNRSFSRSDHLALHMKRHQN

SEQ ID NO: 825961 - protein, 366 aa, Homo sapiens; identical to SEQ ID NO: 825960

SEQ ID NO: 825962 - protein, 457 aa, Homo sapiens; identical to SEQ ID NO: 825958

SEQ ID NO: 825963 - protein, 406 aa, Homo sapiens
MATRVLSMSARLGPVPQPPAPQDEPVFAQLKPVLGAANPARDAALFPGEELKHAHHRPQAQPAPAQAPQPAQPPATGPRLPPEDLVQTRCEMEKYLTPQLPPVPIIPEHKKYRRDSASVVDQFFTDTEGLPYSINMNVFLPDITHLRTGLYKSQRPCVTHIKTEPVAIFSHQSETTAPPPAPTQALPEFTSIFSSHQTAAPEVNNIFIKQELPTPDLHLSVPTQQGHLYQLLNTPDLDMPSSTNQTAAMDTLNVSMSAAMAGLNTHTSAVPQTAVKQFQGMPPCTYTMPSQFLPQQATYFPPSPPSSEPGSPDRQAEMLQNLTPPPSYAATIASKLAIHNPNLPTTLPVNSQNIQPVRYSIPGNSQIAIEQMCGFLKIIYIYELPIFAIQNFVNMQISFIGLLQVF

SEQ ID NO: 825964 - protein, 86 aa, Homo sapiens
FEIPSPVLSRMFALQAGRFTSFVRCHRCEKPYKCTWEGCDWRFARSDELTRHYRKHTGAKPFQCGVCNRSFSRSDHLALHMKRHQN

SEQ ID NO: 825965 - protein, 457 aa, Homo sapiens; identical to SEQ ID NO: 825958

SEQ ID NO: 825966 - protein, 457 aa, Homo sapiens; identical to SEQ ID NO: 825958

SEQ ID NO: 825967 - protein, 366 aa, Homo sapiens; identical to SEQ ID NO: 825960

SEQ ID NO: 825968 - protein, 281 aa, Homo sapiens
GELQEGLGRGRRRGSIFSSHQTAAPEVNNIFIKQELPTPDLHLSVPTQQGHLYQLLNTPDLDMPSSTNQTAAMDTLNVSMSAAMAGLNTHTSAVPQTAVKQFQGMPPCTYTMPSQFLPQQATYFPPSPPSSEPGSPDRQAEMLQNLTPPPSYAATIASKLAIHNPNLPTTLPVNSQNIQPVRYNRRSNPDLEKRRIHYCDYPGCTKVYTKSSHLKAHLRTHTGEKPYKCTWEGCDWRFARSDELTRHYRKHTGAKPFQCGVCNRSFSRSDHLALHMKRHQN

SEQ ID NO: 825969 - protein, 477 aa, Homo sapiens
MATRVLSMSARLGPVPQPPAPQDEPVFAQLKPVLGAANPARDAALFPGEELKHAHHRPQAQPAPAQAPQPAQPPATGPRLPPEDLVQTRCEMEKYLTPQLPPVPIIPEHKKYRRDSASVVDQFFTDTEGLPYSINMNVFLPDITHLRTGLYKSQRPCVTHIKTEPVAIFSHQSETTAPPPAPTQALPEFTSIFSSHQTAAPEVNNIFIKQELPTPDLHLSVPTQQGHLYQLLNTPDLDMPSSTNQTAAMDTLNVSMSAAMAGLNTHTSAVPQTAVKQFQGMPPCTYTMPSQFLPQQATYFPPSPPSSEPGSPDRQAEMLQNLTPPPSYAATIASKLAIHNPNLPTTLPVNSQNIQPVRYNRRSNPDLEKRRIHYCDYPGCTKVYTKSSHLKAHLRTHTVVKLSVPDYFASICKRKVCEGEKPYKCTWEGCDWRFARSDELTRHYRKHTGAKPFQCGVCNRSFSRSDHLALHMKRHQN

SEQ ID NO: 825970 - protein, 66 aa, Homo sapiens
NRRSNPDLEKRRIHYCDYPGMCSYLVEASIDVVCVCVCLCARACACVHARALFNLMALNRKVVLDS

SEQ ID NO: 825971 - protein, 2994 aa, Homo sapiens
ARWDLQKHSLLIVIGDIGTESQLRAVRAHLEQGILSWNIDLSSFDLNQQLRLFITRHLAHFSSEVKGQRTLCHQSEILETIILVNPSADSISSEVHHLLSSSSAYKLLILSGQSLEPGGDLILQSGTYSYENFAQVLHNPEISQLLSNRDPGIQAFLTVSCLGEGDWSHLGLSSSQETLHLRLNPEPTLPTMDGVAEFSEYVSETVDVPSPFDLLEPPTSGGFLKLSKPCCYIFPGGRGDSALFAVNGFNILVDGGSDRKSCFWKLVRHLDRIDSVLLTHIGADNLPGINGLLQRKVAELEEEQSQGSSSYSDWVKNLISPELGVVFFNVPEKLRLPDASRKAKRSIEEACLTLQHLNRLGIQAEPLYRVVSNTIEPLTLFHKMGVGRLDMYVLNPVKDSKEMQFLMQKWAGNSKAKTGIVLPNGKEAEISVPYLTSITALVVWLPANPTEKIVRVLFPGNAPQNKILEGLEKLRHLDFLRYPVATQKDLASGAVPTNLKPSKIKQRADSKESLKATTKTAVSKLAKREEVVEEGAKEARSELAKELAKTEKKAKESSEKPPEKPAKPERVKTESSEALKAEKRKLIKDKVGKKHLKEKISKLEEKKDKEKKEIKKERKELKKDEGRKEEKKDAKKEEKRKDTKPELKKISKPDLKPFTPEVRKTLYKAKVPGRVKIDRSRAIRGEKELSSEPQTPPAQKGTVPLPTISGHRELVLSSPEDLTQDFEEMKREERALLAEQRDTGLGDKPFPLDTAEEGPPSTAIQGTPPSVPGLGQEEHVMKEKELVPEVPEEQGSKDRGLDSGAETEEEKDTWEEKKQREAERLPDRTEAREESEPEVKEDVIEKAELEEMEEVHPSDEEEEDATKAEGFYQKHMQEPLKVTPRSREAFGGRELGLQGKAPEKETSLFLSSLTTPAGATEHVSYIQDETIPGYSETEQTISDEEIHDEPEERPAPPRFHTSTYDLPGPEGAGPFEASQPADSAVPATSGKVYGTPETELTYPTNIVAAPLAEEEHVSSATSITECDKLSSFATSVAEDQSVASLTAPQTEETGKSSLLLDTVTSIPSSRTEATQGLDYVPSAGTISPTSSLEEDKGFKSPPCEDFSVTGESEKRGEIIGKGLSGERAVEEEEEETANVEMSEKLCSQYGTPVFSAPGHALHPGEPALGEAEERCLSPDDSTVKMASPPPSGPPSATHTPFHQSPVEEKSEPQDFQEADSWGDTKRTPGVGKEDAAEETVKPGPEEGTLEKEEKVPPPRSPQAQEAPVNIDEGLTGCTIQLLPAQDKAIVFEIMEAGEPTGPILGAEALPGGLRTLPQEPGKPQKDEVLRYPDRSLSPEDAESLSVLSVPSPDTANQEPTPKSPCGLTEQYLHKDRWPEVSPEDTQSLSLSEESPSKETSLDVSSKQLSPESLGTLQFGELNLGKEEMGHLMQAEDTSHHTAPMSVPEPHAATASPPTDGTTRYSAQTDITDDSLDRKSPASSFSHSTPSGNGKYLPGAITSPDEHILTPDSSFSKSPESLPGPALEDIAIKWEDKVPGLKDRTSEQKKEPEPKDEVLQQKDKTLEHKEVVEPKDTAIYQKDEALHVKNEAVKQQDKALEQKGRDLEQKDTALEQKDKALEPKDKDLEEKDKALEQKDKIPEEKDKALEQKDTALEQKDKALEPKDKDLEQKDRVLEQKEKIPEEKDKALDQKVRSVEHKAPEDTVAEMKDRDLEQTDKAPEQKHQAQEQKDKVSEKKDQALEQKYWALGQKDEALEQNIQALEENHQTQEQESLVQEDKTRKPKMLEEKSPEKVKAMEEKLEALLEKTKALGLEESLVQEGRAREQEEKYWRGQDVVQEWQETSPTREEPAGEQKELAPAWEDTSPEQDNRYWRGREDVALEQDTYWRELSCERKVWFPHELDGQGARPHYTEERESTFLDEGPDDEQEVPLREHATRSPWASDFKDFQESSPQKGLEVERWLAESPVGLPPEEEDKLTRSPFEIISPPASPPEMVGQRVPSAPGQESPIPDPKLMPHMKNEPTTPSWLADIPPWVPKDRPLPPAPLSPAPGPPTPAPESHTPAPFSWGTAEYDSVVAAVQEGAAELEGGPYSPLGKDYRKAEGEREEEGRAEAPDKSSHSSKVPEASKSHATTEPEQTEPEQREPTPYPDERSFQYADIYEQMMLTGLGPACPTREPPLGAAGDWPPCLSTKEAAAGRNTSAEKELSSPISPKSLQSDTPTFSYAALAGPTVPPRPEPGPSMEPSLTPPAVPPRAPILSKGPSPPLNGNILSCSPDRRSPSPKESGRSHWDDSTSDSELEKGAREQPEKEAQSPSPPHPIPMGSPTLWPETEAHVSPPLDSHLGPARPSLDFPASAFGFSSLQPAPPQLPSPAEPRSAPCGSLAFSGDRALALAPGPPTRTRHDEYLEVTKAPSLDSSLPQLPSPSSPGAPLLSNLPRPASPALSEGSSSEATTPVISSVAERFSPSLEAAEQESGELDPGMEPAAHSLWDLTPLSPAPPASLDLALAPAPSLPGDMGDGILPCHLECSEAATEKPSPFQVPSEDCAANGPTETSPNPPGPAPAKAENEEAAACPAWERGAWPEGAERSSRPDTLLSPEQPVCPAGGSGGPPSSASPEVEAGPQGCATEPRPHRGELSPSFLNPPLPPSIDDRDLSTEEVRLVGRGGRRRVGGPGTTGGPCPVTDETPPTSASDSGSSQSDSDVPPETEECPSITAEAALDSDEDGDFLPVDKAGGVSGTHHPRPGHDPPPLPQPDPRPSPPRPDVCMADPEGLSSESGRVERLREKEKVQGRVGRRAPGKAKPASPARRLVLRGKRSPTPGKGPADRASRAPPRPRSTTSQVTPAEEKDGHSPMSKGLVNGLKAGPMALSSKGSSGAPVYVDLAYIPNHCSGKTADLDFFRRVRASYYVVSGNDPANGEPSRAVLDALLEGKAQWGENLQVTLIPTHDTEVTREWYQQTHEQQQQLNVLVLASSSTVVMQDESFPACKIEF

SEQ ID NO: 825972 - protein, 2796 aa, Homo sapiens
MDGVAEFSEYVSETVDVPSPFDLLEPPTSGGFLKLSKPCCYIFPGGRGDSALFAVNGFNILVDGGSDRKSCFWKLVRHLDRIDSVLLTHIGADNLPGINGLLQRKVAELEEEQSQGSSSYSDWVKNLISPELGVVFFNVPEKLRLPDASRKAKRSIEEACLTLQHLNRLGIQAEPLYRVVSNTIEPLTLFHKMGVGRLDMYVLNPVKDSKEMQFLMQKWAGNSKAKTGIVLPNGKEAEISVPYLTSITALVVWLPANPTEKIVRVLFPGNAPQNKILEGLEKLRHLDFLRYPVATQKDLASGAVPTNLKPSKIKQRADSKESLKATTKTAVSKLAKREEVVEEGAKEARSELAKELAKTEKKAKESSEKPPEKPAKPERVKTESSEALKAEKRKLIKDKVGKKHLKEKISKLEEKKDKEKKEIKKERKELKKDEGRKEEKKDAKKEEKRKDTKPELKKISKPDLKPFTPEVRKTLYKAKVPGRVKIDRSRAIRGEKELSSEPQTPPAQKGTVPLPTISGHRELVLSSPEDLTQDFEEMKREERALLAEQRDTGLGDKPFPLDTAEEGPPSTAIQGTPPSVPGLGQEEHVMKEKELVPEVPEEQGSKDRGLDSGAETEEEKDTWEEKKQREAERLPDRTEAREESEPEVKEDVIEKAELEEMEEVHPSDEEEEDATKAEGFYQKHMQEPLKVTPRSREAFGGRELGLQGKAPEKETSLFLSSLTTPAGATEHVSYIQDETIPGYSETEQTISDEEIHDEPEERPAPPRFHTSTYDLPGPEGAGPFEASQPADSAVPATSGKVYGTPETELTYPTNIVAAPLAEEEHVSSATSITECDKLSSFATSVAEDQSVASLTAPQTEETGKSSLLLDTVTSIPSSRTEATQGLDYVPSAGTISPTSSLEEDKGFKSPPCEDFSVTGESEKRGEIIGKGLSGERAVEEEEEETANVEMSEKLCSQYGTPVFSAPGHALHPGEPALGEAEERCLSPDDSTVKMASPPPSGPPSATHTPFHQSPVEEKSEPQDFQEADSWGDTKRTPGVGKEDAAEETVKPGPEEGTLEKEEKVPPPRSPQAQEAPVNIDEGLTGCTIQLLPAQDKAIVFEIMEAGEPTGPILGAEALPGGLRTLPQEPGKPQKDEVLRYPDRSLSPEDAESLSVLSVPSPDTANQEPTPKSPCGLTEQYLHKDRWPEVSPEDTQSLSLSEESPSKETSLDVSSKQLSPESLGTLQFGELNLGKEEMGHLMQAEDTSHHTAPMSVPEPHAATASPPTDGTTRYSAQTDITDDSLDRKSPASSFSHSTPSGNGKYLPGAITSPDEHILTPDSSFSKSPESLPGPGWEDKVPGLKDRTSEQKKEPEPKDEVLQQKDKTLEHKEVVEPKDTAIYQKDEALHVKNEAVKQQDKALEQKGRDLEQKDTALEQKDKALEPKDKDLEEKDKALEQKDKIPEEKDKALEQKDTALEQKDKALEPKDKDLEQKDRVLEQKEKIPEEKDKALDQKVRSVEHKAPEDTVAEMKDRDLEQTDKAPEQKHQAQEQKDKVSEKKDQALEQKYWALGQKDEALEQNIQALEENHQTQEQESLVQEDKTRKPKMLEEKSPEKVKAMEEKLEALLEKTKALGLEESLVQEGRAREQEEKYWRGQDVVQEWQETSPTREEPAGEQKELAPAWEDTSPEQDNRYWRGREDVALEQDTYWRELSCERKVWFPHELDGQGARPHYTEERESTFLDEGPDDEQEVPLREHATRSPWASDFKDFQESSPQKGLEVERWLAESPVGLPPEEEDKLTRSPFEIISPPASPPEMVGQRVPSAPGQESPIPDPKLMPHMKNEPTTPSWLADIPPWVPKDRPLPPAPLSPAPGPPTPAPESHTPAPFSWGTAEYDSVVAAVQEGAAELEGGPYSPLGKDYRKAEGEREEEGRAEAPDKSSHSSKVPEASKSHATTEPEQTEPEQREPTPYPDERSFQYADIYEQMMLTGLGPACPTREPPLGAAGDWPPCLSTKEAAAGRNTSAEKELSSPISPKSLQSDTPTFSYAALAGPTVPPRPEPGPSMEPSLTPPAVPPRAPILSKGPSPPLNGNILSCSPDRRSPSPKESGRSHWDDSTSDSELEKGAREQPEKEAQSPSPPHPIPMGSPTLWPETEAHVSPPLDSHLGPARPSLDFPASAFGFSSLQPAPPQLPSPAEPRSAPCGSLAFSGDRALALAPGPPTRTRHDEYLEVTKAPSLDSSLPQLPSPSSPGAPLLSNLPRPASPALSEGSSSEATTPVISSVAERFSPSLEAAEQESGELDPGMEPAAHSLWDLTPLSPAPPASLDLALAPAPSLPGDMGDGILPCHLECSEAATEKPSPFQVPSEDCAANGPTETSPNPPGPAPAKAENEEAAACPAWERGAWPEGAERSSRPDTLLSPEQPVCPAGGSGGPPSSASPEVEAGPQGCATEPRPHRGELSPSFLNPPLPPSIDDRDLSTEEVRLVGRGGRRRVGGPGTTGGPCPVTDETPPTSASDSGSSQSDSDVPPETEECPSITAEAALDSDEDGDFLPVDKAGGVSGTHHPRPGHDPPPLPQPDPRPSPPRPDVCMADPEGLSSESGRVERLREKEKVQGRVGRRAPGKAKPASPARRLVLRGKRSPTPGKGPADRASRAPPRPRSTTSQVTPAEEKDGHSPMSKGLVNGLKAGPMALSSKGSSGAPVYVDLAYIPNHCSGKTADLDFFRRVRASYYVVSGNDPANGEPSRAVLDALLEGKAQWGENLQVTLIPTHDTEVTREWYQQTHEQQQQLNVLVLASSSTVVMQDESFPACKIEF

SEQ ID NO: 825973 - protein, 2006 aa, Homo sapiens
MDGVAEFSEYVSETVDVPSPFDLLEPPTSGGFLKLSKPCCYIFPGGRGDSALFAVNGFNILVDGGSDRKSCFWKLVRHLDRIDSVLLTHIGADNLPGINGLLQRKVAELEEEQSQGSSSYSDWVKNLISPELGVVFFNVPEKLRLPDASRKAKRSIEEACLTLQHLNRLGIQAEPLYRVVSNTIEPLTLFHKMGVGRLDMYVLNPVKDSKEMQFLMQKWAGNSKAKTGIVLPNGKEAEISVPYLTSITALVVWLPANPTEKIVRVLFPGNAPQNKILEGLEKLRHLDFLRYPVATQKDLASGAVPTNLKPSKIKQRADSKESLKATTKTAVSKLAKREEVVEEGAKEARSELAKELAKTEKKAKESSEKPPEKPAKPERVKTESSEALKAEKRKLIKDKVGKKHLKEKISKLEEKKDKEKKEIKKERKELKKDEGRKEEKKDAKKEEKRKDTKPELKKISKPDLKPFTPEVRKTLYKAKVPGRVKIDRSRAIRGEKELSSEPQTPPAQKGTVPLPTISGHRELVLSSPEDLTQDFEEMKREERALLAEQRDTGLGDKPFPLDTAEEGPPSTAIQGTPPSVPGLGQEEHVMKEKELVPEVPEEQGSKDRGLDSGAETEEEKDTWEEKKQREAERLPDRTEAREESEPEVKEDVIEKAELEEMEEVHPSDEEEEDATKAEGFYQKHMQEPLKVTPRSREAFGGRELGLQGKAPEKETSLFLSSLTTPAGATEHVSYIQDETIPGYSETEQTISDEEIHDEPEERPAPPRFHTSTYDLPGPEGAGPFEASQPADSAVPATSGKVYGTPETELTYPTNIVAAPLAEEEHVSSATSITECDKLSSFATSVAEDQSVASLTAPQTEETGKSSLLLDTVTSIPSSRTEATQGLDYVPSAGTISPTSSLEEDKGFKSPPCEDFSVTGESEKRGEIIGKGLSGERAVEEEEEETANVEMSEKLCSQYGTPVFSAPGHALHPGEPALGEAEERCLSPDDSTVKMASPPPSGPPSATHTPFHQSPVEEKSEPQDFQEADSWGDTKRTPGVGKEDAAEETVKPGPEEGTLEKEEKVPPPRSPQAQEAPVNIDEGLTGCTIQLLPAQDKAIVFEIMEAGEPTGPILGAEALPGGLRTLPQEPGKPQKDEVLRYPDRSLSPEDAESLSVLSVPSPDTANQEPTPKSPCGLTEQYLHKDRWPEVSPEDTQSLSLSEESPSKETSLDVSSKQLSPESLGTLQFGELNLGKEEMGHLMQAEDTSHHTAPMSVPEPHAATASPPTDGTTRYSAQTDITDDSLDRKSPASSFSHSTPSGNGKYLPGAITSPDEHILTPDSSFSKSPESLPGPALEDIAIKWEDKVPGLKDRTSEQKKEPEPKDEVLQQKDKTLEHKEVVEPKDTAIYQKDEALHVKNEAVKQQDKALEQKGRDLEQKDTALEQKDKALEPKDKDLEEKDKALEQKDKIPEEKDKALEQKDTALEQKDKALEPKDKDLEQKDRVLEQKEKIPEEKDKALDQKVRSVEHKAPEDTVAEMKDRDLEQTDKAPEQKHQAQEQKDKVSEKKDQALEQKYWALGQKDEALEQNIQALEENHQTQEQESLVQEDKTRKPKMLEEKSPEKVKAMEEKLEALLEKTKALGLEESLVQEGRAREQEEKYWRGQDVVQEWQETSPTREEPAGEQKELAPAWEDTSPEQDNRYWRGREDVALEQDTYWRELSCERKVWFPHELDGQGARPHYTEERESTFLDEGPDDEQEVPLREHATRSPWASDFKDFQESSPQKGLEVERWLAESPVGLPPEEEDKLTRSPFEIISPPASPPEMVGQRVPSAPGQESPIPDPKLMPHMKNEPTTPSWLADIPPWVPKDRPLPPAPLSPAPGPPTPAPESHTPAPFSWGTAEYDSVVAAVQEGAAELEGGPYSPLGKDYRKAEGEREEEGRAEAPDKSSHSSKVPEASKSHATTEPEQTEPEQREPTPYPDERSFQYADIYEQMMLTGLGPACPTREPPLGVRGMGANPQLLQAGI

SEQ ID NO: 825974 - protein, 1383 aa, Homo sapiens
MDGVAEFSEYVSETVDVPSPFDLLEPPTSGGFLKLSKPCCYIFPGGRGDSALFAVNGFNILVDGGSDRKSCFWKLVRHLDRIDSVLLTHIGADNLPGINGLLQRKVAELEEEQSQGSSSYSDWVKNLISPELGVVFFNVPEKLRLPDASRKAKRSIEEACLTLQHLNRLGIQAEPLYRVVSNTIEPLTLFHKMGVGRLDMYVLNPVKDSKEMQFLMQKWAGNSKAKTGIVLPNGKEAEISVPYLTSITALVVWLPANPTEKIVRVLFPGNAPQNKILEGLEKLRHLDFLRYPVATQKDLASGAVPTNLKPSKIKQRADSKESLKATTKTAVSKLAKREEVVEEGAKEARSELAKELAKTEKKAKESSEKPPEKPAKPERVKTESSEALKAEKRKLIKDKVGKKHLKEKISKLEEKKDKEKKEIKKERKELKKDEGRKEEKKDAKKEEKRKDTKPELKKISKPDLKPFTPEVRKTLYKAKVPGRVKIDRSRAIRGEKELSSEPQTPPAQKGTVPLPTISGHRELVLSSPEDLTQDFEEMKREERALLAEQRDTGLGDKPFPLDTAEEGPPSTAIQGTPPSVPGLGQEEHVMKEKELVPEVPEEQGSKDRGLDSGAETEEEKDTWEEKKQREAERLPDRTEAREESEPEVKEDVIEKAELEEMEEVHPSDEEEEDATKAEGFYQKHMQEPLKVTPRSREAFGGRELGLQGKAPEKETSLFLSSLTTPAGATEHVSYIQDETIPGYSETEQTISDEEIHDEPEERPAPPRFHTSTYDLPGPEGAGPFEASQPADSAVPATSGKVYGTPETELTYPTNIVAAPLAEEEHVSSATSITECDKLSSFATSVAEDQSVASLTAPQTEETGKSSLLLDTVTSIPSSRTEATQGLDYVPSAGTISPTSSLEEDKGFKSPPCEDFSVTGESEKRGEIIGKGLSGERAVEEEEEETANVEMSEKLCSQYGTPVFSAPGHALHPGEPALGEAEERCLSPDDSTVKMASPPPSGPPSATHTPFHQSPVEEKSEPQDFQEADSWGDTKRTPGVGKEDAAEETVKPGPEEGTLEKEEKVPPPRSPQAQEAPVNIDEGLTGCTIQLLPAQDKAIVFEIMEAGEPTGPILGAEALPGGLRTLPQEPGKPQKDEVLRYPDRSLSPEDAESLSVLSVPSPDTANQEPTPKSPCGLTEQYLHKDRWPEVSPEDTQSLSLSEESPSKETSLDVSSKQLSPESLGTLQFGELNLGKEEMGHLMQAEDTSHHTAPMSVPEPHAATASPPTDGTTRYSAQTDITDDSLDRKSPASSFSHSTPSGNGKYLPGAITSPDEHILTPDSSFSKSPESLPGPALEDIAIKWEDKVPGLKDRTSEQKKEPDPFSSPAWLLCMWSSAVAWCLMG

SEQ ID NO: 825975 - protein, 2803 aa, Homo sapiens
MDGVAEFSEYVSETVDVPSPFDLLEPPTSGGFLKLSKPCCYIFPGGRGDSALFAVNGFNILVDGGSDRKSCFWKLVRHLDRIDSVLLTHIGADNLPGINGLLQRKVAELEEEQSQGSSSYSDWVKNLISPELGVVFFNVPEKLRLPDASRKAKRSIEEACLTLQHLNRLGIQAEPLYRVVSNTIEPLTLFHKMGVGRLDMYVLNPVKDSKEMQFLMQKWAGNSKAKTGIVLPNGKEAEISVPYLTSITALVVWLPANPTEKIVRVLFPGNAPQNKILEGLEKLRHLDFLRYPVATQKDLASGAVPTNLKPSKIKQRADSKESLKATTKTAVSKLAKREEVVEEGAKEARSELAKELAKTEKKAKESSEKPPEKPAKPERVKTESSEALKAEKRKLIKDKVGKKHLKEKISKLEEKKDKEKKEIKKERKELKKDEGRKEEKKDAKKEEKRKDTKPELKKISKPDLKPFTPEVRKTLYKAKVPGRVKIDRSRAIRGEKELSSEPQTPPAQKGTVPLPTISGHRELVLSSPEDLTQDFEEMKREERALLAEQRDTGLGDKPFPLDTAEEGPPSTAIQGTPPSVPGLGQEEHVMKEKELVPEVPEEQGSKDRGLDSGAETEEEKDTWEEKKQREAERLPDRTEAREESEPEVKEDVIEKAELEEMEEVHPSDEEEEDATKAEGFYQKHMQEPLKVTPRSREAFGGRELGLQGKAPEKETSLFLSSLTTPAGATEHVSYIQDETIPGYSETEQTISDEEIHDEPEERPAPPRFHTSTYDLPGPEGAGPFEASQPADSAVPATSGKVYGTPETELTYPTNIVAAPLAEEEHVSSATSITECDKLSSFATSVAEDQSVASLTAPQTEETGKSSLLLDTVTSIPSSRTEATQGLDYVPSAGTISPTSSLEEDKGFKSPPCEDFSVTGESEKRGEIIGKGLSGERAVEEEEEETANVEMSEKLCSQYGTPVFSAPGHALHPGEPALGEAEERCLSPDDSTVKMASPPPSGPPSATHTPFHQSPVEEKSEPQDFQEADSWGDTKRTPGVGKEDAAEETVKPGPEEGTLEKEEKVPPPRSPQAQEAPVNIDEGLTGCTIQLLPAQDKAIVFEIMEAGEPTGPILGAEALPGGLRTLPQEPGKPQKDEVLRYPDRSLSPEDAESLSVLSVPSPDTANQEPTPKSPCGLTEQYLHKDRWPEVSPEDTQSLSLSEESPSKETSLDVSSKQLSPESLGTLQFGELNLGKEEMGHLMQAEDTSHHTAPMSVPEPHAATASPPTDGTTRYSAQTDITDDSLDRKSPASSFSHSTPSGNGKYLPGAITSPDEHILTPDSSFSKSPESLPGPALEDIAIKWEDKVPGLKDRTSEQKKEPEPKDEVLQQKDKTLEHKEVVEPKDTAIYQKDEALHVKNEAVKQQDKALEQKGRDLEQKDTALEQKDKALEPKDKDLEEKDKALEQKDKIPEEKDKALEQKDTALEQKDKALEPKDKDLEQKDRVLEQKEKIPEEKDKALDQKVRSVEHKAPEDTVAEMKDRDLEQTDKAPEQKHQAQEQKDKVSEKKDQALEQKYWALGQKDEALEQNIQALEENHQTQEQESLVQEDKTRKPKMLEEKSPEKVKAMEEKLEALLEKTKALGLEESLVQEGRAREQEEKYWRGQDVVQEWQETSPTREEPAGEQKELAPAWEDTSPEQDNRYWRGREDVALEQDTYWRELSCERKVWFPHELDGQGARPHYTEERESTFLDEGPDDEQEVPLREHATRSPWASDFKDFQESSPQKGLEVERWLAESPVGLPPEEEDKLTRSPFEIISPPASPPEMVGQRVPSAPGQESPIPDPKLMPHMKNEPTTPSWLADIPPWVPKDRPLPPAPLSPAPGPPTPAPESHTPAPFSWGTAEYDSVVAAVQEGAAELEGGPYSPLGKDYRKAEGEREEEGRAEAPDKSSHSSKVPEASKSHATTEPEQTEPEQREPTPYPDERSFQYADIYEQMMLTGLGPACPTREPPLGAAGDWPPCLSTKEAAAGRNTSAEKELSSPISPKSLQSDTPTFSYAALAGPTVPPRPEPGPSMEPSLTPPAVPPRAPILSKGPSPPLNGNILSCSPDRRSPSPKESGRSHWDDSTSDSELEKGAREQPEKEAQSPSPPHPIPMGSPTLWPETEAHVSPPLDSHLGPARPSLDFPASAFGFSSLQPAPPQLPSPAEPRSAPCGSLAFSGDRALALAPGPPTRTRHDEYLEVTKAPSLDSSLPQLPSPSSPGAPLLSNLPRPASPALSEGSSSEATTPVISSVAERFSPSLEAAEQESGELDPGMEPAAHSLWDLTPLSPAPPASLDLALAPAPSLPGDMGDGILPCHLECSEAATEKPSPFQVPSEDCAANGPTETSPNPPGPAPAKAENEEAAACPAWERGAWPEGAERSSRPDTLLSPEQPVCPAGGSGGPPSSASPEVEAGPQGCATEPRPHRGELSPSFLNPPLPPSIDDRDLSTEEVRLVGRGGRRRVGGPGTTGGPCPVTDETPPTSASDSGSSQSDSDVPPETEECPSITAEAALDSDEDGDFLPVDKAGGVSGTHHPRPGHDPPPLPQPDPRPSPPRPDVCMADPEGLSSESGRVERLREKEKVQGRVGRRAPGKAKPASPARRLVLRGKRSPTPGKGPADRASRAPPRPRSTTSQVTPAEEKDGHSPMSKGLVNGLKAGPMALSSKGSSGAPVYVDLAYIPNHCSGKTADLDFFRRVRASYYVVSGNDPANGEPSRAVLDALLEGKAQWGENLQVTLIPTHDTEVTREWYQQTHEQQQQLNVLVLASSSTVVMQDESFPACKIEF

SEQ ID NO: 825976 - protein, 2803 aa, Homo sapiens; identical to SEQ ID NO: 825975

SEQ ID NO: 825977 - protein, 1854 aa, Homo sapiens
MSEKLCSQYGTPVFSAPGHALHPGEPALGEAEERCLSPDDSTVKMASPPPSGPPSATHTPFHQSPVEEKSEPQDFQEADSWGDTKRTPGVGKEDAAEETVKPGPEEGTLEKEEKVPPPRSPQAQEAPVNIDEGLTGCTIQLLPAQDKAIVFEIMEAGEPTGPILGAEALPGGLRTLPQEPGKPQKDEVLRYPDRSLSPEDAESLSVLSVPSPDTANQEPTPKSPCGLTEQYLHKDRWPEVSPEDTQSLSLSEESPSKETSLDVSSKQLSPESLGTLQFGELNLGKEEMGHLMQAEDTSHHTAPMSVPEPHAATASPPTDGTTRYSAQTDITDDSLDRKSPASSFSHSTPSGNGKYLPGAITSPDEHILTPDSSFSKSPESLPGPALEDIAIKWEDKVPGLKDRTSEQKKEPEPKDEVLQQKDKTLEHKEVVEPKDTAIYQKDEALHVKNEAVKQQDKALEQKGRDLEQKDTALEQKDKALEPKDKDLEEKDKALEQKDKIPEEKDKALEQKDTALEQKDKALEPKDKDLEQKDRVLEQKEKIPEEKDKALDQKVRSVEHKAPEDTVAEMKDRDLEQTDKAPEQKHQAQEQKDKVSEKKDQALEQKYWALGQKDEALEQNIQALEENHQTQEQESLVQEDKTRKPKMLEEKSPEKVKAMEEKLEALLEKTKALGLEESLVQEGRAREQEEKYWRGQDVVQEWQETSPTREEPAGEQKELAPAWEDTSPEQDNRYWRGREDVALEQDTYWRELSCERKVWFPHELDGQGARPHYTEERESTFLDEGPDDEQEVPLREHATRSPWASDFKDFQESSPQKGLEVERWLAESPVGLPPEEEDKLTRSPFEIISPPASPPEMVGQRVPSAPGQESPIPDPKLMPHMKNEPTTPSWLADIPPWVPKDRPLPPAPLSPAPGPPTPAPESHTPAPFSWGTAEYDSVVAAVQEGAAELEGGPYSPLGKDYRKAEGEREEEGRAEAPDKSSHSSKVPEASKSHATTEPEQTEPEQREPTPYPDERSFQYADIYEQMMLTGLGPACPTREPPLGAAGDWPPCLSTKEAAAGRNTSAEKELSSPISPKSLQSDTPTFSYAALAGPTVPPRPEPGPSMEPSLTPPAVPPRAPILSKGPSPPLNGNILSCSPDRRSPSPKESGRSHWDDSTSDSELEKGAREQPEKEAQSPSPPHPIPMGSPTLWPETEAHVSPPLDSHLGPARPSLDFPASAFGFSSLQPAPPQLPSPAEPRSAPCGSLAFSGDRALALAPGPPTRTRHDEYLEVTKAPSLDSSLPQLPSPSSPGAPLLSNLPRPASPALSEGSSSEATTPVISSVAERFSPSLEAAEQESGELDPGMEPAAHSLWDLTPLSPAPPASLDLALAPAPSLPGDMGDGILPCHLECSEAATEKPSPFQVPSEDCAANGPTETSPNPPGPAPAKAENEEAAACPAWERGAWPEGAERSSRPDTLLSPEQPVCPAGGSGGPPSSASPEVEAGPQGCATEPRPHRGELSPSFLNPPLPPSIDDRDLSTEEVRLVGRGGRRRVGGPGTTGGPCPVTDETPPTSASDSGSSQSDSDVPPETEECPSITAEAALDSDEDGDFLPVDKAGGVSGTHHPRPGHDPPPLPQPDPRPSPPRPDVCMADPEGLSSESGRVERLREKEKVQGRVGRRAPGKAKPASPARRLVLRGKRSPTPGKGPADRASRAPPRPRSTTSQVTPAEEKDGHSPMSKGLVNGLKAGPMALSSKGSSGAPVYVDLAYIPNHCSGKTADLDFFRRVRASYYVVSGNDPANGEPSRAVLDALLEGKAQWGENLQVTLIPTHDTEVTREWYQQTHEQQQQLNVLVLASSSTVVMQDESFPACKIEF

SEQ ID NO: 825978 - protein, 92 aa, Homo sapiens
TFARRAYRAFWRCRERGEEEGGYEAVADRGVETYPNDAGERGFGRRWRRRRDSSGRKKRPLPAVRAAKGPNPSHSPSLKERKPTRRPARLPQ

SEQ ID NO: 825979 - protein, 132 aa, Homo sapiens
MVGRNSAIAAGVCGALFIGYCIYFDRKRRSDPNFKNRLREGRKKQKLAKERAGLSKLPDLKDAEAVQKFFLEEIQLGEELLAQGEYEKGVDHLTNGIAVCGQPQQLLQALQQTLPPLVFQMLLTKLPTIREF

SEQ ID NO: 825980 - protein, 92 aa, Homo sapiens; identical to SEQ ID NO: 825978

SEQ ID NO: 825981 - protein, 92 aa, Homo sapiens; identical to SEQ ID NO: 825978

SEQ ID NO: 825982 - protein, 92 aa, Homo sapiens; identical to SEQ ID NO: 825978

SEQ ID NO: 825983 - protein, 114 aa, Homo sapiens
MVGRNSAIAAGVCGALFIGYCIYFDRQKLAKERAGLSKLPDLKDAEAVQKFFLEEIQLGEELLAQGEYEKGVDHLTNGIAVCGQPQQLLQALQQTLPPLVFQMLLTKLPTIREF

SEQ ID NO: 825984 - protein, 589 aa, Homo sapiens
SEANQWEVAYSGSATEYTFTHLKPGTLYKLRACCISTGGHSQCSESLPVRTLSIAPGQCRPPRVLGRPKHKEVHLEWDVPASESGCEVSEYSVEMTEPEDVASEVYHGPELECTVGNLLPGTVYRFRVRALNDGGYGPYSDVSEITTAAGPPGQCKAPCISCTPDGCVLVGWESPDSSGADISEYRLEWGEDEESLELIYHGTDTRFEIRDLLPAAQYCCRLQAFNQAGAGPYSELVLCQTPASAPDPVSTLCVLEEEPLDAYPDSPSACLVLNWEEPCNNGSEILAYTIDLGDTSITVGNTTMHVMKDLLPETTYRIRIQAINEIGAGPFSQFIKAKTRPLPPLPPRLECAAAGPQSLKLKWGDSNSKTHAAEDIVYTLQLEDRNKRFISIYRGPSHTYKVQRLTEFTCYSFRIQAASEAGEGPFSETYTFSTTKSVPPTIKAPRVTQLEGNSCEILWETVPSMKGDPVNYILQVLVGRESEYKQVYKGEEATFQISGLQTNTDYRFRVCACRRCLDTSQELSGAFSPSAAFVLQRSEVMLTGDMGSLDDPKMKSMMPTDEQFAAIIVLGFATLSILFAFILQYFLMK

SEQ ID NO: 825985 - protein, 286 aa, Homo sapiens
MHVMKDLLPETTYRIRIQAINEIGAGPFSQFIKAKTRPLPPLPPRLECAAAGPQSLKLKWGDSNSKTHAAEDIVYTLQLEDRNKRFISIYRGPSHTYKVQRLTEFTCYSFRIQAASEAGEGPFSETYTFSTTKSVPPTIKAPRVTQLEGNSCEILWETVPSMKGDPVNYILQVLVGRESEYKQVYKGEEATFQISGLQTNTDYRFRVCACRRCLDTSQELSGAFSPSAAFVLQRSEVMLTGDMGSLDDPKMKSMMPTDEQFAAIIVLGFATLSILFAFILQYFLMK

SEQ ID NO: 825986 - protein, 215 aa, Homo sapiens
MHVMKDLLPETTYRFISIYRGPSHTYKVQRLTEFTCYSFRIQAASEAGEGPFSETYTFSTTKSVPPTIKAPRVTQLEGNSCEILWETVPSMKGDPVNYILQVLVGRESEYKQVYKGEEATFQISGLQTNTDYRFRVCACRRCLDTSQELSGAFSPSAAFVLQRSEVMLTGDMGSLDDPKMKSMMPTDEQFAAIIVLGFATLSILFAFILQYFLMK

SEQ ID NO: 825987 - protein, 377 aa, Homo sapiens
SEANQWEVAYSGSATEYTFTHLKPGTLYKLRACCISTGGHSQCSESLPVRTLSIAPGQCRPPRVLGRPKHKEVHLEWDVPASESGCEVSEYSVEMTEPEDVASEVYHGPELECTVGNLLPGTVYRFRVRALNDGGYGPYSDVSEITTAAGPPGQCKAPCISCTPDGCVLVGWESPDSSGADISEYRLEWGEDEESLELIYHGTDTRFEIRDLLPAAQYCCRLQAFNQAGAGPYSELVLCQTPASAPDPVSTLCVLEEEPLDAYPDSPSACLVLNWEEPCNNGSEILAYTIDLGDTSITVGNTTMHVMKDLLPETTYRIRIQAINEIGAGPFSQFIKAKTRPLPPLPPRLECAAAGPQSLKLKWGDKCIQDQEHTHRV

SEQ ID NO: 825988 - protein, 260 aa, Homo sapiens
AAVSRGSDAISSLPPLPPRLECAAAGPQSLKLKWGDSNSKTHAAEDIVYTLQLEDRNKRFISIYRGPSHTYKVQRLTEFTCYSFRIQAASEAGEGPFSETYTFSTTKSVPPTIKAPRVTQLEGNSCEILWETVPSMKGDPVNYILQVLVGRESEYKQVYKGEEATFQISGLQTNTDYRFRVCACRRCLDTSQELSGAFSPSAAFVLQRSEVMLTGDMGSLDDPKMKSMMPTDEQFAAIIVLGFATLSILFAFILQYFLMK

SEQ ID NO: 825989 - protein, 589 aa, Homo sapiens; identical to SEQ ID NO: 825984

SEQ ID NO: 825990 - protein, 365 aa, Homo sapiens
EPPAEPLQYLACYRFHCSHQLGDNMWFLTTLLLWGGQVDTTKAVITLQPPWVSVFQEETVTLHCEVLHLPGSSSTQWFLNGTATQTSTPSYRITSASVNDSGEYRCQRGLSGRSDPIQLEIHRGWLLLQVSSRVFTEGEPLALRCHAWKDKLVYNVLYYRNGKAFKFFHWNSNLTILKTNISHNGTYHCSGMGKHRYTSAGISVTVKELFPAPVLNASVTSPLLEGNLVTLSCETKLLLQRPGLQLYFSFYMGSKTLRGRNTSSEYQILTARREDSGLYWCEAATEDGNVLKRSPELELQVLGLQLPTPVWFHVLFYLAVGIMFLVNTVLWVTIRKELKRKKKWDLEISLDSGGQALEAPTQGCA

SEQ ID NO: 825991 - protein, 395 aa, Homo sapiens
EPPAEPLQYLACYRFHCSHQLGDNMWFLTTLLLWGGQVDTTKAVITLQPPWVSVFQEETVTLHCEVLHLPGSSSTQWFLNGTATQTSTPSYRITSASVNDSGEYRCQRGLSGRSDPIQLEIHRGWLLLQVSSRVFTEGEPLALRCHAWKDKLVYNVLYYRNGKAFKFFHWNSNLTILKTNISHNGTYHCSGMGKHRYTSAGISVTVKELFPAPVLNASVTSPLLEGNLVTLSCETKLLLQRPGLQLYFSFYMGSKTLRGRNTSSEYQILTARREDSGLYWCEAATEDGNVLKRSPELELQVLGLQLPTPVWFHVLFYLAVGIMFLVNTVLWVTIRKELKRKKKWDLEISLDSGHEKKVISSLQEDRHLEEELKCQEQKEEQLQEGVHRKEPQGAT

SEQ ID NO: 825992 - protein, 395 aa, Homo sapiens; identical to SEQ ID NO: 825991

SEQ ID NO: 825993 - protein, 307 aa, Homo sapiens
GATSRTSSISCMLQISLLPPAWRQHVVLDNSAPLGGWLLLQVSSRVFTEGEPLALRCHAWKDKLVYNVLYYRNGKAFKFFHWNSNLTILKTNISHNGTYHCSGMGKHRYTSAGISVTVKELFPAPVLNASVTSPLLEGNLVTLSCETKLLLQRPGLQLYFSFYMGSKTLRGRNTSSEYQILTARREDSGLYWCEAATEDGNVLKRSPELELQVLGLQLPTPVWFHVLFYLAVGIMFLVNTVLWVTIRKELKRKKKWDLEISLDSGHEKKVISSLQEDRHLEEELKCQEQKEEQLQEGVHRKEPQGAT

SEQ ID NO: 825994 - protein, 78 aa, Homo sapiens
SEYSRGSPREPLPYLMLCLASLYIMMTLTSWYSPDAKFQSMTSKWPAVWVKISSSWVCLLLYVWTLVAPLVLTSRDFS

SEQ ID NO: 825995 - protein, 473 aa, Homo sapiens
MGAVLGVFSLASWVPCLCSGASCLLCSCCPNSKNSTVTRLIYAFILLLSTVVSYIMQRKEMETYLKKIPGFCEGGFKIHEADINADKDCDVLVGYKAVYRISFAMAIFFFVFSLLMFKVKTSKDLRAAVHNGFWFFKIAALIGIMVGSFYIPGGYFSSVWFVVGMIGAALFILIQLVLLVDFAHSWNESWVNRMEEGNPRLWYAALLSFTSAFYILSIICVGLLYTYYTKPDGCTENKFFISINLILCVVASIISIHPKIQEHQPRSGLLQSSLITLYTMYLTWSAMSNEPDRSCNPNLMSFITRITAPTLAPGNSTAVVPTPTPPSKSGSLLDSDNFIGLFVFVLCLLYSSIRTSTNSQVDKLTLSGSDSVILGDTTTSGASDEEDGQPRRAVDNEKEGVQYSYSLFHLMLCLASLYIMMTLTSWYSPDAKFQSMTSKWPAVWVKISSSWVCLLLYVWTLVAPLVLTSRDFS

SEQ ID NO: 825996 - protein, 473 aa, Homo sapiens; identical to SEQ ID NO: 825995

SEQ ID NO: 825997 - protein, 473 aa, Homo sapiens; identical to SEQ ID NO: 825995

SEQ ID NO: 825998 - protein, 473 aa, Homo sapiens; identical to SEQ ID NO: 825995

SEQ ID NO: 825999 - protein, 344 aa, Homo sapiens
MGAVLGVFSLASWVPCLCSGASCLLCSCCPNSKNSTVTRLIYAFILLLSTVVSYIMQRKEMETYLKKIPGFCEGGFKIHEADINADKDCDVLVGYKAVYRISFAMAIFFFVFSLLMFKVKTSKDLRAAVHNGFWFFKIAALIGIMVGSFYIPGGYFSSVWFVVGMIGAALFILIQLVLLVDFAHSWNESWVNRMEEGNPRLWYAALLSFTSAFYILSIICVGLLYTYYTKPDGCTENKFFISINLILCVVASIISIHPKIQEHQPRSGLLQSSLITLYTMYLTWSAMSNEPDRSCNPNLMSFITRITAPTLAPGNSTVWTTRKRECSIATPYSTSCSAWLPCTS

SEQ ID NO: 826000 - protein, 473 aa, Homo sapiens; identical to SEQ ID NO: 825995

SEQ ID NO: 826001 - protein, 455 aa, Homo sapiens
MGAVLGVFSLASWVPCLCSGASCLLCSCCPNSKNSTVTRLIYAFILLLSTVVSYIMQRKEMETYLKKIPGFCEGGFYKAVYRISFAMAIFFFVFSLLMFKVKTSKDLRAAVHNGFWFFKIAALIGIMVGSFYIPGGYFSSVWFVVGMIGAALFILIQLVLLVDFAHSWNESWVNRMEEGNPRLWYAALLSFTSAFYILSIICVGLLYTYYTKPDGCTENKFFISINLILCVVASIISIHPKIQEHQPRSGLLQSSLITLYTMYLTWSAMSNEPDRSCNPNLMSFITRITAPTLAPGNSTAVVPTPTPPSKSGSLLDSDNFIGLFVFVLCLLYSSIRTSTNSQVDKLTLSGSDSVILGDTTTSGASDEEDGQPRRAVDNEKEGVQYSYSLFHLMLCLASLYIMMTLTSWYSPDAKFQSMTSKWPAVWVKISSSWVCLLLYVWTLVAPLVLTSRDFS

SEQ ID NO: 826002 - protein, 427 aa, Homo sapiens
MGAVLGVFSLASWVPCLCSGASCLLCSCCPNSKNSTVTRLIYAFILLLSTVVSYIMQRKEMETYLKKIPGFCEGGFKIHEADINADKDCDVLVGYKAVYRISFAMAIFFFVFSLLMFKVKTSKDLRAAVHNGFWFFKIAALIGIMVGSFYIPGGYFSSALLSFTSAFYILSIICVGLLYTYYTKPDGCTENKFFISINLILCVVASIISIHPKIQEHQPRSGLLQSSLITLYTMYLTWSAMSNEPDRSCNPNLMSFITRITAPTLAPGNSTAVVPTPTPPSKSGSLLDSDNFIGLFVFVLCLLYSSIRTSTNSQVDKLTLSGSDSVILGDTTTSGASDEEDGQPRRAVDNEKEGVQYSYSLFHLMLCLASLYIMMTLTSWYSPDAKFQSMTSKWPAVWVKISSSWVCLLLYVWTLVAPLVLTSRDFS

SEQ ID NO: 826003 - protein, 473 aa, Homo sapiens; identical to SEQ ID NO: 825995

SEQ ID NO: 826004 - protein, 364 aa, Homo sapiens
MGAVLGVFSLASWVPCLCSGASCLLCSCCPNSKNSTVTRLIYAFILLLSTVVSYIMQRKEMETYLKKIPGFCEGGFKIHEADINADKDCDVLVGYKAVYRISFAMAIFFFVFSLLMFKVKTSKDLRAAVHNGFWFFKIAALIGIMVGSFYIPGGYFSSVWFVVGMIGAALFILIQLVLLVDFAHSWNESWVNRMEEGNPRLWYAALLSFTSAFYILSIICVGLLYTYYTKPDGCTENKFFISINLILCVVASIISIHPKIQEHQPRSGLLQSSLITLYTMYLTWSAMSNEPEPLTEVAAFGSILVYLALIPPVLAVLTAERIAAFPGVSQFGAAAYGHGQEEATVATWKTSLTLRSEDREEHST

SEQ ID NO: 826005 - protein, 307 aa, Homo sapiens
MGAVLGVFSLASWVPCLCSGASCLLCSCCPNSKNSTVTRLIYAFILLLSTVVSYIMQRKEMETYLKKIPGFCEGGFKIHEADINADKDCDVLVGYKAVYRISFAMAIFFFVFSLLMFKVKTSKDLRAAVHNGFWFFKIAALIGIMVGSFYIPGGYFSSVWFVVGMIGAALFILIQLVLLVDFAHSWNESWVNRMEEGNPRLWYAALLSFTSAFYILSIICVGLLYTYYTKPDGCTENKFFISINLILCVVASIISIHPKIQEQQPPPTHFFSTNLFFQQKNPSLLREPSDFLHLKSVKSSCFLLPYP

SEQ ID NO: 826006 - protein, 248 aa, Homo sapiens
  misc_feature (236)..(236): Xaa can be any naturally occurring amino acid
MGAVLGVFSLASWVPCLCSGASCLLCSCCPNSKNSTVTRLIYAFILLLSTVVSYIMQRKEMETYLKKIPGFCEGGFKIHEADINADKDCDVLVGYKAVYRISFAMAIFFFVFSLLMFKVKTSKDLRAAVHNGFWFFKIAALIGIMVGSFYIPGGYFSSVWLVVDDRGSLFILIQMVCGNSVIWDAMVIDEKNQVECAMLKAYTDTVGQFNTREKLNRLGYPMTRCHNCVVFLAFSXPKDTPKHRPHDG

SEQ ID NO: 826007 - protein, 138 aa, Homo sapiens
MGAVLGVFSLASWVPCLCSGASCLLCSCCPNSKNSTVTRLIYAFILLLSTVVSYIMQRKEMETYLKKIPGFCEGGFKIHEADINADKDCDVLVGYKAVYRISFAMAIFFFVFSLLMFKVKTSKDLRAAVHNGFWFFNI

SEQ ID NO: 826008 - protein, 80 aa, Homo sapiens
IRASVEGCVSGLRNRHVSGESPQLAVTTVLESSLRTGHLHHWRHHGGCAGCLLPRQLENPGELKARHGGSRQDGLNLLTS

SEQ ID NO: 826009 - protein, 239 aa, Homo sapiens
MGAVLGVFSLASWVPCLCSGASCLLCSCCPNSKNSTVTRLIYAFILLLSTVVSYIMQRKEMETYLKKIPGFCEGGFKIHEADINADKDCDVLVGYKAVYRISFAMAIFFFVFSLLMFKVKTSKDLRAAVHNGFWFFKIAALIGIMVGSFYIPGGYFSSVWFVVGMIGAALFILIQLVLLVDFAHSWNESWVNRMEEGNPRLWYAALRCHKRLLSGTMGGGIITHHGGEQLQVRLRGYVQ

SEQ ID NO: 826010 - protein, 473 aa, Homo sapiens; identical to SEQ ID NO: 825995

SEQ ID NO: 826011 - protein, 473 aa, Homo sapiens; identical to SEQ ID NO: 825995

SEQ ID NO: 826012 - protein, 473 aa, Homo sapiens; identical to SEQ ID NO: 825995

SEQ ID NO: 826013 - protein, 473 aa, Homo sapiens; identical to SEQ ID NO: 825995

SEQ ID NO: 826014 - protein, 418 aa, Homo sapiens
MQRKEMETYLKKIPGFCEGGFKIHEADINADKDCDVLVGYKAVYRISFAMAIFFFVFSLLMFKVKTSKDLRAAVHNGFWFFKIAALIGIMVGSFYIPGGYFSSVWFVVGMIGAALFILIQLVLLVDFAHSWNESWVNRMEEGNPRLWYAALLSFTSAFYILSIICVGLLYTYYTKPDGCTENKFFISINLILCVVASIISIHPKIQEHQPRSGLLQSSLITLYTMYLTWSAMSNEPDRSCNPNLMSFITRITAPTLAPGNSTAVVPTPTPPSKSGSLLDSDNFIGLFVFVLCLLYSSIRTSTNSQVDKLTLSGSDSVILGDTTTSGASDEEDGQPRRAVDNEKEGVQYSYSLFHLMLCLASLYIMMTLTSWYSPDAKFQSMTSKWPAVWVKISSSWVCLLLYVWTLVAPLVLTSRDFS

SEQ ID NO: 826015 - protein, 473 aa, Homo sapiens; identical to SEQ ID NO: 825995

SEQ ID NO: 826016 - protein, 292 aa, Homo sapiens
LALTGMPYLTGFYSKDLIIEAANTLLSFTSAFYILSIICVGLLYTYYTKPDGCTENKFFISINLILCVVASIISIHPKIQEHQPRSGLLQSSLITLYTMYLTWSAMSNEPDRSCNPNLMSFITRITAPTLAPGNSTAVVPTPTPPSKSGSLLDSDNFIGLFVFVLCLLYSSIRTSTNSQVDKLTLSGSDSVILGDTTTSGASDEEDGQPRRAVDNEKEGVQYSYSLFHLMLCLASLYIMMTLTSWYSPDAKFQSMTSKWPAVWVKISSSWVCLLLYVWTLVAPLVLTSRDFS

SEQ ID NO: 826017 - protein, 473 aa, Homo sapiens; identical to SEQ ID NO: 825995

SEQ ID NO: 826018 - protein, 233 aa, Homo sapiens
MGAVLGVFSLASWVPCLCSGASCLLCSCCPNSKNSTVTRLIYAFILLLSTVVSYIMQRKEMETYLKKIPGFCEGGFKIHEADINADKDCDVLVGYKAVYRISFAMAIFFFVFSLLMFKVKTSKDLRAAVHNGFWFFKIAALIGIMVGSFYIPGGYFSSVWFVVGMIGAALFILIQLVLLVDFAHSWNESWVNRMEEGQVWMLLLSSSAYICWSAAFINTDVRTSSNNDWGVIA

SEQ ID NO: 826019 - protein, 194 aa, Homo sapiens
MGAVLGVFSLASWVPCLCSGASCLLCSCCPNSKNSTVTRLIYAFILLLSTVVSYIMQRKEMETYLKKIPGFCEGGFKIHEADINADKDCDVLVGYKAVYRISFAMAIFFFVFSLLMFKVKTSKDLRAAVHNGFWFFKIAALIGIMVGSFYIPGGYFSSGPFNAGVEWPFNASGPFNASGPFKRLRAIQAPPGTY

SEQ ID NO: 826020 - protein, 150 aa, Homo sapiens
  misc_feature (150)..(150): Xaa can be any naturally occurring amino acid
MGAVLGVFSLASWVPCLCSGASCLLCSCCPNSKNSTVTRLIYAFILLLSTVVSYIMQRKEMETYLKKIPGFCEGGFKIHEADINADKDCDVLVGYKAVYRISFAMAIFFFVFSLLMFKVKTSKDLRAAVHNGFGSFLALWFGGRMIGAAX

SEQ ID NO: 826021 - protein, 111 aa, Homo sapiens
  misc_feature (79)..(79): Xaa can be any naturally occurring amino acid
MEGRVGIDKKGIGDMWSLALDENSMFDVTGWPFTSRRDEVAMYGDAYSLIDLASTESTTYLPRTYHMDCSRSCPQTLPXQCSHDRLHSFLVWWMPSNISEEYFSQVSCCLF

SEQ ID NO: 826022 - protein, 829 aa, Homo sapiens
MGCAPSIHISERLVAEDAPSPAAPPLSSGGPRLPQGQKTAALPRTRGAGLLESELRDGSGKKVAVADVQFGPMRFHQDQLQVLLVFTKEDNQCNGFCRACEKAGFKCTVTKEAQAVLACFLDKHHDIIIIDHRNPRQLDAEALCRSIRSSKLSENTVIVGVVRRVDREELSVMPFISAGFTRRYVENPNIMACYNELLQLEFGEVRSQLKLRACNSVFTALENSEDAIEITSEDRFIQYANPAFETTMGYQSGELIGKELGEVPINEKKADLLDTINSCIRIGKEWQGIYYAKKKNGDNIQQNVKIIPVIGQGGKIRHYVSIIRVCNGNNKAEKISECVQSDTHTDNQTGKHKDRRKGSLDVKAVASRATEVSSQRRHSSMARIHSMTIEAPITKVINIINAAQESSPMPVTEALDRVLEILRTTELYSPQFGAKDDDPHANDLVGGLMSDGLRRLSGNEYVLSTKNTQMVSSNIITPISLDDVPPRIARAMENEEYWDFDIFELEAATHNRPLIYLGLKMFARFGICEFLHCSESTLRSWLQIIEANYHSSNPYHNSTHSADVLHATAYFLSKERIKETLDPIDEVAALIAATIHDVDHPGRTNSFLCNAGSELAILYNDTAVLESHHAALAFQLTTGDDKCNIFKNMERNDYRTLRQGIIDMVLATEMTKHFEHVNKFVNSINKPLATLEENGETDKNQEVINTMLRTPENRTLIKRMLIKCADVSNPCRPLQYCIEWAARISEEYFSQTDEEKQQGLPVVMPVFDRNTCSIPKSQISFIDYFITDMFDAWDAFVDLPDLMQHLDNNFKYWKGLDEMKLRNLRPPPE

SEQ ID NO: 826023 - protein, 449 aa, Homo sapiens
MARIHSMTIEAPITKVINIINAAQESSPMPVTEALDRVLEILRTTELYSPQFGAKDDDPHANDLVGGLMSDGLRRLSGNEYVLSTKNTQMVSSNIITPISLDDVPPRIARAMENEEYWDFDIFELEAATHNRPLIYLGLKMFARFGICEFLHCSESTLRSWLQIIEANYHSSNPYHNSTHSADVLHATAYFLSKERIKETLDPIDEVAALIAATIHDVDHPGRTNSFLCNAGSELAILYNDTAVLESHHAALAFQLTTGDDKCNIFKNMERNDYRTLRQGIIDMVLATEMTKHFEHVNKFVNSINKPLATLEENGETDKNQEVINTMLRTPENRTLIKRMLIKCADVSNPCRPLQYCIEWAARISEEYFSQTDEEKQQGLPVVMPVFDRNTCSIPKSQISFIDYFITDMFDAWDAFVDLPDLMQHLDNNFKYWKGLDEMKLRNLRPPPE

SEQ ID NO: 826024 - protein, 312 aa, Homo sapiens
GLLMLLTNLLTCSKCLSFLWLRSWLQIIEANYHSSNPYHNSTHSADVLHATAYFLSKERIKETLDPIDEVAALIAATIHDVDHPGRTNSFLCNAGSELAILYNDTAVLESHHAALAFQLTTGDDKCNIFKNMERNDYRTLRQGIIDMVLATEMTKHFEHVNKFVNSINKPLATLEENGETDKNQEVINTMLRTPENRTLIKRMLIKCADVSNPCRPLQYCIEWAARISEEYFSQTDEEKQQGLPVVMPVFDRNTCSIPKSQISFIDYFITDMFDAWDAFVDLPDLMQHLDNNFKYWKGLDEMKLRNLRPPPE

SEQ ID NO: 826025 - protein, 188 aa, Homo sapiens
HWVICLFCLYRLFFETGPVTVDMVLATEMTKHFEHVNKFVNSINKPLATLEENGETDKNQEVINTMLRTPENRTLIKRMLIKCADVSNPCRPLQYCIEWAARISEEYFSQTDEEKQQGLPVVMPVFDRNTCSIPKSQISFIDYFITDMFDAWDAFVDLPDLMQHLDNNFKYWKGLDEMKLRNLRPPPE

SEQ ID NO: 826026 - protein, 115 aa, Homo sapiens [sequence omitted]

SEQ ID NO: 826027 - protein, 829 aa, Homo sapiens; identical to SEQ ID NO: 826022

SEQ ID NO: 826028 - protein, 637 aa, Homo sapiens
MGCAPSIHISERLVAEDAPSPAAPPLSSGGPRLPQGQKTAALPRTRGAGLLESELRDGSGKKVAVADVQFGPMRFHQDQLQVLLVFTKEDNQCNGFCRACEKAGFKCTVTKEAQAVLACFLDKHHDIIIIDHRNPRQLDAEALCRSIRSSKLSENTVIVGVVRRVDREELSVMPFISAGFTRRYVENPNIMACYNELLQLEFGEVRSQLKLRACNSVFTALENSEDAIEITSEDRFIQYANPAFETTMGYQSGELIGKELGEVPINEKKADLLDTINSCIRIGKEWQGIYYAKKKNGDNIQQNVKIIPVIGQGGKIRHYVSIIRVCNGNNKAEKISECVQSDTHTDNQTGKHKDRRKGSLDVKAVASRATEVSSQRRHSSMARIHSMTIEAPITKVINIINAAQESSPMPVTEALDRVLEILRTTELYSPQFGAKDDDPHANDLVGGLMSDGLRRLSGNEYVLSTKNTQMVSSNIITPISLDDVPPRIARAMENEEYWDFDIFELEAATHNRPLIYLGLKMFARFGICEFLHCSESTLRSWLQIIEANYHSSNPYHNSTHSADVLHATAYFLSKERIKVSCCLPATFNGQEQWGESSASASTKIHSMTAHVCSLAQEGQGHTRNQAGGHISFGKLMC

SEQ ID NO: 826029 - protein, 593 aa, Homo sapiens
MGCAPSIHISERLVAEDAPSPAAPPLSSGGPRLPQGQKTAALPRTRGAGLLESELRDGSGKKVAVADVQFGPMRFHQDQLQVLLVFTKEDNQCNGFCRACEKAGFKCTVTKEAQAVLACFLDKHHDIIIIDHRNPRQLDAEALCRSIRSSKLSENTVIVGVVRRVDREELSVMPFISAGFTRRYVENPNIMACYNELLQLEFGEVRSQLKLRACNSVFTALENSEDAIEITSEDRFIQYANPAFETTMGYQSGELIGKELGEVPINEKKADLLDTINSCIRIGKEWQGIYYAKKKNGDNIQQNVKIIPVIGQGGKIRHYVSIIRVCNGNNKAEKISECVQSDTHTDNQTGKHKDRRKGSLDVKAVASRATEVSSQRRHSSMARIHSMTIEAPITKVINIINAAQESSPMPVTEALDRVLEILRTTELYSPQFGAKDDDPHANDLVGGLMSDGLRRLSGNEYVLSTKNTQMVSSNIITPISLDDVPPRIARAMENEEYWDFDIFELEAATHNRPLIYLGLKMFARFGICEFLHCSESTLRSWLQIIEANYHSSNPYHNSTHSADVLHATAYFLSKERIKETLDPIDVARCYGIL

SEQ ID NO: 826030 - protein, 390 aa, Homo sapiens
MGCAPSIHISERLVAEDAPSPAAPPLSSGGPRLPQGQKTAALPRTRGAGLLESELRDGSGKKVAVADVQFGPMRFHQDQLQVLLVFTKEDNQCNGFCRACEKAGFKCTVTKEAQAVLACFLDKHHDIIIIDHRNPRQLDAEALCRSIRSSKLSENTVIVGVVRRVDREELSVMPFISAGFTRRYVENPNIMACYNELLQLEFGEVRSQLKLRACNSVFTALENSEDAIEITSEDRFIQYANPAFETTMGYQSGELIGKELGEVPINEKKADLLDTINSCIRIGKEWQGIYYAKKKNGDNIQQNVKIIPVIGQGGKIRHYVSIIRVCNGNNKAEKISECVQSDTHTDNQTGKHKDRRKGSLDVKAVASRATEVSSQRRHFSMARAIRGGSS

SEQ ID NO: 826031 - protein, 88 aa, Homo sapiens
MGCAPSIHISERLVAEDAPSPAAPPLSSGGPRLPQGQKTAALPRTRGAGLLESELRDGSGKKVRGAGHSGAAAKLGPGQYSNFPASRA

SEQ ID NO: 826032 - protein, 657 aa, Homo sapiens
MPFISAGFTRRYVENPNIMACYNELLQLEFGEVRSQLKLRACNSVFTALENSEDAIEITSEDRFIQYANPAFETTMGYQSGELIGKELGEVPINEKKADLLDTINSCIRIGKEWQGIYYAKKKNGDNIQQNVKIIPVIGQGGKIRHYVSIIRVCNGNNKAEKISECVQSDTHTDNQTGKHKDRRKGSLDVKAVASRATEVSSQRRHSSMARIHSMTIEAPITKVINIINAAQESSPMPVTEALDRVLEILRTTELYSPQFGAKDDDPHANDLVGGLMSDGLRRLSGNEYVLSTKNTQMVSSNIITPISLDDVPPRIARAMENEEYWDFDIFELEAATHNRPLIYLGLKMFARFGICEFLHCSESTLRSWLQIIEANYHSSNPYHNSTHSADVLHATAYFLSKERIKETLDPIDEVAALIAATIHDVDHPGRTNSFLCNAGSELAILYNDTAVLESHHAALAFQLTTGDDKCNIFKNMERNDYRTLRQGIIDMVLATEMTKHFEHVNKFVNSINKPLATLEENGETDKNQEVINTMLRTPENRTLIKRMLIKCADVSNPCRPLQYCIEWAARISEEYFSQTDEEKQQGLPVVMPVFDRNTCSIPKSQISFIDYFITDMFDAWDAFVDLPDLMQHLDNNFKYWKGLDEMKLRNLRPPPE

SEQ ID NO: 826033 - protein, 181 aa, Homo sapiens
MERNDYRTLRQGIIDMVLATEMTKHFEHVNKFVNSINKPLATLEENGETDKNQEVINTMLRTPENRTLIKRMLIKCADVSNPCRPLQYCIEWAARISEEYFSQTDEEKQQGLPVVMPVFDRNTCSIPKSQISFIDYFITDMFDAWDAFVDLPDLMQHLDNNFKYWKGLDEMKLRNLRPPPE

SEQ ID NO: 826034 - protein, 123 aa, Homo sapiens [sequence omitted]

SEQ ID NO: 826035 - protein, 123 aa, Homo sapiens
NLLQPPSNAITVKWRLGHCSLGLLQELFRKAHEDHGLPQFLVKHKVWSAPAKGIDGFLPVFDRNTCSIPKSQISFIDYFITDMFDAWDAFVDLPDLMQHLDNNFKYWKGLDEMKLRNLRPPPE

SEQ ID NO: 826036 - protein, 757 aa, Homo sapiens
MGCAPSIHISERLVAEDAPSPAAPPLSSGGPRLPQGQKTAALPRTRGAGLLESELRDGSGKKVAVADVQFGPMRFHQDQLQVLLVFTKEDNQCNGFCRACEKAGFKCTVTKEAQAVLACFLDKHHDIIIIDHRNPRQLDAEALCRSIRSSKLSENTVIVGVVRRVDREELSVMPFISAGFTRRYVENPNIMACYNELLQLEFGEVRSQLKLRACNSVFTALENSEDAIEITSEDRFIQYANPAFETTMGYQSGELIGKELGEVPINEKKADLLDTINSCIRIGKEWQGIYYAKKKNGDNIQQNVKIIPVIGQGGKIRHYVSIIRVCNGNNKAEKISECVQSDTHTDNQTGKHKDRRKGSLDVKAVASRATEVSSQRRHSSMARIHSMTIEAPITKVINIINAAQESSPMPVTEALDRVLEILRTTELYSPQFGAKDDDPHANDLVGGLMSDGLRRLSGNEYVLSTKNTQMVSSNIITPISLDDVPPRIARAMENEEYWDFDIFELEAATHNRPLIYLGLKMFARFGICEFLHCSESTLRSWLQIIEANYHSSNPYHNSTHSADVLHATAYFLSKERIKETLDPIDEVAALIAATIHDVDHPGRTNSFLCNAGSELAILYNDTAVLESHHAALAFQLTTGDDKCNIFKNMERNDYRTLRQGIIDMVLATEMTKHFEHVNKFVNSINKPLATLEENGETDKNQEVINTMLRTPENRTLIKRMLIKCADVSNPCRPLQYCIEWAARISEEYFSQVSCCLF

SEQ ID NO: 826037 - protein, 314 aa, Homo sapiens
MGCAPSIHISERLVAEDAPSPAAPPLSSGGPRLPQGQKTAALPRTRGAGLLESELRDGSGKKVAVADVQFGPMRFHQDQLQVLLVFTKEDNQCNGFCRACEKAGFKCTVTKEAQAVLACFLDKHHDIIIIDHRNPRQLDAEALCRSIRSSKLSENTVIVGVVRRVDREELSVMPFISAGFTRRYVENPNIMACYNELLQLEFGEVRSQLKLRACNSVFTALENSEDAIEITSEDRFIQYANPAFETTMGYQSGELIGKELGEVPINEKKADLLDTINSCIRIGKEWQGIYYAKKKNGDNIQQNVKIIPVIGQGG

SEQ ID NO: 826038 - protein, 324 aa, Homo sapiens
MAQQRALPQSKETLLQSYNKRLKDDIKSIMDNFTEIIKTAKIEDETQVSRATQGEQDNYEMHVRAANIVRAGESLMKLVSDLKQFLILNDFPSVNEAIDQRNQQLRTLQEECDRKLITLRDEISIDLYELEEEYYSSRYKSAGLPMQSGSLPTWAWPAGRAAFCFFKFLLVLAVEPCLGFRAELLARAFDRQTIHIHMPGPWAFPTVQCDENHRTHASRIGRVWRREAPGCIPRRPSSESLPPRAVRSGAVLLLLPSESICRDFSQGWASLFWAVRSTPMSRAPGMQFHVDVTKPQCGGRDSHGNVGDEAQAGNGLESHWSSNS

SEQ ID NO: 826039 - protein, 318 aa, Homo sapiens
MAQQRALPQSKETLLQSYNKRLKDDIKSIMDNFTEIIKTAKIEDETQVSRATQGEQDNYEMHVRAGESLMKLVSDLKQFLILNDFPSVNEAIDQRNQQLRTLQEECDRKLITLRDEISIDLYELEEEYYSSRYKYAGLPMQSGSLPTWAWPAGRAAFCFFKFLLVLAVEPCLGFRAELLARAFDRQTIHIHMPGPWAFPTVQCDENHRTHASRIGRVWRREAPGCIPRRPSSESLPPRAVRSGAVLLLLPSESICRDFSQGWASLFWAVRSTPMSRAPGMQFHVDVTKPQCGGRDSHGNVGDEAQAGNGLESHWSSNS

SEQ ID NO: 826040 - protein, 262 aa, Homo sapiens
MAQQRALPQSKETLLQSYNKRLKDDIKSIMDNFTEIIKTAKIEDETQVSRATQGEQDNYEMHVRAANIVRAGESLMKLVSDLKQFLILNDFPSVNEAIDQRNQQLRTLQEECDRKLITLRDEISIDLYELEEEYYSSRYKSAGLPMQSGSLPTWAWPAGRAAFCFFKFLLVLAVEPCLGFRAELLARAFDRQTIHIHMPGPWAFPTVQCDENHRTHASRIGRVWRREAPGCIPRRPSSESLPPRAVRSGAVLLLLPLKPSTV

SEQ ID NO: 826041 - protein, 200 aa, Homo sapiens
MAQQRALPQSKETLLQSYNKRLKDDIKSIMDNFTEIIKTAKIEDETQVSRATQGEQDNYEMHVRAANIVRAGESLMKLVSDLKQFLILNDFPSVNEAIDQRNQQLRTLQEECDRKLITLRDEISIDLYELEEEYYSSSSSLCEANDLPLCEAYGRLDLDTDSADGLSAPLLASPEPSAGPLQVAAPAHSHAGGPGPTEHA

SEQ ID NO: 826042 - protein, 200 aa, Homo sapiens; identical to SEQ ID NO: 826041

SEQ ID NO: 826043 - protein, 150 aa, Homo sapiens
MAQQRALPQSKETLLQSYNKRLKDDIKSIMDNFTEIIKTAKIEDETQVSRATQGEQDNYEMHVRAANIVRAGESLMKLVSDLKQFLILNDFPSVNEAIDQRNQQLRTLQEECDRKLITLRDEISIDLYELEEEYYSSSWQNSRLRNCRAP

SEQ ID NO: 826044 - protein, 131 aa, Homo sapiens
MLGWLSPLAASPCQACQLRGQMEQEWRKGKAGLGCGRVFLTLLLSCSPLPWLSSLPAPVSPWGFWWWKSSSLCEANDLPLCEAYGRLDLDTDSADGLSAPLLASPEPSAGPLQVAAPAHSHAGGPGPTEHA

SEQ ID NO: 826045 - protein, 236 aa, Homo sapiens
MAPDPWFSTYDSTCQIAQEIAEKIQQRNQYERKGEKAPKLTVTIRALLQNLKEKIALLKDLLLRAVSTHQITQLEGDRRQNLLDDLVTRERLLLASFKNEGAEPDLIRSSLMSEEAKRGAPNPWLFEEPEETRGLGFDEIRQQQQKIIQEQDAGLDALSSIISRQKQMGQEIGNELDEQNEIIDDLANLVENTDEKLRNETRRVNMVDRKSASCGMIMVILLLLVAIVVVAVWPTN

SEQ ID NO: 826046 - protein, 201 aa, Homo sapiens
MAPDPWFSTYDSTCQIAQEIAEKIQQRNQYERKGEKAPKLTVTIRALLQNLKEKIALLKDLLLRAVSTHQITQLEGDRRQNLLDDLVTRERLLLASFKNEGAEPDLIRSSLMSEEAKRGAPNPWLFEEPEETRGLGFDEIRQQQQKIIQEQDAGLDALSSIISRQKQMGQEIGNELDEQNEIIDDLCHLVENTDDLVELIM

SEQ ID NO: 826047 - protein, 236 aa, Homo sapiens; identical to SEQ ID NO: 826045

SEQ ID NO: 826048 - protein, 242 aa, Homo sapiens
MAPDPWFSTYDSTCQIAQEIAEKIQQRNQYERKGEKAPKLTVTIRALLQNLKEKIALLKDLLLRAVSTHQITQLEGDRRQNLLDDLVTRERLLLASFKNEGAEPDLIRSSLMSEEAKRGAPNPWLFEEPEETRGLGFDEIRQQQQKIIQEQDAGLDALSSIISRQKQMGQEIGNELDEQNEIIDDLANLVENTDEKLRNETRRVNMVDRKSASCGMIMVILLLLVAIVVVAVWPTNSSDTWQ

SEQ ID NO: 826049 - protein, 181 aa, Homo sapiens
MTTRSLLNVLREFWQAQMSGSPHTILLVKLPKKLLRKFNNEINMNEKVKRHQRSSLMSEEAKRGAPNPWLFEEPEETRGLGFDEIRQQQQKIIQEQDAGLDALSSIISRQKQMGQEIGNELDEQNEIIDDLANLVENTDEKLRNETRRVNMVDRKSASCGMIMVILLLLVAIVVVAVWPTN

SEQ ID NO: 826050 - protein, 192 aa, Homo sapiens
MAPDPWFSTYDSTCQIAQEIAEKIQQRNQYERKGEKAPKLTVTIRALLQNLKEKIALLKDLLLRAVSTHQITQLEGDRRQNLLDDLVTRERLLLASFKNEGAEPDLIRSSLMSEEAKRGAPNPWLFEEPEETRGLGFDEIRQQQQKIIQEQDAGLDALSSIISRQKQMGQEIGNELDEQNGKNKSGIDQICR

SEQ ID NO: 826051 - protein, 119 aa, Homo sapiens
MAPDPWFSTYDSTCQIAQEIAEKIQQRNQYERKGEKAPKLTVTIRALLQNLKEKIALLKDLLLRAVSTHQITQLEGDRRQNLLDDLVTRERLLLASFKNEGAEPDLIRTRSLGWFRIRF

SEQ ID NO: 826052 - protein, 236 aa, Homo sapiens; identical to SEQ ID NO: 826045

SEQ ID NO: 826053 - protein, 217 aa, Homo sapiens [sequence omitted]

SEQ ID NO: 826054 - protein, 236 aa, Homo sapiens; identical to SEQ ID NO: 826045

SEQ ID NO: 826055 - protein, 259 aa, Homo sapiens
  misc_feature (70)..(70): Xaa can be any naturally occurring amino acid
  misc_feature (77)..(77): Xaa can be any naturally occurring amino acid
MSGSPHTILLVKLPKKLLRKFNNEINMNEKVKRHQSIGEPKSLHVTESWSLVSAKTPSKATKDATCCDTXIITSPYXSRRSLDEQSDKHKSLERTQLEGDRRQNLLDDLVTRERLLLASFKNEGAEPDLIRSSLMSEEAKRGAPNPWLFEEPEETRGLGFDEIRQQQQKIIQEQDAGLDALSSIISRQKQMGQEIGNELDEQNEIIDDLANLVENTDEKLRNETRRVNMVDRKSASCGMIMVILLLLVAIVVVAVWPTN

SEQ ID NO: 826056 - protein, 125 aa, Homo sapiens
MSEEAKRGAPNPWLFEEPEETRGLGFDEIRQQQQKIIQEQDAGLDALSSIISRQKQMGQEIGNELDEQNEIIDDLANLVENTDEKLRNETRRVNMVDRKSASCGMIMVILLLLVAIVVVAVWPTN

SEQ ID NO: 826057 - protein, 197 aa, Homo sapiens
MAPDPWFSTYDSTCQIAQEIAEKIQQRNQYERKGEKAPKLTVTIRALLQNLKEKIALLKDLLLRAVSTHQITQLEGDRRQNLLDDLVTRERLLLASFKNEGAEPDLIRSSLMSEEAKRGAPNPWLFEEPEETRGLGFDEIRQQQQKIIQEQDAGLDALSSIISRQKQMGQEIGNELDEQNEIIDDLANLVENTDEKG

SEQ ID NO: 826058 - protein, 104 aa, Homo sapiens
MVHLTPEEKSAVTALWGKVNVDEVGGEALGRLLVVYPWTQRFLESFGDLSTPDAVMGNPKVKAHGKKVLGAFSDGLAHLDNLKGTFATLSELHCDKLHVDPENF

SEQ ID NO: 826059 - protein, 104 aa, Homo sapiens; identical to SEQ ID NO: 826058

SEQ ID NO: 826060 - protein, 104 aa, Homo sapiens; identical to SEQ ID NO: 826058

SEQ ID NO: 826061 - protein, 81 aa, Homo sapiens
  misc_feature (2)..(2): Xaa can be any naturally occurring amino acid
PXPGNSRTMVHLTPEEKSAVTALWGKAVNVDEVGGEALGRLLVVYPWTQRFFESFGDLSTPDAVMGNPKVKAHGKKVLRCL

SEQ ID NO: 826062 - protein, 133 aa, Homo sapiens
FFCKKALFAGEQEFNQKGQIPCHHLTLQTPPSSHLSSPLLQQGQNQQQGLQSLGQQRRLTMVHLTPEEKSAVTALWGKAVNVDEVGGEALGRLLVVYPWTQRFFESFGDLSTPDAVMGNPKVKAHGKKVLRCL

SEQ ID NO: 826063 - protein, 117 aa, Homo sapiens
MVHLTPEEKSAVTALWGKAVNVDEVGGEALGRGWYQGYKTGLRRPIETGHVETEKTLGFLIGTDSLCLLVYFPTLRLLVVYPWTQRFFESFGDLSTPDAVMGNPKVKAHGKKVLRCL

SEQ ID NO: 826064 - protein, 118 aa, Homo sapiens
RGNSEHDPPYWRGAVWLNVNYLALGALHHYGHLEGPHQARAAKLHLELRANVVGNVWRQYQATGFSLGAVGGEALGRLLVVYPWTQRFFESFGDLSTPDAVMGNPKVKAHGKKVLRCL

SEQ ID NO: 826065 - protein, 104 aa, Homo sapiens; identical to SEQ ID NO: 826058

SEQ ID NO: 826066 - protein, 104 aa, Homo sapiens; identical to SEQ ID NO: 826058

SEQ ID NO: 826067 - protein, 383 aa, Homo sapiens
MGVKASQTGFVVLVLLQCCSAYKLVCYYTSWSQYREGDGSCFPDALDRFLCTHIIYSFANISNDHIDTWEWNDVTLYGMLNTLKNRNPNLKTLLSVGGWNFGSQRFSKIASNTQSRRTFIKSVPPFLRTHGFDGLDLAWLYPGRRDKQHFTTLIKEMKAEFIKEAQPGKKQLLLSAALSAGKVTIDSSYDIAKISQHLDFISIMTYDFHGAWRGTTGHHSPLFRGQEDASPDRFSNTDYAVGYMLRLGAPASKLVMGIPTFGRSFTLASSETGVGAPISGPGIPGRFTKEAGTLAYYEICDFLRGATVHRILGQQVPYATKGNQWVGYDDQESVKSKVQYLKDRQLAGAMVWALDLDDFQGSFCGQDLRFPLTNAIKDALAAT

SEQ ID NO: 826068 - protein, 67 aa, Homo sapiens
VVSYPLVALGGIGDQESVKSEVQYLKDRQLAGAMVWALDLDDFQGSFCGQDLRFPLTNAIKDALAAT

SEQ ID NO: 826069 - protein, 305 aa, Homo sapiens
MGVKASQTGFVVLVLLQCCSAYKLVCYYTSWSQYREGDGSCFPDALDRFLCTHIIYSFANISNDHIDTWEWNDVTLYGMLNTLKNRNPNLKTLLSVGGWNFGSQRFSKIASNTQSRRTFIKSVPPFLRTHGFDGLDLAWLYPGRRDKQHFTTLIKEMKAEFIKEAQPGKKQLLLSAALSAGKVTIDSSYDIAKISQHLDFISIMTYDFHGAWRGTTGHHSPLFRGQEDASPDRFSNTDYAVGYMLRLGAPASKLVMGIPTFGRSFTLASSETGVGAPISGPGIPGRFTKEAGTLAYYEVMELGRR

SEQ ID NO: 826070 - protein, 415 aa, Homo sapiens [sequence omitted]

SEQ ID NO: 826071 - protein, 305 aa, Homo sapiens; identical to SEQ ID NO: 826069

SEQ ID NO: 826072 - protein, 383 aa, Homo sapiens; identical to SEQ ID NO: 826067

SEQ ID NO: 826073 - protein, 383 aa, Homo sapiens; identical to SEQ ID NO: 826067

SEQ ID NO: 826074 - protein, 364 aa, Homo sapiens
MGVKASQTGFVVLVLLQCCSAYKLVCYYTSWSQYREGDGSCFPDALDRFLCTHIIYSFANISNDHIDTWEWNDVTLYGMLNTLKNRFSKIASNTQSRRTFIKSVPPFLRTHGFDGLDLAWLYPGRGDKQHFTTLIKEMKAEFIKEAQPGKKQLLLSAALSAGKVTIDSSYDIAKISQHLDFISIMTYDFHGAWRGTTGHHSPLFRGQEDASPDRFSNTDYAVGYMLRLGAPASKLVMGIPTFGRSFTLASSETGVGAPISGPGIPGRFTKEAGTLAYYEICDFLRGATVHRILGQQVPYATKGNQWVGYDDQESVKSKVQYLKDRQLAGAMVWALDLDDFQGSFCGQDLRFPLTNAIKDALAAT

SEQ ID NO: 826075 - protein, 322 aa, Homo sapiens
MGVKASQTGFVVLVLLQCCSAYKLVCYYTSWSQYREGDGSCFPDALDRFLCTHIIYSFANISNDHIDTWEWNDVTLYGMLNTLKNRNPNLKTLLSVGGWNFGSQRFSKIASNTQSRRTFIKSVPPFLRTHGFDGLDLAWLYPGRRDKQHFTTLIKEMKAEFIKEAQPGKKQLLLSAALSAGKVTIDSSYDIAKISQHLDFISIMTYDFHGAWRGTTGHHSPLFRGQEDASPDRFSNTICDFLRGATVHRILGQQVPYATKGNQWVGYDDQESVKSKVQYLKDRQLAGAMVWALDLDDFQGSFCGQDLRFPLTNAIKDALAAT

SEQ ID NO: 826076 - protein, 269 aa, Homo sapiens
MGVKASQTGFVVLVLLQCCSAYKLVCYYTSWSQYREGDGSCFPDALDRFLCTHIIYSFANISNDHIDTWEWNDVTLYGMLNTLKNRNPNLKTLLSVGGWNFGSQRADFGPRFSKIASNTQSRRTFIKSVPPFLRTHGFDGLDLAWLYPGRGDKQHFTTLIKEMKAEFIKEAQPGKKQLLLSAALSAGKVTIDSSYDIAKISQHLDFISIMTYDFHGAWRGTTGHHSPLFRGQEDASPDRFSNTVSSQKEGGPGGGRKTCHLPVLTHQSL

SEQ ID NO: 826077 - protein, 383 aa, Homo sapiens; identical to SEQ ID NO: 826067

SEQ ID NO: 826078 - protein, 383 aa, Homo sapiens; identical to SEQ ID NO: 826067

SEQ ID NO: 826079 - protein, 383 aa, Homo sapiens; identical to SEQ ID NO: 826067

SEQ ID NO: 826080 - protein, 383 aa, Homo sapiens; identical to SEQ ID NO: 826067

SEQ ID NO: 826081 - protein, 112 aa, Homo sapiens
ERDPQKRCHSAVKCKGFYKLASGEVRCYLTYIGCEKPQVCNLRRALISGIPPPHPFIIQAGLLPELLHVAFLLCMCFKGGGGASMVDTPGPRYPFLSVQLQAYCKAQLETFT

SEQ ID NO: 826082 - protein, 430 aa, Homo sapiens
MECTRSCAARGPCRKVAGTSETLCGRLGRGHILSLFCCSHIGCESGRLETMSLCWSLVAAYLVGVGSAYKLVCYYTSWSQYREGDGSCFPDALDRFLCTHIIYSFANISNDHIDTWEWNDVTLYGMLNTLKNRNPNLKTLLSVGGWNFGSQRFSKIASNTQSRRTFIKSVPPFLRTHGFDGLDLAWLYPGRGDKQHFTTLIKEMKAEFIKEAQPGKKQLLLSAALSAGKVTIDSSYDIAKISQHLDFISIMTYDFHGAWRGTTGHHSPLFRGQEDASPDRFSNTDYAVGYMLRLGAPASKLVMGIPTFGRSFTLASSETGVGAPISGPGIPGRFTKEAGTLAYYEICDFLRGATVHRILGQQVPYATKGNQWVGYDDQESVKSKVQYLKDRQLAGAMVWALDLDDFQGSFCGQDLRFPLTNAIKDALAAT

SEQ ID NO: 826083 - protein, 263 aa, Homo sapiens [sequence omitted]

SEQ ID NO: 826084 - protein, 326 aa, Homo sapiens
TRGRPTRPIDTWEWNDVTLYGMLNTLKNRNPNLKTLLSVGGWNFGSQRFSKIASNTQSRRTFIKSVPPFLRTHGFDGLDLAWLYPGRGDKQHFTTLIKEMKAEFIKEAQPGKKQLLLSAALSAGKVTIDSSYDIAKISQHLDFISIMTYDFHGAWRGTTGHHSPLFRGQEDASPDRFSNTDYAVGYMLRLGAPASKLVMGIPTFGRSFTLASSETGVGAPISGPGIPGRFTKEAGTLAYYEICDFLRGATVHRILGQQVPYATKGNQWVGYDDQESVKSKVQYLKDRQLAGAMVWALDLDDFQGSFCGQDLRFPLTNAIKDALAAT

SEQ ID NO: 826085 - protein, 263 aa, Homo sapiens [sequence omitted]

SEQ ID NO: 826086 - protein, 180 aa, Homo sapiens [sequence omitted]

SEQ ID NO: 826087 - protein, 383 aa, Homo sapiens; identical to SEQ ID NO: 826067

SEQ ID NO: 826088 - protein, 119 aa, Homo sapiens [sequence omitted]

SEQ ID NO: 826089 - protein, 355 aa, Homo sapiens
MGVKASQTGFVVLVLLQCCSAYKLVCYYTSWSQYREGDGSCFPDALDRFLCTHIIYSFANISNDHIDTWEWNDVTLYGMLNTLKNRNPNLKTLLSVGGWNFGSQRFSKIASNTQSRRTFIKSVPPFLRTHGFDGLDLAWLYPGRRDKQHFTTLIKEMKAEFIKEAQPGKKQLLLSAALSAGKVTIDSSYDIAKISQHLDFISIMTYDFHGAWRGTTGHHSPLFRGQEDASPDRFSNTDYAVGYMLRLGAPASKLVMGIPTFGRSFTLASSETGVGAPISGPGIPGRFTKEAGTLAYYEICDFLRGATVHRILGQQVPYATKGNQWVGYDDQESVKSKMPRPPLAPAGREPDHLPC

SEQ ID NO: 826090 - protein, 549 aa, Homo sapiens
MRRPRGEPGPRAPRPTEGATCAGPGESWSPSPNSMLRVLLSAQTSPARLSGLLLIPPVQPCCLGPSKWGDRPVGGGPSAGPVQGLQRLLEQAKSPGELLRWLGQNPSKVRAHHYSVALRRLGQLLGSRPRPPPVEQVTLQDLSQLIIRNCPSFDIHTIHVCLHLAVLLGFPSDGPLVCALEQERRLRLPPKPPPPLQPLLRGGQGLEAALSCPRFLRYPRQHLISSLAEARPEELTPHVMVLLAQHLARHRLREPQLLEAIAHFLVVQETQLSSKVVQKLVLPFGRLNYLPLEQQFMPCLERILAREAGVAPLATVNILMSLCQLRCLPFRALHFVFSPGFINYISGTPHALIVRRYLSLLDTAVELELPGYRGPRLPRRQQVPIFPQPLITDRARCKYSHKDIVAEGLRQLLGEEKYRQDLTVPPGYCTDFLLCASSSGAVLPVRTQDPFLPYPPRSCPQGQAASSATTRDPAQRVVLVLRERWHFCRDGRVLLGSRALRERHLGLMGYQLLPLPFEELESQRGLPQLKSYLRQKLQALGLRWGPEGG

SEQ ID NO: 826091 - protein, 465 aa, Homo sapiens
MRRPRGEPGPRAPRPTEGATCAGPGESWSPSPNSMLRVLLSAQTSPARLSGLLLIPPVQPCCLGPSKWGDRPVGGGPSAGPVQGLQRLLEQAKSPGELLRWLGQNPSKVRAHHYSVALRRLGQLLGSRPRPPPVEQVTLQDLSQLIIRNCPSFDIHTIHVCLHLAVLLGFPSDGPLVCALEQERRLRLPPKPPPPLQPLLRGGQGLEAALSCPRFLRYPRQHLISSLAEARPEELTPHVMVLLAQHLARHRLREPQLLEAIAHFLVVQETQLSSKVVQKLVLPFGRLNYLPLEQQFMPCLERILAREAGVAPLATVNILMSLCQLRCLPFRALHFVFSPGFINYISGTPHALIVRRYLSLLDTAVELELPGYRGPRLPRRQQVPIFPQPLITDRARCKYSHKDIVAEGLRQLLGEEKYRQDLTVPPGYCTDFLLCASSSGAVLPVRTQDPFLPYPPRSCPSSRAT

SEQ ID NO: 826092 - protein, 549 aa, Homo sapiens; identical to SEQ ID NO: 826090

SEQ ID NO: 826093 - protein, 435 aa, Homo sapiens
MRRPRGEPGPRAPRPTEGATCAGPGESWSPSPNSMLRVLLSAQTSPARLSGLLLIPPVQPCCLGPSKWGDRPVGGGPSAGPVQGLQRLLEQAKSPGELLRWLGQNPSKVRAHHYSVALRRLGQLLGSRPRPPPVEQVTLQDLSQLIIRNCPSFDIHTIHVCLHLAVLLGFPSDGPLVCALEQERRLRLPPKPPPPLQPLLRGGQGLEAALSCPRFLRYPRQHLISSLAEARPEELTPHVMVLLAQHLARHRLREPQLLEAIAHFLVVQETQLSSKVVQKLVLPFGRLNYLPLEQQFMPCLERILAREAGVAPLATVNILMSLCQLRCLPFRALHFVFSPGFINYISGTPHALIVRRYLSLLDTAVELELPGYRGPRLPRRQQVPIFPQPLITDRARCKYRWMGQPGARGGASLGPAEWKSQRDHEAPKLRSSRPP

SEQ ID NO: 826094 - protein, 435 aa, Homo sapiens; identical to SEQ ID NO: 826093

SEQ ID NO: 826095 - protein, 476 aa, Homo sapiens [sequence omitted]

SEQ ID NO: 826096 - protein, 435 aa, Homo sapiens; identical to SEQ ID NO: 826093

SEQ ID NO: 826097 - protein, 476 aa, Homo sapiens [sequence omitted]

SEQ ID NO: 826098 - protein, 465 aa, Homo sapiens; identical to SEQ ID NO: 826091

SEQ ID NO: 826099 - protein, 515 aa, Homo sapiens
MLRVLLSAQTSPARLSGLLLIPPVQPCCLGPSKWGDRPVGGGPSAGPVQGLQRLLEQAKSPGELLRWLGQNPSKVRAHHYSVALRRLGQLLGSRPRPPPVEQVTLQDLSQLIIRNCPSFDIHTIHVCLHLAVLLGFPSDGPLVCALEQERRLRLPPKPPPPLQPLLRGGQGLEAALSCPRFLRYPRQHLISSLAEARPEELTPHVMVLLAQHLARHRLREPQLLEAIAHFLVVQETQLSSKVVQKLVLPFGRLNYLPLEQQFMPCLERILAREAGVAPLATVNILMSLCQLRCLPFRALHFVFSPGFINYISGTPHALIVRRYLSLLDTAVELELPGYRGPRLPRRQQVPIFPQPLITDRARCKYSHKDIVAEGLRQLLGEEKYRQDLTVPPGYCTDFLLCASSSGAVLPVRTQDPFLPYPPRSCPQGQAASSATTRDPAQRVVLVLRERWHFCRDGRVLLGSRALRERHLGLMGYQLLPLPFEELESQRGLPQLKSYLRQKLQALGLRWGPEGG

SEQ ID NO: 826100 - protein, 522 aa, Homo sapiens
MRRPRGEPGPRAPRPTEGATCAGPGESWSPSPNSMLRVLLSAQTSPARLSGLLLIPPVQPCCLGPSKWGDRPVGGGPSAGPVQGLQRLLEQAKSPGELLRWLGQNPSKVRAHHYSVALRRLGQLLGSRPRPPPVEQVTLQDLSQLIIRNCPSFDIHTIHVCLHLAVLLGFPSDGPLVCALEQERRLRLPPKPPPPLQPLLREARPEELTPHVMVLLAQHLARHRLREPQLLEAIAHFLVVQETQLSSKVVQKLVLPFGRLNYLPLEQQFMPCLERILAREAGVAPLATVNILMSLCQLRCLPFRALHFVFSPGFINYISGTPHALIVRRYLSLLDTAVELELPGYRGPRLPRRQQVPIFPQPLITDRARCKYSHKDIVAEGLRQLLGEEKYRQDLTVPPGYCTDFLLCASSSGAVLPVRTQDPFLPYPPRSCPQGQAASSATTRDPAQRVVLVLRERWHFCRDGRVLLGSRALRERHLGLMGYQLLPLPFEELESQRGLPQLKSYLRQKLQALGLRWGPEGG

SEQ ID NO: 826101 - protein, 400 aa, Homo sapiens [sequence omitted]

SEQ ID NO: 826102 - protein, 553 aa, Homo sapiens
MRRPRGEPGPRAPRPTEGATCAGPGESWSPSPNSMLRVLLSAQTSPARLSGLLLIPPVQPCCLGPSKWGDRPVGGGPSAGPVQGLQRLLEQAKSPGELLRWLGQNPSKVRAHHYSVALRRLGQLLGSRPRPPPVEQVTLQDLSQLIIRNCPSFVDFHQYYHGFFCYACCLDFGFPSDGPLVCALEQERRLRLPPKPPPPLQPLLRGGQGLEAALSCPRFLRYPRQHLISSLAEARPEELTPHVMVLLAQHLARHRLREPQLLEAIAHFLVVQETQLSSKVVQKLVLPFGRLNYLPLEQQFMPCLERILAREAGVAPLATVNILMSLCQLRCLPFRALHFVFSPGFINYISGTPHALIVRRYLSLLDTAVELELPGYRGPRLPRRQQVPIFPQPLITDRARCKYSHKDIVAEGLRQLLGEEKYRQDLTVPPGYCTDFLLCASSSGAVLPVRTQDPFLPYPPRSCPQGQAASSATTRDPAQRVVLVLRERWHFCRDGRVLLGSRALRERHLGLMGYQLLPLPFEELESQRGLPQLKSYLRQKLQALGLRWGPEGG

SEQ ID NO: 826103 - protein, 310 aa, Homo sapiens
MVLLAQHLARHRLREPQLLEAIAHFLVVQETQLSSKVVQKLVLPFGRLNYLPLEQQFMPCLERILAREAGVAPLATVNILMSLCQLRCLPFRALHFVFSPGFINYISGTPHALIVRRYLSLLDTAVELELPGYRGPRLPRRQQVPIFPQPLITDRARCKYSHKDIVAEGLRQLLGEEKYRQDLTVPPGYCTDFLLCASSSGAVLPVRTQDPFLPYPPRSCPQGQAASSATTRDPAQRVVLVLRERWHFCRDGRVLLGSRALRERHLGLMGYQLLPLPFEELESQRGLPQLKSYLRQKLQALGLRWGPEGG

SEQ ID NO: 826104 - protein, 273 aa, Homo sapiens
MRRPRGEPGPRAPRPTEGATCAGPGESWSPSPNSMLRVLLSAQTSPARLSGLLLIPPVQPCCLGPSKWGDRPVGGGPSAGPVQGLQRLLEQAKSPGELLRWLGQNPSKVRAHHYSVALRRLGQLLGSRPRPPPVEQVTLQDLSQLIIRNCPSFDIHTIHVCLHLAVLLGFPSDGPLVCALEQERRLRLPPKPPPPLQPLLRGGQGLEAALSCPRFLRYPRQHLISSLAEARPEELTPHVMVLLAQHLARHRLREPQPSLSSPTVPAASTVTRT

SEQ ID NO: 826105 - protein, 253 aa, Homo sapiens
MPCLERILAREAGVAPLATVNILMSLCQLRCLPFRALHFVFSPGFINYISGTPHALIVRRYLSLLDTAVELELPGYRGPRLPRRQQVPIFPQPLITDRARCKYSHKDIVAEGLRQLLGEEKYRQDLTVPPGYCTDFLLCASSSGAVLPVRTQDPFLPYPPRSCPQGQAASSATTRDPAQRVVLVLRERWHFCRDGRVLLGSRALRERHLGLMGYQLLPLPFEELESQRGLPQLKSYLRQKLQALGLRWGPEGG

SEQ ID NO: 826106 - protein, 406 aa, Homo sapiens
MIRTAAQLCYQAAFYLSPSGFPSDGPLVCALEQERRLRLPPKPPPPLQPLLREARPEELTPHVMVLLAQHLARHRLREPQLLEAIAHFLVVQETQLSSKVVQKLVLPFGRLNYLPLEQQFMPCLERILAREAGVAPLATVNILMSLCQLRCLPFRALHFVFSPGFINYISGTQPGWLAGPLRAGEAGEQGGLQAQSPSPRLPTGTPHALIVRRYLSLLDTAVELELPGYRGPRLPRRQQVPIFPQPLITDRARCKYSHKDIVAEGLRQLLGEEKYRQDLTVPPGYCTDFLLCASSSGAVLPVRTQDPFLPYPPRSCPQGQAASSATTRDPAQRVVLVLRERWHFCRDGRVLLGSRALRERHLGLMGYQLLPLPFEELESQRGLPQLKSYLRQKLQALGLRWGPEGG

SEQ ID NO: 826107 - protein, 414 aa, Homo sapiens
MRRPRGEPGPRAPRPTEGATCAGPGESCFPSDGPLVCALEQERRLRLPPKPPPPLQPLLREARPEELTPHVMVLLAQHLARHRLREPQLLEAIAHFLVVQETQLSSKVVQKLVLPFGRLNYLPLEQQFMPCLERILAREAGVAPLATVNILMSLCQLRCLPFRALHFVFSPGFINYISGTQPGWLAGPLRAGEAGEQGGLQAQSPSPRLPTGTPHALIVRRYLSLLDTAVELELPGYRGPRLPRRQQVPIFPQPLITDRARCKYSHKDIVAEGLRQLLGEEKYRQDLTVPPGYCTDFLLCASSSGAVLPVRTQDPFLPYPPRSCPQGQAASSATTRDPAQRVVLVLRERWHFCRDGRVLLGSRALRERHLGLMGYQLLPLPFEELESQRGLPQLKSYLRQKLQALGLRWGPEGG

SEQ ID NO: 826108 - protein, 159 aa, Homo sapiens
MLRVLLSAQTSPARLSGLLLIPPVQPCCLGPSKWGDRPVGGGPSAGPVQGLQRLLEQAKSPGELLRWLGQNPSKVRAHHYSVALRRLGQLLGSRPRPPPVEQVTLQDLSQLIIRNCPSFDIHTIHVCLHLAVLLGGTEVGPALWATELPAPGTAVYALP

SEQ ID NO: 826109 - protein, 99 aa, Homo sapiens
RKRERRKVENSPSNPMIRTAAQLCYQAAFYLSPSGFPSDGPLVCALEQERRLRLPPKPPPPLQPLLRGGQGLEAALSCPRFLRYPRQHLISSLAGAGGG

SEQ ID NO: 826110 - protein, 582 aa, Homo sapiens
MRRPRGEPGPRAPRPTEGATCAGPGESWSPSPNSMLRVLLSAQTSPARLSGLLLIPPVQPCCLGPSKWGDRPVGGGPSAGPVQGLQRLLEQAKSPGELLRWLGQNPSKVRAHHYSVALRRLGQLLGSRPRPPPVEQVTLQDLSQLIIRNCPSFDIHTIHVCLHLAVLLGFPSDGPLVCALEQERRLRLPPKPPPPLQPLLRGGQGLEAALSCPRFLRYPRQHLISSLAEARPEELTPHVMVLLAQHLARHRLREPQLLEAIAHFLVVQETQLSSKVVQKLVLPFGRLNYLPLEQQFMPCLERILAREAGVAPLATVNILMSLCQLRCLPFRALHFVFSPGFINYISGTQPGWLAGPLRAGEAGEQGGLQAQSPSPRLPTGTPHALIVRRYLSLLDTAVELELPGYRGPRLPRRQQVPIFPQPLITDRARCKYSHKDIVAEGLRQLLGEEKYRQDLTVPPGYCTDFLLCASSSGAVLPVRTQDPFLPYPPRSCPQGQAASSATTRDPAQRVVLVLRERWHFCRDGRVLLGSRALRERHLGLMGYQLLPLPFEELESQRGLPQLKSYLRQKLQALGLRWGPEGG

SEQ ID NO: 826111 - protein, 549 aa, Homo sapiens; identical to SEQ ID NO: 826090

SEQ ID NO: 826112 - protein, 490 aa, Homo sapiens
MRRPRGEPGPRAPRPTEGATCAGPGESWSPSPNSMLRVLLSAQTSPARLSGLLLIPPVQPCCLGPSKWGDRPVGGGPSAGPVQGLQRLLEQAKSPGELLRWLGQNPSKVRAHHYSVALRRLGQLLGSRPRPPPVEQVTLQDLSQLIIRNCPSFDIHTIHVCLHLAVLLGFPSDGPLVCALEQERRLRLPPKPPPPLQPLLRGGQGLEAALSCPRFLRYPRQHLISSLAEARPEELTPHVMVLLAQHLARHRLREPQLLEAIAHFLVVQETQLSSKVVQKLVLPFGRLNYLPLEQQFMPCLERILAREAGVAPLATVNILMSLCQLRCLPFRALHFVFSPGFINYISGTPHALIVRRYLSLLDTAVELELPGYRGPRLPRRQQVPIFPQPLITDRARCKYSHKDIVAEGLRQLLGEEKYRQDLTVPPGYCTGEQGAGGRPGETEPWLRPPALLPSRLPAVRQQLWCCASREDPGPLPAIPTKVLPTGPGCL

SEQ ID NO: 826113 - protein, 531 aa, Homo sapiens
MRRPRGEPGPRAPRPTEGATCAGPGESWSPSPNSMLRVLLSAQTSPARLSGLLLIPPVQPCCLGPSKWGDRPVGGGPSAGPVQGLQRLLEQAKSPGELLRWLGQNPSKVRAHHYSVALRRLGQLLGSRPRPPPVEQVTLQDLSQLIIRNCPSFDIHTIHVCLHLAVLLGFPSDGPLVCALEQERRLRLPPKPPPPLQPLLRGGQGLEAALSCPRFLRYPRQHLISSLAEARPEELTPHVMVLLAQHLARHRLREPQLLEAIAHFLVVQETQLSSKVVQKLVLPFGRLNYLPLEQQFMPCLERILAREAGVAPLATVNILMSLCQLRCLPFRALHFVFSPGFINYISGTPHALIVRRYLSLLDTAVELELPGYRGPRLPRRQQVPIFPQPLITDRARCKYSHKDIVAEGLRQLLGEEKYRQDLTVPPGYCTDFLLCASSSGAVLPVRTQDPFLPYPPRSCPQGQAASSATTRDPAQRVVLVLRERWHFCRDGRVLLGSRALRERHLGLMGYQLLPVSGPGLARGASSLPACG

SEQ ID NO: 826114 - protein, 490 aa, Homo sapiens; identical to SEQ ID NO: 826112

SEQ ID NO: 826115 - protein, 494 aa, Homo sapiens
MRRPRGEPGPRAPRPTEGATCAGPGESWSPSPNSMLRVLLSAQTSPARLSGLLLIPPVQPCCLGPSKWGDRPVGGGPSAGPVQGLQRLLEQAKSPGELLRWLGQNPSKVRAHHYSVALRRLGQLLGSRPRPPPVEQVTLQDLSQLIIRNCPSFDIHTIHVCLHLAVLLGFPSDGPLVCALEQERRLRLPPKPPPPLQPLLRGGQGLEAALSCPRFLRYPRQHLISSLAEARPEELTPHVMVLLAQHLARHRLREPQLLEAIAHFLVVQETQLSSKVVQKLVLPFGRLNYLPLEQQFMPCLERILAREAGVAPLATVNILMSLCQLRCLPFRALHFVFSPGFINYISGTPHALIVRRYLSLLDTAVELELPGYRGPRLPRRQQVPIFPQPLITDRARCKYSHKDIVAEGLRQLLGEEKYRQDLTVPPGYCTDFLLCASSSGAVLPVRTQDPFLPYPPRSCPQGQAASSATTRDPAQSYPSRNWSPREACPSSRAT

SEQ ID NO: 826116 - protein, 462 aa, Homo sapiens
MRRPRGEPGPRAPRPTEGATCAGPGESWSPSPNSMLRVLLSAQTSPARLSGLLLIPPVQPCCLGPSKWGDRPVGGGPSAGPVQGLQRLLEQAKSPGELLRWLGQNPSKVRAHHYSVALRRLGQLLGSRPRPPPVEQVTLQDLSQLIIRNCPSFDIHTIHVCLHLAVLLGFPSDGPLVCALEQERRLRLPPKPPPPLQPLLRGGQGLEAALSCPRFLRYPRQHLISSLAEARPEELTPHVMVLLAQHLARHRLREPQLLEAIAHFLVVQETQLSSKVVQKLVLPFGRLNYLPLEQQFMPCLERILAREAGVAPLATVNILMSLCQLRCLPFRALHFVFSPGFINYISGTPHALIVRRYLSLLDTAVELELPGYRGPRLPRRQQVPIFPQPLITDRARCKYSHKDIVAEGLRQLLGEEKYRQDLTVPPGYCTATLRGTGVPERPAPAQELPEAEAPGPGPALGA

SEQ ID NO: 826117 - protein, 515 aa, Homo sapiens; identical to SEQ ID NO: 826099

SEQ ID NO: 826118 - protein, 310 aa, Homo sapiens; identical to SEQ ID NO: 826103

SEQ ID NO: 826119 - protein, 408 aa, Homo sapiens
MRRPRGEPGPRAPRPTEGATCAGPGESCFPSDGPLVCALEQERRLRLPPKPPPPLQPLLRGGQGLEAALSCPRFLRYPRQHLISSLAEARPEELTPHVMVLLAQHLARHRLREPQLLEAIAHFLVVQETQLSSKVVQKLVLPFGRLNYLPLEQQFMPCLERILAREAGVAPLATVNILMSLCQLRCLPFRALHFVFSPGFINYISGTPHALIVRRYLSLLDTAVELELPGYRGPRLPRRQQVPIFPQPLITDRARCKYSHKDIVAEGLRQLLGEEKYRQDLTVPPGYCTDFLLCASSSGAVLPVRTQDPFLPYPPRSCPQGQAASSATTRDPAQRVVLVLRERWHFCRDGRVLLGSRALRERHLGLMGYQLLPLPFEELESQRGLPQLKSYLRQKLQALGLRWGPEGG

SEQ ID NO: 826120 - protein, 239 aa, Homo sapiens
MRRPRGEPGPRAPRPTEGATCAGPGESWSPSPNSMLRVLLSAQTSPARLSGLLLIPPVQPCCLGPSKWGDRPVGGGPSAGPVQGLQRLLEQAKSPGELLRWLGQNPSKVRAHHYSVALRRLGQLLGSRPRPPPVEQVTLQDLSQLIIRNCPSFDIHTIHVCLHLAVLLGFPSDGPLVCALEQERRLRLPPKPPPPLQPLLRGGQGLEAALSCPRFLRYPRQHPSLSSPTVPAASTVTRT

SEQ ID NO: 826121 - protein, 253 aa, Homo sapiens; identical to SEQ ID NO: 826105

SEQ ID NO: 826122 - protein, 246 aa, Homo sapiens
MRRPRGEPGPRAPRPTEGATCAGPGESWSPSPNSMLRVLLSAQTSPARLSGLLLIPPVQPCCLGPSKWGDRPVGGGPSAGPVQGLQRLLEQAKSPGELLRWLGQNPSKVRAHHYSVALRRLGQLLGSRPRPPPVEQVTLQDLSQLIIRNCPSFDIHTIHVCLHLAVLLGFPSDGPLVCALEQERRLRLPPKPPPPLQPLLREARPEELTPHVMVLLAQHLARHRLREPQPSLSSPTVPAASTVTRT

SEQ ID NO: 826123 - protein, 159 aa, Homo sapiens; identical to SEQ ID NO: 826108

SEQ ID NO: 826124 - protein, 1251 aa, Homo sapiens
MELSDVRCLTGSEELYTIHPTPPAGDGRSASRPQRLLWQTAVRHITEQRFIHGHRGGSGSGSGGSGKASDPAGGGPNHHAPQLSGDSALPLYSLGPGERAHSTCGTKVFPERSGSGSASGSGGGGDLGFLHLDCAPSNSDFFLNGGYSYRGVIFPTLRNSFKSRDLERLYQRYFLGQRRKSEVVMNVLDVLTKLTLLVLHLSLASAPMDPLKGILLGFFTGIEVVICALVVVRKDTTSHTYLQYSGVVTWVAMTTQILAAGLGYGLLGDGIGYVLFTLFATYSMLPLPLTWAILAGLGTSLLQVILQVVIPRLAVISINQVVAQAVLFMCMNTAGIFISYLSDRAQRQAFLETRRCVEARLRLETENQRQERLVLSVLPRFVVLEMINDMTNVEDEHLQHQFHRIYIHRYENVSILFADVKGFTNLSTTLSAQELVRMLNELFARFDRLAHEHHCLRIKILGDCYYCVSGLPEPRQDHAHCCVEMGLSMIKTIRYVRSRTKHDVDMRIGIHSGSVLCGVLGLRKWQFDVWSWDVDIANKLESGGIPGRIHISKATLDCLNGDYNVEEGHGKERNEFLRKHNIETYLIKQPEDSLLSLPEDIVKESVSSSDRRNSGATFTEGSWSPELPFDNIVGKQNTLAALTRNSINLLPNHLAQALHVQSGPEEINKRIEHTIDLRSGDKLRREHIKPFSLMFKDSSLEHKYSQMRDEVFKSNLVCAFIVLLFITAIQSLLPSSRVMPMTIQFSILIMLHSALVLITTAEDYKCLPLILRKTCCWINETYLARNVIIFASILINFLGAILNILWCDFDKSIPLKNLTFNSSAVFTDICSYPEYFVFTGVLAMVTCAVFLRLNSVLKLAVLLIMIAIYALLTETVYAGLFLRYDNLNHSGEDFLGTKEVSLLLMAMFLLAVFYHGQQLEYTARLDFLWRVQAKEEINEMKELREHNENMLRNILPSHVARHFLEKDRDNEELYSQSYDAVGVMFASIPGFADFYSQTEMNNQGVECLRLLNEIIADFDELLGEDRFQDIEKIKTIGSTYMAVSGLSPEKQQCEDKWGHLCALADFSLALTESIQEINKHSFNNFELRIGISHGSVVAGVIGAKKPQYDIWGKTVNLASRMDSTGVSGRIQVPEETYLILKDQGFAFDYRGEIYVKGISEQEGKIKTYFLLGRVQPNPFILPPRRLPGQYSLAAVVLGLVQSLNRQRQKQLLNENNNTGIIKGHYNRRTLLSPSGTEPGAQAEGTDKSDLP

SEQ ID NO: 826125 - protein, 866 aa, Homo sapiens
MINDMTNVEDEHLQHQFHRIYIHRYENVSILFADVKGFTNLSTTLSAQELVRMLNELFARFDRLAHEHHCLRIKILGDCYYCVSGLPEPRQDHAHCCVEMGLSMIKTIRYVRSRTKHDVDMRIGIHSGSVLCGVLGLRKWQFDVWSWDVDIANKLESGGIPGRIHISKATLDCLNGDYNVEEGHGKERNEFLRKHNIETYLIKQPEDSLLSLPEDIVKESVSSSDRRNSGATFTEGSWSPELPFDNIVGKQNTLAALTRNSINLLPNHLAQALHVQSGPEEINKRIEHTIDLRSGDKLRREHIKPFSLMFKDSSLEHKYSQMRDEVFKSNLVCAFIVLLFITAIQSLLPSSRVMPMTIQFSILIMLHSALVLITTAEDYKCLPLILRKTCCWINETYLARNVIIFASILINFLGAILNILWCDFDKSIPLKNLTFNSSAVFTDICSYPEYFVFTGVLAMVTCAVFLRLNSVLKLAVLLIMIAIYALLTETVYAGLFLRYDNLNHSGEDFLGTKEVSLLLMAMFLLAVFYHGQQLEYTARLDFLWRVQAKEEINEMKELREHNENMLRNILPSHVARHFLEKDRDNEELYSQSYDAVGVMFASIPGFADFYSQTEMNNQGVECLRLLNEIIADFDELLGEDRFQDIEKIKTIGSTYMAVSGLSPEKQQCEDKWGHLCALADFSLALTESIQEINKHSFNNFELRIGISHGSVVAGVIGAKKPQYDIWGKTVNLASRMDSTGVSGRIQVPEETYLILKDQGFAFDYRGEIYVKGISEQEGKIKTYFLLGRVQPNPFILPPRRLPGQYSLAAVVLGLVQSLNRQRQKQLLNENNNTGIIKGHYNRRTLLSPSGTEPGAQAEGTDKSDLP

SEQ ID NO: 826126 - protein, 623 aa, Homo sapiens
MTNVEDEHLQHQFHRIYIHRYENVSILFADVKGFTNLSTTLSAQELVRMLNELFARFDRLAHEHHCLRIKILGDCYYCVSGLPEPRQDHAHCCVEMGLSMIKTIRYVRSRTKHDVDMRIGIHSGSVLCGVLGLRKWQFDVWSWDVDIANKLESGGIPGRIHISKATLDCLNGDYNVEEGHGKERNEFLRKHNIETYLIKQPEDSLLSLPEDIVKESVSSSDRRNSGATFTEGSWSPELPFDNIVGKQNTLAALTRNSINLLPNHLAQALHVQSGPEEINKRIEHTIDLRSGDKLRREHIKPFSLMFKDSSLEHKYSQMRDEVFKSNLVCAFIVLLFITAIQSLLPSSRVMPMTIQFSILIMLHSALVLITTAEDYKCLPLILRKTCCWINETYLARNVIIFASILINFLGAILNILWCDFDKSIPLKNLTFNSSAVFTDICSYPEYFVFTGVLAMVTCAVFLRLNSVLKLAVLLIMIAIYALLTETVYAGLFLRYDNLNHSGEDFLGTKEVSLLLMAMFLLAVFYHGQQLEYTARLDFLWRVQAKEEINEMKELREHNENMLRNILPSHVARHFLEKDRDNEELYSQSYDAVGVMFASIPGFADFYSQILPGRGCPGTCPVPQ

SEQ ID NO: 826127 - protein, 337 aa, Homo sapiens [sequence omitted]

SEQ ID NO: 826128 - protein, 610 aa, Homo sapiens
MINDMTNVEDEHLQHQFHRIYIHRYENVSILFADVKGFTNLSTTLSAQELVRMLNELFARFDRLAHEHHCLRIKILGDCYYCVSGLPEPRQDHAHCCVEMGLSMIKTIRYVRSRTKHDVDMRIGIHSGSVLCGVLGLRKWQFDVWSWDVDIANKLESGGIPGRIHISKATLDCLNGDYNVEEGHGKERNEFLRKHNIETYLIKQPEDSLLSLPEDIVKESVSSSDRRNSGATFTEGSWSPELPFDNIVGKQNTLAALTRNSINLLPNHLAQALHVQSGPEEINKRIEHTIDLRSGDKLRREHIKPFSLMFKDSSLEHKYSQMRDEVFKSNLVCAFIVLLFITAIQSLLPSSRVMPMTIQFSILIMLHSALVLITTAEDYKCLPLILRKTCCWINETYLARNVIIFASILINFLGAILNILWCDFDKSIPLKNLTFNSSAVFTDICSYPEYFVFTGVLAMVTCAVFLRLNSVLKLAVLLIMIAIYALLTETVYAGLFLRYDNLNHSGEDFLGTKEVSLLLMAMFLLAVFYHGQQLEYTARLDFLWRVQAKEEINEMKELREHNENMLRNILPSHVARHFLEKDRDNEELYSQSYDADRKHTGDQQAFIQQF

SEQ ID NO: 826129 - protein, 185 aa, Homo sapiens
MLTEALTLPEILMHSFNNFELLIGISHGSVVAGVIGAKKPQYDIWGKTVNLASRMDSTGVSGRIQVPEETYLILKDQGFAFDYRGEIYVKGISEQEGKIKTYFLLGRVQPNPFILPPRRLPGQYSLAAVVLGLVQSLNRQRQKQLLNENNNTGIIKGHYNRRTLLSPSGTEPGAQAEGTDKSDLP

SEQ ID NO: 826130 - protein, 789 aa, Homo sapiens
MAATTANPEMTSDVPSLGPAIASGNSGPGIQGGGAIVQRAIKRRPGLDFDDDGEGNSKFLRCDDDQMSNDKERFARSDDEQSSADKERLARENHSEIERRRRNKMTAYITELSDMVPTCSALARKPDKLTILRMAVSHMKSLRGTGNTSTDGSYKPSFLTDQELKHLILEAADGFLFIVSCETGRVVYVSDSVTPVLNQPQSEWFGSTLYDQVHPDDVDKLREQLSTSENALTGRILDLKTGTVKKEGQQSSMRMCMGSRRSFICRMRCGSSSVDPVSVNRLSFVRNRCRNGLGSVKDGEPHFVVVHCTGYIKAWPPAGVSLPDDDPEAGQGSKFCLVAIGRLQVTSSPNCTDMSNVCQPTEFISRHNIEGIFTFVDHRCVATVGYQPQELLGKNIVEFCHPEDQQLLRDSFQQVVKLKGQVLSVMFRFRSKNQEWLWMRTSSFTFQNPYSDEIEYIICTNTNVKNSSQEPRPTLSNTIQRPQLGPTANLPLEMGSGQLAPRQQQQQTELDMVPGRDGLASYNHSQVVQPVTTTGPEHSKPLEKSDGLFAQDRDPRFSEIYHNINADQSKGISSSTVPATQQLFSQGNTFPPTPRPAENFRNSGLAPPVTIVQPSASAGQMLAQISRHSNPTQGATPTWTPTTRSGFSAQQVATQATAKTRTSQFGVGSFQTPSSFSSMSLPGAPTASPGAAAYPSLTNRGSNFAPETGQTAGQFQTRTAEGVGVWPQWQGQQPHHRSSSSEQHVQQPPAQQPGQPEVFQEMLSMLGDQSNSYNNEEFPDLTMFPPFSE

SEQ ID NO: 826131 - protein, 789 aa, Homo sapiens; identical to SEQ ID NO: 826130

SEQ ID NO: 826132 - protein, 685 aa, Homo sapiens [sequence omitted]

SEQ ID NO: 826133 - protein, 774 aa, Homo sapiens
MAATTANPEMTSDVPSLGPAIASGNSGPGIQGGGAIVQRAIKRRPGLDFDDDGEGNSKFLRCDDDQMSNDKERFARENHSEIERRRRNKMTAYITELSDMVPTCSALARKPDKLTILRMAVSHMKSLRGTGNTSTDGSYKPSFLTDQELKHLILEAADGFLFIVSCETGRVVYVSDSVTPVLNQPQSEWFGSTLYDQVHPDDVDKLREQLSTSENALTGRILDLKTGTVKKEGQQSSMRMCMGSRRSFICRMRCGSSSVDPVSVNRLSFVRNRCRNGLGSVKDGEPHFVVVHCTGYIKAWPPAGVSLPDDDPEAGQGSKFCLVAIGRLQVTSSPNCTDMSNVCQPTEFISRHNIEGIFTFVDHRCVATVGYQPQELLGKNIVEFCHPEDQQLLRDSFQQVVKLKGQVLSVMFRFRSKNQEWLWMRTSSFTFQNPYSDEIEYIICTNTNVKNSSQEPRPTLSNTIQRPQLGPTANLPLEMGSGQLAPRQQQQQTELDMVPGRDGLASYNHSQVVQPVTTTGPEHSKPLEKSDGLFAQDRDPRFSEIYHNINADQSKGISSSTVPATQQLFSQGNTFPPTPRPAENFRNSGLAPPVTIVQPSASAGQMLAQISRHSNPTQGATPTWTPTTRSGFSAQQVATQATAKTRTSQFGVGSFQTPSSFSSMSLPGAPTASPGAAAYPSLTNRGSNFAPETGQTAGQFQTRTAEGVGVWPQWQGQQPHHRSSSSEQHVQQPPAQQPGQPEVFQEMLSMLGDQSNSYNNEEFPDLTMFPPFSE

SEQ ID NO: 826134 - protein, 278 aa, Homo sapiens
MVPGRDGLASYNHSQVVQPVTTTGPEHSKPLEKSDGLFAQDRDPRFSEIYHNINADQSKGISSSTVPATQQLFSQGNTFPPTPRPAENFRNSGLAPPVTIVQPSASAGQMLAQISRHSNPTQGATPTWTPTTRSGFSAQQVATQATAKTRTSQFGVGSFQTPSSFSSMSLPGAPTASPGAAAYPSLTNRGSNFAPETGQTAGQFQTRTAEGVGVWPQWQGQQPHHRSSSSEQHVQQPPAQQPGQPEVFQEMLSMLGDQSNSYNNEEFPDLTMFPPFSE

SEQ ID NO: 826135 - protein, 288 aa, Homo sapiens
QSQDPRCTPAAPCQQPGLASYNHSQVVQPVTTTGPEHSKPLEKSDGLFAQDRDPRFSEIYHNINADQSKGISSSTVPATQQLFSQGNTFPPTPRPAENFRNSGLAPPVTIVQPSASAGQMLAQISRHSNPTQGATPTWTPTTRSGFSAQQVATQATAKTRTSQFGVGSFQTPSSFSSMSLPGAPTASPGAAAYPSLTNRGSNFAPETGQTAGQFQTRTAEGVGVWPQWQGQQPHHRSSSSEQHVQQPPAQQPGQPEVFQEMLSMLGDQSNSYNNEEFPDLTMFPPFSE

SEQ ID NO: 826136 - protein, 547 aa, Homo sapiens
MAATTANPEMTSDVPSLGPAIASGNSGPGIQGGGAIVQRAIKRRPGLDFDDDGEGNSKFLRCDDDQMSNDKERFARSDDEQSSADKERLARENHSEIERRRRNKMTAYITELSDMVPTCSALARKPDKLTILRMAVSHMKSLRGTGNTSTDGSYKPSFLTDQELKHLILEAADGFLFIVSCETGRVVYVSDSVTPVLNQPQSEWFGSTLYDQVHPDDVDKLREQLSTSENALTGRILDLKTGTVKKEGQQSSMRMCMGSRRSFICRMRCGSSSVDPVSVNRLSFVRNRCRNGLGSVKDGEPHFVVVHCTGYIKAWPPAGVSLPDDDPEAGQGSKFCLVAIGRLQVTSSPNCTDMSNVCQPTEFISRHNIEGIFTFVDHRCVATVGYQPQELLGKNIVEFCHPEDQQLLRDSFQQVVKLKGQVLSVMFRFRSKNQEWLWMRTSSFTFQNPYSDEIEYIICTNTNVKNSSQEPRPTLSNTIQRPQLGPTANLPLEMGSGQLAPRQQQQQTELDMVPGRDGLASYNHSQVVQPVTTTATASQLITSEFAA

SEQ ID NO: 826137 - protein, 321 aa, Homo sapiens
MAATTANPEMTSDVPSLGPAIASGNSGPGIQGGGAIVQRAIKRRPGLDFDDDGEGNSKFLRCDDDQMSNDKERFARSDDEQSSADKERLARENHSEIERRRRNKMTAYITELSDMVPTCSALARKPDKLTILRMAVSHMKSLRGTGNTSTDGSYKPSFLTDQELKHLILEAADGFLFIVSCETGRVVYVSDSVTPVLNQPQSEWFGSTLYDQVHPDDVDKLREQLSTSENALTGRILDLKTGTVKKEGQQSSMRMCMGSRRSFICRMRCGSSSVDPVSVNRLSFVRNRCRNGLGSVKDGEPHFVVVHCTGYIKAWPPAVRK

SEQ ID NO: 826138 - protein, 113 aa, Homo sapiens
MTAYITELSDMVPTCSALARKPDKLTILRMAVSHMKSLRGTGNTSTDGSYKPSFLTDQVSGTYSSERVWNLGESLESFRFLDKNSAFQEEVRQWENEFQSLAITLISHWDNEK

SEQ ID NO: 826139 - protein, 789 aa, Homo sapiens; identical to SEQ ID NO: 826130

SEQ ID NO: 826140 - protein, 323 aa, Homo sapiens
MAATTANPEMTSDVPSLGPAIASGNSGPGIQGGGAIVQRAIKRRPGLDFDDDGEGNSKFLRCDDDQMSNDKERFARSDDEQSSADKERLARENHSEIERRRRNKMTAYITELSDMVPTCSALARKPDKLTILRMAVSHMKSLRGTGNTSTDGSYKPSFLTDQELKHLILEAADGFLFIVSCETGRVVYVSDSVTPVLNQPQSEWFGSTLYDQVHPDDVDKLREQLSTSENALTGRILDLKTGTVKKEGQQSSMRMCMGSRRSFICRMRCGSSSVDPVSVNRLSFVRNRCRNGLGSVKDGEPHFVVVHCTGYIKAWPPAGFPPR

SEQ ID NO: 826141 - protein, 866 aa, Homo sapiens
GAGMLGAAEAAILDSAVAEAAVRRRFWGVAFLFPSLPVRWRRLLPLGGGWRGGGGICGHGGDYCQPRLILDSRFSCLRPRVAGTTEMTSDVPSLGPAIASGNSGPGIQGGGAIVQRAIKRRPGLDFDDDGEGNSKFLRCDDDQMSNDKERFARSDDEQSSADKERLARENHSEIERRRRNKMTAYITELSDMVPTCSALARKPDKLTILRMAVSHMKSLRGTGNTSTDGSYKPSFLTDQELKHLILEAADGFLFIVSCETGRVVYVSDSVTPVLNQPQSEWFGSTLYDQVHPDDVDKLREQLSTSENALTGRILDLKTGTVKKEGQQSSMRMCMGSRRSFICRMRCGSSSVDPVSVNRLSFVRNRCRNGLGSVKDGEPHFVVVHCTGYIKAWPPAGVSLPDDDPEAGQGSKFCLVAIGRLQVTSSPNCTDMSNVCQPTEFISRHNIEGIFTFVDHRCVATVGYQPQELLGKNIVEFCHPEDQQLLRDSFQQVVKLKGQVLSVMFRFRSKNQEWLWMRTSSFTFQNPYSDEIEYIICTNTNVKNSSQEPRPTLSNTIQRPQLGPTANLPLEMGSGQLAPRQQQQQTELDMVPGRDGLASYNHSQVVQPVTTTGPEHSKPLEKSDGLFAQDRDPRFSEIYHNINADQSKGISSSTVPATQQLFSQGNTFPPTPRPAENFRNSGLAPPVTIVQPSASAGQMLAQISRHSNPTQGATPTWTPTTRSGFSAQQVATQATAKTRTSQFGVGSFQTPSSFSSMSLPGAPTASPGAAAYPSLTNRGSNFAPETGQTAGQFQTRTAEGVGVWPQWQGQQPHHRSSSSEQHVQQPPAQQPGQPEVFQEMLSMLGDQSNSYNNEEFPDLTMFPPFSE

SEQ ID NO: 826142 - protein, 169 aa, Homo sapiens
TKLGRAWVSNPTQGATPTWTPTTRSGFSAQQVATQATAKTRTSQFGVGSFQTPSSFSSMSLPGAPTASPGAAAYPSLTNRGSNFAPETGQTAGQFQTRTAEGVGVWPQWQGQQPHHRSSSSEQHVQQPPAQQPGQPEVFQEMLSMLGDQSNSYNNEEFPDLTMFPPFSE

SEQ ID NO: 826143 - protein, 789 aa, Homo sapiens; identical to SEQ ID NO: 826130

SEQ ID NO: 826144 - protein, 455 aa, Homo sapiens
MGLSTVPDLLLPLVLLELLVGIYPSGVIGLVPHLGDREKRDSVCPQGKYIHPQNNSICCTKCHKGTYLYNDCPGPGQDTDCRECESGSFTASENHLRHCLSCSKCRKEMGQVEISSCTVDRDTVCGCRKNQYRHYWSENLFQCFNCSLCLNGTVHLSCQEKQNTVCTCHAGFFLRENECVSCSNCKKSLECTKLCLPQIENVKGTEDSGTTVLLPLVIFFGLCLLSLLFIGLMYRYQRWKSKLYSIVCGKSTPEKEGELEGTTTKPLAPNPSFSPTPGFTPTLGFSPVPSSTFTSSSTYTPGDCPNFAAPRREVAPPYQGADPILATALASDPIPNPLQKWEDSAHKPQSLDTDDPATLYAVVENVPPLRWKEFVRRLGLSDHEIDRLELQNGRCLREAQYSMLATWRRRTPRREATLELLGRVLRDMDLLGCLEDIEEALCGPAALPPAPSLLR

SEQ ID NO: 826145 - protein, 265 aa, Homo sapiens
MGLSTVPDLLLPLVLLELLVGIYPSGVIGLVPHLGDREKRDSVCPQGKYIHPQNNSICCTKCHKGTYLYNDCPGPGQDTDCRECESGSFTASENHLRHCLSCSKCRKEMGQVEISSCTVDRDTVCGCRKNQYRHYWSENLFQCFNCSLCLNGTVHLSCQEKQNTVCTCHAGFFLRENECVSCSNCKKSLECTKLCLPQIENVKGTEDSGTTVLLPLVIFFGLCLLSLLFIGLMYRYQRWKSKLYSIVCGKSTPEKERGGTTLSGG

SEQ ID NO: 826146 - protein, 470 aa, Homo sapiens
MGLSTVPDLLLPLVLLELLVGIYPSGVIGLVPHLGDREKRDSVCPQGKYIHPQNNSICCTKCHKGTYLYNDCPGPGQDTDCRECESGSFTASENHLRHCLSCSKCRKEMGQVEISSCTVDRDTVCGCRKNQYRHYWSENLFQCFNCSLCLNGTVHLSCQEKQNTVCTCHAGFFLRENECVSCSKVLLCRPGWNAVARSRLTATSAPRFKQFSCFSLPSSWDYRRTTVLLPLVIFFGLCLLSLLFIGLMYRYQRWKSKLYSIVCGKSTPEKEGELEGTTTKPLAPNPSFSPTPGFTPTLGFSPVPSSTFTSSSTYTPGDCPNFAAPRREVAPPYQGADPILATALASDPIPNPLQKWEDSAHKPQSLDTDDPATLYAVVENVPPLRWKEFVRRLGLSDHEIDRLELQNGRCLREAQYSMLATWRRRTPRREATLELLGRVLRDMDLLGCLEDIEEALCGPAALPPAPSLLR

SEQ ID NO: 826147 - protein, 455 aa, Homo sapiens; identical to SEQ ID NO: 826144

SEQ ID NO: 826148 - protein, 455 aa, Homo sapiens; identical to SEQ ID NO: 826144

SEQ ID NO: 826149 - protein, 455 aa, Homo sapiens; identical to SEQ ID NO: 826144

SEQ ID NO: 826150 - protein, 455 aa, Homo sapiens; identical to SEQ ID NO: 826144

SEQ ID NO: 826151 - protein, 455 aa, Homo sapiens; identical to SEQ ID NO: 826144

SEQ ID NO: 826152 - protein, 228 aa, Homo sapiens
MGLSTVPDLLLPLVLLELLVGIYPSGVIGLVPHLGDREKRDSVCPQGKYIHPQNNSICCTKCHKGTYLYNDCPGPGQDTDCRECESGSFTASENHLRHCLSCSKCRKEMGQVEISSCTVDRDTVCGCRKNQYRHYWSENLFQCFNCSLCLNGTVHLSCQEKQNTVCTCHAGFFLRENECVSCSNCKKSLECTKLCLPQIENVKGTEDSGTTVLLPLVIFFGLCLFHSA

SEQ ID NO: 826153 - protein, 228 aa, Homo sapiens; identical to SEQ ID NO: 826152

SEQ ID NO: 826154 - protein, 455 aa, Homo sapiens; identical to SEQ ID NO: 826144

SEQ ID NO: 826155 - protein, 455 aa, Homo sapiens; identical to SEQ ID NO: 826144

SEQ ID NO: 826156 - protein, 455 aa, Homo sapiens; identical to SEQ ID NO: 826144

SEQ ID NO: 826157 - protein, 495 aa, Homo sapiens
MGLSTVPDLLLPLVLLELLVGIYPSGVIGLVPHLGDREKRDSVCPQGKYIHPQNNSICCTKCHKGTYLYNDCPGPGQDTDCRECESGSFTASENHLRHCLSCSKCRKEMGQVEISSCTVDRDTVCGCRKNQYRHYWSENLFQCFNCSLCLNGTVHLSCQEKQNTVCTCHAGFFLRENECVSCSKVLLCRPGWNAVARSRLTATSASQDSSNSPASASQVAGITGCKKSLECTKLCLPQIENVKGTEDSGTTVLLPLVIFFGLCLLSLLFIGLMYRYQRWKSKLYSIVCGKSTPEKEGELEGTTTKPLAPNPSFSPTPGFTPTLGFSPVPSSTFTSSSTYTPGDCPNFAAPRREVAPPYQGADPILATALASDPIPNPLQKWEDSAHKPQSLDTDDPATLYAVVENVPPLRWKEFVRRLGLSDHEIDRLELQNGRCLREAQYSMLATWRRRTPRREATLELLGRVLRDMDLLGCLEDIEEALCGPAALPPAPSLLR

SEQ ID NO: 826158 - protein, 455 aa, Homo sapiens; identical to SEQ ID NO: 826144

SEQ ID NO: 826159 - protein, 455 aa, Homo sapiens; identical to SEQ ID NO: 826144

SEQ ID NO: 826160 - protein, 347 aa, Homo sapiens
MGQVEISSCTVDRDTVCGCRKNQYRHYWSENLFQCFNCSLCLNGTVHLSCQEKQNTVCTCHAGFFLRENECVSCSNCKKSLECTKLCLPQIENVKGTEDSGTTVLLPLVIFFGLCLLSLLFIGLMYRYQRWKSKLYSIVCGKSTPEKEGELEGTTTKPLAPNPSFSPTPGFTPTLGFSPVPSSTFTSSSTYTPGDCPNFAAPRREVAPPYQGADPILATALASDPIPNPLQKWEDSAHKPQSLDTDDPATLYAVVENVPPLRWKEFVRRLGLSDHEIDRLELQNGRCLREAQYSMLATWRRRTPRREATLELLGRVLRDMDLLGCLEDIEEALCGPAALPPAPSLLR

SEQ ID NO: 826161 - protein, 223 aa, Homo sapiens
MYRYQRWKSKLYSIVCGKSTPEKEGELEGTTTKPLAPNPSFSPTPGFTPTLGFSPVPSSTFTSSSTYTPGDCPNFAAPRREVAPPYQGADPILATALASDPIPNPLQKWEDSAHKPQSLDTDDPATLYAVVENVPPLRWKEFVRRLGLSDHEIDRLELQNGRCLREAQYSMLATWRRRTPRREATLELLGRVLRDMDLLGCLEDIEEALCGPAALPPAPSLLR

SEQ ID NO: 826162 - protein, 254 aa, Homo sapiens
MGLSTVPDLLLPLVLLELLVGIYPSGVIGLVPHLGDREKRDSVCPQGKYIHPQNNSICCTKCHKGTYLYNDCPGPGQDTDCRECESGSFTASENHLRHCLSCSKCRKEMGQVEISSCTVDRDTVCGCRKNQYRHYWSENLFQCFNCSLCLNGTVHLSCQEKQNTVCTCHAGFFLRENECVSCSNCKKSLECTKLCLPQIENVKGTEDSGTTVLLPLVIFFGLCLLSLLFIGLMYRYQRWKSKLYSIGEWGLWEG

SEQ ID NO: 826163 - protein, 218 aa, Homo sapiens
MGLSTVPDLLLPLVLLELLVGIYPSGVIGLVPHLGDREKRDSVCPQGKYIHPQNNSICCTKCHKGTYLYNDCPGPGQDTDCRECESGSFTASENHLRHCLSCSKCRKEMGQVEISSCTVDRDTVCGCRKNQYRHYWSENLFQCFNCSLCLNGTVHLSCQEKQNTVCTCHAGFFLRENECVSCSKVLLCRPGWNAVARSRLTATSASQIQAILLLQPPK

SEQ ID NO: 826164 - protein, 108 aa, Homo sapiens
MRGRARGVVFPRTPGGLPRPVLCTSSPTKGETEAPRGVGRAGWTSGPAAGAVVRPLCRGGPLGFRVSSGKRLAGLVGCAAILETDDSSPLDGFAGSAPASAPIFPAAP

SEQ ID NO: 826165 - protein, 108 aa, Homo sapiens; identical to SEQ ID NO: 826164

SEQ ID NO: 826166 - protein, 108 aa, Homo sapiens; identical to SEQ ID NO: 826164

SEQ ID NO: 826167 - protein, 108 aa, Homo sapiens; identical to SEQ ID NO: 826164

SEQ ID NO: 826168 - protein, 108 aa, Homo sapiens; identical to SEQ ID NO: 826164

SEQ ID NO: 826169 - protein, 72 aa, Homo sapiens
CPGPRPHARTHTAPHTAPPHPATSPVDCLIHPPPRWPADLVPCSHPRAGGADAALWVPEGPGGSDDPPPSLH

SEQ ID NO: 826170 - protein, 103 aa, Homo sapiens
MYSPYCLTQDEFHPFIEALLPHVRAFSYTWFNLQARKRKYFKKHEKRMSKDEERAVKDELLGEKPEIKQKQPARLFPLRPAPPRPRHCASVIPSLPDSLRLLH

SEQ ID NO: 826171 - protein, 470 aa, Homo sapiens
GFIRGCLHHVALLSALIPSSPPPVLPRPACTPRTASPRDEFHPFIEALLPHVRAFSYTWFNLQARKRKYFKKHEKRMSKDEERAVKDELLGEKPEIKQKWASRLLAKLRKDIRPEFREDFVLTITGKKPPCCVLSNPDQKGKIRRIDCLRQADKVWRLDLVMVILFKGIPLESTDGERLYKSPQCSNPGLCVQPHHIGVTIKELDLYLAYFVHTPESGQSDSSNQQGDADIKPLPNGHLSFQDCFVTSGVWNVTELVRVSQTPVATASGPNFSLADLESPSYYNINQVTLGRRSITSPPSTSTTKRPKSIDDSEMESPVDDVFYPGTGRSPAAGSSQSSGWPNDVDAGPASLKKSGKLDFCSALSSQGSSPRMAFTHHPLPVLAGVRPGSPRATASALHFPSTSIIQQSSPYFTHPTIRYHHHHGQDSLKEFVQFVCSDGSGQATGQHSQRQAPPLPTGLSASDPGTATF

SEQ ID NO: 826172 - protein, 470 aa, Homo sapiens; identical to SEQ ID NO: 826171

SEQ ID NO: 826173 - protein, 470 aa, Homo sapiens; identical to SEQ ID NO: 826171

SEQ ID NO: 826174 - protein, 470 aa, Homo sapiens; identical to SEQ ID NO: 826171

SEQ ID NO: 826175 - protein, 470 aa, Homo sapiens; identical to SEQ ID NO: 826171

SEQ ID NO: 826176 - protein, 502 aa, Homo sapiens
MYSPYCLTQDEFHPFIEALLPHVRAFSYTWFNLQARKRKYFKKHEKRMSKDEERAVKDELLGEKPEIKQKWASRLLAKLRKDIRPEFREDFVLTITGKKPPCCVLSNPDQKGKIRRIDCLRQADKVWRLDLVMVILFKGIPLESTDGERLYKSPQCSNPGLCVQPHHIGVTIKELDLYLAYFVHTPESGQSDSSNQQGDADIKPLPNGHLSFQDCFVTSGVWNVTELVRVSQTPVATASGPNFSLADLESPSYYNINQVTLGRRSITSPPSTSTTKRPKSIDDSEMESPVDDVFYPGTGRSPAAGSSQSSGWPNDVDAGPASLKKSGKLDFCSALSSQGSSPRMAFTHHPLPVLAGVRPGSPRATASALHFPSTSIIQQSSPYFTHPTIRYHHHHGQDSLKEFVQFVCSDGSGQATGQPNGSGQGKVPGSFLLPPPPPVARPVPLPMPDSKSTSTAPDGAALTPPSPSFATTGASSANRFVSIGPRDGNFLNIPQQSQSWFL

SEQ ID NO: 826177 - protein, 400 aa, Homo sapiens
MYSPYCLTQDEFHPFIEALLPHVRAFSYTWFNLQARKRKYFKKHEKRMSKDEERAVKDELLGEKPEIKQKWASRLLAKLRKDIRPEFREDFVLTITGKKPPCCVLSNPDQKGKIRRIDCLRQADKVWRLDLVMVILFKGIPLESTDGERLYKSPQCSNPGLCVQPHHIGVTIKELDLYLAYFVHTPESGQSDSSNQQGDADIKPLPNGHLSFQDCFVTSGVWNVTELVRVSQTPVATASGPNFSLADLESPSYYNINQVTLGRRSITSPPSTSTTKRPKSIDDSEMESPVDDVFYPGTGRSPAAGSSQSSGWPNDVDAGSPRATASALHFPSTSIIQQSSPYFTHPTIRYHHHHGQDSLKEFVQFVCSDGSGQATGQHSQRQAPPLPTGLSASDPGTATF

SEQ ID NO: 826178 - protein, 449 aa, Homo sapiens
MEMSWARQSLAGIPAACDEFHPFIEALLPHVRAFSYTWFNLQARKRKYFKKHEKRMSKDEERAVKDELLGEKPEIKQKWASRLLAKLRKDIRPEFREDFVLTITGKKPPCCVLSNPDQKGKIRRIDCLRQADKVWRLDLVMVILFKGIPLESTDGERLYKSPQCSNPGLCVQPHHIGVTIKELDLYLAYFVHTPESGQSDSSNQQGDADIKPLPNGHLSFQDCFVTSGVWNVTELVRVSQTPVATASGPNFSLADLESPSYYNINQVTLGRRSITSPPSTSTTKRPKSIDDSEMESPVDDVFYPGTGRSPAAGSSQSSGWPNDVDAGPASLKKSGKLDFCSALSSQGSSPRMAFTHHPLPVLAGVRPGSPRATASALHFPSTSIIQQSSPYFTHPTIRYHHHHGQDSLKEFVQFVCSDGSGQATGQHSQRQAPPLPTGLSASDPGTATF

SEQ ID NO: 826179 - protein, 441 aa, Homo sapiens
  misc_feature (6)..(6): Xaa can be any naturally occurring amino acid
FQVSKXCQHDEFHPFIEALLPHVRAFSYTWFNLQARKRKYFKKHEKRMSKDEERAVKDELLGEKPEIKQKWASRLLAKLRKDIRPEFREDFVLTITGKKPPCCVLSNPDQKGKIRRIDCLRQADKVWRLDLVMVILFKGIPLESTDGERLYKSPQCSNPGLCVQPHHIGVTIKELDLYLAYFVHTPESGQSDSSNQQGDADIKPLPNGHLSFQDCFVTSGVWNVTELVRVSQTPVATASGPNFSLADLESPSYYNINQVTLGRRSITSPPSTSTTKRPKSIDDSEMESPVDDVFYPGTGRSPAAGSSQSSGWPNDVDAGPASLKKSGKLDFCSALSSQGSSPRMAFTHHPLPVLAGVRPGSPRATASALHFPSTSIIQQSSPYFTHPTIRYHHHHGQDSLKEFVQFVCSDGSGQATGQHSQRQAPPLPTGLSASDPGTATF

SEQ ID NO: 826180 - protein, 374 aa, Homo sapiens
MYSPYCLTQDEFHPFIEALLPHVRAFSYTWFNLQARKRKYFKKHEKRMSKDEERAVKDELLGEKPEIKQKWASRLLAKLRKDIRPEFREDFVLTITGKKPPCCVLSNPDQKGKIRRIDCLRQADKVWRLDLVMVILFKGIPLESTDGERLYKSPQCSNPGLCVQPHHIGVTIKELDLYLAYFVHTPESGQSDSSNQQGDADIKPLPNGHLSFQDCFVTSGVWNVTELVRVSQTPVATASGPNFSLADLESPSYYNINQVTLGRRSITSPPSTSTTKRPKSIDDSEMESPVDDVFYPGTGRSPAAGSSQSSGWPNDVDAGPASLKKSGKLDFCSALSSQGSSPRMAFTHHPLPVLAGVRPGEKWGAPEGGSWGGG

SEQ ID NO: 826181 - protein, 278 aa, Homo sapiens
LCSSCHLSRAGVDLKASSPKSLPESGQSDSSNQQGDADIKPLPNGHLSFQDCFVTSGVWNVTELVRVSQTPVATASGPNFSLADLESPSYYNINQVTLGRRSITSPPSTSTTKRPKSIDDSEMESPVDDVFYPGTGRSPAAGSSQSSGWPNDVDAGPASLKKSGKLDFCSALSSQGSSPRMAFTHHPLPVLAGVRPGSPRATASALHFPSTSIIQQSSPYFTHPTIRYHHHHGQDSLKEFVQFVCSDGSGQATGQHSQRQAPPLPTGLSASDPGTATF

SEQ ID NO: 826182 - protein, 265 aa, Homo sapiens
NVGVSNVGVTNVGVSNVGVSQGDADIKPLPNGHLSFQDCFVTSGVWNVTELVRVSQTPVATASGPNFSLADLESPSYYNINQVTLGRRSITSPPSTSTTKRPKSIDDSEMESPVDDVFYPGTGRSPAAGSSQSSGWPNDVDAGPASLKKSGKLDFCSALSSQGSSPRMAFTHHPLPVLAGVRPGSPRATASALHFPSTSIIQQSSPYFTHPTIRYHHHHGQDSLKEFVQFVCSDGSGQATGQHSQRQAPPLPTGLSASDPGTATF

SEQ ID NO: 826183 - protein, 141 aa, Homo sapiens
AVLEDPRDRYRCGPHDVSSPASLKKSGKLDFCSALSSQGSSPRMAFTHHPLPVLAGVRPGSPRATASALHFPSTSIIQQSSPYFTHPTIRYHHHHGQDSLKEFVQFVCSDGSGQATGQHSQRQAPPLPTGLSASDPGTATF

SEQ ID NO: 826184 - protein, 116 aa, Homo sapiens
PPCCVLSNPDQKGKIRRIDCLRQADKVWRLDLVMVILFKGIPLESTDGERLYKSPQCSNPGLCVQPHHIGVTIKELDLYLAYFVHTPGRSFSTIFPSHFIFLAGICSVYCSSNFQA

SEQ ID NO: 826185 - protein, 153 aa, Homo sapiens
MLSTASSQPGTGPLSPLSAGQEGLLPATREGSRAPGRPRPQPCMQVPSLRPISSCPCPSCRLPCWGRAGGWSRKGTPEPSEEDQAAAAAALSHHLRLGRRPARRLSVPWEGVGCRPFQKCFGAFCAPRLSPAPRPRHCASVIPSLPDSLRLLH

SEQ ID NO: 826186 - protein, 470 aa, Homo sapiens; identical to SEQ ID NO: 826171

SEQ ID NO: 826187 - protein, 470 aa, Homo sapiens; identical to SEQ ID NO: 826171

SEQ ID NO: 826188 - protein, 441 aa, Homo sapiens
MYSPYCLTQDEFHPFIEALLPHVRAFSYTWFNLQARKRKYFKKHEKRMSKDEERAVKDELLGEKPEIKQKWASRLLAKLRKDIRPEFREDFVLTITGKKPPCCVLSNPDQKGKIRRIDCLRQADKVWRLDLVMVILFKGIPLESTDGERLYKSPQCSNPGLCVQPHHIGVTIKELDLYLAYFVHTPESGQSDSSNQQGDADIKPLPNGHLSFQDCFVTSGVWNVTELVRVSQTPVATASGPNFSLADLESPSYYNINQVTLGRRSITSPPSTSTTKRPKSIDDSEMESPVDDVFYPGTGRSPAAGSSQSSGWPNDVDAGPASLKKSGKLDFCSALSSQGSSPRMAFTHHPLPVLAGVRPGSPRATASALHFPSTSIIQQSSPYFTHPTIRYHHHHGQDSLKEFVQFVCSDGSGQATGQHSQRQAPPLPTGLSASDPGTATF

SEQ ID NO: 826189 - protein, 451 aa, Homo sapiens
LSPESQNRALGFAGCFRSMDEFHPFIEALLPHVRAFSYTWFNLQARKRKYFKKHEKRMSKDEERAVKDELLGEKPEIKQKWASRLLAKLRKDIRPEFREDFVLTITGKKPPCCVLSNPDQKGKIRRIDCLRQADKVWRLDLVMVILFKGIPLESTDGERLYKSPQCSNPGLCVQPHHIGVTIKELDLYLAYFVHTPESGQSDSSNQQGDADIKPLPNGHLSFQDCFVTSGVWNVTELVRVSQTPVATASGPNFSLADLESPSYYNINQVTLGRRSITSPPSTSTTKRPKSIDDSEMESPVDDVFYPGTGRSPAAGSSQSSGWPNDVDAGPASLKKSGKLDFCSALSSQGSSPRMAFTHHPLPVLAGVRPGSPRATASALHFPSTSIIQQSSPYFTHPTIRYHHHHGQDSLKEFVQFVCSDGSGQATGQHSQRQAPPLPTGLSASDPGTATF

SEQ ID NO: 826190 - protein, 441 aa, Homo sapiens; identical to SEQ ID NO: 826188

SEQ ID NO: 826191 - protein, 400 aa, Homo sapiens; identical to SEQ ID NO: 826177

SEQ ID NO: 826192 - protein, 159 aa, Homo sapiens
DDGTAMGAELESGDRGPRGQDEFHPFIEALLPHVRAFSYTWFNLQARKRKYFKKHEKRMSKDEERAVKDELLGEKPEIKQKWASRLLAKLRKDIRPEFREDFVLTITGKKPPCCVLSNPDQKGKIRRIDCLRQADKNPDNQIVQTSKEMRTSNHCPTGT

SEQ ID NO: 826193 - protein, 144 aa, Homo sapiens [sequence omitted]

SEQ ID NO: 826194 - protein, 204 aa, Homo sapiens
MYSPYCLTQDEFHPFIEALLPHVRAFSYTWFNLQARKRKYFKKHEKRMSKDEERAVKDELLGEKPEIKQKWASRLLAKLRKDIRPEFREDFVLTITGKKPPCCVLSNPDQKGKIRRIDCLRQADKVWRLDLVMVILFKGIPLESTDGERLYKSPQCSNPGLCVQPHHIGVTIKELDLYLAYFVHTPGRSFSTIFPSHFIFLSMY

SEQ ID NO: 826195 - protein, 519 aa, Homo sapiens
MSVSVLSPSRLLGDVSGILQAASLLILLLLLIKAVQLYLHRQWLLKALQQFPCPPSHWLFGHIQELQQDQELQRIQKWVETFPSACPHWLWGGKVRVQLYDPDYMKVILGRSDPKSHGSYRFLAPWIGYGLLLLNGQTWFQHRRMLTPAFHYDILKPYVGLMADSVRVMLDKWEELLGQDSPLEVFQHVSLMTLDTIMKCAFSHQGSIQVDRNSQSYIQAISDLNNLVFSRVRNAFHQNDTIYSLTSAGRWTHRACQLAHQHTDQVIQLRKAQLQKEGELEKIKRKRHLDFLDILLLAKMENGSILSDKDLRAEVDTFMFEGHDTTASGISWILYALATHPKHQERCREEIHSLLGDGASITWNHLDQMPYTTMCIKEALRLYPPVPGIGRELSTPVTFPDGRSLPKGIMVLLSIYGLHHNPKVWPNPEVFDPSRFAPGSAQHSHAFLPFSGGSRNCIGKQFAMNELKVATALTLLRFELLPDPTRIPIPIARLVLKSKNGIHLRLRRLPNPCEDKDQL

SEQ ID NO: 826196 - protein, 519 aa, Homo sapiens; identical to SEQ ID NO: 826195

SEQ ID NO: 826197 - protein, 334 aa, Homo sapiens
MSVSVLSPSRLLGDVSGILQAASLLILLLLLIKAVQLYLHRQWLLKALQQFPCPPSHWLFGHIQELQQDQELQRIQKWVETFPSACPHWLWGGKVRVQLYDPDYMKVILGRSDPKSHGSYRFLAPWIGYGLLLLNGQTWFQHRRMLTPAFHYDILKPYVGLMADSVRVMLDKWEELLGQDSPLEVFQHVSLMTLDTIMKCAFSIGRELSTPVTFPDGRSLPKGIMVLLSIYGLHHNPKVWPNPEVFDPSRFAPGSAQHSHAFLPFSGGSRNCIGKQFAMNELKVATALTLLRFELLPDPTRIPIPIARLVLKSKNGIHLRLRRLPNPCEDKDQL

SEQ ID NO: 826198 - protein, 417 aa, Homo sapiens
MSVSVLSPSRLLGDVSGILQAASLLILLLLLIKAVQLYLHRQWLLKALQQFPCPPSHWLFGHIQELQQDQELQRIQKWVETFPSACPHWLWGGKVRVQLYDPDYMKVILGRSDPKSHGSYRFLAPWIGYGLLLLNGQTWFQHRRMLTPAFHYDILKPYVGLMADSVRVMLDKWEELLGQDSPLEVFQHVSLMTLDTIMKCAFSHQGSIQVDRNSQSYIQAISDLNNLVFSRVRNAFHQNDTIYSLTSAGRWTHRACQLAHQHTDQVIQLRKAQLQKEGELEKIKRKRHLDFLDILLLAKMENGSILSDKDLRAEVDTFMFEGHDTTASGISWILYALATHPKHQERCREEIHSLLGDGASITWNHLDQMPYTTMCIKEALRLYPPVPGIGRELSTPVTFPDGRSLPKGMKFPHPLTQ

SEQ ID NO: 826199 - protein, 214 aa, Homo sapiens
MSVSVLSPSRLLGDVSGILQAASLLILLLLLIKAVQLYLHRQWLLKALQQFPCPPSHWLFGHIQELQQDQELQRIQKWVETFPSACPHWLWGGKVRVQLYDPDYMKVILGRSDPKSHGSYRFLAPWIGYGLLLLNGQTWFQHRRMLTPAFHYDILKPYVGLMADSVRVMLVSPCLSPLPTPTHSTHSHQLHSQPCVPQADIDIDSWNNTLRSLL

SEQ ID NO: 826200 - protein, 154 aa, Homo sapiens
MSVSVLSPSRLLGDVSGILQAASLLILLLLLIKAVQLYLHRQWLLKALQQFPCPPSHWLFGHIQELQQDQELQRIQKWVETFPSACPHWLWGGKVRVQLYDPDYMKVILGRSDPKSHGSYRFLAPWIAPDCLPIHLSPSSCLLVCSYISFLLLL

SEQ ID NO: 826201 - protein, 519 aa, Homo sapiens; identical to SEQ ID NO: 826195

SEQ ID NO: 826202 - protein, 579 aa, Homo sapiens
MSVSVLSPSRLLGDVSGILQAASLLILLLLLIKAVQLYLHRQWLLKALQQFPCPPSHWLFGHIQELQQDQELQRIQKWVETFPSACPHWLWGGKVRVQLYDPDYMKVILGRSDPKSHGSYRFLAPWIGYGLLLLNGQTWFQHRRMLTPAFHYDILKPYVGLMADSVRVMLDKWEELLGQDSPLEVFQHVSLMTLDTIMKCAFSHQGSIQVDRNSQSYIQAISDLNNLVFSRVRNAFHQNDTIYSLTSAGRWTHRACQLAHQHTDQVIQLRKAQLQKEGELEKIKRKRHLDFLDILLLAKMENGSILSDKDLRAEVDTFMFEGHDTTASGISWILYALATHPKHQERCREEIHSLLGDGASITWNHLDQMPYTTMCIKEALRLYPPVPGIGRELSTPVTFPDGRSLPKGIMVLLSIYGLHHNPKVWPNPEVFDPSRFAPGSAQHSHAFLPFSGGSRNCIGKQFAMNELKVATALTLLRFELLPDPTRIPIPIARLVLKSRPALRASTCRPVFLTPASVPFLSAHILFSVCPPSLLPTCLLSPSLPALLSLTFLQAPYLLVYLSPTHLYLLLGEKLSVGRS

SEQ ID NO: 826203 - protein, 455 aa, Homo sapiens
MSVSVLSPSRLLGDVSGILQAASLLILLLLLIKAVQLYLHRQWLLKALQQFPCPPSHWLFGHIQELQQDQELQRIQKWVETFPSACPHWLWGGKVRVQLYDPDYMKVILGRSDPKSHGSYRFLAPWIGYGLLLLNGQTWFQHRRMLTPAFHYDILKPYVGLMADSVRVMLDKWEELLGQDSPLEVFQHVSLMTLDTIMKCAFSHQGSIQVDRNSQSYIQAISDLNNLVFSRVRNAFHQNDTIYSLTSAGRWTHRACQLAHQHTDQVIQLRKAQLQKEGELEKIKRKRHLDFLDILLLAKMENGSILSDKDLRAEVDTFMFEGHDTTASGISWILYALATHPKHQERCREEIHSLLGDGASITWNHLDQMPYTTMCIKEALRLYPPVPGIGRELSTPVTFPDGRSLPKGIMVLLSIYGLHHNPKVWPNPEVFDPSRFAPGSAQHSHAFLPFSGGSR

SEQ ID NO: 826204 - protein, 214 aa, Homo sapiens; identical to SEQ ID NO: 826199

SEQ ID NO: 826205 - protein, 200 aa, Homo sapiens
MEKPYNKNEGNLENEGKPEDEVEPDDEGKSDEEEKPDVEGKTECEGKREDEGEPGDEGQLEDEGSQEKQGRSEGEGKPQGEGKPASQAKPESQPRAAEKRPAEDYVPRKAKRKTDRGTDDSPKDSQEDLQERHLSSEEMMRECGDVSRAQEELRKKQKMGGFHWMQRDVQDPFAPRGQRGVRGVRGGGRGQRGLHDIPYL

SEQ ID NO: 826206 - protein, 200 aa, Homo sapiens; identical to SEQ ID NO: 826205

SEQ ID NO: 826207 - protein, 120 aa, Homo sapiens
FVFGKEKHALAEMKQKPLLGKRDPHQRPCLLRSWEHLFWFPEPAPELQRSSEDTQHHPAVRQNGTYILILRLFNMVPVTSKATQEAASSIFPKGLSSGSSPCWPSWGCHWGSGSRTSQEW

SEQ ID NO: 826208 - protein, 120 aa, Homo sapiens; identical to SEQ ID NO: 826207

SEQ ID NO: 826209 - protein, 120 aa, Homo sapiens; identical to SEQ ID NO: 826207

SEQ ID NO: 826210 - protein, 120 aa, Homo sapiens; identical to SEQ ID NO: 826207

SEQ ID NO: 826211 - protein, 120 aa, Homo sapiens; identical to SEQ ID NO: 826207

SEQ ID NO: 826212 - protein, 120 aa, Homo sapiens; identical to SEQ ID NO: 826207

SEQ ID NO: 826213 - protein, 120 aa, Homo sapiens; identical to SEQ ID NO: 826207

SEQ ID NO: 826214 - protein, 206 aa, Homo sapiens
MESHSLLWPEGGARGQSHLDVTLASARIQTTKNIWNWDVCFEAARKQVKGNQDNSLSLRWQGSKIPCAGKPEPRGATAQLKMTGHQPCTIRNQHLSSPLRRAPGVSLYPSQTSGLQQMWLHAIRIILPCGLGLASFEIESTSPFLFVMKTPAPAPLGCYLTPVQRKGGKLRRKGRDRQDSISQLVRIRALPTIFSYQKSTEFPRGR

SEQ ID NO: 826215 - protein, 120 aa, Homo sapiens; identical to SEQ ID NO: 826207

SEQ ID NO: 826216 - protein, 120 aa, Homo sapiens; identical to SEQ ID NO: 826207

SEQ ID NO: 826217 - protein, 711 aa, Homo sapiens [sequence omitted]

SEQ ID NO: 826218 - protein, 711 aa, Homo sapiens [sequence omitted]

SEQ ID NO: 826219 - protein, 711 aa, Homo sapiens [sequence omitted]

SEQ ID NO: 826220 - protein, 666 aa, Homo sapiens
MRKVRGPPVSCIKRDSPIQCIQAIAENRADAVTLDGGFIYEAGLAPYKLRPVAAEVYGTERQPRTHYYAVAVVKKGGSFQLNELQGLKSCHTGLRRTAGWNVPIGTLRPFLNWTGPPEPIEAAVARFFSASCVPGADKGQFPNLCRLCAGTGENKCAFSSQEPYFSYSGAFKCLRDGAGDVAFIRESTVFEDLSDEAERDEYELLCPDNTRKPVDKFKDCHLARVPSHAVVARSVNGKEDAIWNLLRQAQEKFGKDKSPKFQLFGSPSGQKDLLFKDSAIGFSRVPPRIDSGLYLGSGYFTAIQNLRKSEEEVAARRARVVWCAVGEQELRKCNQWSGLSEGSVTCSSASTTEDCIALVLKGEADAMSLDGGYVYTAGKCGLVPVLAENYKSQQSSDPDPNCVDRPVEGYLAVAVVRRSDTSLTWNSVKGKKSCHTAVDRTAGWNIPMGLLFNQTGSCKFDEYFSQSCAPGSDPRSNLCALCIGDEQGENKCVPNSNERYYGYTGAFRCLAENAGDVAFVKDVTVLQNTDGNNNEAWAKDLKLADFALLCLDGKRKPVTEARSCHLAMAPNHAVVSRMDKVERLKQVLLHQQAKFGRNGSDCPDKFCLFQSETKNLLFNDNTECLARLHGKTTYEKYLGPQYVAGITNLKKCSTSPLLEACEFLRK

SEQ ID NO: 826221 - protein, 650 aa, Homo sapiens
ASLGLFYFQENRADAVTLDGGFIYEAGLAPYKLRPVAAEVYGTERQPRTHYYAVAVVKKGGSFQLNELQGLKSCHTGLRRTAGWNVPIGTLRPFLNWTGPPEPIEAAVARFFSASCVPGADKGQFPNLCRLCAGTGENKCAFSSQEPYFSYSGAFKCLRDGAGDVAFIRESTVFEDLSDEAERDEYELLCPDNTRKPVDKFKDCHLARVPSHAVVARSVNGKEDAIWNLLRQAQEKFGKDKSPKFQLFGSPSGQKDLLFKDSAIGFSRVPPRIDSGLYLGSGYFTAIQNLRKSEEEVAARRARVVWCAVGEQELRKCNQWSGLSEGSVTCSSASTTEDCIALVLKGEADAMSLDGGYVYTAGKCGLVPVLAENYKSQQSSDPDPNCVDRPVEGYLAVAVVRRSDTSLTWNSVKGKKSCHTAVDRTAGWNIPMGLLFNQTGSCKFDEYFSQSCAPGSDPRSNLCALCIGDEQGENKCVPNSNERYYGYTGAFRCLAENAGDVAFVKDVTVLQNTDGNNNEAWAKDLKLADFALLCLDGKRKPVTEARSCHLAMAPNHAVVSRMDKVERLKQVLLHQQAKFGRNGSDCPDKFCLFQSETKNLLFNDNTECLARLHGKTTYEKYLGPQYVAGITNLKKCSTSPLLEACEFLRK

SEQ ID NO: 826222 - protein, 621 aa, Homo sapiens
LEDPFDCHVEVYGTERQPRTHYYAVAVVKKGGSFQLNELQGLKSCHTGLRRTAGWNVPIGTLRPFLNWTGPPEPIEAAVARFFSASCVPGADKGQFPNLCRLCAGTGENKCAFSSQEPYFSYSGAFKCLRDGAGDVAFIRESTVFEDLSDEAERDEYELLCPDNTRKPVDKFKDCHLARVPSHAVVARSVNGKEDAIWNLLRQAQEKFGKDKSPKFQLFGSPSGQKDLLFKDSAIGFSRVPPRIDSGLYLGSGYFTAIQNLRKSEEEVAARRARVVWCAVGEQELRKCNQWSGLSEGSVTCSSASTTEDCIALVLKGEADAMSLDGGYVYTAGKCGLVPVLAENYKSQQSSDPDPNCVDRPVEGYLAVAVVRRSDTSLTWNSVKGKKSCHTAVDRTAGWNIPMGLLFNQTGSCKFDEYFSQSCAPGSDPRSNLCALCIGDEQGENKCVPNSNERYYGYTGAFRCLAENAGDVAFVKDVTVLQNTDGNNNEAWAKDLKLADFALLCLDGKRKPVTEARSCHLAMAPNHAVVSRMDKVERLKQVLLHQQAKFGRNGSDCPDKFCLFQSETKNLLFNDNTECLARLHGKTTYEKYLGPQYVAGITNLKKCSTSPLLEACEFLRK

SEQ ID NO: 826223 - protein, 711 aa, Homo sapiens [sequence omitted]

SEQ ID NO: 826224 - protein, 711 aa, Homo sapiens [sequence omitted]

SEQ ID NO: 826225 - protein, 457 aa, Homo sapiens
DSSSVPDLPFCHLARVPSHAVVARSVNGKEDAIWNLLRQAQEKFGKDKSPKFQLFGSPSGQKDLLFKDSAIGFSRVPPRIDSGLYLGSGYFTAIQNLRKSEEEVAARRARVVWCAVGEQELRKCNQWSGLSEGSVTCSSASTTEDCIALVLKGEADAMSLDGGYVYTAGKCGLVPVLAENYKSQQSSDPDPNCVDRPVEGYLAVAVVRRSDTSLTWNSVKGKKSCHTAVDRTAGWNIPMGLLFNQTGSCKFDEYFSQSCAPGSDPRSNLCALCIGDEQGENKCVPNSNERYYGYTGAFRCLAENAGDVAFVKDVTVLQNTDGNNNEAWAKDLKLADFALLCLDGKRKPVTEARSCHLAMAPNHAVVSRMDKVERLKQVLLHQQAKFGRNGSDCPDKFCLFQSETKNLLFNDNTECLARLHGKTTYEKYLGPQYVAGITNLKKCSTSPLLEACEFLRK

SEQ ID NO: 826226 - protein, 711 aa, Homo sapiens [sequence omitted]

SEQ ID NO: 826227 - protein, 705 aa, Homo sapiens
MKLVFLVLLFLGALGLCLAGRRRRSVQWCAVSQPEATKCFQWQRNMRKVRGPPVSCIKRDSPIQCIQAIAENRADAVTLDGGFIYEAGLAPYKLRPVAAEVYGTERQPRTHYYAVAVVKKGGSFQLNELQGLKSCHTGLRRTAGWNVPIGTLRPFLNWTGPPEPIEAAVARFFSASCVPGADKGQFPNLCRLCAGTGENKCAFSSQEPYFSYSGAFKCLRDGAGDVAFIRESTVFEDLSDEAERDEYELLCPDNTRKPVDKFKDCHLARVPSHAVVARSVNGKEDAIWNLLRQAQEKFGKDKSPKFQLFGSPSGQKDLLFKDSAIGFSRVPPRIDSGLYLGSGYFTAIQNLRKSEEEVAARRARVVWCAVGEQELRKCNQWSGLSEGSVTCSSASTTEDCIALVLKGEADAMSLDGGYVYTAGKCGLVPVLAENYKSQQSSDPDPNCVDRPVEGYLAVAVVRRSDTSLTWNSVKGKKSCHTAVDRTAGWNIPMGLLFNQTGSCKFDEYFSQSCAPGSDPRSNLCALCIGDEQGENKCVPNSNERYYGYTGAFRCLAENAGDVAFVKDVTVLQNTDGNNNEAWAKDLKLADFALLCLDGKRKPVTEARSCHLAMAPNHAVVSRMDKVERLKQVLLHQQAKFGRNGSDCPDKFCLFQSETKNLLFNDNTECLARLHGKTTYEKYLGPQYVAGITNLILPVNSGLCFA

SEQ ID NO: 826228 - protein, 241 aa, Homo sapiens
ASTRWELSYCRPAGGANSLVISHVGRANQTGSCKFDEYFSQSCAPGSDPRSNLCALCIGDEQGENKCVPNSNERYYGYTGAFRCLAENAGDVAFVKDVTVLQNTDGNNNEAWAKDLKLADFALLCLDGKRKPVTEARSCHLAMAPNHAVVSRMDKVERLKQVLLHQQAKFGRNGSDCPDKFCLFQSETKNLLFNDNTECLARLHGKTTYEKYLGPQYVAGITNLKKCSTSPLLEACEFLRK

SEQ ID NO: 826229 - protein, 577 aa, Homo sapiens
MKLVFLVLLFLGALGLCLAGRRRRSVQWCAVSQPEATKCFQWQRNMRKVRGPPVSCIKRDSPIQCIQAIAENRADAVTLDGGFIYEAGLAPYKLRPVAAEVYGTERQPRTHYYAVAVVKKGGSFQLNELQGLKSCHTGLRRTAGWNVPIGTLRPFLNWTGPPEPIEAAVARFFSASCVPGADKGQFPNLCRLCAGTGENKCAFSSQEPYFSYSGAFKCLRDGAGDVAFIRESTVFEDLSDEAERDEYELLCPDNTRKPVDKFKDCHLARVPSHAVVARSVNGKEDAIWNLLRQAQEKFGKDKSPKFQLFGSPSGQKDLLFKDSAIGFSRVPPRIDSGLYLGSGYFTAIQNLRKSEEEVAARRARVVWCAVGEQELRKCNQWSGLSEGSVTCSSASTTEDCIALVLKGEADAMSLDGGYVYTAGKCGLVPVLAENYKSQQSSDPDPNCVDRPVEGYLAVAVVRRSDTSLTWNSVKGKKSCHTAVDRTAGWNIPMGLLFNQTGSCKFDEYFSQSCAPGSDPRSNLCALCIGDEQGENKCVPNSNERYYGYTGAFRCLAENAGDVAFVKDVTVLQNTDGR

SEQ ID NO: 826230 - protein, 590 aa, Homo sapiens
MKLVFLVLLFLGALGLCLAGRRRRSVQWCAVSQPEATKCFQWQRNMRKVRGPPVSCIKRDSPIQCIQAIAENRADAVTLDGGFIYEAGLAPYKLRPVAAEVYGTERQPRTHYYAVAVVKKGGSFQLNELQGLKSCHTGLRRTAGWNVPIGTLRPFLNWTGPPEPIEAAVARFFSASCVPGADKGQFPNLCRLCAGTGENKCAFSSQEPYFSYSGAFKCLRDGAGDVAFIRESTVFEDLSDEAERDEYELLCPDNTRKPVDKFKDCHLARVPSHAVVARSVNGKEDAIWNLLRQAQEKFGKDKSPKFQLFGSPSGQKDLLFKDSAIGFSRVPPRIDSGLYLGSGYFTAIQNLRKSEEEVAARRARVVWCAVGEQELRKCNQWSGLSEGSVTCSSASTTEDCIALVLKGEADAMSLDGGYVYTAGKCGLVPVLAENYKSQQSSDPDPNCVDRPVEGYLAVAVVRRSDTSLTWNSVKGKKSCHTAVDRTAGWNIPMGLLFNQTGSCKFDEYFSQSCAPGSDPRSNLCALCIGDEQGENKCVPNSNERYYGYTGAFRCLAENAGDVAFVKDVTVLQNTDGNNNEAQMQSRHGLQ

SEQ ID NO: 826231 - protein, 526 aa, Homo sapiens
MKLVFLVLLFLGALGLCLAGRRRRSVQWCAVSQPEATKCFQWQRNMRKVRGPPVSCIKRDSPIQCIQAIAENRADAVTLDGGFIYEAGLAPYKLRPVAAEVYGTERQPRTHYYAVAVVKKGGSFQLNELQGLKSCHTGLRRTAGWNVPIGTLRPFLNWTGPPEPIEAAVARFFSASCVPGADKGQFPNLCRLCAGTGENKCAFSSQEPYFSYSGAFKCLRDGAGDVAFIRESTVFEDLSDEAERDEYELLCPDNTRKPVDKFKDCHLARVPSHAVVARSVNGKEDAIWNLLRQAQEKFGKDKSPKFQLFGSPSGQKDLLFKDSAIGFSRVPPRIDSGLYLGSGYFTAIQNLRKSEEEVAARRARVVWCAVGEQELRKCNQWSGLSEGSVTCSSASTTEDCIALVLKGEADAMSLDGGYVYTAGKCGLVPVLAENYKSQQSSDPDPNCVDRPVEGYLAVAVVRRSDTSLTWNSVKGKKSCHTAVDRTAGWNIPMGLLFNQTGSCKFDEYFSQSCAPGSDPRSNLCAS

SEQ ID NO: 826232 - protein, 580 aa, Homo sapiens
MKLVFLVLLFLGALGLCLAGRRRRSVQWCAVSQPEATKCFQWQRNMRKVRGPPVSCIKRDSPIQCIQAIAENRADAVTLDGGFIYEAGLAPYKLRPVAAEVYGTERQPRTHYYAVAVVKKGGSFQLNELQGLKSCHTGLRRTAGWNVPIGTLRPFLNWTGPPEPIEAAVARFFSASCVPGADKGQFPNLCRLCAGTGENKCAFSSQEPYFSYSGAFKCLRDGAGDVAFIRESTVFEDLSDEAERDEYELLCPDNTRKPVDKFKDCHLARVPSHAVVARSVNGKEDAIWNLLRQAQEKFGKDKSPKFQLFGSPSGQKDLLFKDSAIGFSRVPPRIDSGLYLGSGYFTAIQNLRKSEEEVAARRARVVWCAVGEQELRKCNQWSGLSEGSVTCSSASTTEDCIALVLKGEADAMSLDGGYVYTAGKCGLVPVLAENYKSQQSSDPDPNCVDRPVEGYLAVAVVRRSDTSLTWNSVKGKKSCHTAVDRTAGWNIPMGLLFNQTGSCKFGKEFQRCGGWATLEGRHIVLWNLREGRGGDLQADSGLQASSSIRKFSLWLPPGGVGALGVSLHSTSHAPFTPPQD

SEQ ID NO: 826233 - protein, 154 aa, Homo sapiens
AVQLDLSIYRIPVTVLTDGNNNEAWAKDLKLADFALLCLDGKRKPVTEARSCHLAMAPNHAVVSRMDKVERLKQVLLHQQAKFGRNGSDCPDKFCLFQSETKNLLFNDNTECLARLHGKTTYEKYLGPQYVAGITNLKKCSTSPLLEACEFLRK

SEQ ID NO: 826234 - protein, 411 aa, Homo sapiens
MKLVFLVLLFLGALGLCLAGRRRRSVQWCAVSQPEATKCFQWQRNMRKVRGPPVSCIKRDSPIQCIQAIAENRADAVTLDGGFIYEAGLAPYKLRPVAAEVYGTERQPRTHYYAVAVVKKGGSFQLNELQGLKSCHTGLRRTAGWNVPIGTLRPFLNWTGPPEPIEAAVARFFSASCVPGADKGQFPNLCRLCAGTGENKCAFSSQEPYFSYSGAFKCLRDGAGDVAFIRESTVFEDLSDEAERDEYELLCPDNTRKPVDKFKDCHLARVPSHAVVARSVNGKEDAIWNLLRQAQEKFGKDKSPKFQLFGSPSGQKDLLFKDSAIGFSRVPPRIDSGLYLGSGYFTAIQNLRKSEEEVAARRARVVWCAVGEQELRKCNQWSGLSEGSVTCSSASTTEDCIALVLKEKLMP

SEQ ID NO: 826235 - protein, 355 aa, Homo sapiens
MKLVFLVLLFLGALGLCLAGRRRRSVQWCAVSQPEATKCFQWQRNMRKVRGPPVSCIKRDSPIQCIQAIAENRADAVTLDGGFIYEAGLAPYKLRPVAAEVYGTERQPRTHYYAVAVVKKGGSFQLNELQGLKSCHTGLRRTAGWNVPIGTLRPFLNWTGPPEPIEAAVARFFSASCVPGADKGQFPNLCRLCAGTGENKCAFSSQEPYFSYSGAFKCLRDGAGDVAFIRESTVFEDLSDEAERDEYELLCPDNTRKPVDKFKDCHLARVPSHAVVARSVNGKEDAIWNLLRQAQEKFGKDKSPKFQLFGSPSGQKDLLFKDSAIGFSRVPPRIDSGLYLGSGYFTAIQNLRKSE

SEQ ID NO: 826236 - protein, 102 aa, Homo sapiens [sequence omitted]

SEQ ID NO: 826237 - protein, 169 aa, Homo sapiens [sequence omitted]

SEQ ID NO: 826238 - protein, 99 aa, Homo sapiens
MRKVRGPPVSCIKRDSPIQCIQAIAVSQCRVLVGTKLNGREREMEKDRTRALLTSSAIGSILWPRVGIRRTTEHSFSYGQPDTVLGEVDAAANLVVVGG

SEQ ID NO: 826239 - protein, 711 aa, Homo sapiens [sequence omitted]

SEQ ID NO: 826240 - protein, 107 aa, Homo sapiens
MGSGTWALIIWLLCHLCGFHAQGHLMAHIASLSPVPASAFYVQDEEREGEERAKGMYQLSFKDVSEKLAPNTPADISLAYSYPYGHMSPRESDKSSLYTKGGPRVGG

SEQ ID NO: 826241 - protein, 726 aa, Homo sapiens
MARNLGMPSRLQTADMKLVFLVLLFLGALGLCLAGRRRRSVQWCAVSQPEATKCFQWQRNMRKVRGPPVSCIKRDSPIQCIQAIAENRADAVTLDGGFIYEAGLAPYKLRPVAAEVYGTERQPRTHYYAVAVVKKGGSFQLNELQGLKSCHTGLRRTAGWNVPIGTLRPFLNWTGPPEPIEAAVARFFSASCVPGADKGQFPNLCRLCAGTGENKCAFSSQEPYFSYSGAFKCLRDGAGDVAFIRESTVFEDLSDEAERDEYELLCPDNTRKPVDKFKDCHLARVPSHAVVARSVNGKEDAIWNLLRQAQEKFGKDKSPKFQLFGSPSGQKDLLFKDSAIGFSRVPPRIDSGLYLGSGYFTAIQNLRKSEEEVAARRARVVWCAVGEQELRKCNQWSGLSEGSVTCSSASTTEDCIALVLKGEADAMSLDGGYVYTAGKCGLVPVLAENYKSQQSSDPDPNCVDRPVEGYLAVAVVRRSDTSLTWNSVKGKKSCHTAVDRTAGWNIPMGLLFNQTGSCKFDEYFSQSCAPGSDPRSNLCALCIGDEQGENKCVPNSNERYYGYTGAFRCLAENAGDVAFVKDVTVLQNTDGNNNEAWAKDLKLADFALLCLDGKRKPVTEARSCHLAMAPNHAVVSRMDKVERLKQVLLHQQAKFGRNGSDCPDKFCLFQSETKNLLFNDNTECLARLHGKTTYEKYLGPQYVAGITNLKKCSTSPLLEACEFLRK

SEQ ID NO: 826242 - protein, 710 aa, Homo sapiens
MRPPSSCCSSGPSGLCLAGRRRRSVQWCAVSQPEATKCFQWQRNMRKVRGPPVSCIKRDSPIQCIQAIAENRADAVTLDGGFIYEAGLAPYKLRPVAAEVYGTERQPRTHYYAVAVVKKGGSFQLNELQGLKSCHTGLRRTAGWNVPIGTLRPFLNWTGPPEPIEAAVARFFSASCVPGADKGQFPNLCRLCAGTGENKCAFSSQEPYFSYSGAFKCLRDGAGDVAFIRESTVFEDLSDEAERDEYELLCPDNTRKPVDKFKDCHLARVPSHAVVARSVNGKEDAIWNLLRQAQEKFGKDKSPKFQLFGSPSGQKDLLFKDSAIGFSRVPPRIDSGLYLGSGYFTAIQNLRKSEEEVAARRARVVWCAVGEQELRKCNQWSGLSEGSVTCSSASTTEDCIALVLKGEADAMSLDGGYVYTAGKCGLVPVLAENYKSQQSSDPDPNCVDRPVEGYLAVAVVRRSDTSLTWNSVKGKKSCHTAVDRTAGWNIPMGLLFNQTGSCKFDEYFSQSCAPGSDPRSNLCALCIGDEQGENKCVPNSNERYYGYTGAFRCLAENAGDVAFVKDVTVLQNTDGNNNEAWAKDLKLADFALLCLDGKRKPVTEARSCHLAMAPNHAVVSRMDKVERLKQVLLHQQAKFGRNGSDCPDKFCLFQSETKNLLFNDNTECLARLHGKTTYEKYLGPQYVAGITNLKKCSTSPLLEACEFLRK

SEQ ID NO: 826243 - protein, 711 aa, Homo sapiens [sequence omitted]

SEQ ID NO: 826244 - protein, 504 aa, Homo sapiens
DSSSVPDLPLCLRDGAGDVAFIRESTVFEDLSDEAERDEYELLCPDNTRKPVDKFKDCHLARVPSHAVVARSVNGKEDAIWNLLRQAQEKFGKDKSPKFQLFGSPSGQKDLLFKDSAIGFSRVPPRIDSGLYLGSGYFTAIQNLRKSEEEVAARRARVVWCAVGEQELRKCNQWSGLSEGSVTCSSASTTEDCIALVLKGEADAMSLDGGYVYTAGKCGLVPVLAENYKSQQSSDPDPNCVDRPVEGYLAVAVVRRSDTSLTWNSVKGKKSCHTAVDRTAGWNIPMGLLFNQTGSCKFDEYFSQSCAPGSDPRSNLCALCIGDEQGENKCVPNSNERYYGYTGAFRCLAENAGDVAFVKDVTVLQNTDGNNNEAWAKDLKLADFALLCLDGKRKPVTEARSCHLAMAPNHAVVSRMDKVERLKQVLLHQQAKFGRNGSDCPDKFCLFQSETKNLLFNDNTECLARLHGKTTYEKYLGPQYVAGITNLKKCSTSPLLEACEFLRK

SEQ ID NO: 826245 - protein, 711 aa, Homo sapiens [sequence omitted]

SEQ ID NO: 826246 - protein, 300 aa, Homo sapiens
MSLDGGYVYTAGKCGLVPVLAENYKSQQSSDPDPNCVDRPVEGYLAVAVVRRSDTSLTWNSVKGKKSCHTAVDRTAGWNIPMGLLFNQTGSCKFDEYFSQSCAPGSDPRSNLCALCIGDEQGENKCVPNSNERYYGYTGAFRCLAENAGDVAFVKDVTVLQNTDGNNNEAWAKDLKLADFALLCLDGKRKPVTEARSCHLAMAPNHAVVSRMDKVERLKQVLLHQQAKFGRNGSDCPDKFCLFQSETKNLLFNDNTECLARLHGKTTYEKYLGPQYVAGITNLKKCSTSPLLEACEFLRK

SEQ ID NO: 826247 - protein, 169 aa, Homo sapiens [sequence omitted]

SEQ ID NO: 826248 - protein, 624 aa, Homo sapiens
MKLVFLVLLFLGALGLCLAGRRRRSVQWCAVSQPEATKCFQWQRNMRKVRGPPVSCIKRDSPIQCIQAIAENRADAVTLDGGFIYEAGLAPYKLRPVAAEVYGTERQPRTHYYAVAVVKKGGSFQLNELQGLKSCHTGLRRTAGWNVPIGTLRPFLNWTGPPEPIEAAVARFFSASCVPGADKGQFPNLCRLCAGTGENKCAFSSQEPYFSYSGAFKCLRDGAGDVAFIRESTVFEDLSDEAERDEYELLCPDNTRKPVDKFKDCHLARVPSHAVVARSVNGKEDAIWNLLRQAQEKFGKDKSPKFQLFGSPSGQKDLLFKDSAIGFSRVPPRIDSGLYLGSGYFTAIQNLRKSEEEVAARRARVVWCAVGEQELRKCNQWSGLSEGSVTCSSASTTEDCIALVLKGEADAMSLDGGYVYTAGKCGLVPVLAENYKSQQSSDPDPNCVDRPVEGYLAVAVVRRSDTSLTWNSVKGKKSCHTAVDRTAGWNIPMGLLFNQTGSCKFDEYFSQSCAPGSDPRSNLCALCIGDEQGENKCVPNSNERYYGYTGAFRCLAENAGDVAFVKDVTVLQNTDGNNNEAWAKDLKLADFALLCLDGKRKPGCADDDRMIDGPRDTRYAFNER

SEQ ID NO: 826249 - protein, 551 aa, Homo sapiens
MKLVFLVLLFLGALGLCLAGRRRRSVQWCAVSQPEATKCFQWQRNMRKVRGPPVSCIKRDSPIQCIQAIAENRADAVTLDGGFIYEAGLAPYKLRPVAAEVYGTERQPRTHYYAVAVVKKGGSFQLNELQGLKSCHTGLRRTAGWNVPIGTLRPFLNWTGPPEPIEAAVARFFSASCVPGADKGQFPNLCRLCAGTGENKCAFSSQEPYFSYSGAFKCLRDGAGDVAFIRESTVFEDLSDEAERDEYELLCPDNTRKPVDKFKDCHLARVPSHAVVARSVNGKEDAIWNLLRQAQEKFGKDKSPKFQLFGSPSGQKDLLFKDSAIGFSRVPPRIDSGLYLGSGYFTAIQNLRKSEEEVAARRARVVWCAVGEQELRKCNQWSGLSEGSVTCSSASTTEDCIALVLKGEADAMSLDGGYVYTAGKCGLVPVLAENYKSQQSSDPDPNCVDRPVEGYLAVAVVRRSDTSLTWNSVKGKKSCHTAVDRTAGWNIPMGLLFNQTGSCKFDEYFSQSCAPGSDPRSNLCAGVLGPWPPLLKVGIAHPSAYNSLLSS

SEQ ID NO: 826250 - protein, 524 aa, Homo sapiens
MKLVFLVLLFLGALGLCLAGRRRRSVQWCAVSQPEATKCFQWQRNMRKVRGPPVSCIKRDSPIQCIQAIAENRADAVTLDGGFIYEAGLAPYKLRPVAAEVYGTERQPRTHYYAVAVVKKGGSFQLNELQGLKSCHTGLRRTAGWNVPIGTLRPFLNWTGPPEPIEAAVARFFSASCVPGADKGQFPNLCRLCAGTGENKCAFSSQEPYFSYSGAFKCLRDGAGDVAFIRESTVFEDLSDEAERDEYELLCPDNTRKPVDKFKDCHLARVPSHAVVARSVNGKEDAIWNLLRQAQEKFGKDKSPKFQLFGSPSGQKDLLFKDSAIGFSRVPPRIDSGLYLGSGYFTAIQNLRKSEEEVAARRARVVWCAVGEQELRKCNQWSGLSEGSVTCSSASTTEDCIALVLKGEADAMSLDGGYVYTAGKCGLVPVLAENYKSQQSSDPDPNCVDRPVEGYLAVAVVRRSDTSLTWNSVKGKKSCHTAVDRTAGWNIPMGLLFNQTGSCKFDEYFSQSCDEGIPQGPHDR

SEQ ID NO: 826251 - protein, 539 aa, Homo sapiens
MKLVFLVLLFLGALGLCLAGRRRRSVQWCAVSQPEATKCFQWQRNMRKVRGPPVSCIKRDSPIQCIQAIAENRADAVTLDGGFIYEAGLAPYKLRPVAAEVYGTERQPRTHYYAVAVVKKGGSFQLNELQGLKSCHTGLRRTAGWNVPIGTLRPFLNWTGPPEPIEAAVARFFSASCVPGADKGQFPNLCRLCAGTGENKCAFSSQEPYFSYSGAFKCLRDGAGDVAFIRESTVFEDLSDEAERDEYELLCPDNTRKPVDKFKDCHLARVPSHAVVARSVNGKEDAIWNLLRQAQEKFGKDKSPKFQLFGSPSGQKDLLFKDSAIGFSRVPPRIDSGLYLGSGYFTAIQNLRKSEEEVAARRARVVWCAVGEQELRKCNQWSGLSEGSVTCSSASTTEDCIALVLKGEADAMSLDGGYVYTAGKCGLVPVLAENYKSQQSSDPDPNCVDRPVEGYLAVAVVRRSDTSLTWNSVKGKKSCHTAVDRTAGWNIPMLTKVSALLRRLARIGVLDEGKMKLDYILGLKIEGFFKRDACRPRSS

SEQ ID NO: 826252 - protein, 359 aa, Homo sapiens
MKLVFLVLLFLGALGLCLAGRRRRSVQWCAVSQPEATKCFQWQRNMRKVRGPPVSCIKRDSPIQCIQAIAENRADAVTLDGGFIYEAGLAPYKLRPVAAEVYGTERQPRTHYYAVAVVKKGGSFQLNELQGLKSCHTGLRRTAGWNVPIGTLRPFLNWTGPPEPIEAAVARFFSASCVPGADKGQFPNLCRLCAGTGENKCAFSSQEPYFSYSGAFKCLRDGAGDVAFIRESTVFEDLSDEAERDEYELLCPDNTRKPVDKFKDCHLARVPSHAVVARSVNGKEDAIWNLLRQAQEKFGKDKSPKFQLFGSPSGQKDLLFKDSAIGFSRVPPRIDSGLYLGSGYFTAIQNLRKSEREGL

SEQ ID NO: 826253 - protein, 245 aa, Homo sapiens
MKLVFLVLLFLGALGLCLAGRRRRSVQWCAVSQPEATKCFQWQRNMRKVRGPPVSCIKRDSPIQCIQAIAENRADAVTLDGGFIYEAGLAPYKLRPVAAEVYGTERQPRTHYYAVAVVKKGGSFQLNELQGLKSCHTGLRRTAGWNVPIGTLRPFLNWTGPPEPIEAAVARFFSASCVPGADKGQFPNLCRLCAGTGENKCAFSSQEPYFSYSGAFKCLRDGAGDVAFIRESTVFGKSRVMSRGY

SEQ ID NO: 826254 - protein, 245 aa, Homo sapiens; identical to SEQ ID NO: 826253

SEQ ID NO: 826255 - protein, 191 aa, Homo sapiens
MESKYKEILLLTGLDNITDEELDRFKFFLSDEFNIATGKLHTANRIQVATLMIQNAGAVSAVMKTIRIFQKLNYMLLAKRLQEEKEKVDKQYKSVTKPKPLSQAEMSPAASAAIRNDVAKQRAAPKVSPHVKPEQKQMVAQQESIREGFQKRCLPVMVLKAKKPFTFETQEEKLVKPRRSTRFKLSPLEQL

SEQ ID NO: 826256 - protein, 343 aa, Homo sapiens
MESKYKEILLLTGLDNITDEELDRFKFFLSDEFNIATGKLHTANRIQVATLMIQNAGAVSAVMKTIRIFQKLNYMLLAKRLQEEKEKVDKQYKSVTKPKPLSQAEMSPAASAAIRNDVAKQRAAPKVSPHVKPEQKQMVAQQESIREGFQKRCLPVMVLKAKKPFTFETQEGKQEMFHATVATEKEFFFVKVFNTLLKDKFIPKRIIIIARYYRHSGFLEVNSASRVLDAESDQKVNVPLNIIRKAGETPKINTLQTQPLGTIVNGLFVVQKVTEKKKNILFDLSDNTGKMEVLGVRNEDTMKCKEGDKVRLTFFTLSKNGEKLQLTSGVHSTIKVIKAKKKT

SEQ ID NO: 826257 - protein, 435 aa, Homo sapiens
ACWPGVAGAAEAWAAEKGSCLLCNPENGLQERKNWASAWESIVETQGVSRPVPGRQLEYGLTRYLDGDLSWRRRCAWEEIAEAVNMEKQPQNSRRGLAPREVPPAVGLLLIMALMNTLLYLCLDHFFIAPRQSTVDPTHCPYGHFRIGQMKNCSPWLSCEELRTEVRQLKRVGEGAVKRVFLSEWKEHKVALSQLTSLEMKDDFLHGLQMLKSLQGTHVVTLLGYCEDDNTMLTEYHPLGSLSNLEETLNLSKYQNVNTWQHRLELAMDYVSIINYLHHSPVGTRVMCDSNDLPKTLSQYLLTSNFSILANDLDALPLVNHSSGMLVKCGHRELHGDFVAPEQLWPYGEDVPFHDDLMPSYDEKIDIWKIPDISSFLLGHIEGSDMVRFHLFDIHKACKSQTPSERPTAQDVLETYQKVLDTLRDAMMSQAREML

SEQ ID NO: 826258 - protein, 148 aa, Homo sapiens
MKALIVLGLVLLSVTVQGKVFERCELARTLKRLGMDGYRGISLANWMCLAKWESGYNTRATNYNAGDRSTDYGIFQINSRYWCNDGKTPGAVNACHLSCSALLQDNIADAVACAKRVVRDPQGIRAWVAWRNRCQNRDVRQYVQGCGV

SEQ ID NO: 826259 - protein, 148 aa, Homo sapiens; identical to SEQ ID NO: 826258

SEQ ID NO: 826260 - protein, 114 aa, Homo sapiens [sequence omitted]

SEQ ID NO: 826261 - protein, 128 aa, Homo sapiens
LHRARTLPFTPWLGMDGYRGISLANWMCLAKWESGYNTRATNYNAGDRSTDYGIFQINSRYWCNDGKTPGAVNACHLSCSALLQDNIADAVACAKRVVRDPQGIRAWVAWRNRCQNRDVRQYVQGCGV

SEQ ID NO: 826262 - protein, 148 aa, Homo sapiens; identical to SEQ ID NO: 826258

SEQ ID NO: 826263 - protein, 137 aa, Homo sapiens
MKALIVLGLVLLSVTVQGKVFERCELARTLKRLGMDGYRGISLANWMCLAKWESGYNTRATNYNAGDRSTDYGIFQINSRYWCNDGKTPGAVNACHLSCSGWHGEIVVKTEMSVSMFKVVECNSRIFLLQLILSLSH

SEQ ID NO: 826264 - protein, 148 aa, Homo sapiens; identical to SEQ ID NO: 826258

SEQ ID NO: 826265 - protein, 148 aa, Homo sapiens; identical to SEQ ID NO: 826258

SEQ ID NO: 826266 - protein, 148 aa, Homo sapiens; identical to SEQ ID NO: 826258

SEQ ID NO: 826267 - protein, 104 aa, Homo sapiens
MKALIVLGLVLLSVTVQGKVFERCELARTLKRLGMDGYRGISLANWMCLAKWESGYNTRATNYNAGDRSTDYGIFQINSRYWCNDGKTPGAVNACHLSCSGKTS

SEQ ID NO: 826268 - protein, 148 aa, Homo sapiens; identical to SEQ ID NO: 826258

SEQ ID NO: 826269 - protein, 148 aa, Homo sapiens; identical to SEQ ID NO: 826258

SEQ ID NO: 826270 - protein, 148 aa, Homo sapiens; identical to SEQ ID NO: 826258

SEQ ID NO: 826271 - protein, 148 aa, Homo sapiens; identical to SEQ ID NO: 826258

SEQ ID NO: 826272 - protein, 148 aa, Homo sapiens; identical to SEQ ID NO: 826258

SEQ ID NO: 826273 - protein, 152 aa, Homo sapiens
MKALIVLGLVLLSVTVQGKVFERCELARTLKRLGMDGYRGISLANWMCLAKWESGYNTRATNYNAGDRSTDYGIFQINSRYWCNDGKTPGAVNACHLSCSALLQDNIADAVACAKRVVRDPQGIRAWVAWRNRCLSFFSSFCLSHIKGVGIK

SEQ ID NO: 826274 - protein, 148 aa, Homo sapiens; identical to SEQ ID NO: 826258

SEQ ID NO: 826275 - protein, 110 aa, Homo sapiens
MLSVWEAFSQSAHSPQHERIHTEKKPYTCKTCGKAFSQRTSLILHERSHTGEKPYECNECGKAFSSGSDLIRHQRSHSSEKPYECSKCGKAYSRSSSLIRHQNTHSEEKA

SEQ ID NO: 826276 - protein, 145 aa, Homo sapiens
MKALIVLGLVLLSVTVQGKVFERCELARTLKRLGMDGYRGISLANWMCLAKWESGYNTRATNYNAGDRSTDYGIFQINSRYWCNDGKTPGAVNACHLSCSALLQDNIADAVACAKRVVRDPQGIRAWVAWRNRCQNRDVRFCWAI

SEQ ID NO: 826277 - protein, 154 aa, Homo sapiens
SKTLPVATEVGLRGLCRVERVLPGPGPSATTMDRRKKPLDVTASSLVDLKAELFRKQEEFKQEKLLKDSGVFGKPKTTNKKPSIWSKQNVGVSNRAEKDAEQKIEEQKTLDKARQCISKALKQGRFPIFLMQILSSIPSLQQFASRQLSWKFRL

SEQ ID NO: 826278 - protein, 498 aa, Homo sapiens
SKTLPVATEVGLRGLCRVERVLPGPGPSATTMDRRKKPLDVTASSLVDLKAELFRKQEEFKQEKLLKDSGVFGKPKTTNKKPSIWSKQNVGVSNRAEKDAEQKIEEQKTLDKAREKLEEKAKLYEKMTKGDFIDEEVEDMYLVDFTQKIIDKRKEMEASGAHRDSQKAGERDDDEENLPEGEIPPPQDPSEEWVDYVDSLGRSRRCMRKDLPDLLEMDKNLQGRLFISPANEKTLLSEDMRKELQRQQWEEEEREALKRPMGPVHYEDIRENEARQLGVGYFAFARDKELRNKQMKTLEMLREQTTDQRTKRENIKEKRKAILEARLAKLRQKKMKKSKEGGTEEENRDGDVIGPLPPEPEAVPTPRPAAQSSKVEVIVQERKDTKPGVPHIREWDRGKEFSFGYWSKRQSDLRAERDPEFAPPSDYFVGQKRTGFSSSQAWSRPGPAQSDPGQCPDQSHGPSPEHTSPTPAPDNPPQAPTVTFKTLDDMISYYKQVT

SEQ ID NO: 826279 - protein, 498 aa, Homo sapiens; identical to SEQ ID NO: 826278

SEQ ID NO: 826280 - protein, 345 aa, Homo sapiens
  misc_feature (20)..(20): Xaa can be any naturally occurring amino acid
  misc_feature (28)..(29): Xaa can be any naturally occurring amino acid
EEDDNIIYVTHKLMKGVKKXEFVKHVQXXIPPPQDPSEEWVDYVDSLGRSRRCMRKDLPDLLEMDKNLQGRLFISPANEKTLLSEDMRKELQRQQWEEEEREALKRPMGPVHYEDIRENEARQLGVGYFAFARDKELRNKQMKTLEMLREQTTDQRTKRENIKEKRKAILEARLAKLRQKKMKKSKEGGTEEENRDGDVIGPLPPEPEAVPTPRPAAQSSKVEVIVQERKDTKPGVPHIREWDRGKEFSFGYWSKRQSDLRAERDPEFAPPSDYFVGQKRTGFSSSQAWSRPGPAQSDPGQCPDQSHGPSPEHTSPTPAPDNPPQAPTVTFKTLDDMISYYKQVT

SEQ ID NO: 826281 - protein, 478 aa, Homo sapiens
SKTLPVATEVGLRGLCRVERVLPGPGPSATTMDRRKKPLDVTASSLVDLKAELFRKQEEFKQEKLLKDSGVFGKPKTTNKKPSIWSKQNVGVSNRAEKDAEQKIEEQKTLDKAREKLEEKAKLYEKMTKGDFIDEEVEDMYLVDFTQKIIDKRKEMEASGAHRDSQKAGERDDDEENLPEGEIPPPQDPSEEWVDYVDSLGRSRRCMRKDLPDLLEMDKNLQGRLFISPANEKTLLSEDMRKELQRQQWEEEEREALKRPMGPVHYEDIRENEARQLGVGYFAFARDKELRNKQMKTLEMLREQTTDQRTKRENIKEKRKAILEARLAKLRQKKMKKSKEGGTEEENRDGDVIGPLPPEPEAVPTPRPAAQSSKVEVIVQERKDTKPGNFPLDTGRRGSQISGLREILSLPRRQITLWVRRELVFPAARHGADLGQHRVTQGSALTRATDLALNIRHPLLPPTTHHKPPQLLSKLWMT

SEQ ID NO: 826282 - protein, 154 aa, Homo sapiens; identical to SEQ ID NO: 826277

SEQ ID NO: 826283 - protein, 215 aa, Homo sapiens
SKTLPVATEVGLRGLCRVERVLPGPGPSATTMDRRKKPLDVTASSLVDLKAELFRKQEEFKQEKLLKDSGVFGKPKTTNKKPSIWSKQNVGVSNRAEKDAEQKIEEQKTLDKAREKKKKKKKKKICGGALGLGKSFLNLWWGGGARGYVCNCGANECSLRETAAHRHNVRGFLHQIKNARGGTGGVVKNSRGGPGGIKGLFQREVQESRLINPDD

SEQ ID NO: 826284 - protein, 422 aa, Homo sapiens
SKTLPVATEVGLRGLCRVERVLPGPGPSATTMDRRKKPLDVTASSLVDLKAELFRKQEEFKQEKLLKDSGVFGKPKTTNKKPSIWSKQNVGVSNRAEKDAEQKIEEQKTLDKAREKLEEKAKLYEKMTKGDFIDEEVEDMYLVDFTQKIIDKRKEMEASGAHRDSQKAGERDDDEENLPEGEIPPPQDPSEEWVDYVDSLGRSRRCMRKDLPDLLEMDKNLQGRLFISPANEKTLLSEDMRKELQRQQWEEEEREALKRPMGPVHYEDIRENDGDVIGPLPPEPEAVPTPRPAAQSSKVEVIVQERKDTKPGVPHIREWDRGKEFSFGYWSKRQSDLRAERDPEFAPPSDYFVGQKRTGFSSSQAWSRPGPAQSDPGQCPDQSHGPSPEHTSPTPAPDNPPQAPTVTFKTLDDMISYYKQVT

SEQ ID NO: 826285 - protein, 269 aa, Homo sapiens
GRYYYKIRGRVGKELQRQQWEEEEREALKRPMGPVHYEDIRENEARQLGVGYFAFARDKELRNKQMKTLEMLREQTTDQRTKRENIKEKRKAILEARLAKLRQKKMKKSKEGGTEEENRDGDVIGPLPPEPEAVPTPRPAAQSSKVEVIVQERKDTKPGVPHIREWDRGKEFSFGYWSKRQSDLRAERDPEFAPPSDYFVGQKRTGFSSSQAWSRPGPAQSDPGQCPDQSHGPSPEHTSPTPAPDNPPQAPTVTFKTLDDMISYYKQVT

SEQ ID NO: 826286 - protein, 164 aa, Homo sapiens [sequence omitted]

SEQ ID NO: 826287 - protein, 81 aa, Homo sapiens
ATTTKFAAASTGIGELLWGQFISAIPTRSLKFLKEAGHGTTKEEITKDAEGLDEIDHAEMELRRGQILWFRGLNRIQTQVL

SEQ ID NO: 826288 - protein, 1205 aa, Homo sapiens
MTNPSDRVLPANSMAESREGDFGCTVMELRKLMELRSRDALTQINVHYGGVQNLCSRLKTSPVEGLSGNPADLEKRRQVFGHNVIPPKKPKTFLELVWEALQDVTLIILEIAAIISLVLSFYRPAGEENELCGQVATTPEDENEAQAGWIEGAAILFSVIIVVLVTAFNDWSKEKQFRGLQCRIEQEQKFSIIRNGQLIQLPVAEIVVGDIAQVKYGDLLPADGILIQGNDLKIDESSLTGESDHVKKSLDKDPMLLSGTHVMEGSGRMVVTAVGVNSQTGIILTLLGVNEDDEGEKKKKGKKQGVPENRNKAKTQDGVALEIQPLNSQEGIDNEEKDKKAVKVPKKEKSVLQGKLTRLAVQIGKAGLLMSALTVFILILYFVIDNFVINRRPWLPECTPIYIQYFVKFFIIGITVLVVAVPEGLPLAVTISLAYSVKKMMKDNNLVRHLDACETMGNATAICSDKTGTLTMNRMTVVQAYIGGIHYRQIPSPDVFLPKVLDLIVNGISINSAYTSKILPPEKEGGLPRQVGNKTECALLGFVTDLKQDYQAVRNEVPEEKLYKVYTFNSVRKSMSTVIRNPNGGFRMYSKGASEIILRKCNRILDRKGEAVPFKNKDRDDMVRTVIEPMACDGLRTICIAYRDFDDTEPSWDNENEILTELTCIAVVGIEDPVRPEVPDAIAKCKQAGITVRMVTGDNINTARAIATKCGILTPGDDFLCLEGKEFNRLIRNEKGEVEQEKLDKIWPKLRVLARSSPTDKHTLVKGIIDSTVGEHRQVVAVTGDGTNDGPALKKADVGFAMGIAGTDVAKEASDIILTDDNFTSIVKAVMWGRNVYDSISKFLQFQLTVNVVAVIVAFTGACITQDSPLKAVQMLWVNLIMDTFASLALATEPPTESLLKRRPYGRNKPLISRTMMKNILGHAFYQLIVIFILVFAGEKFFDIDSGRKAPLHSPPSQHYTIVFNTFVLMQLFNEINSRKIHGEKNVFSGIYRNIIFCSVVLGTFICQIFIVEFGGKPFSCTSLSLSQWLWCLFIGIGELLWGQFISAIPTRSLKFLKEAGHGTTKEEITKDAEGLDEIDHAEMELRRGQILWFRGLNRIQTQIKVVKAFHSSLHESIQKPYNQKSIHSFMTHPEFAIEEELPRTPLLDEEEEENPDKASKFGTRVLLLDGEVTPYANTNNNAVDCNQVQLPQSDSSLQSLETSV

SEQ ID NO: 826289 - protein, 143 aa, Homo sapiens
QSPNSAQSPNSAQSPNSAQSPNSAQSPNSAHSPNSAQSPNSAQSPNSAQSPNSAQSPNSALPLELQRGELAWLNLNGYLTAENPEGRGTLACVEKPLNASLPFFPASFALQLKQPVVPSQYAETSSPFISRDHPRCIGEGGHL

SEQ ID NO: 826290 - protein, 1170 aa, Homo sapiens
MTNPSDRVLPANSMAESREGDFGCTVMELRKLMELRSRDALTQINVHYGGVQNLCSRLKTSPVEGLSGNPADLEKRRQVFGHNVIPPKKPKTFLELVWEALQDVTLIILEIAAIISLVLSFYRPAGEENELCGQVATTPEDENEAQAGWIEGAAILFSVIIVVLVTAFNDWSKEKQFRGLQCRIEQEQKFSIIRNGQLIQLPVAEIVVGDIAQVKYGDLLPADGILIQGNDLKIDESSLTGESDHVKKSLDKDPMLLSGTHVMEGSGRMVVTAVGVNSQTGIILTLLGVNEDDEGEKKKKGKKQGVPENRNKAKTQDGVALEIQPLNSQEGIDNEEKDKKAVKVPKKEKSVLQGKLTRLAVQIGKAGLLMSALTVFILILYFVIDNFVINRRPWLPECTPIYIQYFVKFFIIGITVLVVAVPEGLPLAVTISLAYSVKKMMKDNNLVRHLDACETMGNATAICSDKTGTLTMNRMTVVQAYIGGIHYRQIPSPDVFLPKVLDLIVNGISINSAYTSKILPPEKEGGLPRQVGNKTECALLGFVTDLKQDYQAVRNEVPEEKLYKVYTFNSVRKSMSTVIRNPNGGFRMYSKGASEIILRKCNRILDRKGEAVPFKNKDRDDMVRTVIEPMACDGLRTICIAYRDFDDTEPSWDNENEILTELTCIAVVGIEDPVRPEVPDAIAKCKQAGITVRMVTGDNINTARAIATKCGILTPGDDFLCLEGKEFNRLIRNEKGEVEQEKLDKIWPKLRVLARSSPTDKHTLVKGIIDSTVGEHRQVVAVTGDGTNDGPALKKADVGFAMGIAGTDVAKEASDIILTDDNFTSIVKAVMWGRNVYDSISKFLQFQLTVNVVAVIVAFTGACITQDSPLKAVQMLWVNLIMDTFASLALATEPPTESLLKRRPYGRNKPLISRTMMKNILGHAFYQLIVIFILVFAGEKFFDIDSGRKAPLHSPPSQHYTIVFNTFVLMQLFNEINSRKIHGEKNVFSGIYRNIIFCSVVLGTFICQIFIVEFGGKPFSCTSLSLSQWLWCLFIGIGELLWGQFISAIPTRSLKFLKEAGHGTTKEEITKDAEGLDEIDHAEMELRRGQILWFRGLNRIQTQIDVINTFQTGASFKGVLRRQNMGQHLDVKLVPSSSYVAVAPVKSSPTTSVPAVSSPPMGNQSGQSVP

SEQ ID NO: 826291 - protein, 1241 aa, Homo sapiens
MTNPSDRVLPANSMAESREGDFGCTVMELRKLMELRSRDALTQINVHYGGVQNLCSRLKTSPVEGLSGNPADLEKRRQVFGHNVIPPKKPKTFLELVWEALQDVTLIILEIAAIISLVLSFYRPAGEENELCGQVATTPEDENEAQAGWIEGAAILFSVIIVVLVTAFNDWSKEKQFRGLQCRIEQEQKFSIIRNGQLIQLPVAEIVVGDIAQVKYGDLLPADGILIQGNDLKIDESSLTGESDHVKKSLDKDPMLLSGTHVMEGSGRMVVTAVGVNSQTGIILTLLGVNEDDEGEKKKKGKKQGVPENRNKAKTQDGVALEIQPLNSQEGIDNEEKDKKAVKVPKKEKSVLQGKLTRLAVQIGKAGLLMSALTVFILILYFVIDNFVINRRPWLPECTPIYIQYFVKFFIIGITVLVVAVPEGLPLAVTISLAYSVKKMMKDNNLVRHLDACETMGNATAICSDKTGTLTMNRMTVVQAYIGGIHYRQIPSPDVFLPKVLDLIVNGISINSAYTSKILPPEKEGGLPRQVGNKTECALLGFVTDLKQDYQAVRNEVPEEKLYKVYTFNSVRKSMSTVIRNPNGGFRMYSKGASEIILRKCNRILDRKGEAVPFKNKDRDDMVRTVIEPMACDGLRTICIAYRDFDDTEPSWDNENEILTELTCIAVVGIEDPVRPEVPDAIAKCKQAGITVRMVTGDNINTARAIATKCGILTPGDDFLCLEGKEFNRLIRNEKGEVEQEKLDKIWPKLRVLARSSPTDKHTLVKGIIDSTVGEHRQVVAVTGDGTNDGPALKKADVGFAMGIAGTDVAKEASDIILTDDNFTSIVKAVMWGRNVYDSISKFLQFQLTVNVVAVIVAFTGACITQDSPLKAVQMLWVNLIMDTFASLALATEPPTESLLKRRPYGRNKPLISRTMMKNILGHAFYQLIVIFILVFAGEKFFDIDSGRKAPLHSPPSQHYTIVFNTFVLMQLFNEINSRKIHGEKNVFSGIYRNIIFCSVVLGTFICQIFIVEFGGKPFSCTSLSLSQWLWCLFIGIGELLWGQFISAIPTRSLKFLKEAGHGTTKEEITKDAEGLDEIDHAEMELRRGQILWFRGLNRIQTQIDVINTFQTGASFKGVLRRQNMGQHLDVKLVPSSSYIKVVKAFHSSLHESIQKPYNQKSIHSFMTHPEFAIEEELPRTPLLDEEEEENPDKASKFGTRVLLLDGEVTPYANTNNNAVDCNQVQLPQSDSSLQSLETSV

SEQ ID NO: 826292 - protein, 1134 aa, Homo sapiens
MTNPSDRVLPANSMAESREGDFGCTVMELRKLMELRSRDALTQINVHYGGVQNLCSRLKTSPVEGLSGNPADLEKRRQVFGHNVIPPKKPKTFLELVWEALQDVTLIILEIAAIISLVLSFYRPAGEENELCGQVATTPEDENEAQAGWIEGAAILFSVIIVVLVTAFNDWSKEKQFRGLQCRIEQEQKFSIIRNGQLIQLPVAEIVVGDIAQVKYGDLLPADGILIQGNDLKIDESSLTGESDHVKKSLDKDPMLLSGTHVMEGSGRMVVTAVGVNSQTGIILTLLGVNEDDEGEKKKKGKKQGVPENRNKAKTQDGVALEIQPLNSQEGIDNEEKDKKAVKVPKKEKSVLQGKLTRLAVQIGKAGLLMSALTVFILILYFVIDNFVINRRPWLPECTPIYIQYFVKFFIIGITVLVVAVPEGLPLAVTISLAYSVKKMMKDNNLVRHLDACETMGNATAICSDKTGTLTMNRMTVVQAYIGGIHYRQIPSPDVFLPKVLDLIVNGISINSAYTSKILPPEKEGGLPRQVGNKTECALLGFVTDLKQDYQAVRNEVPEEKLYKVYTFNSVRKSMSTVIRNPNGGFRMYSKGASEIILRKCNRILDRKGEAVPFKNKDRDDMVRTVIEPMACDGLRTICIAYRDFDDTEPSWDNENEILTELTCIAVVGIEDPVRPEVPDAIAKCKQAGITVRMVTGDNINTARAIATKCGILTPGDDFLCLEGKEFNRLIRNEKGEVEQEKLDKIWPKLRVLARSSPTDKHTLVKGIIDSTVGEHRQVVAVTGDGTNDGPALKKADVGFAMGIAGTDVAKEASDIILTDDNFTSIVKAVMWGRNVYDSISKFLQFQLTVNVVAVIVAFTGACITQDSPLKAVQMLWVNLIMDTFASLALATEPPTESLLKRRPYGRNKPLISRTMMKNILGHAFYQLIVIFILVFAGEKFFDIDSGRKAPLHSPPSQHYTIVFNTFVLMQLFNEINSRKIHGEKNVFSGIYRNIIFCSVVLGTFICQFISAIPTRSLKFLKEAGHGTTKEEITKDAEGLDEIDHAEMELRRGQILWFRGLNRIQTQIDVINTFQTGASFKGVLRRQNMGQHLDVKLVPSSSYVAVAPVKSSPTTSVPAVSSPPMGNQSGQSVP

SEQ ID NO: 826293 - protein, 309 aa, Homo sapiens
MTNPSDRVLPANSMAESREGDFGCTVMELRKLMELRSRDALTQINVHYGGVQNLCSRLKTSPVEGLSGNPADLEKRRQVFGHNVIPPKKPKTFLELVWEALQDVTLIILEIAAIISLVLSFYRPAGEENELCGQVATTPEDENEAQAGWIEGAAILFSVIIVVLVTAFNDWSKEKQFRGLQCRIEQEQKFSIIRNGQLIQLPVAEIVVGDIAQVKYGDLLPADGILIQGNDLKIDESSLTGESDHVKKSLDKDPMLLSGTHVMEGSGRMVVTAVGVNSQTGIILTLLGVNEDDEGEKKKNLVGNRPVPP

SEQ ID NO: 826294 - protein, 57 aa, Homo sapiens
PPVLLLSPLGEKFFDIDSGRKAPLHSPPSQHYTIVFNTFVLMQLFNEINSRKIHGEK

SEQ ID NO: 826295 - protein, 1205 aa, Homo sapiens; identical to SEQ ID NO: 826288

SEQ ID NO: 826296 - protein, 106 aa, Homo sapiens
MVRAKFRSNLPAKAIGHRIRVMLYPSRIETNEKSINKCGFVLIVFLSGLKNLLPGLGLPGQVDLSTRLCGKASKCIPSFLSCFLCLTIEAARGTITVCRDFLTFHI

SEQ ID NO: 826297 - protein, 1164 aa, Homo sapiens
MTNPSDRVLPANSMAESREGDFGCTVMELRKLMELRSRDALTQINVHYGGVQNLCSRLKTSPVEGLSGNPADLEKRRQVFGHNVIPPKKPKTFLELVWEALQDVTLIILEIAAIISLVLSFYRPAGEENELCGQVATTPEDENEAQAGWIEGAAILFSVIIVVLVTAFNDWSKEKQFRGLQCRIEQEQKFSIIRNGQLIQLPVAEIVVGDIAQVKYGDLLPADGILIQGNDLKIDESSLTGESDHVKKSLDKDPMLLSGTHVMEGSGRMVVTAVGVNSQTGIILTLLGVNEDDEGEKKKKGKKQGVPENRNKAKTQDGVALEIQPLNSQEGIDNEEKDKKAVKVPKKEKSVLQGKLTRLAVQIGKAGLLMSALTVFILILYFVIDNFVINRRPWLPECTPIYIQYFVKFFIIGITVLVVAVPEGLPLAVTISLAYSVKKMMKDNNLVRHLDACETMGNATAICSDKTGTLTMNRMTVVQAYIGGIHYRQIPSPDVFLPKVLDLIVNGISINSAYTSKILPPEKEGGLPRQVGNKTECALLGFVTDLKQDYQAVRNEVPEEKLYKVYTFNSVRKSMSTVIRNPNGGFRMYSKGASEIILRKCNRILDRKGEAVPFKNKDRDDMVRTVIEPMACDGLRTICIAYRDFDDTEPSWDNENEILTELTCIAVVGIEDPVRPEVPDAIAKCKQAGITVRMVTGDNINTARAIATKCGILTPGDDFLCLEGKEFNRLIRNEKGEVEQEKLDKIWPKLRVLARSSPTDKHTLVKGIIDSTVGEHRQVVAVTGDGTNDGPALKKADVGFAMGIAGTDVAKEASDIILTDDNFTSIVKAVMWGRNVYDSISKFLQFQLTVNVVAVIVAFTGACITQDSPLKAVQMLWVNLIMDTFASLALATEPPTESLLKRRPYGRNKPLISRTMMKNILGHAFYQLIVIFILVFAGEKFFDIDSGRKAPLHSPPSQHYTIVFNTFVLMQLFNEINSRKIHGEKNVFSGIYRNIIFCSVVLGTFICQIFIVEFGGKPFSCTSLSLSQWLWCLFIGIGELLWGQFISAIPTRSLKFLKEAGHGTTKEEITKDAEGLDEIDHAEMELRRGQILWFRGLNRIQTQIDVINTFQTGASFKGVLRRQNMGQHLDVKLVPSSSYVAVAPVKSSPTTSVPAVSSPPMGSE

SEQ ID NO: 826298 - protein, 1130 aa, Homo sapiens
MTNPSDRVLPANSMAESREGDFGCTVMELRKLMELRSRDALTQINVHYGGVQNLCSRLKTSPVEGLSGNPADLEKRRQVFGHNVIPPKKPKTFLELVWEALQDVTLIILEIAAIISLVLSFYRPAGEENELCGQVATTPEDENEAQAGWIEGAAILFSVIIVVLVTAFNDWSKEKQFRGLQCRIEQEQKFSIIRNGQLIQLPVAEIVVGDIAQVKYGDLLPADGILIQGNDLKIDESSLTGESDHVKKSLDKDPMLLSGTHVMEGSGRMVVTAVGVNSQTGIILTLLGVNEDDEGEKKKKGKKQGVPENRNKAKTQDGVALEIQPLNSQEGIDNEEKDKKAVKVPKKEKSVLQGKLTRLAVQIGKAGLLMSALTVFILILYFVIDNFVINRRPWLPECTPIYIQYFVKFFIIGITVLVVAVPEGLPLAVTISLAYSVKKMMKDNNLVRHLDACETMGNATAICSDKTGTLTMNRMTVVQAYIGGIHYRQIPSPDVFLPKVLDLIVNGISINSAYTSKILPPEKEGGLPRQVGNKTECALLGFVTDLKQDYQAVRNEVPEEKLYKVYTFNSVRKSMSTVIRNPNGGFRMYSKGASEIILRKCNRILDRKGEAVPFKNKDRDDMVRTVIEPMACDGLRTICIAYRDFDDTEPSWDNENEILTELTCIAVVGIEDPVRPEVPDAIAKCKQAGITVRMVTGDNINTARAIATKCGILTPGDDFLCLEGKEFNRLIRNEKGEVEQEKLDKIWPKLRVLARSSPTDKHTLVKGIIDSTVGEHRQVVAVTGDGTNDGPALKKADVGFAMGIAGTDVAKEASDIILTDDNFTSIVKAVMWGRNVYDSISKFLQFQLTVNVVAVIVAFTGACITQDSPLKAVQMLWVNLIMDTFASLALATEPPTESLLKRRPYGRNKPLISRTMMKNILGHAFYQLIVIFILVFAGEKFFDIDSGRKAPLHSPPSQHYTIVFNTFVLMQLFNEINSRKIHGEKNVFSGIYRNIIFCSVVLGTFICQIFIVEFGGKPFSCTSLSLSQWLWCLFIGIGELLWGQFISAIPTRSLKFLKEAGHGTTKEEITKDAEGLDEIDHAEMELRRGQILWFRGLNRIQTQHLLQDSDLLPDKEEAIISSSLFPSCNF

SEQ ID NO: 826299 - protein, 309 aa, Homo sapiens; identical to SEQ ID NO: 826293

SEQ ID NO: 826300 - protein, 76 aa, Homo sapiens
VIIVVLVTAFNDWSKEKQFRGLQCRIEQEQKFSIIRNGQLIQLPVAEIVVGDIAQVKYGESSVFLLLTPPPPPFKG

SEQ ID NO: 826301 - protein, 912 aa, Homo sapiens
MGSKGVYQYHWQSHNVKHSGVDDMVLLSKITENSIVENLKKRYMDDYIFTYIGSVLISVNPFKQMPYFGEKEIEMYQGAAQYENPPHIYALADNMYRNMIIDRENQCVIISGESGAGKTVAAKYIMSYISRVSGGGTKVQHVKDIILQSNPLLEAFGNAKTVRNNNSSRFGKYFEIQFSPGGEPDGGKISNFLLEKSRVVMRNPGERSFHIFYQLIEGASAEQKHSLGITSMDYYYYLSLSGSYKVDDIDDRREFQETLHAMNVIGIFAEEQTLVLQIVAGILHLGNISFKEVGNYAAVESEEFLAFPAYLLGINQDRLKEKLTSRQMDSKWGGKSESIHVTLNVEQACYTRDALAKALHARVFDFLVDSINKAMEKDHEEYNIGVLDIYGFEIFQKNGFEQFCINFVNEKLQQIFIELTLKAEQEEYVQEGIRWTPIEYFNNKIVCDLIENKVNPPGIMSILDDVCATMHAVGEGADQTLLQKLQMQIGSHEHFNSWNQGFIIHHYAGKVSYDMDGFCERNRDVLFMDLIELMQSSELPFIKSLFPENLQADKKGRPTTAGSKIKKQANDLVSTLMKCTPHYIRCIKPNETKKPRDWEESRVKHQVEYLGLKENIRVRRAGYAYRRIFQKFLQRYAILTKATWPSWQGEEKQGVLHLLQSVNMDSDQFQLGRSKVFIKAPESLFLLEEMRERKYDGYARVIQKSWRKFVARKKYVQMREEASDLLLNKKERRRNSINRNFIGDYIGMEEHPELQQFVGKREKIDFADTVTKYDRRFKGVKRDLLLTPKCLYLIGREKVKQGPDKGLVKEVLKRKIEIERILSVSLSTMQDDIFILHEQEYDSLLESVFKTEFLSLLAKRYEEKTQKQLPLKFSNTLELKLKKENWGPWSAGGLPASAVPPRVWGPGCPQAQ

SEQ ID NO: 826302 - protein, 818 aa, Homo sapiens
MYRNMIIDRENQCVIISGESGAGKTVAAKYIMSYISRVSGGGTKVQHVKDIILQSNPLLEAFGNAKTVRNNNSSRFGKYFEIQFSPGGEPDGGKISNFLLEKSRVVMRNPGERSFHIFYQLIEGASAEQKHSLGITSMDYYYYLSLSGSYKVDDIDDRREFQETLHAMNVIGIFAEEQTLVLQIVAGILHLGNISFKEVGNYAAVESEEFLAFPAYLLGINQDRLKEKLTSRQMDSKWGGKSESIHVTLNVEQACYTRDALAKALHARVFDFLVDSINKAMEKDHEEYNIGVLDIYGFEIFQKNGFEQFCINFVNEKLQQIFIELTLKAEQEEYVQEGIRWTPIEYFNNKIVCDLIENKVNPPGIMSILDDVCATMHAVGEGADQTLLQKLQMQIGSHEHFNSWNQGFIIHHYAGKVSYDMDGFCERNRDVLFMDLIELMQSSELPFIKSLFPENLQADKKGRPTTAGSKIKKQANDLVSTLMKCTPHYIRCIKPNETKKPRDWEESRVKHQVEYLGLKENIRVRRAGYAYRRIFQKFLQRYAILTKATWPSWQGEEKQGVLHLLQSVNMDSDQFQLGRSKVFIKAPESLFLLEEMRERKYDGYARVIQKSWRKFVARKKYVQMREEASDLLLNKKERRRNSINRNFIGDYIGMEEHPELQQFVGKREKIDFADTVTKYDRRFKGVKRDLLLTPKCLYLIGREKVKQGPDKGLVKEVLKRKIEIERILSVSLSTMQDDIFILHEQEYDSLLESVFKTEFLSLLAKRYEEKTQKQLPLKFSNTLELKLKKENWGPWSAGGLPASAVPPRVWGPGCPQAQ

SEQ ID NO: 826303 - protein, 538 aa, Homo sapiens
MEKDHEEYNIGVLDIYGFEIFQKNGFEQFCINFVNEKLQQIFIELTLKAEQEEYVQEGIRWTPIEYFNNKIVCDLIENKVNPPGIMSILDDVCATMHAVGEGADQTLLQKLQMQIGSHEHFNSWNQGFIIHHYAGKVSYDMDGFCERNRDVLFMDLIELMQSSELPFIKSLFPENLQADKKGRPTTAGSKIKKQANDLVSTLMKCTPHYIRCIKPNETKKPRDWEESRVKHQVEYLGLKENIRVRRAGYAYRRIFQKFLQRYAILTKATWPSWQGEEKQGVLHLLQSVNMDSDQFQLGRSKVFIKAPESLFLLEEMRERKYDGYARVIQKSWRKFVARKKYVQMREEASDLLLNKKERRRNSINRNFIGDYIGMEEHPELQQFVGKREKIDFADTVTKYDRRFKGVKRDLLLTPKCLYLIGREKVKQGPDKGLVKEVLKRKIEIERILSVSLSTMQDDIFILHEQEYDSLLESVFKTEFLSLLAKRYEEKTQKQLPLKFSNTLELKLKKENWGPWSAGGLPASAVPPRVWGPGCPQAQ

SEQ ID NO: 826304 - protein, 195 aa, Homo sapiens
MREEASDLLLNKKERRRNSINRNFIGDYIGMEEHPELQQFVGKREKIDFADTVTKYDRRFKGVKRDLLLTPKCLYLIGREKVKQGPDKGLVKEVLKRKIEIERILSVSLSTMQDDIFILHEQEYDSLLESVFKTEFLSLLAKRYEEKTQKQLPLKFSNTLELKLKKENWGPWSAGGLPASAVPPRVWGPGCPQAQ

SEQ ID NO: 826305 - protein, 117 aa, Homo sapiens [sequence omitted]

SEQ ID NO: 826306 - protein, 912 aa, Homo sapiens; identical to SEQ ID NO: 826301

SEQ ID NO: 826307 - protein, 912 aa, Homo sapiens; identical to SEQ ID NO: 826301

SEQ ID NO: 826308 - protein, 827 aa, Homo sapiens
MGSKGVYQYHWQSHNVKHSGVDDMVLLSKITENSIVENLKKRYMDDYIFTYIGSVLISVNPFKQMPYFGEKEIEMYQGAAQYENPPHIYALADNMYRNMIIDRENQCVIISGESGAGKTVAAKYIMSYISRVSGGGTKVQHVKDIILQSNPLLEAFGNAKTVRNNNSSRFGKYFEIQFSPGGEPDGGKISNFLLEKSRVVMRNPGERSFHIFYQLIEGASAEQKHSLGITSMDYYYYLSLSGSYKVDDIDDRREFQETLHAMNVIGIFAEEQTLVLQIVAGILHLGNISFKEVGNYAAVESEEFLAFPAYLLGINQDRLKEKLTSRQMDSKWGGKSESIHVTLNVEQACYTRDALAKALHARVFDFLVDSINKAMEKDHEEYNIGVLDIYGFEIFQKNGFEQFCINFVNEKLQQIFIELTLKAEQEEYVQEGIRWTPIEYFNNKIVCDLIENKVNPPGIMSILDDVCATMHAVGEGADQTLLQKLQMQIGSHEHFNSWNQGFIIHHYAGKVSYDMDGFCERNRDVLFMDLIELMQSSELPFIKSLFPENLQADKKGRPTTAGSKIKKQANDLVSTLMKCTPHYIRCIKPNETKKPRDWEESRVKHQVEYLGLKENIRVRRAGYAYRRIFQKFLQRYAILTKATWPSWQGEEKQGVLHLLQSVNMDSDQFQLGRSKVFIKAPESLFLLEEMRERKYDGYARVIQKSWRKFVARKKYVQMREEASDLLLNKKERRRNSINRNFIGDYIGMEEHPELQQFVGKREKIDFADTVTKYDRRFKGVKRDLLLTPKCLYLIGREKVKQGPDKGLVKEVLKRKIEIERILSVSLR

SEQ ID NO: 826309 - protein, 418 aa, Homo sapiens
MGSKGVYQYHWQSHNVKHSGVDDMVLLSKITENSIVENLKKRYMDDYIFTYIGSVLISVNPFKQMPYFGEKEIEMYQGAAQYENPPHIYALADNMYRNMIIDRENQCVIISGESGAGKTVAAKYIMSYISRVSGGGTKVQHVKDIILQSNPLLEAFGNAKTVRNNNSSRFGKYFEIQFSPGGEPDGGKISNFLLEKSRVVMRNPGERSFHIFYQLIEGASAEQKHSLGITSMDYYYYLSLSGSYKVDDIDDRREFQETLHAMNVIGIFAEEQTLVLQIVAGILHLGNISFKEVGNYAAVESEEFLAFPAYLLGINQDRLKEKLTSRQMDSKWGGKSESIHVTLNVEQACYTRDALAKALHARVFDFLVDGVKRDLLLTPKCLYLIGREKVKQGPDKGLVKEVLKRKIEIERILSVSLR

SEQ ID NO: 826310 - protein, 912 aa, Homo sapiens; identical to SEQ ID NO: 826301

SEQ ID NO: 826311 - protein, 889 aa, Homo sapiens
MVLLSKITENSIVENLKKRYMDDYIFTYIGSVLISVNPFKQMPYFGEKEIEMYQGAAQYENPPHIYALADNMYRNMIIDRENQCVIISGESGAGKTVAAKYIMSYISRVSGGGTKVQHVKDIILQSNPLLEAFGNAKTVRNNNSSRFGKYFEIQFSPGGEPDGGKISNFLLEKSRVVMRNPGERSFHIFYQLIEGASAEQKHSLGITSMDYYYYLSLSGSYKVDDIDDRREFQETLHAMNVIGIFAEEQTLVLQIVAGILHLGNISFKEVGNYAAVESEEFLAFPAYLLGINQDRLKEKLTSRQMDSKWGGKSESIHVTLNVEQACYTRDALAKALHARVFDFLVDSINKAMEKDHEEYNIGVLDIYGFEIFQKNGFEQFCINFVNEKLQQIFIELTLKAEQEEYVQEGIRWTPIEYFNNKIVCDLIENKVNPPGIMSILDDVCATMHAVGEGADQTLLQKLQMQIGSHEHFNSWNQGFIIHHYAGKVSYDMDGFCERNRDVLFMDLIELMQSSELPFIKSLFPENLQADKKGRPTTAGSKIKKQANDLVSTLMKCTPHYIRCIKPNETKKPRDWEESRVKHQVEYLGLKENIRVRRAGYAYRRIFQKFLQRYAILTKATWPSWQGEEKQGVLHLLQSVNMDSDQFQLGRSKVFIKAPESLFLLEEMRERKYDGYARVIQKSWRKFVARKKYVQMREEASDLLLNKKERRRNSINRNFIGDYIGMEEHPELQQFVGKREKIDFADTVTKYDRRFKGVKRDLLLTPKCLYLIGREKVKQGPDKGLVKEVLKRKIEIERILSVSLSTMQDDIFILHEQEYDSLLESVFKTEFLSLLAKRYEEKTQKQLPLKFSNTLELKLKKENWGPWSAGGLPASAVPPRVWGPGCPQAQ

SEQ ID NO: 826312 - protein, 912 aa, Homo sapiens; identical to SEQ ID NO: 826301

SEQ ID NO: 826313 - protein, 912 aa, Homo sapiens; identical to SEQ ID NO: 826301

SEQ ID NO: 826314 - protein, 178 aa, Homo sapiens
AQDQIVLSFNANDIIDIIKEDPSGWWTGRLRGKQGLFPNNYVTKIRGARDSDTWGRGAPGYHQNGVIRNQYVPYPHAPGSQRSNQKSLYTSMARPPLPRQQSTSSDRVSQTPESLDFLKVPDQGAAGVRRQTTSRPPPAGGRPKPQPKPKPQVPQCKALYAYETLKRLGWGQGVSLHK

SEQ ID NO: 826315 - protein, 635 aa, Homo sapiens
MGSKGVYQYHWQSHNVKHSGVDDMVLLSKITENSIVENLKKRYMDDYIFTYIGSVLISVNPFKQMPYFGEKEIEMYQGAAQYENPPHIYALADNMYRNMIIDRENQCVIISGESGAGKTVAAKYIMSYISRVSGGGTKVQHVKDIILQSNPLLEAFGNAKTVRNNNSSRFGKYFEIQFSPGGEPDGGKISNFLLEKSRVVMRNPGERSFHIFYQLIEGASAEQKHSLGITSMDYYYYLSLSGSYKVDDIDDRREFQETLHAMNVIGIFAEEQTLVLQIVAGILHLGNISFKEVGNYAAVESEEFLAFPAYLLGINQDRLKEKLTSRQMDSKWGGKSESIHVTLNVEQACYTRDALAKALHARVFDFLVDSINKAMEKDHEEYNIGVLDIYGFEIFQKNGFEQFCINFVNEKLQQIFIELTLKAEQEEYVQEGIRWTPIEYFNNKIVCDLIENKVNPPGIMSILDDVCATMHAVGEGADQTLLQKLQMQIGSHEHFNSWNQGFIIHHYAGKVSYDMDGFCERNRDVLFMDLIELMQSSELPFIKSLFPENLQADKKGRPTTAGSKIKKQANDLVSTLMKCTPHYIRCIKPNETKKPRDWEESRVKHQVEYLGLKENIRVRRAGYAYRRIFQKFLQR

SEQ ID NO: 826316 - protein, 532 aa, Homo sapiens
MGSKGVYQYHWQSHNVKHSGVDDMVLLSKITENSIVENLKKRYMDDYIFTYIGSVLISVNPFKQMPYFGEKEIEMYQGAAQYENPPHIYALADNMYRNMIIDRENQCVIISGESGAGKTVAAKYIMSYISRVSGGGTKVQHVKDIILQSNPLLEAFGNAKTVRNNNSSRFGKYFEIQFSPGGEPDGGKISNFLLEKSRVVMRNPGERSFHIFYQLIEGASAEQKHSLGITSMDYYYYLSLSGSYKVDDIDDRREFQETLHAMNVIGIFAEEQTLVLQIVAGILHLGNISFKEVGNYAAVESEEFLAFPAYLLGINQDRLKEKLTSRQMDSKWGGKSESIHVTLNVEQACYTRDALAKALHARVFDFLVDSINKAMEKDHEEYNIGVLDIYGFEIFQKNGFEQFCINFVNEKLQQIFIELTLKAEQEEYVQEGIRWTPIEYFNNKIVCDLIENKVNPPGIMSILDDVCATMHAVGEGADQTLLQKLQMQIGSHEHFNSWKLGIMSHEHCAIGDEMRRIGPLICPCRGRSPNAW

SEQ ID NO: 826317 - protein, 193 aa, Homo sapiens [sequence omitted]

SEQ ID NO: 826318 - protein, 193 aa, Homo sapiens [sequence omitted]

SEQ ID NO: 826319 - protein, 193 aa, Homo sapiens [sequence omitted]

SEQ ID NO: 826320 - protein, 193 aa, Homo sapiens [sequence omitted]

SEQ ID NO: 826321 - protein, 193 aa, Homo sapiens [sequence omitted]

SEQ ID NO: 826322 - protein, 193 aa, Homo sapiens [sequence omitted]

SEQ ID NO: 826323 - protein, 193 aa, Homo sapiens [sequence omitted]

SEQ ID NO: 826324 - protein, 193 aa, Homo sapiens [sequence omitted]

SEQ ID NO: 826325 - protein, 259 aa, Homo sapiens
ELVAVVNEHPHGPVDTLQVLCAVEVLAVFVPGHCMLWPGPRTGDDESMAQSLLVELNGHLGHPGPAAHFGHIVNDGQQPSRMVFVFSQGTKQLRTSTSGVWSLALVRSFLGTALEPQDTIIGHGLEVAWGEVWALQVAEADAPLLPTHSAAVTGGPFPEGGEDMEVPIVFICKGLLALVLESGHHSLTVLDVHIVGVKVVPLAGAAEVQAWVLRLSPENQQAEHADAEAGQHVAAHTYLGCLRQHPPIKVRQHFGVAAT

SEQ ID NO: 826326 - protein, 193 aa, Homo sapiens [sequence omitted]

SEQ ID NO: 826327 - protein, 193 aa, Homo sapiens [sequence omitted]

SEQ ID NO: 826328 - protein, 134 aa, Homo sapiens
MGKQNSKLRPEVMQDLLESTDFTEHEIQEWYKGFLRDCPSGHLSMEEFKKIYGNFFPYGDASKFAEHVFRTFDANGDGTIDFREFIIALSVTSRGKLEQKLKWAFSMYDLDGNGYISKAEMLEIVQAIYKMVSS

SEQ ID NO: 826329 - protein, 193 aa, Homo sapiens [sequence omitted]

SEQ ID NO: 826330 - protein, 1500 aa, Homo sapiens
MDPSMGVNSVTISVEGMTCNSCVWTIEQQIGKVNGVHHIKVSLEEKNATIIYDPKLQTPKTLQEAIDDMGFDAVIHNPDPLPVLTDTLFLTVTASLTLPWDHIQSTLLKTKGVTDIKIYPQKRTVAVTIIPSIVNANQIKELVPELSLDTGTLEKKSGACEDHSMAQAGEVVLKMKVEGMTCHSCTSTIEGKIGKLQGVQRIKVSLDNQEATIVYQPHLISVEEMKKQIEAMGFPAFVKKQPKYLKLGAIDVERLKNTPVKSSEGSQQRSPSYTNDSTATFIIDGMHCKSCVSNIESTLSALQYVSSIVVSLENRSAIVKYNASSVTPESLRKAIEAVSPGLYRVSITSEVESTSNSPSSSSLQKIPLNVVSQPLTQETVINIDGMTCNSCVQSIEGVISKKPGVKSIRVSLANSNGTVEYDPLLTSPETLRGAIEDMGFDATLSDTNEPLVVIAQPSSEMPLLTSTNEFYTKGMTPVQDKEEGKNSSKCYIQVTGMTCASCVANIERNLRREEGIYSILVALMAGKAEVRYNPAVIQPPMIAEFIRELGFGATVIENADEGDGVLELVVRGMTCASCVHKIESSLTKHRGILYCSVALATNKAHIKYDPEIIGPRDIIHTIESLGFEASLVKKDRSASHLDHKREIRQWRRSFLVSLFFCIPVMGLMTYMMVMDHHFATLHHNQNMSKEEMINLHSSMFLERQILPGLSVMNLLSFLLCVPVQFFGGWYFYIQAYKALKHKTANMDVLIVLATTIAFAYSLIILLVAMYERAKVNPITFFDTPPMLFVFIALGRWLEHIAKGKTSEALAKLISLQATEATIVTLDSDNILLSEEQVDVELVQRGDIIKVVPGGKFPVDGRVIEGHSMVDESLITGEAMPVAKKPGSTVIAGSINQNGSLLICATHVGADTTLSQIVKLVEEAQTSKAPIQQFADKLSGYFVPFIVFVSIATLLVWIVIGFLNFEIVETYFPGYNRSISRTETIIRFAFQASITVLCIACPCSLGLATPTAVMVGTGVGAQNGILIKGGEPLEMAHKVKVVVFDKTGTITHGTPVVNQVKVLTESNRISHHKILAIVGTAESNSEHPLGTAITKYCKQELDTETLGTCIDFQVVPGCGISCKVTNIEGLLHKNNWNIEDNNIKNASLVQIDASNEQSSTSSSMIIDAQISNALNAQQYKVLIGNREWMIRNGLVINNDVNDFMTEHERKGRTAVLVAVDDELCGLIAIADTVKPEAELAIHILKSMGLEVVLMTGDNSKTARSIASQVGITKVFAEVLPSHKVAKVKQLQEEGKRVAMVGDGINDSPALAMANVGIAIGTGTDVAIEAADVVLIRNDLLDVVASIDLSRKTVKRIRINFVFALIYNLVGIPIAAGVFMPIGLVLQPWMGSAAMAASSVSVVLSSLFLKLYRKPTYESYELPARSQIGQKSPSEISVHVGIDDTSRNSPKLGLLDRIVNYSRASINSLLSDKRSLNSVVTSEPDKHSLLVGDFREDDDTAL

SEQ ID NO: 826331 - protein, 1500 aa, Homo sapiens; identical to SEQ ID NO: 826330

SEQ ID NO: 826332 - protein, 1121 aa, Homo sapiens
PTTVELHVDGVSDICTKGGDINFVFTGFSVNGKVLSKGQPLGPAGVQVSLRNTGTEAKIQSTVTQPGGKFAFFKVLPGDYEILATHPTWALKEASTTVRVTNSNANAASPLIVAGYNVSGSVRSDGEPMKGVKFLLFSSLVTKEDVLGCNVSPVPGFQPQDESLVYLCYTVSREDGSFSFYSLPSGGYTVIPFYRGERITFDVAPSRLDFTVEHDSLKIEPVFHVMGFSVTGRVLNGPEGDGVPEAVVTLNNQIKVKTKADGSFRLENITTGTYTIHAQKEHLYFETVTIKIAPNTPQLADIVATGFSVCGQISIIRFPDTVKQMNKYKVVLSSQDKDKSLVTVETDAHGSFCFKANPGTYKVQVMVPEAETRAGLTLKPQTFPLTVTDRPVMDVAFVQFLASVSGKVSCLDTCGDLLVTLQSLSRQGEKRSLQLSGKVNAMTFTFDNVLPGKYKISIMHEDWCWKNKSLEVEVLEDDVSAVEFRQTGYMLRCSLSHAITLEFYQDGNGRENVGIYNLSKGVNRFCLSKPGVYKVTPRSCHRFEQAFYTYDTSSPSILTLTAIRHHVLGTITTDKMMDVTVTIKSSIDSEPALVLGPLKSVQELRREQQLAEIEARRQEREKNGNEEGEERMTKPPVQEMVDELQGPFSYDFSYWARSGEKITVTPSSKELLFYPPSMEAVVSGESCPGKLIEIHGKAGLFLEGQIHPELEGVEIVISEKGASSPLITVFTDDKGAYSVGPLHSDLEYTVTSQKEGYVLTAVEGTIGDFKAYALAGVSFEIKAEDDQPLPGVLLSLSGGLFRSNLLTQDNGILTFSNLSPGQYYFKPMMKEFRFEPSSQMIEVQEGQNLKITITGYRTAYSCYGTVSSLNGEPEQGVAMEAVGQNDCSIYGEDTVTDEEGKFRLRGLLPGCVYHVQLKAEGNDHIERALPHHRVIEVGNNDIDDVNIIVFRQINQFDLSGNVITSSEYLPTLWVKLYKSENLDNPIQTVSLGQSLFFHFPPLLRDGENYVVLLDSTLPRSQYDYILPQVSFTAVGYHKHITLIFNPTRKLPEQDIAQGSYIALPLTLLVLLAGYNHDKLIPLLLQLTSRLQGVGALGQAASDNSGPEDAKRQAKKQKTRRT

SEQ ID NO: 826333 - protein, 844 aa, Homo sapiens
RLGTGCVVNRPSIKIAPNTPQLADIVATGFSVCGQISIIRFPDTVKQMNKYKVVLSSQDKDKSLVTVETDAHGSFCFKANPGTYKVQVMVPEAETRAGLTLKPQTFPLTVTDRPVMDVAFVQFLASVSGKVSCLDTCGDLLVTLQSLSRQGEKRSLQLSGKVNAMTFTFDNVLPGKYKISIMHEDWCWKNKSLEVEVLEDDVSAVEFRQTGYMLRCSLSHAITLEFYQDGNGRENVGIYNLSKGVNRFCLSKPGVYKVTPRSCHRFEQAFYTYDTSSPSILTLTAIRHHVLGTITTDKMMDVTVTIKSSIDSEPALVLGPLKSVQELRREQQLAEIEARRQEREKNGNEEGEERMTKPPVQEMVDELQGPFSYDFSYWARSGEKITVTPSSKELLFYPPSMEAVVSGESCPGKLIEIHGKAGLFLEGQIHPELEGVEIVISEKGASSPLITVFTDDKGAYSVGPLHSDLEYTVTSQKEGYVLTAVEGTIGDFKAYALAGVSFEIKAEDDQPLPGVLLSLSGGLFRSNLLTQDNGILTFSNLSPGQYYFKPMMKEFRFEPSSQMIEVQEGQNLKITITGYRTAYSCYGTVSSLNGEPEQGVAMEAVGQNDCSIYGEDTVTDEEGKFRLRGLLPGCVYHVQLKAEGNDHIERALPHHRVIEVGNNDIDDVNIIVFRQINQFDLSGNVITSSEYLPTLWVKLYKSENLDNPIQTVSLGQSLFFHFPPLLRDGENYVVLLDSTLPRSQYDYILPQVSFTAVGYHKHITLIFNPTRKLPEQDIAQGSYIALPLTLLVLLAGYNHDKLIPLLLQLTSRLQGVGALGQAASDNSGPEDAKRQAKKQKTRRT

SEQ ID NO: 826334 - protein, 640 aa, Homo sapiens
KARYEAAWLIGRGRSHAITLEFYQDGNGRENVGIYNLSKGVNRFCLSKPGVYKVTPRSCHRFEQAFYTYDTSSPSILTLTAIRHHVLGTITTDKMMDVTVTIKSSIDSEPALVLGPLKSVQELRREQQLAEIEARRQEREKNGNEEGEERMTKPPVQEMVDELQGPFSYDFSYWARSGEKITVTPSSKELLFYPPSMEAVVSGESCPGKLIEIHGKAGLFLEGQIHPELEGVEIVISEKGASSPLITVFTDDKGAYSVGPLHSDLEYTVTSQKEGYVLTAVEGTIGDFKAYALAGVSFEIKAEDDQPLPGVLLSLSGGLFRSNLLTQDNGILTFSNLSPGQYYFKPMMKEFRFEPSSQMIEVQEGQNLKITITGYRTAYSCYGTVSSLNGEPEQGVAMEAVGQNDCSIYGEDTVTDEEGKFRLRGLLPGCVYHVQLKAEGNDHIERALPHHRVIEVGNNDIDDVNIIVFRQINQFDLSGNVITSSEYLPTLWVKLYKSENLDNPIQTVSLGQSLFFHFPPLLRDGENYVVLLDSTLPRSQYDYILPQVSFTAVGYHKHITLIFNPTRKLPEQDIAQGSYIALPLTLLVLLAGYNHDKLIPLLLQLTSRLQGVGALGQAASDNSGPEDAKRQAKKQKTRRT

SEQ ID NO: 826335 - protein, 595 aa, Homo sapiens
SYVEAIPDVYVHTRACVNKRSTWTTASSPSILTLTAIRHHVLGTITTDKMMDVTVTIKSSIDSEPALVLGPLKSVQELRREQQLAEIEARRQEREKNGNEEGEERMTKPPVQEMVDELQGPFSYDFSYWARSGEKITVTPSSKELLFYPPSMEAVVSGESCPGKLIEIHGKAGLFLEGQIHPELEGVEIVISEKGASSPLITVFTDDKGAYSVGPLHSDLEYTVTSQKEGYVLTAVEGTIGDFKAYALAGVSFEIKAEDDQPLPGVLLSLSGGLFRSNLLTQDNGILTFSNLSPGQYYFKPMMKEFRFEPSSQMIEVQEGQNLKITITGYRTAYSCYGTVSSLNGEPEQGVAMEAVGQNDCSIYGEDTVTDEEGKFRLRGLLPGCVYHVQLKAEGNDHIERALPHHRVIEVGNNDIDDVNIIVFRQINQFDLSGNVITSSEYLPTLWVKLYKSENLDNPIQTVSLGQSLFFHFPPLLRDGENYVVLLDSTLPRSQYDYILPQVSFTAVGYHKHITLIFNPTRKLPEQDIAQGSYIALPLTLLVLLAGYNHDKLIPLLLQLTSRLQGVGALGQAASDNSGPEDAKRQAKKQKTRRT

SEQ ID NO: 826336 - protein, 1121 aa, Homo sapiens; identical to SEQ ID NO: 826332

SEQ ID NO: 826337 - protein, 1101 aa, Homo sapiens
PTTVELHVDGVSDICTKGGDINFVFTGFSVNGKVLSKGQPLGPAGVQVSLRNTGTEAKIQSTVTQPGGKFAFFKVLPGDYEILATHPTWALKEASTTVRVTNSNANAASPLIVAGYNVSGSVRSDGEPMKGVKFLLFSSLVTKEDVLGCNVSPVPGFQPQDESLVYLCYTVSREDGSFSFYSLPSGGYTVIPFYRGERITFDVAPSRLDFTVEHDSLKIEPVFHVMGFSVTGRVLNGPEGDGVPEAVVTLNNQIKVKTKADGSFRLENITTGTYTIHAQKEHLYFETVTIKIAPNTPQLADIVATGFSVCGQISIIRFPDTVKQMNKYKVVLSSQDKDKSLVTVETDAHGSFCFKANPGTYKVQVMVPEAETRAGLTLKPQTFPLTVTDRPVMDVAFVQFLASVSGKVSCLDTCGDLLVTLQSLSRQGEKRSLQLSGKVNAMTFTFDNVLPGKYKISIMHEDWCWKNKSLEVEVLEDDVSAVEFRQTGYMLRCSLSHAITLEFYQDGNGRENVGIYNLSKGVNRFCLSKPGVYKVTPRSCHRFEQAFYTYDTSSPSILTLTAIRHHVLGTITTDKMMDVTVTIKSSIDSEPALVLGPLKSVQELRREQQLAEIEARRQEREKNGNEEGEERMTKPPVQEMVDELQGPFSYDFSYWARSGEKITVTPSSKELLFYPPSMEAVVSGESCPGKLIEIHGKAGLFLEGQIHPELEGVEIVISEKGASSPLITVFTDDKGAYSVGPLHSDLEYTVTSQKEGYVLTAVEGTIGDFKAYALAGVSFEIKAEDDQPLPGVLLSLSGGLFRSNLLTQDNGILTFSNLSPGQYYFKPMMKEFRFEPSSQMIEVQEGQNLKITITGYRTAYSCYGTVSSLNGEPEQGVAMEAVGQNDCSIYGEDTVTDEEGKFRLRGLLPGCVYHVQLKAEGNDHIERALPHHRVIEVGNNDIDDVNIIVFRQINQFDLSGNVITSSEYLPTLWVKLYKSENLDNPIQTVSLGQSLFFHFPPLLRDGENYVVLLDSTLPRSQYDYILPQVSFTAVGYHKHITLIFNPTRKLPEQDIAQGSYIALPLTLLVLLAGYNHDKVGNPEASGDGGHVRESESSQLQE

SEQ ID NO: 826338 - protein, 406 aa, Homo sapiens
  misc_feature (3)..(4): Xaa can be any naturally occurring amino acid
SGXXVSLKPVDSEGGGHVLRRSSVGPLHSDLEYTVTSQKEGYVLTAVEGTIGDFKAYALAGVSFEIKAEDDQPLPGVLLSLSGGLFRSNLLTQDNGILTFSNLSPGQYYFKPMMKEFRFEPSSQMIEVQEGQNLKITITGYRTAYSCYGTVSSLNGEPEQGVAMEAVGQNDCSIYGEDTVTDEEGKFRLRGLLPGCVYHVQLKAEGNDHIERALPHHRVIEVGNNDIDDVNIIVFRQINQFDLSGNVITSSEYLPTLWVKLYKSENLDNPIQTVSLGQSLFFHFPPLLRDGENYVVLLDSTLPRSQYDYILPQVSFTAVGYHKHITLIFNPTRKLPEQDIAQGSYIALPLTLLVLLAGYNHDKLIPLLLQLTSRLQGVGALGQAASDNSGPEDAKRQAKKQKTRRT

SEQ ID NO: 826339 - protein, 293 aa, Homo sapiens
MKEFRFEPSSQMIEVQEGQNLKITITGYRTAYSCYGTVSSLNGEPEQGVAMEAVGQNDCSIYGEDTVTDEEGKFRLRGLLPGCVYHVQLKAEGNDHIERALPHHRVIEVGNNDIDDVNIIVFRQINQFDLSGNVITSSEYLPTLWVKLYKSENLDNPIQTVSLGQSLFFHFPPLLRDGENYVVLLDSTLPRSQYDYILPQVSFTAVGYHKHITLIFNPTRKLPEQDIAQGSYIALPLTLLVLLAGYNHDKLIPLLLQLTSRLQGVGALGQAASDNSGPEDAKRQAKKQKTRRT

SEQ ID NO: 826340 - protein, 1121 aa, Homo sapiens; identical to SEQ ID NO: 826332

SEQ ID NO: 826341 - protein, 1121 aa, Homo sapiens; identical to SEQ ID NO: 826332

SEQ ID NO: 826342 - protein, 1101 aa, Homo sapiens; identical to SEQ ID NO: 826337

SEQ ID NO: 826343 - protein, 208 aa, Homo sapiens
  misc_feature (1)..(1): Xaa can be any naturally occurring amino acid
  misc_feature (5)..(5): Xaa can be any naturally occurring amino acid
XPAPXACAAPNACAGSPHHRVIEVGNNDIDDVNIIVFRQINQFDLSGNVITSSEYLPTLWVKLYKSENLDNPIQTVSLGQSLFFHFPPLLRDGENYVVLLDSTLPRSQYDYILPQVSFTAVGYHKHITLIFNPTRKLPEQDIAQGSYIALPLTLLVLLAGYNHDKLIPLLLQLTSRLQGVGALGQAASDNSGPEDAKRQAKKQKTRRT

SEQ ID NO: 826344 - protein, 208 aa, Homo sapiens
VRRSWSKGSPRMLMWLPIDRVIEVGNNDIDDVNIIVFRQINQFDLSGNVITSSEYLPTLWVKLYKSENLDNPIQTVSLGQSLFFHFPPLLRDGENYVVLLDSTLPRSQYDYILPQVSFTAVGYHKHITLIFNPTRKLPEQDIAQGSYIALPLTLLVLLAGYNHDKLIPLLLQLTSRLQGVGALGQAASDNSGPEDAKRQAKKQKTRRT

SEQ ID NO: 826345 - protein, 118 aa, Homo sapiens [sequence omitted]

SEQ ID NO: 826346 - protein, 1067 aa, Homo sapiens
  misc_feature (1052)..(1053): Xaa can be any naturally occurring amino acid
  misc_feature (1061)..(1061): Xaa can be any naturally occurring amino acid
PTTVELHVDGVSDICTKGGDINFVFTGFSVNGKVLSKGQPLGPAGVQVSLRNTGTEAKIQSTVTQPGGKFAFFKVLPGDYEILATHPTWALKEASTTVRVTNSNANAASPLIVAGYNVSGSVRSDGEPMKGVKFLLFSSLVTKEDVLGCNVSPVPGFQPQDESLVYLCYTVSREDGSFSFYSLPSGGYTVIPFYRGERITFDVAPSRLDFTVEHDSLKIEPVFHVMGFSVTGRVLNGPEGDGVPEAVVTLNNQIKVKTKADGSFRLENITTGTYTIHAQKEHLYFETVTIKIAPNTPQLADIVATGFSVCGQISIIRFPDTVKQMNKYKVVLSSQDKDKSLVTVETDAHGSFCFKANPGTYKVQVMVPEAETRAGLTLKPQTFPLTVTDRPVMDVAFVQFLASVSGKVSCLDTCGDLLVTLQSLSRQGEKRSLQLSGKVNAMTFTFDNVLPGKYKISIMHEDWCWKNKSLEVEVLEDDVSAVEFRQTGYMLRCSLSHAITLEFYQDGNGRENVGIYNLSKGVNRFCLSKPGVYKVTPRSCHRFEQAFYTYDTSSPSILTLTAIRHHVLGTITTDKMMDVTVTIKSSIDSEPALVLGPLKSVQELRREQQLAEIEARRQEREKNGNEEGEERMTKPPVQEMVDELQGPFSYDFSYWARSGEKITVTPSSKELLFYPPSMEAVVSGESCPGKLIEIHGKAGLFLEGQIHPELEGVEIVISEKGASSPLITVFTDDKGAYSVGPLHSDLEYTVTSQKEGYVLTAVEGTIGDFKAYALAGVSFEIKAEDDQPLPGVLLSLSGGLFRSNLLTQDNGILTFSNLSPGQYYFKPMMKEFRFEPSSQMIEVQEGQNLKITITGYRTAYSCYGTVSSLNGEPEQGVAMEAVGQNDCSIYGEDTVTDEEGKFRLRGLLPGCVYHVQLKAEGNDHIERALPHHRVIEVGNNDIDDVNIIVFRQINQFDLSGNVITSSEYLPTLWVKLYKSENLDNPIQTVSLGQSLFFHFPPLLRDGENYVVLLDSTLPRSQYDYILPQVSFTAVGYHKHITLIFNPTRELAXXEIGQEDLXWFRINP

SEQ ID NO: 826347 - protein, 1050 aa, Homo sapiens
PTTVELHVDGVSDICTKGGDINFVFTGFSVNGKVLSKGQPLGPAGVQVSLRNTGTEAKIQSTVTQPGGKFAFFKVLPGDYEILATHPTWALKEASTTVRVTNSNANAASPLIVAGYNVSGSVRSDGEPMKGVKFLLFSSLVTKEDVLGCNVSPVPGFQPQDESLVYLCYTVSREDGSFSFYSLPSGGYTVIPFYRGERITFDVAPSRLDFTVEHDSLKIEPVFHVMGFSVTGRVLNGPEGDGVPEAVVTLNNQIKVKTKADGSFRLENITTGTYTIHAQKEHLYFETVTIKIAPNTPQLADIVATGFSVCGQISIIRFPDTVKQMNKYKVVLSSQDKDKSLVTVETDAHGSFCFKANPGTYKVQVMVPEAETRAGLTLKPQTFPLTVTDRPVMDVAFVQFLASVSGKVSCLDTCGDLLVTLQSLSRQGEKRSLQLSGKVNAMTFTFDNVLPGKYKISIMHEDWCWKNKSLEVEVLEDDVSAVEFRQTGYMLRCSLSHAITLEFYQDGNGRENVGIYNLSKGVNRFCLSKPGVYKVTPRSCHRFEQAFYTYDTSSPSILTLTAIRHHVLGTITTDKMMDVTVTIKSSIDSEPALVLGPLKSVQELRREQQLAEIEARRQEREKNGNEEGEERMTKPPVQEMVDELQGPFSYDFSYWARSGEKITVTPSSKELLFYPPSMEAVVSGESCPGKLIEIHGKAGLFLEGQIHPELEGVEIVISEKGASSPLITVFTDDKGAYSVGPLHSDLEYTVTSQKEGYVLTAVEGTIGDFKAYALAGVSFEIKAEDDQPLPGVLLSLSGGLFRSNLLTQDNGILTFSNLSPGQYYFKPMMKEFRFEPSSQMIEVQEGQNLKITITGYRTAYSCYGTVSSLNGEPEQGVAMEAVGQNDCSIYGEDTVTDEEGKFRLRGLLPGCVYHVQLKAEGNDHIERALPHHRVIEVGNNDIDDVNIIVFRQINQFDLSGNVITSSEYLPTLWVKLYKSENLDNPIQTVSLGQSLFFHFPPLLRDGENYVSLLDFTLPISHYDYILVKSCSLITDSLPSLFTNCRTGIAG

SEQ ID NO: 826348 - protein, 1115 aa, Homo sapiens
PTTVELHVDGVSDICTKGGDINFVFTGFSVNGKVLSKGQPLGPAGVQVSLRNTGTEAKIQSTVTQPGGKFAFFKVLPGDYEILATHPTWALKEASTTVRVTNSNANAASPLIVAGYNVSGSVRSDGEPMKGVKFLLFSSLVTKEDVLGCNVSPVPGFQPQDESLVYLCYTVSREDGSFSFYSLPSGGYTVIPFYRGERITFDVAPSRLDFTVEHDSLKIEPVFHVMGFSVTGRVLNGPEGDGVPEAVVTLNNQIKVKTKADGSFRLENITTGTYTIHAQKEHLYFETVTIKIAPNTPQLADIVATGFSVCGQISIIRFPDTVKQMNKYKVVLSSQDKDKSLVTVETDAHGSFCFKANPGTYKVQVMVPEAETRAGLTLKPQTFPLTVTDRPVMDVAFVQFLASVSGKVSCLDTCGDLLVTLQSLSRQGEKRSLQLSGKVNAMTFTFDNVLPGKYKISIMHEDWCWKNKSLEVEVLEDDVSAVEFRQTGYMLRCSLSHAITLEFYQDGNGRENVGIYNLSKGVNRFCLSKPGVYKVTPRSCHRFEQAFYTYDTSSPSILTLTAIRHHVLGTITTDKMMDVTVTIKSSIDSEPALVLGPLKSVQELRREQQLAEIEARRQEREKNGNEEGEERMTKPPVQEMVDELQGPFSYDFSYWARSGEKITVTPSSKELLFYPPSMEAVVSGESCPGKLIEIHGKAGLFLEGQIHPELEGVEIVISEKGASSPLITVFTDDKGAYSVGPLHSDLEYTVTSQKEGYVLTAVEGTIGDFKAYALAGVSFEIKAEDDQPLPGVLLSLSGGLFRSNLLTQDNGILTFSNLSPGQYYFKPMMKEFRFEPSSQMIEVQEGQNLKITITGYRTAYSCYGTVSSLNGEPEQGVAMEAVGQNDCSIYGEDTVTDEEGKFRLRGLLPGCVYHVQLKAEGNDHIERALPHHRVIEVGNNDIDDVNIIVFRQINQFDLSGNVITSSEYLPTLWVKLYKSENLDNPIQTVSLGQSLFFHFPPLLRDGEARDGENYVVLLDSTLPRIQYDYILPQDSFTAVGYHKTFTVIFNPPRNCLTGNAKVQLPQGGADGRVTRKQLGGVEGEDRPAFNRREKANRAQTVGAPNGQPPTCGRAS

SEQ ID NO: 826349 - protein, 1120 aa, Homo sapiens
PTTVELHVDGVSDICTKGGDINFVFTGFSVNGKVLSKGQPLGPAGVQVSLRNTGTEAKIQSTVTQPGGKFAFFKVLPGDYEILATHPTWALKEASTTVRVTNSNANAASPLIVAGYNVSGSVRSDGEPMKGVKFLLFSSLVTKEDVLGCNVSPVPGFQPQDESLVYLCYTVSREDGSFSFYSLPSGGYTVIPFYRGERITFDVAPSRLDFTVEHDSLKIEPVFHVMGFSVTGRVLNGPEGDGVPEAVVTLNNQIKVKTKADGSFRLENITTGTYTIHAQKEHLYFETVTIKIAPNTPQLADIVATGFSVCGQISIIRFPDTVKQMNKYKVVLSSQDKDKSLVTVETDAHGSFCFKANPGTYKVQVMVPEAETRAGLTLKPQTFPLTVTDRPVMDVAFVQFLASVSGKVSCLDTCGDLLVTLQSLSRQGEKRSLQLSGKVNAMTFTFDNVLPGKYKISIMHEDWCWKNKSLEVEVLEDDVSAVEFRQTGYMLRCSLSHAITLEFYQDGNGRENVGIYNLSKGVNRFCLSKPGVYKVTPRSCHRFEQAFYTYDTSSPSILTLTAIRHHVLGTITTDKMMDVTVTIKSSIDSEPALVLGPLKSVQELRREQQLAEIEARRQEREKNGNEEGEERMTKPPVQEMVDELQGPFSYDFSYWARSGEKITVTPSSKELLFYPPSMEAVVSGESCPGKLIEIHGKAGLFLEGQIHPELEGVEIVISEKGASSPLITVFTDDKGAYSVGPLHSDLEYTVTSQKEGYVLTAVEGTIGDFKAYALAGVSFEIKAEDDQPLPGVLLSLSGGLFRSNLLTQDNGILTFSNLSPGQYYFKPMMKEFRFEPSSQMIEVQEGQNLKITITGYRTAYSCYGTVSSLNGEPEQGVAMEAVGQNDCSIYGEDTVTDEEGKFRLRGLLPGCVYHVQLKAEGNDHIERALPHHRVIEVGNNDIDDVNIIVFRQINQFDLSGNVITSSEYLPTLWVKLYKSENLDKPRNRRQGGREEEGDSCSLTWDRPQPGVRLRDGENYVVLLDSTLPRIQYDYILPQDSFTAVGYHKTFTVIFNPPRNCLTGNAKVQLPQGGADGRVTRKQLGGSEGEDRPAFNRREKANRAQTVGAPNGQPPTCGRAS

SEQ ID NO: 826350 - protein, 848 aa, Homo sapiens
PTTVELHVDGVSDICTKGGDINFVFTGFSVNGKVLSKGQPLGPAGVQVSLRNTGTEAKIQSTVTQPGGKFAFFKVLPGDYEILATHPTWALKEASTTVRVTNSNANAASPLIVAGYNVSGSVRSDGEPMKGVKFLLFSSLVTKEDVLGCNVSPVPGFQPQDESLVYLCYTVSREDGSFSFYSLPSGGYTVIPFYRGERITFDVAPSRLDFTVEHDSLKIEPVFHVMGFSVTGRVLNGPEGDGVPEAVVTLNNQIKVKTKADGSFRLENITTGTYTIHAQKEHLYFETVTIKIAPNTPQLADIVATGFSVCGQISIIRFPDTVKQMNKYKVVLSSQDKDKSLVTVETDAHGSFCFKANPGTYKVQVMVPEAETRAGLTLKPQTFPLTVTDRPVMDVAFVQFLASVSGKVSCLDTCGDLLVTLQSLSRQGEKRSLQLSGKVNAMTFTFDNVLPGKYKISIMHEDWCWKNKSLEVEVLEDDVSAVEFRQTGYMLRCSLSHAITLEFYQDGNGRENVGIYNLSKGVNRFCLSKPGVYKVTPRSCHRFEQAFYTYDTSSPSILTLTAIRHHVLGTITTDKMMDVTVTIKSSIDSEPALVLGPLKSVQELRREQQLAEIEARRQEREKNGNEEGEERMTKPPVQEMVDELQGPFSYDFSYWARSGEKITVTPSSKELLFYPPSMEAVVSGESCPGKLIEIHGKAGLFLEGQIHPELEGVEIVISEKGASSPLITVFTDDKGAYSVGPLHSDLEYTVTSQKEGYVLTAVEGTIGDFKAYALAGVSFEIKAEDDQPLPGVLLSLSGGLFRSNLLTQDNGILTFSNLVTCSAIYHLPVFPEREPGCSMRGLMCCLTT

SEQ ID NO: 826351 - protein, 822 aa, Homo sapiens
PTTVELHVDGVSDICTKGGDINFVFTGFSVNGKVLSKGQPLGPAGVQVSLRNTGTEAKIQSTVTQPGGKFAFFKVLPGDYEILATHPTWALKEASTTVRVTNSNANAASPLIVAGYNVSGSVRSDGEPMKGVKFLLFSSLVTKEDVLGCNVSPVPGFQPQDESLVYLCYTVSREDGSFSFYSLPSGGYTVIPFYRGERITFDVAPSRLDFTVEHDSLKIEPVFHVMGFSVTGRVLNGPEGDGVPEAVVTLNNQIKVKTKADGSFRLENITTGTYTIHAQKEHLYFETVTIKIAPNTPQLADIVATGFSVCGQISIIRFPDTVKQMNKYKVVLSSQDKDKSLVTVETDAHGSFCFKANPGTYKVQVMVPEAETRAGLTLKPQTFPLTVTDRPVMDVAFVQFLASVSGKVSCLDTCGDLLVTLQSLSRQGEKRSLQLSGKVNAMTFTFDNVLPGKYKISIMHEDWCWKNKSLEVEVLEDDVSAVEFRQTGYMLRCSLSHAITLEFYQDGNGRENVGIYNLSKGVNRFCLSKPGVYKVTPRSCHRFEQAFYTYDTSSPSILTLTAIRHHVLGTITTDKMMDVTVTIKSSIDSEPALVLGPLKSVQELRREQQLAEIEARRQEREKNGNEEGEERMTKPPVQEMVDELQGPFSYDFSYWARSGEKITVTPSSKELLFYPPSMEAVVSGESCPGKLIEIHGKAGLFLEGQIHPELEGVEIVISEKGASSPLITVFTDDKGAYSVGPLHSDLEYTVTSQKEGYVLTAVEGTIGDFKAYALAGVSFEIKAERGEDRPSDAWGRPIQQIQSQAPFVGTSAFRLAGTSFMA

SEQ ID NO: 826352 - protein, 559 aa, Homo sapiens
PTTVELHVDGVSDICTKGGDINFVFTGFSVNGKVLSKGQPLGPAGVQVSLRNTGTEAKIQSTVTQPGGKFAFFKVLPGDYEILATHPTWALKEASTTVRVTNSNANAASPLIVAGYNVSGSVRSDGEPMKGVKFLLFSSLVTKEDVLGCNVSPVPGFQPQDESLVYLCYTVSREDGSFSFYSLPSGGYTVIPFYRGERITFDVAPSRLDFTVEHDSLKIEPVFHVMGFSVTGRVLNGPEGDGVPEAVVTLNNQIKVKTKADGSFRLENITTGTYTIHAQKEHLYFETVTIKIAPNTPQLADIVATGFSVCGQISIIRFPDTVKQMNKYKVVLSSQDKDKSLVTVETDAHGSFCFKANPGTYKVQVMVPEAETRAGLTLKPQTFPLTVTDRPVMDVAFVQFLASVSGKVSCLDTCGDLLVTLQSLSRQGEKRSLQLSGKVNAMTFTFDNVLPGKYKISIMHEDWCWKNKSLEVEVLEDDVSAVEFRQTGYMLRCSLSHAITLEFYQDGNGRENVGIYNLSKGVNRFCLSKPGVYKVTPRSCHRFEQAFYTYDTFHLVSVN

SEQ ID NO: 826353 - protein, 102 aa, Homo sapiens [sequence omitted]

SEQ ID NO: 826354 - protein, 313 aa, Homo sapiens
SIICEDGSNRNSFIMGLKKYWPGFRFEPSSQMIEVQEGQNLKITITGYRTAYSCYGTVSSLNGEPEQGVAMEAVGQNDCSIYGEDTVTDEEGKFRLRGLLPGCVYHVQLKAEGNDHIERALPHHRVIEVGNNDIDDVNIIVFRQINQFDLSGNVITSSEYLPTLWVKLYKSENLDNPIQTVSLGQSLFFHFPPLLRDGENYVVLLDSTLPRSQYDYILPQVSFTAVGYHKHITLIFNPTRKLPEQDIAQGSYIALPLTLLVLLAGYNHDKLIPLLLQLTSRLQGVGALGQAASDNSGPEDAKRQAKKQKTRRT

SEQ ID NO: 826355 - protein, 718 aa, Homo sapiens
QDCRVTSKSPQVSKQETFQSLSRQGEKRSLQLSGKVNAMTFTFDNVLPGKYKISIMHEDWCWKNKSLEVEVLEDDVSAVEFRQTGYMLRCSLSHAITLEFYQDGNGRENVGIYNLSKGVNRFCLSKPGVYKVTPRSCHRFEQAFYTYDTSSPSILTLTAIRHHVLGTITTDKMMDVTVTIKSSIDSEPALVLGPLKSVQELRREQQLAEIEARRQEREKNGNEEGEERMTKPPVQEMVDELQGPFSYDFSYWARSGEKITVTPSSKELLFYPPSMEAVVSGESCPGKLIEIHGKAGLFLEGQIHPELEGVEIVISEKGASSPLITVFTDDKGAYSVGPLHSDLEYTVTSQKEGYVLTAVEGTIGDFKAYALAGVSFEIKAEDDQPLPGVLLSLSGGLFRSNLLTQDNGILTFSNLSPGQYYFKPMMKEFRFEPSSQMIEVQEGQNLKITITGYRTAYSCYGTVSSLNGEPEQGVAMEAVGQNDCSIYGEDTVTDEEGKFRLRGLLPGCVYHVQLKAEGNDHIERALPHHRVIEVGNNDIDDVNIIVFRQINQFDLSGNVITSSEYLPTLWVKLYKSENLDNPIQTVSLGQSLFFHFPPLLRDGENYVVLLDSTLPRSQYDYILPQVSFTAVGYHKHITLIFNPTRKLPEQDIAQGSYIALPLTLLVLLAGYNHDKLIPLLLQLTSRLQGVGALGQAASDNSGPEDAKRQAKKQKTRRT

SEQ ID NO: 826356 - protein, 621 aa, Homo sapiens
VFTKYLDIGVERLLKPVAGARGHFVHTRLGQAESVDSFGEVINPHILTPSDTSSPSILTLTAIRHHVLGTITTDKMMDVTVTIKSSIDSEPALVLGPLKSVQELRREQQLAEIEARRQEREKNGNEEGEERMTKPPVQEMVDELQGPFSYDFSYWARSGEKITVTPSSKELLFYPPSMEAVVSGESCPGKLIEIHGKAGLFLEGQIHPELEGVEIVISEKGASSPLITVFTDDKGAYSVGPLHSDLEYTVTSQKEGYVLTAVEGTIGDFKAYALAGVSFEIKAEDDQPLPGVLLSLSGGLFRSNLLTQDNGILTFSNLSPGQYYFKPMMKEFRFEPSSQMIEVQEGQNLKITITGYRTAYSCYGTVSSLNGEPEQGVAMEAVGQNDCSIYGEDTVTDEEGKFRLRGLLPGCVYHVQLKAEGNDHIERALPHHRVIEVGNNDIDDVNIIVFRQINQFDLSGNVITSSEYLPTLWVKLYKSENLDNPIQTVSLGQSLFFHFPPLLRDGENYVVLLDSTLPRSQYDYILPQVSFTAVGYHKHITLIFNPTRKLPEQDIAQGSYIALPLTLLVLLAGYNHDKLIPLLLQLTSRLQGVGALGQAASDNSGPEDAKRQAKKQKTRRT

SEQ ID NO: 826357 - protein, 1121 aa, Homo sapiens; identical to SEQ ID NO: 826332

SEQ ID NO: 826358 - protein, 1107 aa, Homo sapiens
PTTVELHVDGVSDICTKGGDINFVFTGFSVNGKVLSKGQPLGPAGVQVSLRNTGTEAKIQSTVTQPGGKFAFFKVLPGDYEILATHPTWALKEASTTVRVTNSNANAASPLIVAGYNVSGSVRSDGEPMKGVKFLLFSSLVTKEDVLGCNVSPVPGFQPQDESLVYLCYTVSREDGSFSFYSLPSGGYTVIPFYRGERITFDVAPSRLDFTVEHDSLKIEPVFHVMGFSVTGRVLNGPEGDGVPEAVVTLNNQIKVKTKADGSFRLENITTGTYTIHAQKEHLYFETVTIKIAPNTPQLADIVATGFSVCGQISIIRFPDTVKQMNKYKVVLSSQDKDKSLVTVETDAHGSFCFKANPGTYKVQVMVPEAETRAGLTLKPQTFPLTVTDRPVMDVAFVQFLASVSGKVSCLDTCGDLLVTLQSLSRQGEKRSLQLSGKVNAMTFTFDNVLPGKYKISIMHEDWCWKNKSLEVEVLEDDVSAVEFRQTGYMLRCSLSHAITLEFYQDGNGRENVGIYNLSKGVNRFCLSKPGVYKVTPRSCHRFEQAFYTYDTSSPSILTLTAIRHHVLGTITTDKMMDVTVTIKSSIDSEPALVLGPLKSVQELRREQQLAEIEARRQEREKNGNEEGEERMTKPPVQEMVDELQGPFSYDFSYWARSGEKITVTPSSKELLFYPPSMEAVVSGESCPGKLIEIHGKAGLFLEGQIHPELEGVEIVISEKGASSPLITVFTDDKGAYSVGPLHSDLEYTVTSQKEGYVLTAVEGTIGDFKAYALAGVSFEIKAEDDQPLPGVLLSLSGGLFRSNLLTQDNGILTFSNLSPGQYYFKPMMKEFRFEPSSQMIEVQEGQNLKITITGYRTAYSCYGTVSSLNGEPEQGVAMEAVGQNDCSIYGEDTVTDEEGKFRLRGLLPGCVYHVQLKAEGNDHIERALPHHRVIEVGNNDIDDVNIIVFRQINQFDLSGNVITSSEYLPTLWVKLYKSENLDNPIQTVSLGQSLFFHFPPLLRDGENYVVLLDSTLPRSQYDYILPQVSFTAVGYHKHITLIFNPTRKLPEQDIAQGSYIALPLTLLVLLAGYNHDKGHIRPGERPAHPWGLISKRPASFELKPTH

SEQ ID NO: 826359 - protein, 1121 aa, Homo sapiens; identical to SEQ ID NO: 826332

SEQ ID NO: 826360 - protein, 1121 aa, Homo sapiens; identical to SEQ ID NO: 826332

SEQ ID NO: 826361 - protein, 221 aa, Homo sapiens
TDSRVFLQPGCVYHVQLKAEGNDHIERALPHHRVIEVGNNDIDDVNIIVFRQINQFDLSGNVITSSEYLPTLWVKLYKSENLDNPIQTVSLGQSLFFHFPPLLRDGENYVVLLDSTLPRSQYDYILPQVSFTAVGYHKHITLIFNPTRKLPEQDIAQGSYIALPLTLLVLLAGYNHDKLIPLLLQLTSRLQGVGALGQAASDNSGPEDAKRQAKKQKTRRT

SEQ ID NO: 826362 - protein, 1166 aa, Homo sapiens
PTTVELHVDGVSDICTKGGDINFVFTGFSVNGKVLSKGQPLGPAGVQVSLRNTGTEAKIQSTVTQPGGKFAFFKVLPGDYEILATHPTWALKEASTTVRVTNSNANAASPLIVAGYNVSGSVRSDGEPMKGVKFLLFSSLVTKEDVLGCNVSPVPGFQPQDESLVYLCYTVSREDGSFSFYSLPSGGYTVIPFYRGERITFDVAPSRLDFTVEHDSLKIEPVFHVMGFSVTGRVLNGPEGDGVPEAVVTLNNQIKVKTKADGSFRLENITTGTYTIHAQKEHLYFETVTIKIAPNTPQLADIVATGFSVCGQISIIRFPDTVKQMNKYKVVLSSQDKDKSLVTVETDAHGSFCFKANPGTYKVQVMVPEAETRAGLTLKPQTFPLTVTDRPVMDVAFVQFLASVSGKVSCLDTCGDLLVTLQSLSRQGEKRSLQLSGKVNAMTFTFDNVLPGKYKISIMHEDWCWKNKSLEVEVLEDDVSAVEFRQTGYMLRCSLSHAITLEFYQDGNGRENVGIYNLSKGVNRFCLSKPGVYKVTPRSCHRFEQAFYTYDTSSPSILTLTAIRHHVLGTITTDKMMDVTVTIKSSIDSEPALVLGPLKSVQELRREQQLAEIEARRQEREKNGNEEGEERMTKPPVQEMVDELQGPFSYDFSYWARSGEKITVTPSSKELLFYPPSMEAVVSGESCPGKLIEIHGKAGLFLEGQIHPELEGVEIVISEKGASSPLITVFTDDKGAYSVGPLHSDLEYTVTSQKEGYVLTAVEGTIGDFKAYALAGVSFEIKAEDDQPLPGVLLSLSGGLFRSNLLTQDNGILTFSNLSPGQYYFKPMMKEFRFEPSSQMIEVQEGQNLKITITGYRTAYSCYGTVSSLNGEPEQGVAMEAVGQNDCSIYGEDTVTDEEGKFRLRGLLPGCVYHVQLKAEGNDHIERALPHHRVIEVGNNDIDDVNIIVFRQINQFDLSGNVITSSEYLPTLWVKLYKSENLDNPIQTVSLGQSLFFHFPPLLRDGENYVVLLDSTLPRSQYDYILPQVSFTAVGYHKHITLIFNPTRKLPEQDIAQGSYIALPLTLLVLLAGYNHDKLIPLLLQLTSRLQGVGALGQAASDNSGPEDAKRQAKKQKTRRTLRLQEEFQLMWCLVPWRGTLGIHLFSSLPFASEILLETTATCIHY

SEQ ID NO: 826363 - protein, 1105 aa, Homo sapiens
PTTVELHVDGVSDICTKGGDINFVFTGFSVNGKVLSKGQPLGPAGVQVSLRNTGTEAKIQSTVTQPGGKFAFFKVLPGDYEILATHPTWALKEASTTVRVTNSNANAASPLIVAGYNVSGSVRSDGEPMKGVKFLLFSSLVTKEDVLGCNVSPVPGFQPQDESLVYLCYTVSREDGSFSFYSLPSGGYTVIPFYRGERITFDVAPSRLDFTVEHDSLKIEPVFHVMGFSVTGRVLNGPEGDGVPEAVVTLNNQIKVKTKADGSFRLENITTGTYTIHAQKEHLYFETVTIKIAPNTPQLADIVATGFSVCGQISIIRFPDTVKQMNKYKVVLSSQDKDKSLVTVETDAHGSFCFKANPGTYKVQVMVPEAETRAGLTLKPQTFPLTVTDRPVMDVAFVQFLASVSGKVSCLDTCGDLLVTLQSLSRQGEKRSLQLSGKVNAMTFTFDNVLPGKYKISIMHEDWCWKNKSLEVEVLEDDVSAVEFRQTGYMLRCSLSHAITLEFYQDGNGRENVGIYNLSKGVNRFCLSKPGVYKVTPRSCHRFEQAFYTYDTSSPSILTLTAIRHHVLGTITTDKMMDVTVTIKSSIDSEPALVLGPLKSVQELRREQQLAEIEARRQEREKNGNEEGEERMTKPPVQEMVDELQGPFSYDFSYWARSGEKITVTPSSKELLFYPPSMEAVVSGESCPGKLIEIHGKAGLFLEGQIHPELEGVEIVISEKGASSPLITVFTDDKGAYSVGPLHSDLEYTVTSQKEGYVLTAVEGTIGDFKAYALAGVSFEIKAEDDQPLPGVLLSLSGGLFRSNLLTQDNGILTFSNLSPGQYYFKPMMKEFRFEPSSQMIEVQEGQNLKITITGYRTAYSCYGTVSSLNGEPEQGVAMEAVGQNDCSIYGEDTVTDEEGKFRLRGLLPGCVYHVQLKAEGNDHIERALPHHRVIEVGNNDIDDVNIIVFRQINQFDLSGNVITSSEYLPTLWVKLYKSENLDNPIQTVSLGQSLFFHFPPLLRDGENYVVLLDSTLPRSQYDYILPQVSFTAVGYHKHITLIFNPTRKLPEQDIAQGSYIALPLTLLVLLAGYNHDKLLSEAAWPSARTPCSRLVNCSSKGWAG

SEQ ID NO: 826364 - protein, 118 aa, Homo sapiens [sequence omitted]

SEQ ID NO: 826365 - protein, 118 aa, Homo sapiens
LFSISSVVTWISIKQGLLIFPHKACLDFTAVGYHKHITLIFNPTRKLPEQDIAQGSYIALPLTLLVLLAGYNHDKLIPLLLQLTSRLQGVGALGQAASDNSGPEDAKRQAKKQKTRRT

SEQ ID NO: 826366 - protein, 1009 aa, Homo sapiens
PTTVELHVDGVSDICTKGGDINFVFTGFSVNGKVLSKGQPLGPAGVQVSLRNTGTEAKIQSTVTQPGGKFAFFKVLPGDYEILATHPTWALKEASTTVRVTNSNANAASPLIVAGYNVSGSVRSDGEPMKGVKFLLFSSLVTKEDVLGCNVSPVPGFQPQDESLVYLCYTVSREDGSFSFYSLPSGGYTVIPFYRGERITFDVAPSRLDFTVEHDSLKIEPVFHVMGFSVTGRVLNGPEGDGVPEAVVTLNNQIKVKTKADGSFRLENITTGTYTIHAQKEHLYFETVTIKIAPNTPQLADIVATGFSVCGQISIIRFPDTVKQMNKYKVVLSSQDKDKSLVTVETDAHGSFCFKANPGTYKVQVMVPEAETRAGLTLKPQTFPLTVTDRPVMDVAFVQFLASVSGKVSCLDTCGDLLVTLQSLSRQGEKRSLQLSGKVNAMTFTFDNVLPGKYKISIMHEDWCWKNKSLEVEVLEDDVSAVEFRQTGYMLRCSLSHAITLEFYQDGNGRENVGIYNLSKGVNRFCLSKPGVYKVTPRSCHRFEQAFYTYDTSSPSILTLTAIRHHVLGTITTDKMMDVTVTIKSSIDSEPALVLGPLKSVQELRREQQLAEIEARRQEREKNGNEEGEERMTKPPVQEMVDELQGPFSYDFSYWARSGEKITVTPSSKELLFYPPSMEAVVSGESCPGKLIEIHGKAGLFLEGQIHPELEGVEIVISEKGASSPLITVFTDDKGAYSVGPLHSDLEYTVTSQKEGYVLTAVEGTIGDFKAYALAGVSFEIKAEDDQPLPGVLLSLSGGLFRSNLLTQDNGILTFSNLSPGQYYFKPMMKEFRFEPSSQMIEVQEGQNLKITITGYRTAYSCYGTVSSLNGEPEQGVAMEAVGQNDCSIYGEDTVTDEEGKFRLRGLLPGCVYHVQLKAEGNDHIERALPHHRVIEVGNNDIDDVNIIVFRQINQFDLSGNVITSSEYLPTLWVKLYKSENLDNPIQTVFPLHLRSCWKPRQPVSTIRR

SEQ ID NO: 826367 - protein, 955 aa, Homo sapiens
PTTVELHVDGVSDICTKGGDINFVFTGFSVNGKVLSKGQPLGPAGVQVSLRNTGTEAKIQSTVTQPGGKFAFFKVLPGDYEILATHPTWALKEASTTVRVTNSNANAASPLIVAGYNVSGSVRSDGEPMKGVKFLLFSSLVTKEDVLGCNVSPVPGFQPQDESLVYLCYTVSREDGSFSFYSLPSGGYTVIPFYRGERITFDVAPSRLDFTVEHDSLKIEPVFHVMGFSVTGRVLNGPEGDGVPEAVVTLNNQIKVKTKADGSFRLENITTGTYTIHAQKEHLYFETVTIKIAPNTPQLADIVATGFSVCGQISIIRFPDTVKQMNKYKVVLSSQDKDKSLVTVETDAHGSFCFKANPGTYKVQVMVPEAETRAGLTLKPQTFPLTVTDRPVMDVAFVQFLASVSGKVSCLDTCGDLLVTLQSLSRQGEKRSLQLSGKVNAMTFTFDNVLPGKYKISIMHEDWCWKNKSLEVEVLEDDVSAVEFRQTGYMLRCSLSHAITLEFYQDGNGRENVGIYNLSKGVNRFCLSKPGVYKVTPRSCHRFEQAFYTYDTSSPSILTLTAIRHHVLGTITTDKMMDVTVTIKSSIDSEPALVLGPLKSVQELRREQQLAEIEARRQEREKNGNEEGEERMTKPPVQEMVDELQGPFSYDFSYWARSGEKITVTPSSKELLFYPPSMEAVVSGESCPGKLIEIHGKAGLFLEGQIHPELEGVEIVISEKGASSPLITVFTDDKGAYSVGPLHSDLEYTVTSQKEGYVLTAVEGTIGDFKAYALAGVSFEIKAEDDQPLPGVLLSLSGGLFRSNLLTQDNGILTFSNLSPGQYYFKPMMKEFRFEPSSQMIEVQEGQNLKITITGYRTAYSCYGTVSSLNGEPEQGVAMEAVGQNDCSIYGEDTVTDEEGKFRLRGLLPGCVYHVQLKAEGNDHIERALPHHRVIEPVVGQPVVGQPVVGQPVVG

SEQ ID NO: 826368 - protein, 1017 aa, Homo sapiens
PTTVELHVDGVSDICTKGGDINFVFTGFSVNGKVLSKGQPLGPAGVQVSLRNTGTEAKIQSTVTQPGGKFAFFKVLPGDYEILATHPTWALKEASTTVRVTNSNANAASPLIVAGYNVSGSVRSDGEPMKGVKFLLFSSLVTKEDVLGCNVSPVPGFQPQDESLVYLCYTVSREDGSFSFYSLPSGGYTVIPFYRGERITFDVAPSRLDFTVEHDSLKIEPVFHVMGFSVTGRVLNGPEGDGVPEAVVTLNNQIKVKTKADGSFRLENITTGTYTIHAQKEHLYFETVTIKIAPNTPQLADIVATGFSVCGQISIIRFPDTVKQMNKYKVVLSSQDKDKSLVTVETDAHGSFCFKANPGTYKVQVMVPEAETRAGLTLKPQTFPLTVTDRPVMDVAFVQFLASVSGKVSCLDTCGDLLVTLQSLSRQGEKRSLQLSGKVNAMTFTFDNVLPGKYKISIMHEDWCWKNKSLEVEVLEDDVSAVEFRQTGYMLRCSLSHAITLEFYQDGNGRENVGIYNLSKGVNRFCLSKPGVYKVTPRSCHRFEQAFYTYDTSSPSILTLTAIRHHVLGTITTDKMMDVTVTIKSSIDSEPALVLGPLKSVQELRREQQLAEIEARRQEREKNGNEEGEERMTKPPVQEMVDELQGPFSYDFSYWARSGEKITVTPSSKELLFYPPSMEAVVSGESCPGKLIEIHGKAGLFLEGQIHPELEGVEIVISEKGASSPLITVFTDDKGAYSVGPLHSDLEYTVTSQKEGYVLTAVEGTIGDFKAYALAGVSFEIKAEDDQPLPGVLLSLSGGLFRSNLLTQDNGILTFSNLQPWSALSFRPPCPPGSPGLPTPLPRQPAPPAAQHSASTPAHTPPPPAHRNPPPPTPPAPHRPPPPPRTPPHPPAPAHAPTPPPPHRTRHRPPTRQHTPPARTTHPQAARQASNHYTRAPPALAPRDRLRPPTDPTPPNATHTPTHHPPQAADAPPPSPNPQHPTATDAPCPHHQNPRAQPHHPPPRGHTHPHPPPHPRA

SEQ ID NO: 826369 - protein, 379 aa, Homo sapiens
PTTVELHVDGVSDICTKGGDINFVFTGFSVNGKVLSKGQPLGPAGVQVSLRNTGTEAKIQSTVTQPGGKFAFFKVLPGDYEILATHPTWALKEASTTVRVTNSNANAASPLIVAGYNVSGSVRSDGEPMKGVKFLLFSSLVTKEDVLGCNVSPVPGFQPQDESLVYLCYTVSREDGSFSFYSLPSGGYTVIPFYRGERITFDVAPSRLDFTVEHDSLKIEPVFHVMGFSVTGRVLNGPEGDGVPEAVVTLNNQIKVKTKADGSFRLENITTGTYTIHAQKEHLYFETVTIKIAPNTPQLADIVATGFSVCGQISIIRFPDTVKQMNKYKVVLSSQDKDKSLVTVETDAHGSFCFKANPGTYKVQVRCIVLNLKCFEKKQ

SEQ ID NO: 826370 - protein, 321 aa, Homo sapiens
PLSARPAPSAGGAAPRSHPGRELGASGQPRAAQRSPQKPGQRTCPRDLQTCATGSARPRGARTPRSPHPSRQSPAMGCFECCIKCLGGVPYASLVATILCFSGVALFCGCGHVALAGTVAILEQHFSTNASDHALLSEVIQLMQYVIYGIASFFFLYGIILLAEGFYTTSAVKELHGEFKTTACGRCISGMFVFLTYVLGVAWLGVFGFSAVPVFMFYNIWSTCEVIKSPQTNGTTGVEQICVDIRQYGIIPWNAFPGKICGSALENICNTNEFYMSYHLFIVACAGAGATVIALLIYMMATTYNYAVLKFKSREDCCTKF

SEQ ID NO: 826371 - protein, 321 aa, Homo sapiens; identical to SEQ ID NO: 826370

SEQ ID NO: 826372 - protein, 321 aa, Homo sapiens; identical to SEQ ID NO: 826370

SEQ ID NO: 826373 - protein, 265 aa, Homo sapiens
MKPAMETAAEENTEQSQERKGCFECCIKCLGGVPYASLVATILCFSGVALFCGCGHVALAGTVAILEQHFSTNASDHALLSEVIQLMQYVIYGIASFFFLYGIILLAEGFYTTSAVKELHGEFKTTACGRCISGMFVFLTYVLGVAWLGVFGFSAVPVFMFYNIWSTCEVIKSPQTNGTTGVEQICVDIRQYGIIPWNAFPGKICGSALENICNTNEFYMSYHLFIVACAGAGATVIALLIYMMATTYNYAVLKFKSREDCCTKF

SEQ ID NO: 826374 - protein, 344 aa, Homo sapiens
PLSARPAPSAGGAAPRSHPGRELGASGQPRAAQRSPQKPGQRTCPRDLQTCATGSARPRGARTPRSPHPSRQSPAMGCFECCIKCLGGVPYASLVATILCFSGVALFCGCGHVALAGTVAILEQHFSTNASDHALLSEVIQLMQYVIYGIASFFFLYGIILLAEGFYTTSAVKELHGEFKTTACGRCISGMFVFLTYVLGVAWLGVFGFSAVPVFMFYNIWSTCEVIKSPQTNGTTGVEQICVDIRQYGIIPWNAFPGKICGSALENICNTNEFYMSYHLFIVACAGAGATVIALIHFLMILSSNWAYLKDASKMQAYQDIKAKEEQELQDIQSRSKEQLNSYT

SEQ ID NO: 826375 - protein, 305 aa, Homo sapiens
MKPAMETAAEENTEQSQERKVNSRAEMEIGRYHWMYPGSKNHQYHPVPTLGDRASPLSSPGCFECCIKCLGGVPYASLVATILCFSGVALFCGCGHVALAGTVAILEQHFSTNASDHALLSEVIQLMQYVIYGIASFFFLYGIILLAEGFYTTSAVKELHGEFKTTACGRCISGMFVFLTYVLGVAWLGVFGFSAVPVFMFYNIWSTCEVIKSPQTNGTTGVEQICVDIRQYGIIPWNAFPGKICGSALENICNTNEFYMSYHLFIVACAGAGATVIALLIYMMATTYNYAVLKFKSREDCCTKF

SEQ ID NO: 826376 - protein, 284 aa, Homo sapiens
RPSEGPAPPPLRWRLLGHLCDEAGTLEVGGARRRCPERPGCFECCIKCLGGVPYASLVATILCFSGVALFCGCGHVALAGTVAILEQHFSTNASDHALLSEVIQLMQYVIYGIASFFFLYGIILLAEGFYTTSAVKELHGEFKTTACGRCISGMFVFLTYVLGVAWLGVFGFSAVPVFMFYNIWSTCEVIKSPQTNGTTGVEQICVDIRQYGIIPWNAFPGKICGSALENICNTNEFYMSYHLFIVACAGAGATVIALLIYMMATTYNYAVLKFKSREDCCTKF

SEQ ID NO: 826377 - protein, 321 aa, Homo sapiens; identical to SEQ ID NO: 826370

SEQ ID NO: 826378 - protein, 201 aa, Homo sapiens
PLSARPAPSAGGAAPRSHPGRELGASGQPRAAQRSPQKPGQRTCPRDLQTCATGSARPRGARTPRSPHPSRQSPAMGCFECCIKCLGGVPYASLVATILCFSGVALFCGCGHVALAGTVAILEQQYGQLVKSSSHRRPTGPRVWSRSVWISDNTVSFLGMLSPEKYVALPWRTSATQTSSTCPITCSLWPVQELVPPSLPC

SEQ ID NO: 826379 - protein, 382 aa, Homo sapiens
PLSARPAPSAGGAAPRSHPGRELGASGQPRAAQRSPQKPGQRTCPRDLQTCATGSARPRGARTPRSPHPSRQSPAMGCFECCIKCLGGVPYASLVATILCFSGVALFCGCGHVALAGTVAILEQHFSTNASDHALLSEVIQLMQYVIYGIASFFFLYGIILLAEGFYTTSAVKELHGEFKTTACGRCISGMFVFLTYVLGVAWLGVFGFSAVPVFMFYNIWSTCEVIKSPQTNGTTGVEQICVDIRQYGIIPWNAFPGKICGSALENICNTNEFYMSYHLFIVACAGAGATVIALIHFLIDTWTSKLGLNLQGCEAKMQGLPPIFKPRDRTRKLPGYSQSRVKENHSPHVYTINVMARDVRTTQLTSLTKSSTSEPGYHGVP

SEQ ID NO: 826380 - protein, 326 aa, Homo sapiens
MKPAMETAAEENTEQSQERKGCFECCIKCLGGVPYASLVATILCFSGVALFCGCGHVALAGTVAILEQHFSTNASDHALLSEVIQLMQYVIYGIASFFFLYGIILLAEGFYTTSAVKELHGEFKTTACGRCISGMFVFLTYVLGVAWLGVFGFSAVPVFMFYNIWSTCEVIKSPQTNGTTGVEQICVDIRQYGIIPWNAFPGKICGSALENICNTNEFYMSYHLFIVACAGAGATVIALIHFLIDTWTSKLGLNLQGCEAKMQGLPPIFKPRDRTRKLPGYSQSRVKENHSPHVYTINVMARDVRTTQLTSLTKSSTSEPGYHGVP

SEQ ID NO: 826381 - protein, 265 aa, Homo sapiens
RPSEGPAPPPLRWRLLGHLCDEAGTLEVGGARRRCPERPGCFECCIKCLGGVPYASLVATILCFSGVALFCGCGHVALAGTVAILEQHFSTNASDHALLSEVIQLMQYVIYGIASFFFLYGIILLAEGFYTTSAVKELHGEFKTTACGRCISGMFVFLTYVLGVAWLGVFGFSAVPVFMFYNIWSTCEVIKSPQTNGTTGVEQICVDIRQYGIIPWNAFPGKICGSALENICNTNEFYMSYHLFIVACAGAGATVIALVSNGPKT

SEQ ID NO: 826382 - protein, 321 aa, Homo sapiens; identical to SEQ ID NO: 826370

SEQ ID NO: 826383 - protein, 265 aa, Homo sapiens; identical to SEQ ID NO: 826373

SEQ ID NO: 826384 - protein, 265 aa, Homo sapiens; identical to SEQ ID NO: 826373

SEQ ID NO: 826385 - protein, 361 aa, Homo sapiens
PLSARPAPSAGGAAPRSHPGRELGASGQPRAAQRSPQKPGQRTCPRDLQTCATGSARPRGARTPRSPHPSRQSPAMVNSRAEMEIGRYHWMYPGSKNHQYHPVPTLGDRASPLSSPGCFECCIKCLGGVPYASLVATILCFSGVALFCGCGHVALAGTVAILEQHFSTNASDHALLSEVIQLMQYVIYGIASFFFLYGIILLAEGFYTTSAVKELHGEFKTTACGRCISGMFVFLTYVLGVAWLGVFGFSAVPVFMFYNIWSTCEVIKSPQTNGTTGVEQICVDIRQYGIIPWNAFPGKICGSALENICNTNEFYMSYHLFIVACAGAGATVIALLIYMMATTYNYAVLKFKSREDCCTKF

SEQ ID NO: 826386 - protein, 182 aa, Homo sapiens
MLTLLFQIHFLMITVFLYGIILLAEGFYTTSAVKELHGEFKTTACGRCISGMFVFLTYVLGVAWLGVFGFSAVPVFMFYNIWSTCEVIKSPQTNGTTGVEQICVDIRQYGIIPWNAFPGKICGSALENICNTNEFYMSYHLFIVACAGAGATVIALLIYMMATTYNYAVLKFKSREDCCTKF

SEQ ID NO: 826387 - protein, 307 aa, Homo sapiens
RPSEGPAPPPLRWRLLGHLCDEAGTLEVGGARRRCPERPGCFECCIKCLGGVPYASLVATILCFSGVALFCGCGHVALAGTVAILEQHFSTNASDHALLSEVIQLMQYVIYGIASFFFLYGIILLAEGFYTTSAVKELHGEFKTTACGRCISGMFVFLTYVLGVAWLGVFGFSAVPVFMFYNIWSTCEVIKSPQTNGTTGVEQICVDIRQYGIIPWNAFPGKICGSALENICNTNEFYMSYHLFIVACAGAGATVIALIHFLMILSSNWAYLKDASKMQAYQDIKAKEEQELQDIQSRSKEQLNSYT

SEQ ID NO: 826388 - protein, 103 aa, Homo sapiens
MFNRRKDNMILKAFTPAAMSPKIIIIVKLKSYLPMANRKKLSIGSSHHNPHFLHCLLDHSFLVPNSARGELVSSFFFFFKLREALFCVEQLFQNSLVFCFPVA

SEQ ID NO: 826389 - protein, 282 aa, Homo sapiens
SGGKLKARYEAGFATGFPQRGGTGGCRMVKLTAELIEQAAQYTNAVRDRELDLRGYKIPVIENLGATLDQFDAIDFSDNEIRKLDGFPLLRRLKTLLVNNNRICRIGEGLDQALPCLTELILTNNSLVELGDLDPLASLKSLTYLSILRNPVTNKKHYRLYVIYKVPQVRVLDFQKVKLKERQEAEKMFKGKRGAQLAKDIARRSKTFNPGAGLPTDKKKGGPSPGDVEAIKNAIANASTLAEVERLKGLLQSGQIPGRERRSGPTDDGEEEMEEDTVTNGS

SEQ ID NO: 826390 - protein, 286 aa, Homo sapiens
AAWRRGAGHAGTSRWREATGFPQRGGTGGCRMVKLTAELIEQAAQYTNAVRDRELDLRGYKIPVIENLGATLDQFDAIDFSDNEIRKLDGFPLLRRLKTLLVNNNRICRIGEGLDQALPCLTELILTNNSLVELGDLDPLASLKSLTYLSILRNPVTNKKHYRLYVIYKVPQVRVLDFQKVKLKERQEAEKMFKGKRGAQLAKDIARRSKTFNPGAGLPTDKKKGGPSPGDVEAIKNAIANASTLAEVERLKGLLQSGQIPGRERRSGPTDDGEEEMEEDTVTNGS

SEQ ID NO: 826391 - protein, 286 aa, Homo sapiens; identical to SEQ ID NO: 826390

SEQ ID NO: 826392 - protein, 206 aa, Homo sapiens
AAWRRGAGHAGTSRWREATGFPQRGGTGGCRMVKLTAELIEQAAQYTNAVRDRELDLRGYKIPVIENLGATLDQFDAIDFSDNEIRKLDGFPLLRRLKTLLVNNNRICRIGEGLDQALPCLTELILTNNSLVELGDLDPLASLKSLTYLSILRNPVTNKKHYRLYVIYKVPQVRVLDFQKVKLKVSSNLLLVSHYRVVCFSLYFCY

SEQ ID NO: 826393 - protein, 185 aa, Homo sapiens
AAWRRGAGHAGTSRWREATGFPQRGGTGGCRMVKLTAELIEQAAQYTNAVRDRELDLRGYKIPVIENLGATLDQFDAIDFSDNEIRKLDGFPLLRRLKTLLVNNNRICRIGEGLDQALPCLTELILTNNSLVELGDLDPLASLKSLTYLSILRNPVTNKKHYRLYVIYKVPQVRVLDFQKVKLKF

SEQ ID NO: 826394 - protein, 94 aa, Homo sapiens
CCLAAGRGARWDVSLAGGHGLSTARGNGRLQDGQADGGADRAGGAVHQRGARPGAGPPGILRNPVTNKKHYRLYVIYKVPQVRVLDFQKVKLKF

SEQ ID NO: 826395 - protein, 206 aa, Homo sapiens; identical to SEQ ID NO: 826392

SEQ ID NO: 826396 - protein, 231 aa, Homo sapiens
AAWRRGAGHAGTSRWREATGFPQRGGTGGCRMVKLTAELIEQAAQYTNAVRDRELDLRGYKIPVIENLGATLDQFDAIDFSDNEIRKLDGFPLLRRLKTLLVNNNRICRIGEGLDQALPCLTELILTNNSLVELGDLDPLASLKSLTYLSILRNPVTNKKHYRLYVIYKVPQVRVLDFQKVKLKERQEAEKMFKGKRGAQLAKDIARRSKTFNPGAGLPTDKCHSKCFNSG

SEQ ID NO: 826397 - protein, 73 aa, Homo sapiens
LVFWVADTWLKLIIHLHCPLSSRNAIANASTLAEVERLKGLLQSGQIPGRERRSGPTDDGEEEMEEDTVTNGS

SEQ ID NO: 826398 - protein, 286 aa, Homo sapiens; identical to SEQ ID NO: 826390

SEQ ID NO: 826399 - protein, 286 aa, Homo sapiens; identical to SEQ ID NO: 826390

SEQ ID NO: 826400 - protein, 230 aa, Homo sapiens
MLGYKIPVIENLGATLDQFDAIDFSDNEIRKLDGFPLLRRLKTLLVNNNRICRIGEGLDQALPCLTELILTNNSLVELGDLDPLASLKSLTYLSILRNPVTNKKHYRLYVIYKVPQVRVLDFQKVKLKERQEAEKMFKGKRGAQLAKDIARRSKTFNPGAGLPTDKKKGGPSPGDVEAIKNAIANASTLAEVERLKGLLQSGQIPGRERRSGPTDDGEEEMEEDTVTNGS

SEQ ID NO: 826401 - protein, 66 aa, Homo sapiens
SGGKLKAKVRGRVGHGLSTARGNGRLQDGQADGGADRAGGAVHQRGARPGAGPPGVIWTLWHLSNR

SEQ ID NO: 826402 - protein, 203 aa, Homo sapiens
AAWRRGAGHAGTSRWREATGFPQRGGTGGCRMVKLTAELIEQAAQYTNAVRDRELDLRGYKIPVIENLGATLDQFDAIDFSDNEIRKLDGFPLLRRLKTLLVNNNRICRIGEGLDQALPCLTELILTNNSLVELGDLDPLASLKSLTYLSILRNPVTNKKHYRLYVIYKVPQVRVLDFQKVKLKVSSNLLLVSHRAWPKTVFI

SEQ ID NO: 826403 - protein, 163 aa, Homo sapiens
AAWRRGAGHAGTSRWREATGFPQRGGTGGCRMVKLTAELIEQAAQYTNAVRDRELDLRGYKIPVIENLGATLDQFDAIDFSDNEIRKLDGFPLLRRLKTLLVNNNRICRIGEGLDQALPCLTELILTNNSLVELVSCTEGKCIWWVGLKVLCASYRKFTKSRK

SEQ ID NO: 826404 - protein, 1220 aa, Homo sapiens
IPAPVSGRPPPGLLAEGKLSGPRPMCRTRLGSHTAASAPARMWLFHTLLCIASLALLAAFNVDVARPWLTPKGGAPFVLSSLLHQDPSTNQTWLLVTSPRTKRTPGPLHRCSLVQDEILCHPVEHVPIPKGRHRGVTVVRSHHGVLICIQVLVRRPHSLSSELTGTCSLLGPDLRPQAQANFFDLENLLDPDARVDTGDCYSNKEGGGEDDVNTARQRRALEKEEEEDKEEEEDEEEEEAGTEIAIILDGSGSIDPPDFQRAKDFISNMMRNFYEKCFECNFALVQYGGVIQTEFDLRDSQDVMASLARVQNITQVGSVTKTASAMQHVLDSIFTSSHGSRRKASKVMVVLTDGGIFEDPLNLTTVINSPKMQGVERFAIGVGEEFKSARTARELNLIASDPDETHAFKVTNYMALDGLLSKLRYNIISMEGTVGDALHYQLAQIGFSAQILDERQVLLGAVGAFDWSGGALLYDTRSRRGRFLNQTAAAAADAEAAQYSYLGYAVAVLHKTCSLSYVAGAPQYKHHGAVFELQKEGREASFLPVLEGEQMGSYFGSELCPVDIDMDGSTDFLLVAAPFYHVHGEEGRVYVYRLSEQDGSFSLARILSGHPGFTNARFGFAMAAMGDLSQDKLTDVAIGAPLEGFGADDGASFGSVYIYNGHWDGLSASPSQRIRASTVAPGLQYFGMSMAGGFDISGDGLADITVGTLGQAVVFRSRPVVRLKVSMAFTPSALPIGFNGVVNVRLCFEISSVTTASESGLREALLNFTLDVDVGKQRRRLQCSDVRSCLGCLREWSSGSQLCEDLLLMPTEGELCEEDCFSNASVKVSYQLQTPEGQTDHPQPILDRYTEPFAIFQLPYEKACKNKLFCVAELQLATTVSQQELVVGLTKELTLNINLTNSGEDSYMTSMALNYPRNLQLKRMQKPPSPNIQCDDPQPVASVLIMNCRIGHPVLKRSSAHVSVVWQLEENAFPNRTADITVTVTNSNERRSLANETHTLQFRHGFVAVLSKPSIMYVNTGQGLSHHKEFLFHVHGENLFGAEYQLQICVPTKLRGLQVAAVKKLTRTQASTVCTWSQERACAYSSVQHVEEWHSVSCVIASDKENVTVAAEISWDHSEELLKDVTELQILGEISFNKSLYEGLNAENHRTKITVVFLKDEKYHSLPIIIKGSVGGLLVLIVILVILFKCGFFKRKYQQLNLESIRKAQLKSENLLEEEN

SEQ ID NO: 826405 - protein, 187 aa, Homo sapiens
SSRPCACAPRQGRGRDGTENWRLGLFSASRSWLSFQASTVCTWSQERACAYSSVQHVEEWHSVSCVIASDKENVTVAAEISWDHSEELLKDVTELQILGEISFNKSLYEGLNAENHRTKITVVFLKDEKYHSLPIIIKGSVGGLLVLIVILVILFKCGFFKRKYQQLNLESIRKAQLKSENLLEEEN

SEQ ID NO: 826406 - protein, 123 aa, Homo sapiens
SSRPCACAPRQGRGRDGTENWRLGLFSASRSWLSFQASTVCTWSQERACAYSSVQITVVFLKDEKYHSLPIIIKGSVGGLLVLIVILVILFKCGFFKRKYQQLNLESIRKAQLKSENLLEEEN

SEQ ID NO: 826407 - protein, 155 aa, Homo sapiens
SSRPCACAPRQGRGRDGTENWRLGLFSASRSWLSFQASTVCTWSQERACAYSSVQLLKDVTELQILGEISFNKSLYEGLNAENHRTKITVVFLKDEKYHSLPIIIKGSVGGLLVLIVILVILFKCGFFKRKYQQLNLESIRKAQLKSENLLEEEN

SEQ ID NO: 826408 - protein, 155 aa, Homo sapiens; identical to SEQ ID NO: 826407

SEQ ID NO: 826409 - protein, 1129 aa, Homo sapiens
IPAPVSGRPPPGLLAEGKLSGPRPMCRTRLGSHTAASAPARMWLFHTLLCIASLALLAAFNVDVARPWLTPKGGAPFVLSSLLHQDPSTNQTWLLVTSPRTKRTPGPLHRCSLVQDEILCHPVEHVPIPKGRHRGVTVVRSHHGVLICIQVLVRRPHSLSSELTGTCSLLGPDLRPQAQANFFDLENLLDPDARVDTGDCYSNKEGGGEDDVNTARQRRALEKEEEEDKEEEEDEEEEEAGTEIAIILDGSGSIDPPDFQRAKDFISNMMRNFYEKCFECNFALVQYGGVIQTEFDLRDSQDVMASLARVQNITQVGSVTKTASAMQHVLDSIFTSSHGSRRKASKVMVVLTDGGIFEDPLNLTTVINSPKMQGVERFAIGVGEEFKSARTARELNLIASDPDETHAFKVTNYMALDGLLSKLRYNIISMEGTVGDALHYQLAQIGFSAQILDERQVLLGAVGAFDWSGGALLYDTRSRRGRFLNQTAAAAADAEAAQYSYLGYAVAVLHKTCSLSYVAGAPQYKHHGAVFELQKEGREASFLPVLEGEQMGSYFGSELCPVDIDMDGSTDFLLVAAPFYHVHGEEGRVYVYRLSEQDGSFSLARILSGHPGFTNARFGFAMAAMGDLSQDKLTDVAIGAPLEGFGADDGASFGSVYIYNGHWDGLSASPSQRIRASTVAPGLQYFGMSMAGGFDISGDGLADITVGTLGQAVVFRSRPVVRLKVSMAFTPSALPIGFNGVVNVRLCFEISSVTTASESGLREALLNFTLDVDVGKQRRRLQCSDVRSCLGCLREWSSGSQLCEDLLLMPTEGELCEEDCFSNASVKVSYQLQTPEGQTDHPQPILDRYTEPFAIFQLPYEKACKNKLFCVAELQLATTVSQQELVVGLTKELTLNINLTNSGEDSYMTSMALNYPRNLQLKRMQKAHVSVVWQLEENAFPNRTADITVTVTKPSIMYVNTGQGLSHHKEFLFHVHGENLFGAEYQLQICVPTKLRGLQVAAVKKLTRTQASTVCTWSQERACAYSSVQLLKDVTELQILGEISFNKSLYEGLNAENHRTKITVVFLKDEKYHSLPIIIKGSVGGLLVLIVILVILFKCGFFKRKYQQLNLESIRKAQLKSENLLEEEN

SEQ ID NO: 826410 - protein, 167 aa, Homo sapiens
MPLHQISAIPSQDAISARVYRSKTKEKEREEQNEKTLGHFMSHSSNISKAGSPPSASAPAPVSSFSRTSITPSSQDICSSSAVFSECCHHSSVQSAVVSKAPHCQSSLTQGLTVTVICKDTLQASKRNSFGSEWAQALKPAKNTKARRTLKFSRSLNDVGEKAQDTS

SEQ ID NO: 826411 - protein, 167 aa, Homo sapiens; identical to SEQ ID NO: 826410

SEQ ID NO: 826412 - protein, 289 aa, Homo sapiens [sequence omitted]

SEQ ID NO: 826413 - protein, 276 aa, Homo sapiens
MPLHQISAIPSQDAISARVYRSKTKEKEREEQNEKTLGHFMSHSSNISKAGSPPSASAPAPVSSFSRTSITPSSQDICRICHCEGDDESPLITPCHCTGSLHFVHQACLQQWIKSSDTRCCELCKYEFIMETKLKPLRKWEKLQMTSSERRKIMCSVTFHVIAITCVVWSLYVLIDRTAEEIKQGQATGILEWPFWILFMYVQCKVYVQLWKRLKAYNRVIYVQNCPETSKKNIFEKSPLTEPNFENKHGYGICHSDTNSSCCTEPEDTGAEIIHV

SEQ ID NO: 826414 - protein, 289 aa, Homo sapiens [sequence omitted]

SEQ ID NO: 826415 - protein, 289 aa, Homo sapiens [sequence omitted]

SEQ ID NO: 826416 - protein, 212 aa, Homo sapiens
MRICHCEGDDESPLITPCHCTGSLHFVHQACLQQWIKSSDTRCCELCKYEFIMETKLKPLRKWEKLQMTSSERRKIMCSVTFHVIAITCVVWSLYVLIDRTAEEIKQGQATGILEWPFWTKLVVVAIGFTGGLLFMYVQCKVYVQLWKRLKAYNRVIYVQNCPETSKKNIFEKSPLTEPNFENKHGYGICHSDTNSSCCTEPEDTGAEIIHV

SEQ ID NO: 826417 - protein, 67 aa, Homo sapiens
PRRGSATPGSGSLCPGARVCPWGRAERNQESQKRSAPRALGRPPRVPGEFLSLTGCETLARQPSSLA

SEQ ID NO: 826418 - protein, 186 aa, Homo sapiens
PLGVLPRRGVGCKQATRWGRCGLAASTSRACSRRARAVAPPAQSPPEVTPAASRIGVPHAARSRRRWPPIRAAEPPARAGGVAAGSASATGGLGWAGLGWAGWGRPPRTHPCAAGPAWSPRRGSATPGSGSLCPGARVCPWGRAERNQESQKRSAPRALGRPPRVPGEFLSLTGCETLARQPSSLA

SEQ ID NO: 826419 - protein, 212 aa, Homo sapiens; identical to SEQ ID NO: 826416

SEQ ID NO: 826420 - protein, 289 aa, Homo sapiens [sequence omitted]

SEQ ID NO: 826421 - protein, 289 aa, Homo sapiens [sequence omitted]

SEQ ID NO: 826422 - protein, 145 aa, Homo sapiens [sequence omitted]

SEQ ID NO: 826423 - protein, 155 aa, Homo sapiens
RRKLQPGSLRGRFRPTLTWRRPLSALECRPRPSRGRDAPPSAVGSGTWQVMSRTRGAKLEFTQANCQKRVAWAVWKSELDANSLAQHVRIHTAQALVMFQTDADFYQQYGPGGTWPAGQVLQAGELVFRPRDGAEGQPALAETSPTAPECPPPAE

SEQ ID NO: 826424 - protein, 241 aa, Homo sapiens
MDFPQHSQHVLEQLNQQRQLGLLCDCTFVVDGVHFKAHKAVLAACSEYFKMLFVDQKDVVHLDISNAAGLGQVLEFMYTAKLSLSPENVDDVLAVATFLQMQDIITACHALKSLAEPATSPGGNAEALATEGGDKRAKEEKVATSTLSRLEQAGRSTPIGPSRDLKEERGGQAQSAASGESDAKDPAGCPVTSQQPGHRVVRAALGQVARAPAPLEPVLPRMTYCVFQGVCFNQSRHNSLG

SEQ ID NO: 826425 - protein, 810 aa, Homo sapiens
MDFPQHSQHVLEQLNQQRQLGLLCDCTFVVDGVHFKAHKAVLAACSEYFKMLFVDQKDVVHLDISNAAGLGQVLEFMYTAKLSLSPENVDDVLAVATFLQMQDIITACHALKSLAEPATSPGGNAEALATEGGDKRAKEEKVATSTLSRLEQAGRSTPIGPSRDLKEERGGQAQSAASGAEQTEKADAPREPPPVELKPDPTSGMAAAEAEAALSESSEQEMEVEPARKGEEEQKEQEEQEEEGAGPAEVKEEGSQLENGEAPEENENEESAGTDSGQELGSEARGLRSGTYGDRTESKAYGSVIHKCEDCGKEFTHTGNFKRHIRIHTGEKPFSCRECSKAFSDPAACKAHEKTHSPLKPYGCEECGKSYRLISLLNLHKKRHSGEARYRCEDCGKLFTTSGNLKRHQLVHSGEKPYQCDYCGRSFSDPTSKMRHLETHDTDKEHKCPHCDKKFNQVGNLKAHLKIHIADGPLKCRECGKQFTTSGNLKRHLRIHSGEKPYVCIHCQRQFADPGALQRHVRIHTGEKPCQCVMCGKAFTQASSLIAHVRQHTGEKPYVCERCGKRFVQSSQLANHIRHHDNIRPHKCSVCSKAFVNVGDLSKHIIIHTGEKPYLCDKCGRGFNRVDNLRSHVKTVHQGKAGIKILEPEEGSEVSVVTVDDMVTLATEALAATAVTQLTGPATLPAVVPVGAAVTADETEVLKAEISKAVKQVQEEDPNTHILYACDSCGDKFLDANSLAQHVRIHTAQALVMFQTDADFYQQYGPGGTWPAGQVLQAGELVFRPRDGAEGQPALAETSPTAPECPPPAE

SEQ ID NO: 826426 - protein, 810 aa, Homo sapiens
MDFPQHSQHVLEQLNQQRQLGLLCDCTFVVDGVHFKAHKAVLAACSEYFKMLFVDQKDVVHLDISNAAGLGQVLEFMYTAKLSLSPENVDDVLAVATFLQMQDIITACHALKSLAEPATSPGGNAEALATEGCPVPSPGGDKRAKEEKVATSTLSRLEQAGRSTPIGPSRDLKEERGGQAQSAASGAEQTEKADAPREPPPVELKPDPTSGMAAAEAEAALSESSEQEMEVEPARKGEEEQKEQEEQEEEGAGPAEVKEEGSQLENGEAPEENENEESAGTDSGQELGSEARGLRSGTYGDRTESKAYGSVIHKCEDCGKEFTHTGNFKRHIRIHTGEKPFSCRECSKAFSDPAACKAHEKTHSPLKPYGCEECGKSYRLISLLNLHKKRHSGEARYRCEDCGKLFTTSGNLKRHQLVHSGEKPYQCDYCGRSFSDPTSKMRHLETHDTDKEHKCPHCDKKFNQVGNLKAHLKIHIADGPLKCRECGKQFTTSGNLKRHLRIHSGEKPYVCIHCQRQFADPGALQRHVRIHTGEKPCQCVMCGKAFTQASSLIAHVRQHTGEKPYVCERCGKRFVQSSQLANHIRHHDNIRPHKCSVCSKAFVNVGDLSKHIIIHTGEKPYLCDKCGRGFNRVDNLRSHVKTVHQGKAGIKILEPEEGSEVSVVTVDDMVTLATEALAATAVTQLTVVPVGAAVTADETEVLKAEISKAVKQVQEEDPNTHILYACDSCGDKFLDANSLAQHVRIHTAQALVMFQTDADFYQQYGPGGTWPAGQVLQAGELVFRPRDGAEGQPALAETSPTAPECPPPAE

SEQ ID NO: 826427 - protein, 459 aa, Homo sapiens
MDFPQHSQHVLEQLNQQRQLGLLCDCTFVVDGVHFKAHKAVLAACSEYFKMLFVDQKDVVHLDISNAAGLGQVLEFMYTAKLSLSPENVDDVLAVATFLQMQDIITACHALKSLAEPATSPGGNAEALATEGGDKRAKEEKVATSTLSRLEQAGRSTPIGPSRDLKEERGGQAQSAASGAEQTEKADAPREPPPVELKPDPTSGMAAAEAEAALSESSEQEMEVEPARKGEEEQKEQEEQEEEGAGPAEVKEEGSQLENGEAPEENENEESAGTDSGQELGSEARGLRSGTYGDRTESKAYGSVIHKCEDCGKEFTHTGNFKRHIRIHTGEKPFSCRECSKAFSDPAACKAHEKTHSPLKPYGCEECGKSYRLISLLNLHKKRHSGEARYRCEDCGKLFTTSGNLKRHQLVHSGEKPYQCDYCGRSFSDPTSKMRHLETHDTDKEHKCPHCDKKFNQGT

SEQ ID NO: 826428 - protein, 740 aa, Homo sapiens
MDFPQHSQHVLEQLNQQRQLGLLCDCTFVVDGVHFKAHKAVLAACSEYFKMLFVDQKDVVHLDISNAAGGDKRAKEEKVATSTLSRLEQAGRSTPIGPSRDLKEERGGQAQSAASGAEQTEKADAPREPPPVELKPDPTSGMAAAEAEAALSESSEQEMEVEPARKGEEEQKEQEEQEEEGAGPAEVKEEGSQLENGEAPEENENEESAGTDSGQELGSEARGLRSGTYGDRTESKAYGSVIHKCEDCGKEFTHTGNFKRHIRIHTGEKPFSCRECSKAFSDPAACKAHEKTHSPLKPYGCEECGKSYRLISLLNLHKKRHSGEARYRCEDCGKLFTTSGNLKRHQLVHSGEKPYQCDYCGRSFSDPTSKMRHLETHDTDKEHKCPHCDKKFNQVGNLKAHLKIHIADGPLKCRECGKQFTTSGNLKRHLRIHSGEKPYVCIHCQRQFADPGALQRHVRIHTGEKPCQCVMCGKAFTQASSLIAHVRQHTGEKPYVCERCGKRFVQSSQLANHIRHHDNIRPHKCSVCSKAFVNVGDLSKHIIIHTGEKPYLCDKCGRGFNRVDNLRSHVKTVHQGKAGIKILEPEEGSEVSVVTVDDMVTLATEALAATAVTQLTVVPVGAAVTADETEVLKAEISKAVKQVQEEDPNTHILYACDSCGDKFLDANSLAQHVRIHTAQALVMFQTDADFYQQYGPGGTWPAGQVLQAGELVFRPRDGAEGQPALAETSPTAPECPPPAE

SEQ ID NO: 826429 - protein, 516 aa, Homo sapiens
TADGAAPTARVQAYGSVIHKCEDCGKEFTHTGNFKRHIRIHTGEKPFSCRECSKAFSDPAACKAHEKTHSPLKPYGCEECGKSYRLISLLNLHKKRHSGEARYRCEDCGKLFTTSGNLKRHQLVHSGEKPYQCDYCGRSFSDPTSKMRHLETHDTDKEHKCPHCDKKFNQVGNLKAHLKIHIADGPLKCRECGKQFTTSGNLKRHLRIHSGEKPYVCIHCQRQFADPGALQRHVRIHTGEKPCQCVMCGKAFTQASSLIAHVRQHTGEKPYVCERCGKRFVQSSQLANHIRHHDNIRPHKCSVCSKAFVNVGDLSKHIIIHTGEKPYLCDKCGRGFNRVDNLRSHVKTVHQGKAGIKILEPEEGSEVSVVTVDDMVTLATEALAATAVTQLTVVPVGAAVTADETEVLKAEISKAVKQVQEEDPNTHILYACDSCGDKFLDANSLAQHVRIHTAQALVMFQTDADFYQQYGPGGTWPAGQVLQAGELVFRPRDGAEGQPALAETSPTAPECPPPAE

SEQ ID NO: 826430 - protein, 247 aa, Homo sapiens
HASPFLWPHRFVQSSQLANHIRHHDNIRPHKCSVCSKAFVNVGDLSKHIIIHTGEKPYLCDKCGRGFNRVDNLRSHVKTVHQGKAGIKILEPEEGSEVSVVTVDDMVTLATEALAATAVTQLTVVPVGAAVTADETEVLKAEISKAVKQVQEEDPNTHILYACDSCGDKFLDANSLAQHVRIHTAQALVMFQTDADFYQQYGPGGTWPAGQVLQAGELVFRPRDGAEGQPALAETSPTAPECPPPAE

SEQ ID NO: 826431 - protein, 92 aa, Homo sapiens
RRKLQPGSLRGRFRPTLTWRRPLSALECRPRPSRGRDAPPSAVGSGTWQVMSRTRGAKLEFTQANCQKRVAWAVWKSEPWTFPSTASMSWNS

SEQ ID NO: 826432 - protein, 122 aa, Homo sapiens
MDFPQHSQHVLEQLNQQRQLGLLCDCTFVVDGVHFKAHKAVLAACSEYFKMLFVDQKDVVHLDISNAAGLGQVLEFMYTAKWPAGQVLQAGELVFRPRDGAEGQPALAETSPTAPECPPPAE

SEQ ID NO: 826433 - protein, 120 aa, Homo sapiens
RAGPGEVSDPWAEGSNPASGASPTQVQSRQRKPMRPGSRRLWSSSQTPRVAWLLQKLRPLCPRARSKVAPPSQDQALPGASSQGPASTAHWGLPLLLPPASPTWSHHALQLWDTLVFACS

SEQ ID NO: 826434 - protein, 803 aa, Homo sapiens
MDFPQHSQHVLEQLNQQRQLGLLCDCTFVVDGVHFKAHKAVLAACSEYFKMLFVDQKDVVHLDISNAAGLGQVLEFMYTAKLSLSPENVDDVLAVATFLQMQDIITACHALKSLAEPATSPGGNAEALATEGGDKRAKEEKVATSTLSRLEQAGRSTPIGPSRDLKEERGGQAQSAASGAEQTEKADAPREPPPVELKPDPTSGMAAAEAEAALSESSEQEMEVEPARKGEEEQKEQEEQEEEGAGPAEVKEEGSQLENGEAPEENENEESAGTDSGQELGSEARGLRSGTYGDRTESKAYGSVIHKCEDCGKEFTHTGNFKRHIRIHTGEKPFSCRECSKAFSDPAACKAHEKTHSPLKPYGCEECGKSYRLISLLNLHKKRHSGEARYRCEDCGKLFTTSGNLKRHQLVHSGEKPYQCDYCGRSFSDPTSKMRHLETHDTDKEHKCPHCDKKFNQVGNLKAHLKIHIADGPLKCRECGKQFTTSGNLKRHLRIHSGEKPYVCIHCQRQFADPGALQRHVRIHTGEKPCQCVMCGKAFTQASSLIAHVRQHTGEKPYVCERCGKRFVQSSQLANHIRHHDNIRPHKCSVCSKAFVNVGDLSKHIIIHTGEKPYLCDKCGRGFNRVDNLRSHVKTVHQGKAGIKILEPEEGSEVSVVTVDDMVTLATEALAATAVTQLTVVPVGAAVTADETEVLKAEISKAVKQVQEEDPNTHILYACDSCGDKFLDANSLAQHVRIHTAQALVMFQTDADFYQQYGPGGTWPAGQVLQAGELVFRPRDGAEGQPALAETSPTAPECPPPAE

SEQ ID NO: 826435 - protein, 803 aa, Homo sapiens; identical to SEQ ID NO: 826434

SEQ ID NO: 826436 - protein, 938 aa, Homo sapiens
MDFPQHSQHVLEQLNQQRQLGLLCDCTFVVDGVHFKAHKAVLAACSEYFKMLFVDQKDVVHLDISNAAGLGQVLEFMYTAKLSLSPENVDDVLAVATFLQMQDIITACHALKSLAEPATSPGGNAEALATEGGDKRAKEEKVATSTLSRLEQAGRSTPIGPSRDLKEERGGQAQSAASGAEQTEKADAPREPPPVELKPDPTSGMAAAEAEAALSESSEQEMEVEPARKGEEEQKEQEEQEEEGAGPAEVKEEGSQLENGEAPEENENEESAGTDSGQELGSEARGLRSGTYGDRTESKAYGSVIHKCEDCGKEFTHTGNFKRHIRIHTGEKPFSCRECSKAFSDPAACKAHEKTHSPLKPYGCEECGKSYRLISLLNLHKKRHSGEARYRCEDCGKLFTTSGNLKRHQLVHSGEKPYQCDYCGRSFSDPTSKMRHLETHDTDKEHKCPHCDKKFNQVCGPLPEPAPGSRRWPQPHACHVVGRAGSTAPASRSSSACSPRKQAQREPLPRGSSRLLCGGQADSGRGLVLKKWGGAAYLSPLGPGTSPDPGEIEPFTDPGKPESQLFLCEEGQVRGPGAELCGVAPLTPPWAQVGNLKAHLKIHIADGPLKCRECGKQFTTSGNLKRHLRIHSGEKPYVCIHCQRQFADPGALQRHVRIHTGEKPCQCVMCGKAFTQASSLIAHVRQHTGEKPYVCERCGKRFVQSSQLANHIRHHDNIRPHKCSVCSKAFVNVGDLSKHIIIHTGEKPYLCDKCGRGFNRVDNLRSHVKTVHQGKAGIKILEPEEGSEVSVVTVDDMVTLATEALAATAVTQLTVVPVGAAVTADETEVLKAEISKAVKQVQEEDPNTHILYACDSCGDKFLDANSLAQHVRIHTAQALVMFQTDADFYQQYGPGGTWPAGQVLQAGELVFRPRDGAEGQPALAETSPTAPECPPPAE

SEQ ID NO: 826437 - protein, 834 aa, Homo sapiens
MDFPQHSQHVLEQLNQQRQLGLLCDCTFVVDGVHFKAHKAVLAACSEYFKMLFVDQKDVVHLDISNAAGLGQVLEFMYTAKLSLSPENVDDVLAVATFLQMQDIITACHALKSLAEPATSPGGNAEALATEGGDKRAKEEKVATSTLSRLEQAGRSTPIGPSRDLKEERGGQAQSAASGAEQTEKADAPREPPPVELKPDPTSGMAAAEAEAALSESSEQEMEVEPARKGEEEQKEQEEQEEEGAGPAEVKEEGSQLENGEAPEENENEESAGTDSGQELGSEARGLRSGTYGDRTESKAYGSVIHKCEDCGKEFTHTGNFKRHIRIHTGEKPFSCRECSKAFSDPAACKAHEKTHSPLKPYGCEECGKSYRLISLLNLHKKRHSGEARYRCEDCGKLFTTSGNLKRHQLVHSGEKPYQCDYCGRSFSDPTSKMRHLETHDTDKEHKCPHCDKKFNQVGNLKAHLKIHIADGPLKCRECGKQFTTSGRARAALAALTPLLLGHRWCPTPGSPSVIATGNLKRHLRIHSGEKPYVCIHCQRQFADPGALQRHVRIHTGEKPCQCVMCGKAFTQASSLIAHVRQHTGEKPYVCERCGKRFVQSSQLANHIRHHDNIRPHKCSVCSKAFVNVGDLSKHIIIHTGEKPYLCDKCGRGFNRVDNLRSHVKTVHQGKAGIKILEPEEGSEVSVVTVDDMVTLATEALAATAVTQLTVVPVGAAVTADETEVLKAEISKAVKQVQEEDPNTHILYACDSCGDKFLDANSLAQHVRIHTAQALVMFQTDADFYQQYGPGGTWPAGQVLQAGELVFRPRDGAEGQPALAETSPTAPECPPPAE

SEQ ID NO: 826438 - protein, 727 aa, Homo sapiens
MYTAKLSLSPENVDDVLAVATFLQMQDIITACHALKSLAEPATSPGGNAEALATEGGDKRAKEEKVATSTLSRLEQAGRSTPIGPSRDLKEERGGQAQSAASGAEQTEKADAPREPPPVELKPDPTSGMAAAEAEAALSESSEQEMEVEPARKGEEEQKEQEEQEEEGAGPAEVKEEGSQLENGEAPEENENEESAGTDSGQELGSEARGLRSGTYGDRTESKAYGSVIHKCEDCGKEFTHTGNFKRHIRIHTGEKPFSCRECSKAFSDPAACKAHEKTHSPLKPYGCEECGKSYRLISLLNLHKKRHSGEARYRCEDCGKLFTTSGNLKRHQLVHSGEKPYQCDYCGRSFSDPTSKMRHLETHDTDKEHKCPHCDKKFNQVGNLKAHLKIHIADGPLKCRECGKQFTTSGNLKRHLRIHSGEKPYVCIHCQRQFADPGALQRHVRIHTGEKPCQCVMCGKAFTQASSLIAHVRQHTGEKPYVCERCGKRFVQSSQLANHIRHHDNIRPHKCSVCSKAFVNVGDLSKHIIIHTGEKPYLCDKCGRGFNRVDNLRSHVKTVHQGKAGIKILEPEEGSEVSVVTVDDMVTLATEALAATAVTQLTVVPVGAAVTADETEVLKAEISKAVKQVQEEDPNTHILYACDSCGDKFLDANSLAQHVRIHTAQALVMFQTDADFYQQYGPGGTWPAGQVLQAGELVFRPRDGAEGQPALAETSPTAPECPPPAE

SEQ ID NO: 826439 - protein, 240 aa, Homo sapiens
MDFPQHSQHVLEQLNQQRQLGLLCDCTFVVDGVHFKAHKAVLAACSEYFKMLFVDQKDVVHLDISNAAGLGQVLEFMYTAKLSLSPENVDDVLAVATFLQMQDIITACHALKSLAEPATSPGGNAEALATEGGDKRAKEEKVATSTLSRLEQAGRSTPIGPSRDLKEERGGQAQSAASGAEQTEKADAPREPPPVELKPDPTSGMAAAEAEAALSESSEQVACRAGAAGWGAGLPPSRRG

SEQ ID NO: 826440 - protein, 274 aa, Homo sapiens
MDFPQHSQHVLEQLNQQRQLGLLCDCTFVVDGVHFKAHKAVLAACSEYFKMLFVDQKDVVHLDISNAAGLGQVLEFMYTAKLSLSPENVDDVLAVATFLQMQDIITACHALKSLAEPATSPGGNAEALATEGGDKRAKEEKVATSTLSRLEQAGRSTPIGPSRDLKEERGGQAQSAASGESDAKDPAGCPVTSQQPGHRVVRAALGQVARAPAPLEPVLPRMTYCVFQGVCFNQSTGHVPDRRGLLSAVWARWHVACRAGAAGWGAGLPPSRRG

SEQ ID NO: 826441 - protein, 118 aa, Homo sapiens
MLLLYLEEKPRQGYNEDNSERRSTVRWNFWIARRMRLSMGALLARTLRMRRKLQPGSLRGRFRPTLTWRRPLSALECRPRPSRGRDAPPSAVGSGTWQVSVNNRPGPGKSREPGRRRR

SEQ ID NO: 826442 - protein, 204 aa, Homo sapiens
MTGLALLYSGVFVAFWACALAVGVCYTIFDLGFRFDVAWFLTETSPFMWSNLGIGLAISLSVVGAAWGIYITGSSIIGGGVKAPRIKTKNLVSIIFCEAVAIYGIIMAIVISNMAEPFSATDPKAIGHRNYHAGYSMFGAGLTVGLSNLFCGVCVGIVGSGAALADAQNPSLFVKILIVEIFGSAIGLFGVIVAILQDLQSEDG

SEQ ID NO: 826443 - protein, 177 aa, Homo sapiens
ELNCFLLCFHNRFLTETSPFMWSNLGIGLAISLSVVGAAWGIYITGSSIIGGGVKAPRIKTKNLVSIIFCEAVAIYGIIMAIVISNMAEPFSATDPKAIGHRNYHAGYSMFGAGLTVGLSNLFCGVCVGIVGSGAALADAQNPSLFVKILIVEIFGSAIGLFGVIVAILQDLQSEDG

SEQ ID NO: 826444 - protein, 204 aa, Homo sapiens; identical to SEQ ID NO: 826442

SEQ ID NO: 826445 - protein, 204 aa, Homo sapiens; identical to SEQ ID NO: 826442

SEQ ID NO: 826446 - protein, 204 aa, Homo sapiens; identical to SEQ ID NO: 826442

SEQ ID NO: 826447 - protein, 204 aa, Homo sapiens; identical to SEQ ID NO: 826442

SEQ ID NO: 826448 - protein, 157 aa, Homo sapiens
MWSNLGIGLAISLSVVGAAWGIYITGSSIIGGGVKAPRIKTKNLVSIIFCEAVAIYGIIMAIVISNMAEPFSATDPKAIGHRNYHAGYSMFGAGLTVGLSNLFCGVCVGIVGSGAALADAQNPSLFVKILIVEIFGSAIGLFGVIVAILQDLQSEDG

SEQ ID NO: 826449 - protein, 157 aa, Homo sapiens; identical to SEQ ID NO: 826448

SEQ ID NO: 826450 - protein, 69 aa, Homo sapiens
VVPAHHVGELGDAAGRADRLRDGRWTLGRVCSSGPAVPTPAAVAAMTGLALLYSGVFVAFWACALAVGS

SEQ ID NO: 826451 - protein, 272 aa, Homo sapiens
MTGLALLYSGVFVAFWACALAVGVCYTIFDLGFRFDVAWFLTETSPFMWSNLGIGLAISLSVVGAAWGIYITGSSIIGGGVKAPRIKTKNLVSIIFCEAVAIYGIIMAIVISNMAEPFSATDPKAIGHRNYHAGYSMFGAGLTVGLSNLFCGVCVGIVGSGAALADAQNPSLFVKILIVEIFGSAIGLFGVIVAILQVMNPLGKPLCPCPQPSLTLLLEKLKCSPSLPITIDSPKQLPPPHFHLLVFSYRGLSIFVSDLVSLTTALFFFPPF

SEQ ID NO: 826452 - protein, 120 aa, Homo sapiens
MTGLALLYSGVFVAFWACALAVGEAGSWRAGAASRPSWPGRNSAGKWPAGNTGPPRALHPRLWGLAPARASDSDKGDPDFQLLEEGCGRVGAARAALPRPATIAVSPRSHVSLLSPLSCS

SEQ ID NO: 826453 - protein, 204 aa, Homo sapiens; identical to SEQ ID NO: 826442

SEQ ID NO: 826454 - protein, 158 aa, Homo sapiens
TTTKFAASTRSYLPVCGWGSLGIYITGSSIIGGGVKAPRIKTKNLVSIIFCEAVAIYGIIMAIVISNMAEPFSATDPKAIGHRNYHAGYSMFGAGLTVGLSNLFCGVCVGIVGSGAALADAQNPSLFVKILIVEIFGSAIGLFGVIVAILQDLQSEDG

SEQ ID NO: 826455 - protein, 164 aa, Homo sapiens
MTGLALLYSGVFVAFWACALAVGVCYTIFDLGFRFDVAWFLTETSPFMWSNLGIGLAISLSVVGAAWGIYITGSSIIGGGVKAPRIKTKNLVSIIFCEAVAIYGIIMAIVISNMAEPFSATDPKAIGHRNYHAGYSMFGAGLTVGLSNLFCGVCVGIDLQSEDG

SEQ ID NO: 826456 - protein, 804 aa, Homo sapiens
MEEPGATPQPYLGLLLEELRRVVAALPEGMRPDSNLYGFPWELVICAAVVGFFAVLFFLWRSFRSVRSRLYVGREKKLALMLSGLIEEKSKLLEKFSLVQKEYEGYEVESSLKDASFEKEATEAQSLEATCEKLNRSNSELEDEILCLEKELKEEKSKHSEQDELMADISKRIQSLEDESKSLKSQVAEAKMTFKIFQMNEERLKIAIKDALNENSQLQESQKQLLQEAEVWKEQVSELNKQKVTFEDSKVHAEQVLNDKESHIKTLTERLLKMKDWAAMLGEDITDDDNLELEMNSESENGAYLDNPPKGALKKLIHAAKLNASLKTLEGERNQIYIQLSEVDKTKEELTEHIKNLQTEQASLQSENTHFENENQKLQQKLKVMTELYQENEMKLHRKLTVEENYRLEKEEKLSKVDEKISHATEELETYRKRAKDLEEELERTIHSYQGQIISHEKKAHDNWLAARNAERNLNDLRKENAHNRQKLTETELKFELLEKDPYALDVPNTAFGREHSPYGPSPLGWPSSETRAFLSPPTLLEGPLRLSPLLPGGGGRGSRGPGNPLDHQITNERGESSCDRLTDPHRAPSDTGSLSPPWDQDRRMMFPPPGQSYPDSALPPQRQDRFCSNSGRLSGPAELRSFNMPSLDKMDGSMPSEMESSRNDTKDDLGNLNVPDSSLPAENEATGPGFVPPPLAPVRGPLFPVDARGPFLRRGPPFPPPPPGAMFGASRDYFPPGDFPGPPPAPFAMRNVYPPRGFPPYLPPRPGFFPPPPHSEGRSEFPSGLIPPSNEPATEHPEPQQET

SEQ ID NO: 826457 - protein, 780 aa, Homo sapiens
MTAAAGFSGLPGSPGVVAALPEGMRPDSNLYGFPWELVICAAVVGFFAVLFFLWRSFRSVRSRLYVGREKKLALMLSGLIEEKSKLLEKFSLVQKEYEGYEVESSLKDASFEKEATEAQSLEATCEKLNRSNSELEDEILCLEKELKEEKSKHSEQDELMADISKRIQSLEDESKSLKSQVAEAKMTFKIFQMNEERLKIAIKDALNGKEQVSELNKQKVTFEDSKVHAEQVLNDKESHIKTLTERLLKMKDWAAMLGEDITDDDNLELEMNSESENGAYLDNPPKGALKKLIHAAKLNASLKTLEGERNQIYIQLSEVDKTKEELTEHIKNLQTEQASLQSENTHFENENQKLQQKLKVMTELYQENEMKLHRKLTVEENYRLEKEEKLSKVDEKISHATEELETYRKRAKDLEEELERTIHSYQGQIISHEKKAHDNWLAARNAERNLNDLRKENAHNRQKLTETELKFELLEKDPYALDVPNTAFGREHSPYGPSPLGWPSSETRAFLSPPTLLEGPLRLSPLLPGGGGRGSRGPGNPLDHQITNERGESSCDRLTDPHRAPSDTGSLSPPWDQDRRMMFPPPGQSYPDSALPPQRQDRFCSNSGRLSGPAELRSFNMPSLDKMDGSMPSEMESSRNDTKDDLGNLNVPDSSLPAENEATGPGFVPPPLAPVRGPLFPVDARGPFLRRGPPFPPPPPGAMFGASRDYFPPGDFPGPPPAPFAMRNVYPPRGFPPYLPPRPGFFPPPPHSEGRSEFPSGLIPPSNEPATEHPEPQQET

SEQ ID NO: 826458 - protein, 792 aa, Homo sapiens [sequence omitted]

SEQ ID NO: 826459 - protein, 735 aa, Homo sapiens
MTAAAGFSGLPGSPGVVAALPEGMRPDSNLYGFPWELVICAAVVGFFAVLFFLWRSFRSVRSRLYVGREKKLALMLSGLIEEKSKLLEKFSLVQKEYEGYEVESSLKDASFEKEATEAQSLEATCEKLNRSNSELEDEILCLEKELKEEKSKHSEQDELMADISKRIQSLEDESKSLKSQVAEAKMTFKIFQMNEERLKIAIKDALNENSQLQESQKQLLQEAEVWKEQVSELNKQKVTFEDSKVHAEQVLNDKESHIKTLTERLLKMKDWAAMLGEDITDDDNLELEMNSESENGAYLDNPPKGALKKLIHAAKLNASLKTLEGERNQIYIQLSEVDKTKEELTEHIKNLQTEQASLQSENTHFENENQKLQQKLKVMTELYQENEMKLHRKLTVEENYRLEKEEKLSKVDEKISHATEELETYRKRAKDLEEELERTIHSYQGQIISHEKKAHDNWLAARNAERNLNDLRKENAHNRQKLTETELKFELLEKDPYALDVPNTAFGREHSPYGPSPLGWPSSETRAFLSPPTLLEGPLRLSPLLPGGGGRGSRGPGNPLDHQITNERGESSCDRLTDPHRAPSDTGSLSPPWDQDRRMMFPPPGQSYPDSALPPQRQDRFCSNSGRLSGPAELRSFNMPSLDKMDGSMPSEMESSRNDTKDDLGNLNVPDSSLPAENEATGPGFVPPPLAPVRGPLFPVDARGPFLRRGPPFPPPPPGAMFGVPPRWREGSGQL

SEQ ID NO: 826460 - protein, 761 aa, Homo sapiens
MEEPGATPQPYLGLLLEELRRVVAALPEGMRPDSNLYGFPWELVICAAVVGFFAVLFFLWRSFRSVRSRLYVGREKKLALMLSGLIEEKSKLLEKFSLVQKEYEGYEVESSLKDASFEKEATEAQSLEATCEKLNRSNSELEDEILCLEKELKEEKSKHSEQDELMADISKRIQSLEDESKSLKSQVAEAKMTFKIFQMNEERLKIAIKDALNENSQLQESQKQLLQEAEVWKEQVSELNKQKVTFEDSKVHAEQVLNDKESHIKTLTERLLKMKDWAAMLGEDITDDDNLELEMNSESENGAYLDNPPKGALKKLIHAAKLNASLKTLEGERNQIYIQLSEVDKTKEELTEHIKNLQTEQASLQSENTHFENENQKLQQKLKVMTELYQENEMKLHRKLTVEENYRLEKEEKLSKVDEKISHATEELETYRKRAKDLEEELERTIHSYQGQIISHEKKAHDNWLAARNAERNLNDLRKENAHNRQKLTETELKFELLEKDPYALDVPNTAFGRGSRGPGNPLDHQITNERGESSCDRLTDPHRAPSDTGSLSPPWDQDRRMMFPPPGQSYPDSALPPQRQDRFCSNSGRLSGPAELRSFNMPSLDKMDGSMPSEMESSRNDTKDDLGNLNVPDSSLPAENEATGPGFVPPPLAPVRGPLFPVDARGPFLRRGPPFPPPPPGAMFGASRDYFPPGDFPGPPPAPFAMRNVYPPRGFPPYLPPRPGFFPPPPHSEGRSEFPSGLIPPSNEPATEHPEPQQET

SEQ ID NO: 826461 - protein, 798 aa, Homo sapiens
MTAAAGFSGLPGSPGVVAALPEGMRPDSNLYGFPWELVICAAVVGFFAVLFFLWRSFRSVRSRLYVGREKKLALMLSGLIEEKSKLLEKFSLVQKEYEGYEVESSLKDASFEKEATEAQSLEATCEKLNRSNSELEDEILCLEKELKEEKSKHSEQDELMADISKRIQSLEDESKSLKSQVAEAKMTFKIFQMNEERLKIAIKDALNENSQLQESQKQLLQEAEVWKEQVSELNKQKVTFEDSKVHAEQVLNDKESHIKTLTERLLKMKDWAAMLGEDITDDDNLELEMNSESENGAYLDNPPKGALKKLIHAAKLNASLKTLEGERNQIYIQLSEVDKTKEELTEHIKNLQTEQASLQSENTHFENENQKLQQKLKVMTELYQENEMKLHRKLTVEENYRLEKEEKLSKVDEKISHATEELETYRKRAKDLEEELERTIHSYQGQIISHEKKAHDNWLAARNAERNLNDLRKENAHNRQKLTETELKFELLEKDPYALDVPNTAFGREHSPYGPSPLGWPSSETRAFLSPPTLLEGPLRLSPLLPGGGGRGSRGPGNPLDHQITNERGESSCDRLTDPHRAPSDTGSLSPPWDQDRRMMFPPPGQSYPDSALPPQRQDRFCSNSGRLSGPAELRSFNMPSLDKMDGSMPSEMESSRNDTKDDLGNLNVPDSSLPAENEATGPGFVPPPLAPVRGPLFPVDARGPFLRRGPPFPPPPPGAMFGASRDYFPPGDFPGPPPAPFAMRNVYPPRGFPPYLPPRPGFFPPPPHSEGRSEFPSGLIPPSNEPATEHPEPQQET

SEQ ID NO: 826462 - protein, 798 aa, Homo sapiens; identical to SEQ ID NO: 826461

SEQ ID NO: 826463 - protein, 724 aa, Homo sapiens
MLSGLIEEKSKLLEKFSLVQKEYEGYEVESSLKDASFEKEATEAQSLEATCEKLNRSNSELEDEILCLEKELKEEKSKHSEQDELMADISKRIQSLEDESKSLKSQVAEAKMTFKIFQMNEERLKIAIKDALNENSQLQESQKQLLQEAEVWKEQVSELNKQKVTFEDSKVHAEQVLNDKESHIKTLTERLLKMKDWAAMLGEDITDDDNLELEMNSESENGAYLDNPPKGALKKLIHAAKLNASLKTLEGERNQIYIQLSEVDKTKEELTEHIKNLQTEQASLQSENTHFENENQKLQQKLKVMTELYQENEMKLHRKLTVEENYRLEKEEKLSKVDEKISHATEELETYRKRAKDLEEELERTIHSYQGQIISHEKKAHDNWLAARNAERNLNDLRKENAHNRQKLTETELKFELLEKDPYALDVPNTAFGREHSPYGPSPLGWPSSETRAFLSPPTLLEGPLRLSPLLPGGGGRGSRGPGNPLDHQITNERGESSCDRLTDPHRAPSDTGSLSPPWDQDRRMMFPPPGQSYPDSALPPQRQDRFCSNSGRLSGPAELRSFNMPSLDKMDGSMPSEMESSRNDTKDDLGNLNVPDSSLPAENEATGPGFVPPPLAPVRGPLFPVDARGPFLRRGPPFPPPPPGAMFGASRDYFPPGDFPGPPPAPFAMRNVYPPRGFPPYLPPRPGFFPPPPHSEGRSEFPSGLIPPSNEPATEHPEPQQET

SEQ ID NO: 826464 - protein, 798 aa, Homo sapiens; identical to SEQ ID NO: 826461

SEQ ID NO: 826465 - protein, 520 aa, Homo sapiens
MTAAAGFSGLPGSPGVVAALPEGMRPDSNLYGFPWELVICAAVVGFFAVLFFLWRSFRSVRSRLYVGREKKLALMLSGLIEEKSKLLEKFSLVQKEYEGYEVESSLKDASFEKEATEAQSLEATCEKLNRSNSELEDEILCLEKELKEEKSKHSEQDELMADISKRIQSLEDESKSLKSQVAEAKMTFKIFQMNEERLKIAIKDALNENSQLQESQKQLLQEAEVWKEQVSELNKQKVTFEDSKVHAEQVLNDKESHIKTLTERLLKMKDWAAMLGEDITDDDNLELEMNSESENGAYLDNPPKGALKKLIHAAKLNASLKTLEGERNQIYIQLSEVDKTKEELTEHIKNLQTEQASLQSENTHFENENQKLQQKLKVMTELYQENEMKLHRKLTVEENYRLEKEEKLSKVDEKISHATEELETYRKRAKDLEEELERTIHSYQGQIIFLMRKKAHDNGVGSGMLKKLMDLEGNCSPANYRTKVIGLKSLLVSQPWGRSPGRRVPRKRSLPTGGATPLWG

SEQ ID NO: 826466 - protein, 421 aa, Homo sapiens
TEAEGVMSERRVVVDLPTSASSSMPLQRRRASFRGPRSSSSLESPPASRTNAMSGLVRAPGVYVGTAPSGCIGGLGARVTRRALGISSVFLQGLRSSGLATVPAPGLERDHGAVEDLGGCLVEYMAKVHALEQVSQELETQLRMHLESKATRSGNWGALRASWASSCQQVGEAVLENARLMLQTETIQAGADDFKERYENEQPFRKAAEEEINSLYKVIDEANLTKMDLESQIESLKEELGSLSRNYEEDVKLLHKQLAGCELEQMDAPIGTGLDDILETIRIQWERDVEKNRVEAGALLQAKQQAEVAHMSQTQEEKLAAALRVELHNTSCQVQSLQAETESLRALKRGLENTLHDAKHWHDMELQNLGAVVGRLEAELREIRAEAEQQQQERAHLLARKCQLQKDVASYHALLDREESG

SEQ ID NO: 826467 - protein, 427 aa, Homo sapiens
TEAEGVMSERRVVVDLPTSASSSMPLQRRRASFRGPRSSSSLESPPASRTNAMSGLVRAPGVYVGTAPSGCIGGLGARVTRRALGISSVFLQGLRSSGLATVPAPGLERDHGAVEDLGGCLVEYMAKVHALEQVSQELETQLRMHLESKATRSGNWGALRASWASSCQQVGEAVLENARLMLQTETIQAGADDFKERYENEQPFRKAAEEEINSLYKVIDEANLTKMDLESQIESLKEELGSLSRNYEEDVKLLHKQLAGCELEQMDAPIGTGLDDILETIRIQWERDVEKNRVEAGALLQAKQQAEVAHMSQTQEEKLAAALRVELHNTSCQVQSLQAETESLRALKRGLENTLHDAKHWHDMELQNLGAVVGRLEAELREIRAEAEQQQQERAHLLARKCQLLMEKLPLFHEENTLPQQLTQEVA

SEQ ID NO: 826468 - protein, 421 aa, Homo sapiens; identical to SEQ ID NO: 826466

SEQ ID NO: 826469 - protein, 412 aa, Homo sapiens
TEAEGVMSERRVVVDLPTSASSSMPLQRRRASFRGPRSSSSLESPPASRTNAMSGLVRAPGVYVGTAPSGCIGGLGARVTRRALGISSVFLQGLRSSGLATVPAPGLERDHGAVEDLGGCLVEYMAKVHALEQVSQELETQLRMHLESKATRSGNWGALRASWASSCQQVGEAVLENARLMLQTETIQAGADDFKERYENEQPFRKAAEEEINSLYKVIDEANLTKMDLESQIESLKEELGSLSRNYEEDVKLLHKQLAGCELEQMDAPIGTGLDDILETIRIQWERDVEKNRVEAGALLQAKQQAEVAHMSQTQEEKLAAALRVELHNTSCQVQSLQAETESLRALKRGLENTLHDAKHWHDMELQNLGAVVGRLEAELREIRAEAEQQQQERTPCWTGRRAADGETSSFS

SEQ ID NO: 826470 - protein, 77 aa, Homo sapiens
RSSSLEKNEKESKRGLENTLHDAKHWHDMELQNLGAVVGRLEAELREIRAEAEQQQQERTPCWTGRRAADGETSSFS

SEQ ID NO: 826471 - protein, 776 aa, Homo sapiens
MEIGWMHNRRQRQVLVFFVLLSLSGAGAELGSYSVVEETERGSFVANLGKDLGLGLTEMSTRKARIISQGNKQHLQLKAQTGDLLINEKLDREELCGPTEPCILHFQVLMENPLEIFQAELRVIDINDHSPMFTEKEMILKIPENSPLGTEFPLNHALDLDVGSNNVQNYKISPSSHFRVLIHEFRDGRKYPELVLDKELDREEEPQLRLTLTALDGGSPPRSGTAQVRIEVVDINDNAPEFEQPIYKVQIPENSPLGSLVATVSARDLDGGANGKISYTLFQPSEDISKTLEVNPMTGEVRLRKQVDFEMVTSYEVRIKATDGGGLSGKCTLLLQVVDVNDNPPQVTMSALTSPIPENSPEIVVAVFSVSDPDSGNNGKTISSIQEDLPFLLKPSVKNFYTLVTERALDREARAEYNITLTVTDMGTPRLKTEHNITVQISDVNDNAPTFTQTSYTLFVRENNSPALHIGSVSATDRDSGTNAQVTYSLLPPQDPHLPLASLVSINADNGHLFALRSLDYEALREFEFRVSATDRGSPALSSEALVRVLVLDANDNSPFVLYPLQNGSAPCTELVPRAAEPGYLVTKVVAVDGDSGQNAWLSYQLLKATEPGLFGVWAHNGEVRTARLLSERDAAKQRLVVLVKDNGEPPRSATATLHVLLVDGFSQPFLPLPEAAPGQTQANSLTVYLVVALASVSSLFLFSVLLFVAVRLCRRSRAASVGRCSMPEGPFPGRLVDVSGTGTLSQSYQYEVCLTGGSETSEFKFLKPIIPNFSP

SEQ ID NO: 826472 - protein, 164 aa, Homo sapiens
  misc_feature (25)..(25): Xaa can be any naturally occurring amino acid
  misc_feature (30)..(30): Xaa can be any naturally occurring amino acid
  misc_feature (40)..(40): Xaa can be any naturally occurring amino acid
TRRPPAASGSGRKGWEKPSTRSTCXVAVAXRGGSPLSLTXTTSLCLAASRSLSSLAVRTSPLCAHTPTAQANSLTVYLVVALASVSSLFLFSVLLFVAVRLCRRSRAASVGRCSMPEGPFPGRLVDVSGTGTLSQSYQYEVCLTGGSETSEFKFLKPIIPNFSP

SEQ ID NO: 826473 - protein, 129 aa, Homo sapiens
MGRRDAQLLAALLVLGLCALAGSEKPSPCQCSRLSPHNRTNCGFPGITSDQCFDNGCCFDSSVTGVPWCFHPLPKQESDQCVMEVSDRRNCGYPGISPEECASRKCCFSNFIFEVPWCFFPKSVEDCHY

SEQ ID NO: 826474 - protein, 115 aa, Homo sapiens
IRKYLTSRPTPPPIYSMSRISASWRSQTEETVATRASAPRNAPLGSAASPTSSLKCPGASSRSLWKTAITKRGWFQRMHLAHRVFRNQRRNFALSASYFMKSWVFLTIFSSFSMV

SEQ ID NO: 826475 - protein, 129 aa, Homo sapiens; identical to SEQ ID NO: 826473

SEQ ID NO: 826476 - protein, 72 aa, Homo sapiens
  misc_feature (21)..(21): Xaa can be any naturally occurring amino acid
LFRRWFRAPPPVNQEKKKELXVTRAALRGQTRNCGYPGISPEECASRKCCFSNFIFEVPWCFFPKSVEDCHY

SEQ ID NO: 826477 - protein, 450 aa, Homo sapiens
SSTPPGARAQRPRPRLSLPGRRWVSASLCSSTAPHSRVTLTPPSQLSGAAMAWRRREASVGARGVLALALLALALCVPGARGRALEWFSAVVNIEYVDPQTNLTVWSVSESGRFGDSSPKEGAHGLVGVPWAPGGDLEGCAPDTRFFVPEPGGRGAAPWVALVARGGCTFKDKVLVAARRNASAVVLYNEERYGNITLPMSHAGTGNIVVIMISYPKGREILELVQKGIPVTMTIGVGTRHVQEFISGQSVVFVAIAFITMMIISLAWLIFYYIQRFLYTGSQIGSQSHRKETKKVIGQLLLHTVKHGEKGIDVDAENCAVCIENFKVKDIIRILPCKHIFHRICIDPWLLDHRTCPMCKLDVIKALGYWGEPGDVQEMPAPESPPGRDPAANLSLALPDDDGSDESSPPSASPAESEPQCDPSFKGDAGENTALLEAGRSDSRHGGPIS

SEQ ID NO: 826478 - protein, 441 aa, Homo sapiens
EVVPPGLGYCRPRRRSASLCSSTAPHSRVTLTPPSQLSGAAMAWRRREASVGARGVLALALLALALCVPGARGRALEWFSAVVNIEYVDPQTNLTVWSVSESGRFGDSSPKEGAHGLVGVPWAPGGDLEGCAPDTRFFVPEPGGRGAAPWVALVARGGCTFKDKVLVAARRNASAVVLYNEERYGNITLPMSHAGTGNIVVIMISYPKGREILELVQKGIPVTMTIGVGTRHVQEFISGQSVVFVAIAFITMMIISLAWLIFYYIQRFLYTGSQIGSQSHRKETKKVIGQLLLHTVKHGEKGIDVDAENCAVCIENFKVKDIIRILPCKHIFHRICIDPWLLDHRTCPMCKLDVIKALGYWGEPGDVQEMPAPESPPGRDPAANLSLALPDDDGSDESSPPSASPAESEPQCDPSFKGDAGENTALLEAGRSDSRHGGPIS

SEQ ID NO: 826479 - protein, 450 aa, Homo sapiens; identical to SEQ ID NO: 826477

SEQ ID NO: 826480 - protein, 491 aa, Homo sapiens
SSTPPGARAQRPRPRLSLPGRRWVSASLCSSTAPHSRVTLTPPSQLSGAAMAWRRREASVGARGVLALALLALALCVPGARGRALEWFSAVVNIEYVDPQTNLTVWSVSESGRFGDSSPKEGAHGLVGVPWAPGGDLEGCAPDTRFFVPEPGGRGAAPWVALVARGGCTFKDKVLVAARRNASAVVLYNEERYGNITLPMSHAGTGNIVVIMISYPKGREILELVQKGIPVTMTIGVGTRHVQEFISGQSVVFVAIAFITMMIISLAWLIFYYIQRFLYTGSQIGSQSHRKETKKVIGQLLLHTVKHGEKGIDVDAENCAVCIENFKVKDIIRILPCKHIFHRICIDPWLLDHRTCPMCKLDVIKALGYWGEPGDVQEMPAPESPPGRDPAANLSLALPDDDGSDESSPPSASPAESEPQCDPSFKGDAGENTALLELTFKKKAVSFADAAAAQGPLLPAMVNPTMFFHIAVDGEPLGCVSFEVRGLESKK

SEQ ID NO: 826481 - protein, 491 aa, Homo sapiens; identical to SEQ ID NO: 826480

SEQ ID NO: 826482 - protein, 478 aa, Homo sapiens
SSTPPGARAQRPRPRLSLPGRRWVSASLCSSTAPHSRVTLTPPSQLSGAAMAWRRREASVGARGVLALALLALALCVPGARGRALEWFSAVVNIEYVDPQTNLTVWSVSESGRFGDSSPKEGAHGLVGVPWAPGGDLEGCAPDTRFFVPEPGGRGAAPWVALVARGGCTFKDKVLVAARRNASAVVLYNEERYGNITLPMSHAGTGNIVVIMISYPKGREILELVQKGIPVTMTIGVGTRHVQEFISGQSVVFVAIAFITMMIISLAWLIFYYIQRFLYTGSQIGSQSHRKETKKVIGQLLLHTVKHGEKGIDVDAENCAVCIENFKVKDIIRILPCKHIFHRICIDPWLLDHRTCPMCKLDVIKALGYWGEPGDVQEMPAPESPPGRDPAANLSLALPDDDGSDESSPPSASPAESEPQCDPSFKGDAGENTALLGERCANYKTIECGQEWWLTPVISVLWEFKVGGLLEFELSKSK

SEQ ID NO: 826483 - protein, 302 aa, Homo sapiens
SSTPPGARAQRPRPRLSLPGRRWVSASLCSSTAPHSRVTLTPPSQLSGAAMAWRRREASVGARGVLALALLALALCVPGARGRALEWFSAVVNIEYVDPQTNLTVWSVSESGRFGDSSPKEGAHGLVGVPWAPGGDLEGCAPDTRFFVPEPGGRGAAPWVALVARGGCTFKDKVLVAARRNASAVVLYNEERYGNITLPMSHAGTGNIVVIMISYPKGREILELVQKGIPVTMTIGVGTRHVQEFISGQSVVFVAIAFITMMIISLAWLIFYYIQRFLYTGSQIGSQVMMDNSEFCFLKDNS

SEQ ID NO: 826484 - protein, 121 aa, Homo sapiens
GLLLLNSRPLDLKGEPGDVQEMPAPESPPGRDPAANLSLALPDDDGSDESSPPSASPAESEPQCDPSFKGDAGENTALLGERCANYKTIECGQEWWLTPVISVLWEFKVGGLLEFELSKSK

SEQ ID NO: 826485 - protein, 450 aa, Homo sapiens; identical to SEQ ID NO: 826477

SEQ ID NO: 826486 - protein, 302 aa, Homo sapiens; identical to SEQ ID NO: 826483

SEQ ID NO: 826487 - protein, 491 aa, Homo sapiens; identical to SEQ ID NO: 826480

SEQ ID NO: 826488 - protein, 491 aa, Homo sapiens; identical to SEQ ID NO: 826480

SEQ ID NO: 826489 - protein, 302 aa, Homo sapiens; identical to SEQ ID NO: 826483

SEQ ID NO: 826490 - protein, 109 aa, Homo sapiens
SLRGGTEAIARLDQLEADYYDLQLQLYEVQFEILKCEELLLTAQLESIKRLISENNFQHFDLLYVIRKKIVSTKLNYVVIFGNIWHGHFISQNVCQVAKHTWAIVDTKN

SEQ ID NO: 826491 - protein, 116 aa, Homo sapiens
SLRGGTEAIARLDQLEADYYDLQLQLYEVQFEILKCEELLLTAQLESIKRLISEKRDEVVYYDTYESMEAMLEKEEMAASAYLQREELQKLQQKARQLEARRGRVSAKKSYLRNKK

SEQ ID NO: 826492 - protein, 461 aa, Homo sapiens
MGKEKTHINIVVIGHVDSGKSTTTGHLIYKCGGIDKRTIEKFEKEAAEMGKGSFKYAWVLDKLKAERERGITIDISLWKFETSKYYVTIIDAPGHRDFIKNMITGTSQADCAVLIVAAGVGEFEAGISKNGQTREHALLAYTLGVKQLIVGVNKMDSTEPPYSQKRYEEMLRKSALTLRKWLQPDTVAFVPISGWNGDNMLEPSANMPWFKGWKVTRKDGNASGTTLLEALDCILPPTRPTDKPLRLPLQDVYKIGGIGTVPVGRVETGVLKPGMVVTFAPVNVTTEVKSVEMHHEALSEALPGDNVGFNVKNVSVKDVRRGNVAGDSKNDPPMEAAGFTAQVIILNHPGQISAGYAPVLDCHTAHIACKFAELKEKIDRRSGKKLEDGPKFLKSGDAAIVDMVPGKPMCVESFSDYPPLGRFAVRDMRQTVAVGVIKAVDKKAAGAGKVTKSAQKAQKAK

SEQ ID NO: 826493 - protein, 262 aa, Homo sapiens
MLEPSANMPWFKGWKVTRKDGNASGTTLLEALDCILPPTRPTDKPLRLPLQDVYKIGGIGTVPVGRVETGVLKPGMVVTFAPVNVTTEVKSVEMHHEALSEALPGDNVGFNVKNVSVKDVRRGNVAGDSKNDPPMEAAGFTAQVIILNHPGQISAGYAPVLDCHTAHIACKFAELKEKIDRRSGKKLEDGPKFLKSGDAAIVDMVPGKPMCVESFSDYPPLGRFAVRDMRQTVAVGVIKAVDKKAAGAGKVTKSAQKAQKAK

SEQ ID NO: 826494 - protein, 252 aa, Homo sapiens
FGPFSQRVCRQNTGVVKTTPKSQNGKGKDSYQHCRHWTRRFGVYKIGGIGTVPVGRVETGVLKPGMVVTFAPVNVTTEVKSVEMHHEALSEALPGDNVGFNVKNVSVKDVRRGNVAGDSKNDPPMEAAGFTAQVIILNHPGQISAGYAPVLDCHTAHIACKFAELKEKIDRRSGKKLEDGPKFLKSGDAAIVDMVPGKPMCVESFSDYPPLGRFAVRDMRQTVAVGVIKAVDKKAAGAGKVTKSAQKAQKAK

SEQ ID NO: 826495 - protein, 299 aa, Homo sapiens
MGKEKTHINIVVIGHVDSGKSTTTGHLIYKCGGIDKRTIEKFEKEAAEMGKGSFKYAWVLDKLKAERERGITIDISLWKFETSKYYVTMSTKLVVLVLFLLAEWRLVFSNPGMVVTFAPVNVTTEVKSVEMHHEALSEALPGDNVGFNVKNVSVKDVRRGNVAGDSKNDPPMEAAGFTAQVIILNHPGQISAGYAPVLDCHTAHIACKFAELKEKIDRRSGKKLEDGPKFLKSGDAAIVDMVPGKPMCVESFSDYPPLGRFAVRDMRQTVAVGVIKAVDKKAAGAGKVTKSAQKAQKAK

SEQ ID NO: 826496 - protein, 461 aa, Homo sapiens; identical to SEQ ID NO: 826492

SEQ ID NO: 826497 - protein, 461 aa, Homo sapiens; identical to SEQ ID NO: 826492

SEQ ID NO: 826498 - protein, 380 aa, Homo sapiens
MGKEKTHINIVVIGHVDSGKSTTTGHLIYKCGGIDKRTIEKFEKEAAEMGKGSFKYAWVLDKLKAERERGITIDISLWKFETSKYYVTIIDAPGHRDFIKNMITGTSQADCAVLIVAAGVGEFEAGISKNGQTREHALLAYTLGVKQLIVGVNKMDSTEPPYSQKRYEEIVYKIGGIGTVPVGRVETGVLKPGMVVTFAPVNVTTEVKSVEMHHEALSEALPGDNVGFNVKNVSVKDVRRGNVAGDSKNDPPMEAAGFTAQVIILNHPGQISAGYAPVLDCHTAHIACKFAELKEKIDRRSGKKLEDGPKFLKSGDAAIVDMVPGKPMCVESFSDYPPLGRFAVRDMRQTVAVGVIKAVDKKAAGAGKVTKSAQKAQKAK

SEQ ID NO: 826499 - protein, 292 aa, Homo sapiens
DAVGRPTRRENGYNPDTVAFVPISGWNGDNMLEPSANMPWFKGWKVTRKDGNASGTTLLEALDCILPPTRPTDKPLRLPLQDVYKIGGIGTVPVGRVETGVLKPGMVVTFAPVNVTTEVKSVEMHHEALSEALPGDNVGFNVKNVSVKDVRRGNVAGDSKNDPPMEAAGFTAQVIILNHPGQISAGYAPVLDCHTAHIACKFAELKEKIDRRSGKKLEDGPKFLKSGDAAIVDMVPGKPMCVESFSDYPPLGRFAVRDMRQTVAVGVIKAVDKKAAGAGKVTKSAQKAQKAK

SEQ ID NO: 826500 - protein, 461 aa, Homo sapiens; identical to SEQ ID NO: 826492

SEQ ID NO: 826501 - protein, 450 aa, Homo sapiens
MGKEKTHINIVVIGHVDSGKSTTTGHLIYKCGGIDKRTIEKFEKEAAEMGKGSFKYAWVLDKLKAERERGITIDISLWKFETSKYYVTIIDAPGHRDFIKNMITGTSQADCAVLIVAAGVGEFEAGISKNGQTREHALLAYTLGVKQLIVGVNKMDSTEPPYSQKRYEEMLRKSALTLRKWLQPDTVAFVPISGWNGDNMLEPSANMPWFKGWKVTRKDGNASGTTLLEALDCILPPTRPTDKPLRLPLQDVYKIGGIGTVPVGRVETGVLKPGMVVTFAPVNVTTEVKSVEMHHEALSEALPGDNVGFNVKNVSVKDVRRGNVAGDSKNDPPMEAAGFTAQVIILNHPGQISAGYAPVLDCHTAHIACKFAELKEKIDRRSGKKLEDGPKFLKSGDAAIVDMVPGKPMCVESFSDYPPLGRFAVREWTTLVFFFACGSFKLLVFKISTF

SEQ ID NO: 826502 - protein, 920 aa, Homo sapiens
MGRSNSRSHSSRSKSRSQSSSRSRSRSHSRKKRYSSRSRSRTYSRSRSRDRMYSRDYRRDYRNNRGMRRPYGYRGRGRGYYQGGGGRYHRGGYRPVWNRRHSRSPRRGRSRSRSPKRRSVSSQRSRSRSRRSYRSSRSPRSSSSRSSSPYSKSPVSKRRGSQEKQTKKAEGEPQEESPLKSKSQEEPKDTFEHDPSESIDEFNKSSATSGDIWPGLSAYDNSPRSPHSPSPIATPPSQSSSCSDAPMLSTVHSAKNTPSQHSHSIQHSPERSGSGSVGNGSSRYSPSQNSPIHHIPSRRSPAKTIAPQNAPRDESRGRSSFYPDGGDQETAKTGKFLKRFTDEESRVFLLDRGNTRDKEASKEKGSEKGRAEGEWEDQEALDYFSDKESGKQKFNDSEGDDTEETEDYRQFRKSVLADQGKSFATASHRNTEEEGLKYKSKVSLKGNRESDGFREEKNYKLKETGYVVERPSTTKDKHKEEDKNSERITVKKETQSPEQVKSEKLKDLFDYSPPLHKNLDAREKSTFREESPLRIKMIASDSHRPEVKLKMAPVPLDDSNRPASLTKDRLLASTLVHSVKKEQEFRSIFDHIKLPQASKSTSESFIQHIVSLVHHVKEQYFKSAAMTLNERFTSYQKATEEHSTRQKSPEIHRRIDISPSTLRKHTRLAGEERVFKEENQKGDKKLRCDSADLRHDIDRRRKERSKERGDSKGSRESSGSRKQEKTPKDYKEYKSYKDDSKHKREQDHSRSSSSSASPSSPSSREEKESKKEREEEFKTHHEMKEYSGFAGVSRPRGTFFRIRGRGRARGVFAGTNTGPNNSNTTFQKRPKEEEWDPEYTPKSKKYFLHDDRDDGVDYWAKRGRGRGTFQRGRGRFNFKKSGSSPKWTHDKYQGDGIVEDEEETMENNEEKKDRRKEEKE

SEQ ID NO: 826503 - protein, 871 aa, Homo sapiens [sequence omitted]

SEQ ID NO: 826504 - protein, 752 aa, Homo sapiens
MGRSNSRSHSSRSKSRSQSSSRSRSRSHSRKKRYSSRSRSRTYSRSRSRDRMYSRDYRRDYRNNRGMRRPYGYRGRGRGYYQGGGGRYHRGGYRPVWNRRHSRSPRRGRSRSRSPKRRSVSSQRSRSRSRRSYRSSRSPRSSSSRSSSPYSKSPVSKRRGSQEKQTKKAEGEPQEESPLKSKSQEEPKDTFEHDPSESIDEFNKSSATSGDIWPGLSAYDNSPRSPHSPSPIATPPSQSSSCSDAPMLSTVHSAKNTPSQHSHSIQHSPERSGSGSVGNGSSRYSPSQNSPIHHIPSRRSPAKTIAPQNAPRDESRGRSSFYPDGGDQETAKTGKFLKRFTDEESRVFLLDRGNTRDKEASKEKGSEKGRAEGEWEDQEALDYFSDKESGKQKFNDSEGDDTEETEDYRQFRKSVLADQGKSFATASHRNTEEEGLKYKSKVSLKGNRESDGFREEKNYKLKETGYVVERPSTTKDKHKEEDKNSERITVKKETQSPEQVKSEKLKDLFDYSPPLHKNLDAREKSTFREESPLRIKMIASDSHRPEVKLKMAPVPLDDSNRPASLTKDRLLASTLVHSVKKEQEFRSIFDHIKLPQASKSTSESFIQHIVSLVHHVKEQYFKSAAMTLNERFTSYQKATEEHSTRQKSPEIHRRIDISPSTLRKHTRLAGEERVFKEENQKGDKKLRCDSADLRHDIDRRRKERSKERGDSKGSRESSGSRKQEKTPKDYKEYKSYKDDSKNVFVFYTAYGG

SEQ ID NO: 826505 - protein, 747 aa, Homo sapiens
MGRSNSRSHSSRSKSRSQSSSRSRSRSHSRKKRYSSRSRSRTYSRSRSRDRMYSRDYRRDYRNNRGMRRPYGYRGRGRGYYQGGGGRYHRGGYRPVWNRRHSRSPRRGRSRSRSPKRRSVSSQRSRSRSRRSYRSSRSPRSSSSRSSSPYSKSPVSKRRGSQEKQTKKAEGEPQEESPLKSKSQEEPKDTFEHDPSESIDEFNKSSATSGDIWPGLSAYDNSPRSPHSPSPIATPPSQSSSCSDAPMLSTVHSAKNTPSQHSHSIQHSPERSGSGSVGNGSSRYSPSQNSPIHHIPSRRSPAKTIAPQNAPRDESRGRSSFYPDGGDQETAKTGKFLKSPPLHKNLDAREKSTFREESPLRIKMIASDSHRPEVKLKMAPVPLDDSNRPASLTKDRLLASTLVHSVKKEQEFRSIFDHIKLPQASKSTSESFIQHIVSLVHHVKEQYFKSAAMTLNERFTSYQKATEEHSTRQKSPEIHRRIDISPSTLRKHTRLAGEERVFKEENQKGDKKLRCDSADLRHDIDRRRKERSKERGDSKGSRESSGSRKQEKTPKDYKEYKSYKDDSKHKREQDHSRSSSSSASPSSPSSREEKESKKEREEEFKTHHEMKEYSGFAGVSRPRGTFFRIRGRGRARGVFAGTNTGPNNSNTTFQKRPKEEEWDPEYTPKSKKYFLHDDRDDGVDYWAKRGRGRGTFQRGRGRFNFKKSGSSPKWTHDKYQGDGIVEDEEETMENNEEKKDRRKEEKE

SEQ ID NO: 826506 - protein, 674 aa, Homo sapiens
MLSTVHSAKNTPSQHSHSIQHSPERSGSGSVGNGSSRYSPSQNSPIHHIPSRRSPAKTIAPQNAPRDESRGRSSFYPDGGDQETAKTGKFLKRFTDEESRVFLLDRGNTRDKEASKEKGSEKGRAEGEWEDQEALDYFSDKESGKQKFNDSEGDDTEETEDYRQFRKSVLADQGKSFATASHRNTEEEGLKYKSKVSLKGNRESDGFREEKNYKLKETGYVVERPSTTKDKHKEEDKNSERITVKKETQSPEQVKSEKLKDLFDYSPPLHKNLDAREKSTFREESPLRIKMIASDSHRPEVKLKMAPVPLDDSNRPASLTKDRLLASTLVHSVKKEQEFRSIFDHIKLPQASKSTSESFIQHIVSLVHHVKEQYFKSAAMTLNERFTSYQKATEEHSTRQKSPEIHRRIDISPSTLRKHTRLAGEERVFKEENQKGDKKLRCDSADLRHDIDRRRKERSKERGDSKGSRESSGSRKQEKTPKDYKEYKSYKDDSKHKREQDHSRSSSSSASPSSPSSREEKESKKEREEEFKTHHEMKEYSGFAGVSRPRGTFFRIRGRGRARGVFAGTNTGPNNSNTTFQKRPKEEEWDPEYTPKSKKYFLHDDRDDGVDYWAKRGRGRGTFQRGRGRFNFKKSGSSPKWTHDKYQGDGIVEDEEETMENNEEKKDRRKEEKE

SEQ ID NO: 826507 - protein, 920 aa, Homo sapiens
MGRSNSRSHSSRSKSRSQSSSRSRSRSHSRKKRYSSRSRSRTYSRSRSRDRMYSRDYRRDYRNNRGMRRPYGYRGRGRGYYQGGGGRYHRGGYRPVWNRRHSRSPRRGRSRSRSPKRRSVSSQRSRSRSRRSYRSSRSPRSSSSRSSSPYSKSPVSKRRGSQEKQTKKAEGEPQEESPLKSKSQEEPKDTFEHDPSESIDEFNKSSATSGDIWPGLSAYDNSPRSPHSPSPIATPPSQSSSCSDAPMLSTVHSAKNTPSQHSHSIQHSPERSGSGSVGNGSSRYSPSQNSPIHHIPSRRSPAKTIAPQNAPRDESRGRSSFYPDGGDQETAKTGKFLKRFTDEESRVFLLDRGNTRDKEASKEKGSEKGRAEGEWEDQEALDYFSDKESGKQKFNDSEGDDTEETEDYRQFRKSVLADQGKSFATASHRNTEEEGLKYKSKVSLKGNRESDGFREEKNYKLKETGYVVERPSTTKDKHKEEDKNSERITVKKETQSPEQVKSEKLKDLFDYSPPLHKNLDAREKSTFREESPLRIKMIASDSHRPEVKLKMAPVPLDDSNRPASLTKDRLLASTLVHSVKKEQEFRSIFDHIKLPQASKSTSESFIQHIVSLVHHVKEQYFKSAAMTLNERFTSYQKATEEHSTRQKSPEIHRRIDISPSTLRKHTRLAGEERVFKEENQKGDKKLRCDSADLRHDIDRRRKERSKERGDSKGSRESSGSRKQEKTPKDYKEYKSYKDDSKHKREQDHSRSSSSSASPSSPSSREEKESKKEREEEFKTHHEMKEYSGFAGVSRPRGTFFRIRGRGRARGVFAGTNTGPNNSNTTFQKRPKEEEWDPEYTPKSKKYFLHDDRDDGVDYWAKRGRGRGTFQRGRGRFNFKKSGSSPKWTHDKYQGDGIVEDEEETMENNEEKKDRRKEEKV

SEQ ID NO: 826508 - protein, 384 aa, Homo sapiens [sequence omitted]

SEQ ID NO: 826509 - protein, 295 aa, Homo sapiens [sequence omitted]

SEQ ID NO: 826510 - protein, 871 aa, Homo sapiens [sequence omitted]

SEQ ID NO: 826511 - protein, 871 aa, Homo sapiens [sequence omitted]

SEQ ID NO: 826512 - protein, 115 aa, Homo sapiens
MQEVLLVFGTNTGPNNSNTTFQKRPKEEEWDPEYTPKSKKYFLHDDRDDGVDYWAKRGRGRGTFQRGRGRFNFKKSGSSPKWTHDKYQGDGIVEDEEETMENNEEKKDRRKEEKE

SEQ ID NO: 826513 - protein, 94 aa, Homo sapiens
IGRMLRLRRIQGTESGLAWQHSHDDRDDGVDYWAKRGRGRGTFQRGRGRFNFKKSGSSPKWTHDKYQGDGIVEDEEETMENNEEKKDRRKEEKE

SEQ ID NO: 826514 - protein, 116 aa, Homo sapiens
  misc_feature (12)..(14): Xaa can be any naturally occurring amino acid
SYADRPGGWEGXXXHMYHAMTTEMMVWIIGPKEEEVVVLFNVAEGALTSKNQVAVLNGLMTNTKGMGLLKMKKRPWKIMKKRRTDARKKRNNKYEVRLQQSRTCTHHFFYLIFVFK

SEQ ID NO: 826515 - protein, 871 aa, Homo sapiens [sequence omitted]

SEQ ID NO: 826516 - protein, 826 aa, Homo sapiens
MGRSNSRSHSSRSKSRSQSSSRSRSRSHSRKKRYSSRSRSRTYSRSRSRDRMYSRDYRRDYRNNRGMRRPYGYRGRGRGYYQGGGGRYHRGGYRPVWNRRHSRSPRRGRSRSRSPKRRSVSSQRSRSRSRRSYRSSRSPRSSSSRSSSPYSKSPVSKRRGSQEKQTKKAEGEPQEESPLKSKSQEEPKDTFEHDPSESIDEFNKSSATSGDIWPGLSAYDNSPRSPHSPSPIATPPSQSSSCSDAPMLSTVHSAKNTPSQHSHSIQHSPERSGSGSVGNGSSRYSPSQNSPIHHIPSRRSPAKTIAPQNAPRDESRGRSSFYPDGGDQETAKTGKFLKRFTDEESRVFLLDRGNTRDKEASKEKGSEKGRAEGEWEDQEALDYFSDKESGKQKFNDSEGDDTEETEDYRQFRKSVLADQGKSFATASHRNTEEEGLKYKSKVSLKGNRESDGFREEKNYKLKETGYVVERPSTTKDKHKEEDKNSERITVKKETQSPEQVKSEKLKDLFDYSPPLHKNLDAREKSTFREESPLRIKMIASDSHRPEVKLKMAPVPLDDSNRPASLTKDRLLASTLVHSVKKEQEFRSIFDHIKLPQASKSTSESFIQHIVSLVHHVKEQYFKSAAMTLNERFTSYQKATEEHSTRQKSPEIHRRIDISPSTLRKHTRLAGEERVFKEENQKGDKKLRCDSADLRHDIDRRRKERSKERGDSKGSRESSGSRKQEKTPKDYKEYKSYKDDSKHKREQDHSRSSSSSASPSSPSSREEKESKKEREEEFKTHHEMKEYSGFAGVSRPRGTFVSEKIIFDCLVGVYLRVLYIRKVIYMI

SEQ ID NO: 826517 - protein, 712 aa, Homo sapiens
MGRSNSRSHSSRSKSRSQSSSRSRSRSHSRKKRYSSRSRSRTYSRSRSRDRMYSRDYRRDYRNNRGMRRPYGYRGRGRGYYQGGGGRYHRGGYRPVWNRRHSRSPRRGRSRSRSPKRRSVSSQRSRSRSRRSYRSSRSPRSSSSRSSSPYSKSPVSKRRGSQEKQTKKAEGEPQEESPLKSKSQEEPKDTFEHDPSESIDEFNKSSATSGDIWPGLSAYDNSPRSPHSPSPIATPPSQSSSCSDAPMLSTVHSAKNTPSQHSHSIQHSPERSGSGSVGNGSSRYSPSQNSPIHHIPSRRSPAKTIAPQNAPRDESRGRSSFYPDGGDQETAKTGKFLKRFTDEESRVFLLDRGNTRDKEASKEKGSEKGRAEGEWEDQEALDYFSDKESGKQKFNDSEGDDTEETEDYRQFRKSVLADQGKSFATASHRNTEEEGLKYKSKVSLKGNRESDGFREEKNYKLKETGYVVERPSTTKDKHKEEDKNSERITVKKETQSPEQVKSEKLKDLFDYSPPLHKNLDAREKSTFREESPLRIKMIASDSHRPEVKLKMAPVPLDDSNRPASLTKDRLLASTLVHSVKKEQEFRSIFDHIKLPQASKSTSESFIQHIVSLVHHVKEQYFKSAAMTLNERFTSYQKATEEHSTRQKSPEIHSCHCGHRKDHDYAIELGDPPTPRAEGEGYADKGEANADVRVREDAVQAEVHADRVSAHAG

SEQ ID NO: 826518 - protein, 339 aa, Homo sapiens
MGRSNSRSHSSRSKSRSQSSSRSRSRSHSRKKRYSSRSRSRTYSRSRSRDRMYSRDYRRDYRNNRGMRRPYGYRGRGRGYYQGGGGRYHRGGYRPVWNRRHSRSPRRGRSRSRSPKRRSVSSQRSRSRSRRSYRSSRSPRSSSSRSSSPYSKSPVSKRRGSQEKQTKKAEGEPQEESPLKSKSQEEPKDTFEHDPSESIDEFNKSSATSGDIWPGLSAYDNSPRSPHSPSPIATPPSQSSSCSDAPMLSTVHSAKNTPSQHSHSIQHSPERSGSGSVGNGSSRYSPSQNSPIHHIPSRRSPAKTIAPQNAPRDESRGRSSFYPDGGDQETAKTGKFLKR

SEQ ID NO: 826519 - protein, 384 aa, Homo sapiens [sequence omitted]

SEQ ID NO: 826520 - protein, 740 aa, Homo sapiens [sequence omitted]

SEQ ID NO: 826521 - protein, 871 aa, Homo sapiens [sequence omitted]

SEQ ID NO: 826522 - protein, 602 aa, Homo sapiens
MEAIYSECNPELLSSSLLIRRFTDEESRVFLLDRGNTRDKEASKEKGSEKGRAEGEWEDQEALDYFSDKESGKQKFNDSEGDDTEETEDYRQFRKSVLADQGKSFATASHRNTEEEGLKYKSKVSLKGNRESDGFREEKNYKLKETGYVVERPSTTKDKHKEEDKNSERITVKKETQSPEQVKSEKLKDLFDYSPPLHKNLDAREKSTFREESPLRIKMIASDSHRPEVKLKMAPVPLDDSNRPASLTKDRLLASTLVHSVKKEQEFRSIFDHIKLPQASKSTSESFIQHIVSLVHHVKEQYFKSAAMTLNERFTSYQKATEEHSTRQKSPEIHRRIDISPSTLRKHTRLAGEERVFKEENQKGDKKLRCDSADLRHDIDRRRKERSKERGDSKGSRESSGSRKQEKTPKDYKEYKSYKDDSKHKREQDHSRSSSSSASPSSPSSREEKESKKEREEEFKTHHEMKEYSGFAGVSRPRGTFFRIRGRGRARGVFAGTNTGPNNSNTTFQKRPKEEEWDPEYTPKSKKYFLHDDRDDGVDYWAKRGRGRGTFQRGRGRFNFKKSGSSPKWTHDKYQGDGIVEDEEETMENNEEKKDRRKEEKE

SEQ ID NO: 826523 - protein, 408 aa, Homo sapiens
MARVNFLTRFPEKLTNSQNGHPVSFLNEFLTKRPGFPGPIKHTAGLASNTLVHILSKEREAKKFSNPIFEPPIKVATHRPRTKAHFQESQFNSNTIIVSLVHHVKEQYFKSAAMTLNERFTSYQKATEEHSTRQKSPEIHRRIDISPSTLRKHTRLAGEERVFKEENQKGDKKLRCDSADLRHDIDRRRKERSKERGDSKGSRESSGSRKQEKTPKDYKEYKSYKDDSKHKREQDHSRSSSSSASPSSPSSREEKESKKEREEEFKTHHEMKEYSGFAGVSRPRGTFFRIRGRGRARGVFAGTNTGPNNSNTTFQKRPKEEEWDPEYTPKSKKYFLHDDRDDGVDYWAKRGRGRGTFQRGRGRFNFKKSGSSPKWTHDKYQGDGIVEDEEETMENNEEKKDRRKEEKE

SEQ ID NO: 826524 - protein, 287 aa, Homo sapiens
MFLNQKVNNMTKNIFYFTLRRIDISPSTLRKHTRLAGEERVFKEENQKGDKKLRCDSADLRHDIDRRRKERSKERGDSKGSRESSGSRKQEKTPKDYKEYKSYKDDSKHKREQDHSRSSSSSASPSSPSSREEKESKKEREEEFKTHHEMKEYSGFAGVSRPRGTFFRIRGRGRARGVFAGTNTGPNNSNTTFQKRPKEEEWDPEYTPKSKKYFLHDDRDDGVDYWAKRGRGRGTFQRGRGRFNFKKSGSSPKWTHDKYQGDGIVEDEEETMENNEEKKDRRKEEKE

SEQ ID NO: 826525 - protein, 124 aa, Homo sapiens
  misc_feature (12)..(12): Xaa can be any naturally occurring amino acid
  misc_feature (25)..(26): Xaa can be any naturally occurring amino acid
YISSCSSRSHSXLSPFFISPHRTTXXVMTTEMMVWIIGPKEEEVVVLFNVAEGALTSKNQVAVLNGLMTNTKGMGLLKMKKRPWKIMKKRRTDARKKRNNKYEVRLQQSRTCTHHFFYLIFVFK

SEQ ID NO: 826526 - protein, 91 aa, Homo sapiens
NVRFKLMAKIKNNSTHMYTHDDRDDGVDYWAKRGRGRGTFQRGRGRFNFKKSGSSPKWTHDKYQGDGIVEDEEETMENNEEKKDRRKEEKE

SEQ ID NO: 826527 - protein, 826 aa, Homo sapiens; identical to SEQ ID NO: 826516

SEQ ID NO: 826528 - protein, 675 aa, Homo sapiens
MGRSNSRSHSSRSKSRSQSSSRSRSRSHSRKKRYSSRSRSRTYSRSRSRDRMYSRDYRRDYRNNRGMRRPYGYRGRGRGYYQGGGGRYHRGGYRPVWNRRHSRSPRRGRSRSRSPKRRSVSSQRSRSRSRRSYRSSRSPRSSSSRSSSPYSKSPVSKRRGSQEKQTKKAEGEPQEESPLKSKSQEEPKDTFEHDPSESIDEFNKSSATSGDIWPGLSAYDNSPRSPHSPSPIATPPSQSSSCSDAPMLSTVHSAKNTPSQHSHSIQHSPERSGSGSVGNGSSRYSPSQNSPIHHIPSRRSPAKTIAPQNAPRDESRGRSSFYPDGGDQETAKTGKFLKRFTDEESRVFLLDRGNTRDKEASKEKGSEKGRAEGEWEDQEALDYFSDKESGKQKFNDSEGDDTEETEDYRQFRKSVLADQGKSFATASHRNTEEEGLKYKSKVSLKGNRESDGFREEKNYKLKETGYVVERPSTTKDKHKEEDKNSERITVKKETQSPEQVKSEKLKDLFDYSPPLHKNLDAREKSTFREESPLRIKMIASDSHRPEVKLKMAPVPLDDSNRPASLTKDRLLASTLVHSVKKEQEFRSIFDHIKLPQASKSTSESFIQHIVSLVHHVKEQYFKSAAMTLNERFTSYQKATEEHSTRQKSPEIHSLASPFPQLLQGVWRLTIERFSL

SEQ ID NO: 826529 - protein, 341 aa, Homo sapiens
MGRSNSRSHSSRSKSRSQSSSRSRSRSHSRKKRYSSRSRSRTYSRSRSRDRMYSRDYRRDYRNNRGMRRPYGYRGRGRGYYQGGGGRYHRGGYRPVWNRRHSRSPRRGRSRSRSPKRRSVSSQRSRSRSRRSYRSSRSPRSSSSRSSSPYSKSPVSKRRGSQEKQTKKAEGEPQEESPLKSKSQEEPKDTFEHDPSESIDEFNKSSATSGDIWPGLSAYDNSPRSPHSPSPIATPPSQSSSCSDAPMLSTVHSAKNTPSQHSHSIQHSPERSGSGSVGNGSSRYSPSQNSPIHHIPSRRSPAKTIAPQNAPRDESRGRSSFYPDGGDQETAKTGKFLKSHR

SEQ ID NO: 826530 - protein, 98 aa, Homo sapiens
PFGAERMSDRGRDAAATGRSWNQSQRGSAWKQSPAQSPLSLHDRSLPGPPTLFLPCPNPEKGSSHYPVGKHSLPWSACQEEGSHLGAGGLSDPILTAG

SEQ ID NO: 826531 - protein, 589 aa, Homo sapiens
MEAEETMECLQEFPEHHKMILDRLNEQREQDRFTDITLIVDGHHFKAHKAVLAACSKFFYKFFQEFTQEPLVEIEGVSKMAFRHLIEFTYTAKLMIQGEEEANDVWKAAEFLQMLEAIKALEVRNKENSAPLEENTTGKNEAKKRKIAETSNVITESLPSAESEPVEIEVEIAEGTIEVEDEGIETLEEVASAKQSVKYIQSTGSSDDSALALLADITSKYRQGDRKGQIKEDGCPSDPTSKQEHMKSHSTESFKCEICNKRYLRESAWKQHLNCYHLEEGGVSKKQRTGKKIHVCQYCEKQFDHFGHFKEHLRKHTGEKPFECPNCHERFARNSTLKCHLTACQTGVGAKKGRKKLYECQVCNSVFNSWDQFKDHLVIHTGDKPNHCTLCDLWFMQGNELRRHLSDAHNISERLVTEEVLSVETRVQTEPVTSMTIIEQVGKVHVLPLLQVQVDSAQVTVEQVHPDLLQDSQVHDSHMSELPEQVQVSYLEVGRIQTEEGTEVHVEELHVERVNQMPVEVQTELLEADLDHVTPEIMNQEERESSQADAAEAAREDHEDAEDLETKPTVDSEAEKAENEDRTALPVLE

SEQ ID NO: 826532 - protein, 589 aa, Homo sapiens; identical to SEQ ID NO: 826531

SEQ ID NO: 826533 - protein, 589 aa, Homo sapiens; identical to SEQ ID NO: 826531

SEQ ID NO: 826534 - protein, 575 aa, Homo sapiens
MEAEETMECLQEFPEHHKMILDRLNEQREQDRFTDITLIVDGHHFKAHKAVLAACSKFFYKFFQEFTQEPLVEIEGTKKTQLPSEENTTGKNEAKKRKIAETSNVITESLPSAESEPVEIEVEIAEGTIEVEDEGIETLEEVASAKQSVKYIQSTGSSDDSALALLADITSKYRQGDRKGQIKEDGCPSDPTSKQVEGIEIVELQLSHVKDLFHCEKCNRSFKLFYHFKEHMKSHSTESFKCEICNKRYLRESAWKQHLNCYHLEEGGVSKKQRTGKKIHVCQYCEKQFDHFGHFKEHLRKHTGEKPFECPNCHERFARNSTLKCHLTACQTGVGAKKGRKKLYECQVCNSVFNSWDQFKDHLVIHTGDKPNHCTLCDLWFMQGNELRRHLSDAHNISERLVTEEVLSVETRVQTEPVTSMTIIEQVGKVHVLPLLQVQVDSAQVTVEQVHPDLLQDSQVHDSHMSELPEQVQVSYLEVGRIQTEEGTEVHVEELHVERVNQMPVEVQTELLEADLDHVTPEIMNQEERESSQADAAEAAREDHEDAEDLETKPTVDSEAEKAENEDRTALPVLE

SEQ ID NO: 826535 - protein, 589 aa, Homo sapiens; identical to SEQ ID NO: 826531

SEQ ID NO: 826536 - protein, 69 aa, Homo sapiens
MVEILPHHDILRESAGNRTYNGPAAEGEAAKGTHGTSPALQRGNTAAHPGPKHNETRRGNHEAHANLPD

SEQ ID NO: 826537 - protein, 589 aa, Homo sapiens; identical to SEQ ID NO: 826531

SEQ ID NO: 826538 - protein, 623 aa, Homo sapiens
MEAEETMECLQEFPEHHKMILDRLNEQREQDRFTDITLIVDGHHFKAHKAVLAACSKFFYKFFQEFTQEPLVEIEGVSKMAFRHLIEFTYTAKLMIQGEEEANDVWKAAEFLQMLEAIKALEVRNKENSAPLEENTTGKNEAKKRKIAETSNVITESLPSAESEPVEIEVEIAEGTIEVEDEGIETLEEVASAKQSVKYIQSTGSSDDSALALLADITSKYRQGDRKGQIKEDGCPSDPTSKQVEGIEIVELQLSHVKDLFHCEKCNRSFKLFYHFKEHMKSHSTESFKCEICNKRYLRESAWKQHLNCYHLEEGGVSKKQRTGKKIHVCQYCEKQFDHFGHFKEHLRKHTGEKPFECPNCHERFARNSTLKCHLTACQTGVGAKKGRKKLYECQVCNSVFNSWDQFKDHLVIHTGDKPNHCTLCDLWFMQGNELRRHLSDAHNISERLVTEEVLSVETRVQTEPVTSMTIIEQVGKVHVLPLLQVQVDSAQVTVEQVHPDLLQDSQVHDSHMSELPEQVQVSYLEVGRIQTEEGTEVHVEELHVERVNQMPVEVQTELLEADLDHVTPEIMNQEERESSQADAAEAAREDHEDAEDLETKPTVDSEAEKAENEDRTALPVLE

SEQ ID NO: 826539 - protein, 623 aa, Homo sapiens; identical to SEQ ID NO: 826538

SEQ ID NO: 826540 - protein, 347 aa, Homo sapiens
MEAEETMECLQEFPEHHKMILDRLNEQREQDRFTDITLIVDGHHFKAHKAVLAACSKFFYKFFQEFTQEPLVEIEGEKPFECPNCHERFARNSTLKCHLTACQTGVGAKKGRKKLYECQVCNSVFNSWDQFKDHLVIHTGDKPNHCTLCDLWFMQGNELRRHLSDAHNISERLVTEEVLSVETRVQTEPVTSMTIIEQVGKVHVLPLLQVQVDSAQVTVEQVHPDLLQDSQVHDSHMSELPEQVQVSYLEVGRIQTEEGTEVHVEELHVERVNQMPVEVQTELLEADLDHVTPEIMNQEERESSQADAAEAAREDHEDAEDLETKPTVDSEAEKAENEDRTALPVLE

SEQ ID NO: 826541 - protein, 351 aa, Homo sapiens
MEAEETMECLQEFPEHHKMILDRLNEQREQDRFTDITLIVDGHHFKAHKAVLAACSKFFYKFFQEFTQEPLVEIEGVSKMAFRHLIEFTYTAKLMIQGEEEANDVWKAAEFLQMLEAIKALEVRNKENSAPLEENTTGKNEAKKRKIAETSNVITESLPSAESEPVEIEVEIAEGTIEVEDEGIETLEEVASAKQSVKYIQSTGSSDDSALALLADITSKYRQGDRKGQIKEDGCPSDPTSKQEHMKSHSTESFKCEICNKRYLRESAWKQHLNCYHLEEGGVSKKQRTGKKIHVCQYCEKQFDHFGHFKEHLRKHTVLDAKKFTVMRPHLVRALPVATLQSPEAMQGITW

SEQ ID NO: 826542 - protein, 332 aa, Homo sapiens
MGAQFSKTAAKGEAAAERPGEAAVASSPSKANGQENGHVKVNGDASPAAAESGAKEELQANGSAPAADKEEPAAAGSGAASPSAAEKGEPAAAAAPEAGASPVEKEAPAEGEAAEPGSPTAAEGEAASAASSTSSPKAEDGATPSPSNETPKKKKKRFSFKKSFKLSGFSFKKNKKEAGEGGEAEAPAAEGGKDEAAGGAAAAAAEAGAASGEQAAAPGEEAAAGEEGAAGGDPQEAKPQEAAVAPEKPPASDETKAAEEPSKVEEKKAEEAGASAAACEAPSAAGPGAPPEQEAAPAEEPAAAAASSACAAPSQEAQPECSPEAPPAEAAE

SEQ ID NO: 826543 - protein, 128 aa, Homo sapiens
MLIADSQRIKFLSSNLNSWRELFPEKKTAAAAAARPVVTPTRGSLFPLLDLLSFFVEEASMGAQFSKTAAKGEAAAERPGEAAVASSPSKANGQVNSTCGCGHLFRVFLSFPPGGSQGSFVERSVAGF

SEQ ID NO: 826544 - protein, 332 aa, Homo sapiens; identical to SEQ ID NO: 826542

SEQ ID NO: 826545 - protein, 332 aa, Homo sapiens; identical to SEQ ID NO: 826542

SEQ ID NO: 826546 - protein, 332 aa, Homo sapiens; identical to SEQ ID NO: 826542

SEQ ID NO: 826547 - protein, 332 aa, Homo sapiens; identical to SEQ ID NO: 826542

SEQ ID NO: 826548 - protein, 332 aa, Homo sapiens; identical to SEQ ID NO: 826542

SEQ ID NO: 826549 - protein, 119 aa, Homo sapiens
MAAAPGEEAAAGEEGAAGGDPQEAKPQEAAVAPEKPPASDETKAAEEPSKVEEKKAEEAGASAAACEAPSAAGPGAPPEQEAAPAEEPAAAAASSACAAPSQEAQPECSPEAPPAEAAE

SEQ ID NO: 826550 - protein, 299 aa, Homo sapiens [sequence omitted]

SEQ ID NO: 826551 - protein, 332 aa, Homo sapiens; identical to SEQ ID NO: 826542

SEQ ID NO: 826552 - protein, 210 aa, Homo sapiens
GTRRRTFLPRLFVGVVPGTGFGELVYNQGLILKKRFSFKKSFKLSGFSFKKNKKEAGEGGEAEAPAAEGGKDEAAGGAAAAAAEAGAASGEQAAAPGEEAAAGEEGAAGGDPQEAKPQEAAVAPEKPPASDETKAAEEPSKVEEKKAEEAGASAAACEAPSAAGPGAPPEQEAAPAEEPAAAAASSACAAPSQEAQPECSPEAPPAEAAE

SEQ ID NO: 826553 - protein, 332 aa, Homo sapiens; identical to SEQ ID NO: 826542

SEQ ID NO: 826554 - protein, 162 aa, Homo sapiens
LGVGPRILLATREISPFSSCLQCGYKSGIFLLLLFFSNYTWAPFFVLDFSTLFPSLLCCCFLISSTKIFLSGVYLIGSVLSSPPPPPPSLRCVLPLPLLPPRQPAQPPHRRPSPSAVQKPPQRRRQSKRASFCEIIEELFSPVCLLEWCQVLVLENLSTTRD

SEQ ID NO: 826555 - protein, 103 aa, Homo sapiens
MGAQFSKTAAKGEAAAERPGEAAVASSPSKANGQENGHVKVNGDASPAAAESGAKEELQANGSAPAADKEEPAAAAASSACAAPSQEAQPECSPEAPPAEAAE

SEQ ID NO: 826556 - protein, 332 aa, Homo sapiens; identical to SEQ ID NO: 826542

SEQ ID NO: 826557 - protein, 332 aa, Homo sapiens; identical to SEQ ID NO: 826542

SEQ ID NO: 826558 - protein, 423 aa, Homo sapiens
DSYLKPERLTATQKKRNRQKERQEIKTPGSRTHTHSHTLTHIETTPLPPVCVAAAAVAAAAAAAARPVVTPTRGSLFPLLDLLSFFVEEASMGAQFSKTAAKGEAAAERPGEAAVASSPSKANGQENGHVKVNGDASPAAAESGAKEELQANGSAPAADKEEPAAAGSGAASPSAAEKGEPAAAAAPEAGASPVEKEAPAEGEAAEPGSPTAAEGEAASAASSTSSPKAEDGATPSPSNETPKKKKKRFSFKKSFKLSGFSFKKNKKEAGEGGEAEAPAAEGGKDEAAGGAAAAAAEAGAASGEQAAAPGEEAAAGEEGAAGGDPQEAKPQEAAVAPEKPPASDETKAAEEPSKVEEKKAEEAGASAAACEAPSAAGPGAPPEQEAAPAEEPAAAAASSACAAPSQEAQPECSPEAPPAEAAE

SEQ ID NO: 826559 - protein, 332 aa, Homo sapiens; identical to SEQ ID NO: 826542

SEQ ID NO: 826560 - protein, 435 aa, Homo sapiens
QLWLCAFFQRAFAVSTSPWHLFSPKPPIKRGLAWLAFACYVSDFVFRALAEWLGGHCRTWGLQLCFGGVSRQRCPFPRSWGSLLGIHPRLPPHNGGGGVSMATGALGGSGALPVQGWGREWRRPGRFSDAPAFSAPEENGHVKVNGDASPAAAESGAKEELQANGSAPAADKEEPAAAGSGAASPSAAEKGEPAAAAAPEAGASPVEKEAPAEGEAAEPGSPTAAEGEAASAASSTSSPKAEDGATPSPSNETPKKKKKRFSFKKSFKLSGFSFKKNKKEAGEGGEAEAPAAEGGKDEAAGGAAAAAAEAGAASGEQAAAPGEEAAAGEEGAAGGDPQEAKPQEAAVAPEKPPASDETKAAEEPSKVEEKKAEEAGASAAACEAPSAAGPGAPPEQEAAPAEEPAAAAASSACAAPSQEAQPECSPEAPPAEAAE

SEQ ID NO: 826561 - protein, 119 aa, Homo sapiens; identical to SEQ ID NO: 826549

SEQ ID NO: 826562 - protein, 332 aa, Homo sapiens; identical to SEQ ID NO: 826542

SEQ ID NO: 826563 - protein, 332 aa, Homo sapiens; identical to SEQ ID NO: 826542

SEQ ID NO: 826564 - protein, 156 aa, Homo sapiens
LGVGPRILLATREISPFSSCLQCGYKSGIFLLLLFFSNYTWAPFFVLDFSTLFPSLLCCCFLISSTKIFLSGVYLIGSVLSSPPPPPPSLRCVLPLPLLPPPHRRPSPSAVQKPPQRRRQSKRASFCEIIEELFSPVCLLEWCQVLVLENLSTTRD

SEQ ID NO: 826565 - protein, 299 aa, Homo sapiens
MDLSELERDNTGRCRLSSPVPAVCRKEPCVLGVDEAGRGPVLGPMVYAICYCPLPRLADLEALKVADSKTLLESERERLFAKMEDTDFVGWALDVLSPNLISTSMLGRVKYNLNSLSHDTATGLIQYALDQGVNVTQVFVDTVGMPETYQARLQQSFPGIEVTVKAKADALYPVVSAASICAKVARDQAVKKWQFVEKLQDLDTDYGSGYPNDPKTKAWLKEHVEPVFGFPQFVRFSWRTAQTILEKEAEDVIWEDSASENQEGLRKITSYFLNEGSQARPRSSHRYFLERGLESATSL

SEQ ID NO: 826566 - protein, 299 aa, Homo sapiens; identical to SEQ ID NO: 826565

SEQ ID NO: 826567 - protein, 283 aa, Homo sapiens
MDLSELERDNTGRCRLSSPVPAVCRKEPCVLGVDEAGRGPVLGPMVYAICYCPLPRLADLEALKVADSKTLLESERERLFAKMEDTDFVGWALDVLSPNLISTSMLGRVKYNLNSLSHDTATGLIQYALDQGVNVTQVFVDTVGMPETYQARLQQSFPGIEVTVKAKADALYPVVSAASICAKVARDQAVKKWQFVEKLQDLDTDYGSGYPNDPKTKAWLKEHVEPVFGFPQFVRFSWRTAQTILEKEAEDVIWGVSWMSWGCYREGRREASVQPCLRGLLPV

SEQ ID NO: 826568 - protein, 283 aa, Homo sapiens; identical to SEQ ID NO: 826567

SEQ ID NO: 826569 - protein, 319 aa, Homo sapiens
SVESSMDRDRAYQMHSIGPVYSCCSRMLRRRVCRHQRCPFAVLVRRLSAGMGSPLSGLPLVYRQYYYYSSMHSALARVWMAAEDVADSKTLLESERERLFAKMEDTDFVGWALDVLSPNLISTSMLGRVKYNLNSLSHDTATGLIQYALDQGVNVTQVFVDTVGMPETYQARLQQSFPGIEVTVKAKADALYPVVSAASICAKVARDQAVKKWQFVEKLQDLDTDYGSGYPNDPKTKAWLKEHVEPVFGFPQFVRFSWRTAQTILEKEAEDVIWEDSASENQEGLRKITSYFLNEGSQARPRSSHRYFLERGLESATSL

SEQ ID NO: 826570 - protein, 217 aa, Homo sapiens
MDLSELERDNTGRCRLSSPVPAVCRKEPCVLGVDEAGRGPVLGPMVYAICYCPLPRLADLEALKVADSKTLLESERERLFAKMEDTDFVGWALDVLSPNLISTSMLGRVKYNLNSLSHDTATGLIQYALDQGVNVTQVFVDTVGMPETYQARLQQSFPGIEVTVKAKADALYPVVSAASICAKGPDHPGERGGRCYMGGLSIRESGGTQEDHILLPQ

SEQ ID NO: 826571 - protein, 67 aa, Homo sapiens
GRKQAPLRGPRKTRAETRSCSISSCSWWWRLRRHGSQRAGERQYRPLSPEFACARGVPQGALRPGRR

SEQ ID NO: 826572 - protein, 131 aa, Homo sapiens
MAQATRWLVLPASVPVARDQAVKKWQFVEKLQDLDTDYGSGYPNDPKTKAWLKEHVEPVFGFPQFVRFSWRTAQTILEKEAEDVIWEDSASENQEGLRKITSYFLNEGSQARPRSSHRYFLERGLESATSL

SEQ ID NO: 826573 - protein, 299 aa, Homo sapiens; identical to SEQ ID NO: 826565

SEQ ID NO: 826574 - protein, 299 aa, Homo sapiens; identical to SEQ ID NO: 826565

SEQ ID NO: 826575 - protein, 299 aa, Homo sapiens; identical to SEQ ID NO: 826565

SEQ ID NO: 826576 - protein, 255 aa, Homo sapiens
MVYAICYCPLPRLADLEALKVADSKTLLESERERLFAKMEDTDFVGWALDVLSPNLISTSMLGRVKYNLNSLSHDTATGLIQYALDQGVNVTQVFVDTVGMPETYQARLQQSFPGIEVTVKAKADALYPVVSAASICAKVARDQAVKKWQFVEKLQDLDTDYGSGYPNDPKTKAWLKEHVEPVFGFPQFVRFSWRTAQTILEKEAEDVIWEDSASENQEGLRKITSYFLNEGSQARPRSSHRYFLERGLESATSL

SEQ ID NO: 826577 - protein, 231 aa, Homo sapiens
DRTWRATGTAVPGKLGSRRASYVSSIPTGLHVYLADVHALVKYNLNSLSHDTATGLIQYALDQGVNVTQVFVDTVGMPETYQARLQQSFPGIEVTVKAKADALYPVVSAASICAKVARDQAVKKWQFVEKLQDLDTDYGSGYPNDPKTKAWLKEHVEPVFGFPQFVRFSWRTAQTILEKEAEDVIWEDSASENQEGLRKITSYFLNEGSQARPRSSHRYFLERGLESATSL

SEQ ID NO: 826578 - protein, 139 aa, Homo sapiens
MDLSELERDNTGRCRLSSPVPAVCRKEPCVLGVDEAGRGPVLGPMVYAICYCPLPRLADLEALKVADSKTLLESERERLFAKMEDTDFVGWALDVLSPNLISTSMLGRVKYNLNSLSHDTATGLIQYALDQGVNVTQVS

SEQ ID NO: 826579 - protein, 246 aa, Homo sapiens
VTASQSPKMAGRSLCLTRSSVPGTPFPPPVQQPSTPGPDLLALEEEYKRLNAELQAKTADVVQQAKEIIRDRQEVRSRPVSTQMKSCDDEDDYSLRGLLPSEGIVHLHSETKPKTKNIDPVNKVQNKLHSANKGRKTNSSVKLKYSDVQTADDVAIPEDFSDFSLAKTISKIEGQLEEEGLPEYIDDIFSGVSNDIGTEAQIRFLKAKLHVMQEELDNVVCECNKKEDEIQNLKSQVKNFEEDFMR

SEQ ID NO: 826580 - protein, 163 aa, Homo sapiens
MKSCDDEDDYSLRGLLPSEGIVHLHSETKPKTKNIDPVNKVQNKLHSANKGRKTNSSVKLKYSDVQTADDVAIPEDFSDFSLAKTISKIEGQLEEEGLPEYIDDIFSGVSNDIGTEAQIRFLKAKLHVMQEELDNVVCECNKKEDEIQNLKSQVKNFEEDFMR

SEQ ID NO: 826581 - protein, 163 aa, Homo sapiens; identical to SEQ ID NO: 826580

SEQ ID NO: 826582 - protein, 163 aa, Homo sapiens; identical to SEQ ID NO: 826580

SEQ ID NO: 826583 - protein, 87 aa, Homo sapiens
VTASQSPKMAGRSLCLTVSSTPGSWGASGFRRLGRLTSFNFGSESLWLFYREAAFQGLRSRHPFSNPLHLDPTSSPWRKNISKKFGG

SEQ ID NO: 826584 - protein, 68 aa, Homo sapiens
AASTAWQRRFLLFVKIVISSLRPWAKKQPSPGHSRFVLLLAEPRQPCSPHLGYKRNGGVFLVSFRGNF

SEQ ID NO: 826585 - protein, 69 aa, Homo sapiens
GSLNRLAAAVSSLRENRDLISPSMGEKTAITRPFTLCAFVSRAQAALQPTSRFLCRRQQDAPGNVCEKG

SEQ ID NO: 826586 - protein, 68 aa, Homo sapiens; identical to SEQ ID NO: 826584

SEQ ID NO: 826587 - protein, 68 aa, Homo sapiens; identical to SEQ ID NO: 826584

SEQ ID NO: 826588 - protein, 114 aa, Homo sapiens
FSTTSLLSNYWFVGTQKVPKPLCEKGLAAKCFDMPVSLDGDTNTSTQEVVQYNWETGDDRFSFRSFRSGMWLSCEETVEEPALLHPQSWKQFRCLRSSGTAAAKGERCRSFIEQ

SEQ ID NO: 826589 - protein, 68 aa, Homo sapiens; identical to SEQ ID NO: 826584

SEQ ID NO: 826590 - protein, 160 aa, Homo sapiens
MSTFFSDTAWICLAVPTVLCGTVFCKYKKSSGQLWSWMVCLAGLCAVCLLILSPFWGLILFSVSCFLMYTYLSGQELLPVDQKAVLVTGGDCGLGHALCKYLDELGFTVFAGVLNENGPGAEELRRTCSPRLSVLQMDITKPVQMTVGCDQQCWGAWLSN

SEQ ID NO: 826591 - protein, 387 aa, Homo sapiens
MSTFFSDTAWICLAVPTVLCGTVFCKYKKSSGQLWSWMVCLAGLCAVCLLILSPFWGLILFSVSCFLMYTYLSGQELLPVDQKAVLVTGGDCGLGHALCKYLDELGFTVFAGVLNENGPGAEELRRTCSPRLSVLQMDITKPVQIKDAYSKVAAMLQDRGLWAVINNAGVLGFPTDGELLLMTDYKQCMAVNFFGTVEVTKTFLPLLRKSKGRLVNVSSMGGGAPMERLASYGSSKAAVTMFSSVMRLELSKWGIKVASIQPGGFLTNIAGTSDKWEKLEKDILDHLPAEVQEDYGQDYILAQRNFLLLINSLASKDFSPVLRDIQHAILAKSPFAYYTPGKGAYLWICLAHYLPIGIYDYFAKRHFGQDKPMPRALRMPNYKKKAT

SEQ ID NO: 826592 - protein, 373 aa, Homo sapiens
MSTFFSDTAWICLAVPTVLCGTVFCKYKKSSGQLWSWMVCLAGLCAVCLLILSPFWGLILFSVSCFLMYTYLSGQELLPVDQKAVLVTGGDCGLGHALCKYLDELGFTVFAGVLNENGPGAEELRRTCSPRLSVLQMDITKPVQIKDAYSKVAAMLQDRGLWAVINNAGVLGFPTDGELLLMTDYKQCMAVNFFGTVEVTKTFLPLLRGAPMERLASYGSSKAAVTMFSSVMRLELSKWGIKVASIQPGGFLTNIAGTSDKWEKLEKDILDHLPAEVQEDYGQDYILAQRNFLLLINSLASKDFSPVLRDIQHAILAKSPFAYYTPGKGAYLWICLAHYLPIGIYDYFAKRHFGQDKPMPRALRMPNYKKKAT

SEQ ID NO: 826593 - protein, 320 aa, Homo sapiens
NKRSQPQRGPIPISIYLKQKSGGDCGLGHALCKYLDELGFTVFAGVLNENGPGAEELRRTCSPRLSVLQMDITKPVQIKDAYSKVAAMLQDRGLWAVINNAGVLGFPTDGELLLMTDYKQCMAVNFFGTVEVTKTFLPLLRKSKGRLVNVSSMGGGAPMERLASYGSSKAAVTMFSSVMRLELSKWGIKVASIQPGGFLTNIAGTSDKWEKLEKDILDHLPAEVQEDYGQDYILAQRNFLLLINSLASKDFSPVLRDIQHAILAKSPFAYYTPGKGAYLWICLAHYLPIGIYDYFAKRHFGQDKPMPRALRMPNYKKKAT

SEQ ID NO: 826594 - protein, 206 aa, Homo sapiens
MTDYKQCMAVNFFGTVEVTKTFLPLLRKSKGRLVNVSSMGGGAPMERLASYGSSKAAVTMFSSVMRLELSKWGIKVASIQPGGFLTNIAGTSDKWEKLEKDILDHLPAEVQEDYGQDYILAQRNFLLLINSLASKDFSPVLRDIQHAILAKSPFAYYTPGKGAYLWICLAHYLPIGIYDYFAKRHFGQDKPMPRALRMPNYKKKAT

SEQ ID NO: 826595 - protein, 251 aa, Homo sapiens [sequence omitted]

SEQ ID NO: 826596 - protein, 206 aa, Homo sapiens; identical to SEQ ID NO: 826594

SEQ ID NO: 826597 - protein, 99 aa, Homo sapiens
NRDKRLLPDFLWPSQDLTLPFPFTPDIAGTSDKWEKLEKDILDHLPAEVQEDYGQDYILAQRNFLLLINSLASKDFSPVLRDIQHAILAKSPFAYYTPG

SEQ ID NO: 826598 - protein, 387 aa, Homo sapiens; identical to SEQ ID NO: 826591

SEQ ID NO: 826599 - protein, 340 aa, Homo sapiens
RNHHMSPGLPLILFSVSCFLMYTYLSGQELLPVDQKAVLVTGGDCGLGHALCKYLDELGFTVFAGVLNENGPGAEELRRTCSPRLSVLQMDITKPVQIKDAYSKVAAMLQDRGLWAVINNAGVLGFPTDGELLLMTDYKQCMAVNFFGTVEVTKTFLPLLRKSKGRLVNVSSMGGGAPMERLASYGSSKAAVTMFSSVMRLELSKWGIKVASIQPGGFLTNIAGTSDKWEKLEKDILDHLPAEVQEDYGQDYILAQRNFLLLINSLASKDFSPVLRDIQHAILAKSPFAYYTPGKGAYLWICLAHYLPIGIYDYFAKRHFGQDKPMPRALRMPNYKKKAT

SEQ ID NO: 826600 - protein, 392 aa, Homo sapiens
MSTFFSDTAWICLAVPTVLCGTVFCKYKKSSGQLWSWMVCLAGLCAVCLLILSPFWGLILFSVSCFLMYTYLSGQELLPVDQKAVLVTGGDCGLGHALCKYLDELGFTVFAGVLNENGPGAEELRRTCSPRLSVLQMDITKPVQIKDAYSKVAAMLQDRGLWAVINNAGVLGFPTDGELLLMTDYKQCMAVNFFGTVEVTKTFLPLLSGIVDLPPHKKICLPGTSEGGAPMERLASYGSSKAAVTMFSSVMRLELSKWGIKVASIQPGGFLTNIAGTSDKWEKLEKDILDHLPAEVQEDYGQDYILAQRNFLLLINSLASKDFSPVLRDIQHAILAKSPFAYYTPGKGAYLWICLAHYLPIGIYDYFAKRHFGQDKPMPRALRMPNYKKKAT

SEQ ID NO: 826601 - protein, 311 aa, Homo sapiens
MLPVDQKAVLVTGGDCGLGHALCKYLDELGFTVFAGVLNENGPGAEELRRTCSPRLSVLQMDITKPVQIKDAYSKVAAMLQDRGLWAVINNAGVLGFPTDGELLLMTDYKQCMAVNFFGTVEVTKTFLPLLRKSKGRLVNVSSMGGGAPMERLASYGSSKAAVTMFSSVMRLELSKWGIKVASIQPGGFLTNIAGTSDKWEKLEKDILDHLPAEVQEDYGQDYILAQRNFLLLINSLASKDFSPVLRDIQHAILAKSPFAYYTPGKGAYLWICLAHYLPIGIYDYFAKRHFGQDKPMPRALRMPNYKKKAT

SEQ ID NO: 826602 - protein, 325 aa, Homo sapiens
NKRSQPQRGPIPISIYLKQKSGGDCGLGHALCKYLDELGFTVFAGVLNENGPGAEELRRTCSPRLSVLQMDITKPVQIKDAYSKVAAMLQDRGLWAVINNAGVLGFPTDGELLLMTDYKQCMAVNFFGTVEVTKTFLPLLSGIVDLPPHKKICLPGTSEGGAPMERLASYGSSKAAVTMFSSVMRLELSKWGIKVASIQPGGFLTNIAGTSDKWEKLEKDILDHLPAEVQEDYGQDYILAQRNFLLLINSLASKDFSPVLRDIQHAILAKSPFAYYTPGKGAYLWICLAHYLPIGIYDYFAKRHFGQDKPMPRALRMPNYKKKAT

SEQ ID NO: 826603 - protein, 1053 aa, Homo sapiens
GAQLLGVHPKGESQRASRGGGQATKMSSAVGPRGPRPPTVPPPMQELPDLSHLTEEERNIIMAVMDRQKEEEEKEEAMLKCVVRDMAKPAACKTPRNAENQPHQPSPRLHQQFESYKEQVRKIGEEARRYQGEHKDDAPTCGICHKTKFADGCGHLCSYCRTKFCARCGGRVSLRSNNDDKEVMWVCNLCRKQQEILTKSGAWFFGSGPQQTSQDGTLSDTATGAGSEVPREKKARLQERSRSQTPLSTAAASSQDAAPPSAPPDRSKGAEPSQQALGPEQKQASSRSRSEPPRERKKTPGLSEQNGKGALKSERKRVPKTSAQPVEGAVEERERKERRESRRLEKGRSQDYPDTPEKRDEGKAADEEKQRKEEDYQTRYRSDPNLARYPVKPPPEEQQMRMHARVSRARHERRHSDVALPRTEAGAALPEGKAGKRAPAAARASPPDSPRAYSAERTAETRAPGAKQLTNHSPPAPRHGPVPAEAPELKAQEPLRKQSRLDPSSAVLMLRNDSLSSDQSESVRPSPPKPHRSKRGGKKRQMSVSSSEEEGVSTPEYTSCEDVELESESVSEKGDLDYYWLDPATWHSRETSPISSHPVTWQPSKEGDRLIGRVILNKRTTMPKDSGALLGLKVVGGKMTDLGRLGAFITKVKKGSLADVVGHLRAGDEVLEWNGKPLPGATNEEVYNIILESKSEPQVEIIVSRPIGDIPRIPESSHPPLESSSSSFESQKMERPSISVISPTSPGALKDAPQVLPGQLSVKLWYDKVGHQLIVNVLQATDLPARVDGRPRNPYVKMYFLPDRSDKSKRRTKTVKKILEPKWNQTFVYSHVHRRDFRERMLEITVWDQPRVQEEESEFLGEILIELETALLDDEPHWYKLQTHDESSLPLPQPSPFMPRRHIHGESSSKKLQRSQRISDSDISDYEVDDGIGVVPPVGYRSSARESKSTTLTVPEQQRTTHHRSRSVSPHRGNDQGKPRSRLPNVPLQRSLDEIHPTRRSRSPTRHHDASRSPVDHRTRDVDSQYLSEQDSELLMLPRAKRGRSAECLHTTR

SEQ ID NO: 826604 - protein, 1529 aa, Homo sapiens
GAQLLGVHPKGESQRASRGGGQATKMSSAVGPRGPRPPTVPPPMQELPDLSHLTEEERNIIMAVMDRQKEEEEKEEAMLKCVVRDMAKPAACKTPRNAENQPHQPSPRLHQQFESYKEQVRKIGEEARRYQGEHKDDAPTCGICHKTKFADGCGHLCSYCRTKFCARCGGRVSLRSNNDDKEVMWVCNLCRKQQEILTKSGAWFFGSGPQQTSQDGTLSDTATGAGSEVPREKKARLQERSRSQTPLSTAAASSQDAAPPSAPPDRSKGAEPSQQALGPEQKQASSRSRSEPPRERKKTPGLSEQNGKGALKSERKRVPKTSAQPVEGAVEERERKERRESRRLEKGRSQDYPDTPEKRDEGKAADEEKQRKEEDYQTRYRSDPNLARYPVKPPPEEQQMRMHARVSRARHERRHSDVALPRTEAGAALPEGKAGKRAPAAARASPPDSPRAYSAERTAETRAPGAKQLTNHSPPAPRHGPVPAEAPELKAQEPLRKQSRLDPSSAVLMLRNDSLSSDQSESVRPSPPKPHRSKRGGKKRQMSVSSSEEEGVSTPEYTSCEDVELESESVSEKGDLDYYWLDPATWHSRETSPISSHPVTWQPSKEGDRLIGRVILNKRTTMPKDSGALLGLKVVGGKMTDLGRLGAFITKVKKGSLADVVGHLRAGDEVLEWNGKPLPGATNEEVYNIILESKSEPQVEIIVSRPIGDIPRIPESSHPPLESSSSSFESQKMERPSISVISPTSPGALKDAPQVLPGQLSVKLWYDKVGHQLIVNVLQATDLPARVDGRPRNPYVKMYFLPDRSDKSKRRTKTVKKILEPKWNQTFVYSHVHRRDFRERMLEITVWDQPRVQEEESEFLGEILIELETALLDDEPHWYKLQTHDESSLPLPQPSPFMPRRHIHGESSSKKLQRSQRISDSDISDYEVDDGIGVVPPVGYRSSARESKSTTLTVPEQQRTTHHRSRSVSPHRGNDQGKPRSRLPNVPLQRSLDEIHPTRRSRSPTRHHDASRSPVDHRTRDVDSQYLSEQDSELLMLPRAKRGRSAECLHTTSELQPFLDRARSASTNCLRPDTSLHSPERERMHRQRSPTQSPPADTSFSSRRGRQLPQVPVRSGSIEQASLVVEERTRQMKMKVHRFKQTTGSGSSQELDREQYSKYNIHKDQYRSCDNVSAKSSDSDVSDVSAISRTSSASRLSSTSFMSEQSERPRGRISSFTPKMQGRRMGTSGRSIMKSTSVSGEMYTLEHNDGSQSDTAVGTVGAGGKKRRSSLSAKVVAIVSRRSRSTSQLSQTESGHKKLKSTIQRSTETGMAAEMRKMVRQPSRESTDGSINSYSSEGNLIFPGVRLGADSQFSDFLDGLGPAQLVGRQTLATPAMGDIQIGMEDKKGQLEVEVIRARSLTQKPGSKSTPAPYVKVYLLENGACIAKKKTRIARKTLDPLYQQSLVFDESPQGKVLQVIVWGDYGRMDHKCFMGVAQILLEELDLSSMVIGWYKLFPPSSLVDPTLTPLTRRASQSSLESSTGPPCIRS

SEQ ID NO: 826605 - protein, 1490 aa, Homo sapiens
GAQLLGVHPKGESQRASRGGGQATKMSSAVGPRGPRPPTVPPPMQELPDLSHLTEEERNIIMAVMDRQKEEEEKEEAMLKCVVRDMAKPAACKTPRNAENQPHQPSPRLHQQFESYKEQVRKIGEEARRYQGEHKDDAPTCGICHKTKFADGCGHLCSYCRTKFCARCGGRVSLRSNNDDKEVMWVCNLCRKQQEILTKSGAWFFGSGPQQTSQDGTLSDTATGAGSEVPREKKARLQERSRSQTPLSTAAASSQDAAPPSAPPDRSKGAEPSQQALGPEQKQASSRSRSEPPRERKKTPGLSEQNGKGALKSERKRVPKTSAQPVEGAVEERERKERRESRRLEKGRSQDYPDTPEKRDEGKAADEEKQRKEEDYQTRYRSDPNLARYPVKPPPEEQQMRMHARVSRARHERRHSDVALPRTEAGAALPEGKAGKRAPAAARASPPDSPRAYSAERTAETRAPGAKQLTNHSPPAPRHGPVPAEAPELKAQEPLRKQSRLDPSSAVLMLRNDSLSSDQSESVRPSPPKPHRSKRGGKKRQMSVSSSEEEGVSTPEYTSCEDVELESESVSEKGDLDYYWLDPATWHSRETSPISSHPVTWQPSKEGDRLIGRVILNKRTTMPKDSGALLGLKVVGGKMTDLGRLGAFITKVKKGSLADVVGHLRAGDEVLEWNGKPLPGATNEEVYNIILESKSEPQVEIIVSRPIGDIPRIPESSHPPLESSSSSFESQKMERPSISVISPTSPGALKDAPQVLPGQLSVKLWYDKVGHQLIVNVLQATDLPARVDGRPRNPYVKMYFLPDRSDKSKRRTKTVKKILEPKWNQTFVYSHVHRRDFRERMLEITVWDQPRVQEEESEFLGEILIELETALLDDEPHWYKLQTHDESSLPLPQPSPFMPRRHIHGESSSKKLQRSQRISDSDISDYEVDDGIGVVPPVGYRSSARESKSTTLTVPEQQRTTHHRSRSVSPHRGNDQGKPRSRLPNVPLQRSLDEIHPTRRSRSPTRHHDASRSPVDHRTRDVDSQYLSEQDSELLMLPRAKRGRSAECLHTTRMHRQRSPTQSPPADTSFSSRRGRQLPQVPVRSGSIEQASLVVEERTRQMKMKVHRFKQTTGSGSSQELDREQYSKYNIHKDQYRSCDNVSAKSSDSDVSDVSAISRTSSASRLSSTSFMSEQSERPRGRIRRMGTSGRSIMKSTSVSGEMYTLEHNDGSQSDTAVGTVGAGGKKRRSSLSAKVVAIVSRRSRSTSQLSQTESGHKKLKSTIQRSTETGMAAEMRKMVRQPSRESTDGSINSYSSEGNLIFPGVRLGADSQFSDFLDGLGPAQLVGRQTLATPAMGDIQIGMEDKKGQLEVEVIRARSLTQKPGSKSTPAPYVKVYLLENGACIAKKKTRIARKTLDPLYQQSLVFDESPQGKVLQVIVWGDYGRMDHKCFMGVAQILLEELDLSSMVIGWYKLFPPSSLVDPTLTPLTRRASQSSLESSTGPPCIRS

SEQ ID NO: 826606 - protein, 1357 aa, Homo sapiens
GAQLLGVHPKGESQRASRGGGQATKMSSAVGPRGPRPPTVPPPMQELPDLSHLTEEERNIIMAVMDRQKEEEEKEEAMLKCVVRDMAKPAACKTPRNAENQPHQPSPRLHQQFESYKEQVRKIGEEARRYQGEHKDDAPTCGICHKTKFADGCGHLCSYCRTKFCARCGGRVSLRSNNDDKEVMWVCNLCRKQQEILTKSGAWFFGSGPQQTSQDGTLSDTATGAGSEVPREKKARLQERSRSQTPLSTAAASSQDAAPPSAPPDRSKGAEPSQQALGPEQKQASSRSRSEPPRERKKTPGLSEQNGKGALKSERKRVPKTSAQPVEGAVEERERKERRESRRLEKGRSQDYPDTPEKRDEGKAADEEKQRKEEDYQTRYRSDPNLARYPVKPPPEEQQMRMHARVSRARHERRHSDVALPRTEAGAALPEGKAGKRAPAAARASPPDSPRAYSAERTAETRAPGAKQLTNHSPPAPRHGPVPAEAPELKAQEPLRKQSRLDPSSAVLMLRNDSLSSDQSESVRPSPPKPHRSKRGGKKRQMSVSSSEEEGVSTPEYTSCEDVELESESVSEKGDLDYYWLDPATWHSRETSPISSHPVTWQPSKEGDRLIGRVILNKRTTMPKDSGALLGLKVVGGKMTDLGRLGAFITKVKKGSLADVVGHLRAGDEVLEWNGKPLPGATNEEVYNIILESKSEPQVEIIVSRPIGDIPRIPESSHPPLESSSSSFESQKMERPSISVISPTSPGALKDAPQVLPGQLSVKLWYDKVGHQLIVNVLQATDLPARVDGRPRNPYVKMYFLPDRSDKSKRRTKTVKKILEPKWNQTFVYSHVHRRDFRERMLEITVWDQPRVQEEESEFLGEILIELETALLDDEPHWYKLQTHDESSLPLPQPSPFMPRRHIHGESSSKKLQRSQRISDSDISDYEVDDGIGVVPPVGYRSSARESKSTTLTVPEQQRTTHHRSRSVSPHRGNDQGKPRSRLPNVPLQRSLDEIHPTRRSRSPTRHHDASRSPVDHRTRDVDSQYLSEQDSELLMLPRAKRGRSAECLHTTSELQPFLDRARSASTNCLRPDTSLHSPERERMHRQRSPTQSPPADTSFSSRRGRQLPQVPVRSGSIEQESGHKKLKSTIQRSTETGMAAEMRKMVRQPSRESTDGSINSYSSEGNLIFPGVRLGADSQFSDFLDGLGPAQLVGRQTLATPAMGDIQIGMEDKKGQLEVEVIRARSLTQKPGSKSTPAPYVKVYLLENGACIAKKKTRIARKTLDPLYQQSLVFDESPQGKVLQVIVWGDYGRMDHKCFMGVAQILLEELDLSSMVIGWYKLFPPSSLVDPTLTPLTRRASQSSLESSTGPPCIRS

SEQ ID NO: 826607 - protein, 219 aa, Homo sapiens
MAAEMRKMVRQPSRESTDGSINSYSSEGNLIFPGVRLGADSQFSDFLDGLGPAQLVGRQTLATPAMGDIQIGMEDKKGQLEVEVIRARSLTQKPGSKSTPAPYVKVYLLENGACIAKKKTRIARKTLDPLYQQSLVFDESPQGKVLQVIVWGDYGRMDHKCFMGVAQILLEELDLSSMVIGWYKLFPPSSLVDPTLTPLTRRASQSSLESSTGPPCIRS

SEQ ID NO: 826608 - protein, 1555 aa, Homo sapiens
GAQLLGVHPKGESQRASRGGGQATKMSSAVGPRGPRPPTVPPPMQELPDLSHLTEEERNIIMAVMDRQKEEEEKEEAMLKCVVRDMAKPAACKTPRNAENQPHQPSPRLHQQFESYKEQVRKIGEEARRYQGEHKDDAPTCGICHKTKFADGCGHLCSYCRTKFCARCGGRVSLRSNNDDKEVMWVCNLCRKQQEILTKSGAWFFGSGPQQTSQDGTLSDTATGAGSEVPREKKARLQERSRSQTPLSTAAASSQDAAPPSAPPDRSKGAEPSQQALGPEQKQASSRSRSEPPRERKKTPGLSEQNGKGALKSERKRVPKTSAQPVEGAVEERERKERRESRRLEKGRSQDYPDTPEKRDEGKAADEEKQRKEEDYQTRYRSDPNLARYPVKPPPEEQQMRMHARVSRARHERRHSDVALPRTEAGAALPEGKAGKRAPAAARASPPDSPRAYSAERTAETRAPGAKQLTNHSPPAPRHGPVPAEAPELKAQEPLRKQSRLDPSSAVLMLRNDSLSSDQSESVRPSPPKPHRSKRGGKKRQMSVSSSEEEGVSTPEYTSCEDVELESESVSEKGDLDYYWLDPATWHSRETSPISSHPVTWQPSKEGDRLIGRVILNKRTTMPKDSGALLGLKVVGGKMTDLGRLGAFITKVKKGSLADVVGHLRAGDEVLEWNGKPLPGATNEEVYNIILESKSEPQVEIIVSRPIGDIPRIPESSHPPLESSSSSFESQKMERPSISVISPTSPGALKDAPQVLPGQLSVKLWYDKVGHQLIVNVLQATDLPARVDGRPRNPYVKMYFLPDRSDKSKRRTKTVKKILEPKWNQTFVYSHVHRRDFRERMLEITVWDQPRVQEEESEFLGEILIELETALLDDEPHWYKLQTHDESSLPLPQPSPFMPRRHIHGESSSKKLQRSQRISDSDISDYEVDDGIGVVPPVGYRSSARESKSTTLTVPEQQRTTHHRSRSVSPHRGNDQGKPRSRLPNVPLQRSLDEIHPTRRSRSPTRHHDASRSPVDHRTRDVDSQYLSEQDSELLMLPRAKRGRSAECLHTTRHLVRHYKTLPPKMPLLQSSSHWNIYSELQPFLDRARSASTNCLRPDTSLHSPERERMHRQRSPTQSPPADTSFSSRRGRQLPQVPVRSGSIEQASLVVEERTRQMKMKVHRFKQTTGSGSSQELDREQYSKYNIHKDQYRSCDNVSAKSSDSDVSDVSAISRTSSASRLSSTSFMSEQSERPRGRISSFTPKMQGRRMGTSGRSIMKSTSVSGEMYTLEHNDGSQSDTAVGTVGAGGKKRRSSLSAKVVAIVSRRSRSTSQLSQTESGHKKLKSTIQRSTETGMAAEMRKMVRQPSRESTDGSINSYSSEGNLIFPGVRLGADSQFSDFLDGLGPAQLVGRQTLATPAMGDIQIGMEDKKGQLEVEVIRARSLTQKPGSKSTPAPYVKVYLLENGACIAKKKTRIARKTLDPLYQQSLVFDESPQGKVLQVIVWGDYGRMDHKCFMGVAQILLEELDLSSMVIGWYKLFPPSSLVDPTLTPLTRRASQSSLESSTGPPCIRS

SEQ ID NO: 826609 - protein, 1385 aa, Homo sapiens
GAQLLGVHPKGESQRASRGGGQATKMSSAVGPRGPRPPTVPPPMQELPDLSHLTEEERNIIMAVMDRQKEEEEKEEAMLKCVVRDMAKPAACKTPRNAENQPHQPSPRLHQQFESYKEQVRKIGEEARRYQGEHKDDAPTCGICHKTKFADGCGHLCSYCRTKFCARCGGRVSLRSNNDDKEVMWVCNLCRKQQEILTKSGAWFFGSGPQQTSQDGTLSDTATGAGSEVPREKKARLQERSRSQTPLSTAAASSQDAAPPSAPPDRSKGAEPSQQALGPEQKQASSRSRSEPPRERKKTPGLSEQNGKGALKSERKRVPKTSAQPVEGAVEERERKERRESRRLEKGRSQDYPDTPEKRDEGKAADEEKQRKEEDYQTRYRSDPNLARYPVKPPPEEQQMRMHARVSRARHERRHSDVALPRTEAGAALPEGKAGKRAPAAARASPPDSPRAYSAERTAETRAPGAKQLTNHSPPAPRHGPVPAEAPELKAQEPLRKQSRLDPSSAVLMLRNDSLSSDQSESVRPSPPKPHRSKRGGKKRQMSVSSSEEEGVSTPEYTSCEDVELESESVSEKGDLDYYWLDPATWHSRETSPISSHPVTWQPSKEGDRLIGRVILNKRTTMPKDSGALLGLKVVGGKMTDLGRLGAFITKVKKGSLADVVGHLRAGDEVLEWNGKPLPGATNEEVYNIILESKSEPQVEIIVSRPIGDIPRIPESSHPPLESSSSSFESQKMERPSISVISPTSPGALKDAPQVLPGQLSVKLWYDKVGHQLIVNVLQATDLPARVDGRPRNPYVKMYFLPDRSDKSKRRTKTVKKILEPKWNQTFVYSHVHRRDFRERMLEITVWDQPRVQEEESEFLGEILIELETALLDDEPHWYKLQTHDESSLPLPQPSPFMPRRHIHGESSSKKLQRSQRISDSDISDYEVDDGIGVVPPVGYRSSARESKSTTLTVPEQQRTTHHRSRSVSPHRGNDQGKPRSRLPNVPLQRSLDEIHPTRRSRSPTRHHDASRSPVDHRTRDVDSQYLSEQDSELLMLPRAKRGRSAECLHTTSELQPFLDRARSASTNCLRPDTSLHSPERERGRWSPSLDRRRPPSPRIQIQHASPENDRMHRQRSPTQSPPADTSFSSRRGRQLPQVPVRSGSIEQESGHKKLKSTIQRSTETGMAAEMRKMVRQPSRESTDGSINSYSSEGNLIFPGVRLGADSQFSDFLDGLGPAQLVGRQTLATPAMGDIQIGMEDKKGQLEVEVIRARSLTQKPGSKSTPAPYVKVYLLENGACIAKKKTRIARKTLDPLYQQSLVFDESPQGKVLQVIVWGDYGRMDHKCFMGVAQILLEELDLSSMVIGWYKLFPPSSLVDPTLTPLTRRASQSSLESSTGPPCIRS

SEQ ID NO: 826610 - protein, 1306 aa, Homo sapiens
GAQLLGVHPKGESQRASRGGGQATKMSSAVGPRGPRPPTVPPPMQELPDLSHLTEEERNIIMAVMDRQKEEEEKEEAMLKCVVRDMAKPAACKTPRNAENQPHQPSPRLHQQFESYKEQVRKIGEEARRYQGEHKDDAPTCGICHKTKFADGCGHLCSYCRTKFCARCGGRVSLRSNNDDKEVMWVCNLCRKQQEILTKSGAWFFGSGPQQTSQDGTLSDTATGAGSEVPREKKARLQERSRSQTPLSTAAASSQDAAPPSAPPDRSKGAEPSQQALGPEQKQASSRSRSEPPRERKKTPGLSEQNGKGALKSERKRVPKTSAQPVEGAVEERERKERRESRRLEKGRSQDYPDTPEKRDEGKAADEEKQRKEEDYQTRYRSDPNLARYPVKPPPEEQQMRMHARVSRARHERRHSDVALPRTEAGAALPEGKAGKRAPAAARASPPDSPRAYSAERTAETRAPGAKQLTNHSPPAPRHGPVPAEAPELKAQEPLRKQSRLDPSSAVLMLRNDSLSSDQSESVRPSPPKPHRSKRGGKKRQMSVSSSEEEGVSTPEYTSCEDVELESESVSEKGDLDYYWLDPATWHSRETSPISSHPVTWQPSKEGDRLIGRVILNKRTTMPKDSGALLGLKVVGGKMTDLGRLGAFITKVKKGSLADVVGHLRAGDEVLEWNGKPLPGATNEEVYNIILESKSEPQVEIIVSRPIGDIPRIPESSHPPLESSSSSFESQKMERPSISVISPTSPGALKDAPQVLPGQLSVKLWYDKVGHQLIVNVLQATDLPARVDGRPRNPYVKMYFLPDRSDKSKRRTKTVKKILEPKWNQTFVYSHVHRRDFRERMLEITVWDQPRVQEEESEFLGEILIELETALLDDEPHWYKLQTHDESSLPLPQPSPFMPRRHIHGESSSKKLQRSQRISDSDISDYEVDDGIGVVPPVGYRSSARESKSTTLTVPEQQRTTHHRSRSVSPHRGNDQGKPRSRLPNVPLQRSLDEIHPTRRSRSPTRHHDASRSPVDHRTRDVDSQYLSEQDRMHRQRSPTQSPPADTSFSSRRGRQLPQVPVRSGSIEQESGHKKLKSTIQRSTETGMAAEMRKMVRQPSRESTDGSINSYSSEGNLIFPGVRLGADSQFSDFLDGLGPAQLVGRQTLATPAMGDIQIGMEDKKGQLEVEVIRARSLTQKPGSKSTPAPYVKVYLLENGACIAKKKTRIARKTLDPLYQQSLVFDESPQGKVLQVIVWGDYGRMDHKCFMGVAQILLEELDLSSMVIGWYKLFPPSSLVDPTLTPLTRRASQSSLESSTGPPCIRS

SEQ ID NO: 826611 - protein, 1365 aa, Homo sapiens
GAQLLGVHPKGESQRASRGGGQATKMSSAVGPRGPRPPTVPPPMQELPDLSHLTEEERNIIMAVMDRQKEEEEKEEAMLKCVVRDMAKPAACKTPRNAENQPHQPSPRLHQQFESYKEQVRKIGEEARRYQGEHKDDAPTCGICHKTKFADGCGHLCSYCRTKFCARCGGRVSLRSNNDDKEVMWVCNLCRKQQEILTKSGAWFFGSGPQQTSQDGTLSDTATGAGSEVPREKKARLQERSRSQTPLSTAAASSQDAAPPSAPPDRSKGAEPSQQALGPEQKQASSRSRSEPPRERKKTPGLSEQNGKGALKSERKRVPKTSAQPVEGAVEERERKERRESRRLEKGRSQDYPDTPEKRDEGKAADEEKQRKEEDYQTRYRSDPNLARYPVKPPPEEQQMRMHARVSRARHERRHSDVALPRTEAGAALPEGKAGKRAPAAARASPPDSPRAYSAERTAETRAPGAKQLTNHSPPAPRHGPVPAEAPELKAQEPLRKQSRLDPSSAVLMLRNDSLSSDQSESVRPSPPKPHRSKRGGKKRQMSVSSSEEEGVSTPEYTSCEDVELESESVSEKGDLDYYWLDPATWHSRETSPISSHPVTWQPSKEGDRLIGRVILNKRTTMPKDSGALLGLKVVGGKMTDLGRLGAFITKVKKGSLADVVGHLRAGDEVLEWNGKPLPGATNEEVYNIILESKSEPQVEIIVSRPIGDIPRIPESSHPPLESSSSSFESQKMERPSISVISPTSPGALKDAPQVLPGQLSVKLWYDKVGHQLIVNVLQATDLPARVDGRPRNPYVKMYFLPDRSDKSKRRTKTVKKILEPKWNQTFVYSHVHRRDFRERMLEITVWDQPRVQEEESEFLGEILIELETALLDDEPHWYKLQTHDESSLPLPQPSPFMPRRHIHGESSSKKLQRSQRISDSDISDYEVDDGIGVVPPVGYRSSARESKSTTLTVPEQQRTTHHRSRSVSPHRGNDQGKPRSRLPNVPLQRSLDEIHPTRRSRSPTRHHDASRSPVDHRTRDVDSQYLSEQDSELLMLPRAKRGRSAECLHTTRHLVRHYKTLPPKMPLLQSSSHWNIYSELQPFLDRARSASTNCLRPDTSLHSPERERMHRQRSPTQSPPADTSFSSRRGRQLPQVPVRSGSIEQASLVVEERTRQMKMKVHRFKQTTGSGSSQELDREQYSKYNIHKDQYRSCDNVSAKSSDSDVSDVSAISRTSSASRLSSTSFMSEQSERPRGRISSFTPKMQGRRMGTSGRSIMKSTSVSGEMYTLEHNDGSQSDTAVGTVGAGGKKRRSSLSAKVVAIVSRRSRSTSQLSQTEQEKYNSSTKASLVVEERTRQMKMKVHRFKQTTGSGSSQELIASNIP

SEQ ID NO: 826612 - protein, 258 aa, Homo sapiens
AGRPREAADRRAPRGHLAPEEERRQRPARLGAPTAARGREPGGLGAPASPGHRAGSGCGAASSRCNRAGRRPQPEPEPERRERDLMAAVAPAGPGDSASAALDELSLNFTYGAPGAGNGSLSGDWYRRNQIHLFGVLLAILGNLVISISLNIQKYSHLQLAQQEHPRPYFKSVLWWGGVLLMAVGETGNFAAYGFAPITLIAPLGCVSVTGKPFCILTNRNLKSRIIGEKHTTETTNAPKKKVYCLVSYHVNMEQLFC

SEQ ID NO: 826613 - protein, 220 aa, Homo sapiens
AGRPREAADRRAPRGHLAPEEERRQRPARLGAPTAARGREPGGLGAPASPGHRAGSGCGAASSRCNRAGRRPQPEPEPERRERDLMAAVAPAGPGDSASAALDELSLNFTYGAPGAGNGSLSGDWYRRNQIHLFGVLLAILGNLVISISLNIQKYSHLQLAQQEHPRPYFKSVLWWGGVLQNASVVPSKSEALKLSFRNVTEIMALPVTDTQPNGAIRVM

SEQ ID NO: 826614 - protein, 453 aa, Homo sapiens
AGRPREAADRRAPRGHLAPEEERRQRPARLGAPTAARGREPGGLGAPASPGHRAGSGCGAASSRCNRAGRRPQPEPEPERRERDLMAAVAPAGPGDSASAALDELSLNFTYGAPGAGNGSLSGDWYRRNQIHLFGVLLAILGNLVISISLNIQKYSHLQLAQQEHPRPYFKSVLWWGGVLLMAVGETGNFAAYGFAPITLIAPLGCVSVTGSAIISVTFLKDNLRASDLLGTTLAFAGTYLLVNFAPNITQAISARTVQYYLVGWQFLIYVILEILIFCILLYFYKRKGMKHMVILLTLVAILASLTVISVKAVSGMITFSVMDKMQLTYPIFYIMFIIMIASCVFQVKFLNQATKLYNTTTVVPVNHIFFTISAIIAGIIFYQEFLGAPFLTVFIYLFGCFLSFLGVFLVTRNREKEHLQQSYIDFGNIPDTTPERKAWRETNVGQNTTRFT

SEQ ID NO: 826615 - protein, 400 aa, Homo sapiens
AGRPREAADRRAPRGHLAPEEERRQRPARLGAPTAARGREPGGLGAPASPGHRAGSGCGAASSRCNRAGRRPQPEPEPERRERDLMAAVAPAGPGDSASAALDELSLNFTYGAPGAGNGSLSGDWYRRNQIHLFGVLLAILGNLVISISLNIQKYSHLQLAQQEHPRPYFKSVLWWGGVLLMAVGETGNFAAYGFAPITLIAPLGCVSVTGSAIISVTFLKDNLRASDLLGTTLAFAGTYLLVNFAPNITQAISARTVQYYLVGWQFLIYVILEILIFCILLYFYKRKGMKHMVILLTLVAILASLTVISVKAVSGMITFSVMDKMQLTYPIFYIMFIIMIASCVFQVKFLNQATKLYNTTTVVPVNHIFFTISAIIAGIIFYQEFLGAPFLTVFIYLFG

SEQ ID NO: 826616 - protein, 288 aa, Homo sapiens
AGRPREAADRRAPRGHLAPEEERRQRPARLGAPTAARGREPGGLGAPASPGHRAGSGCGAASSRCNRAGRRPQPEPEPERRERDLMAAVAPAGPGDSASAALDELSLNFTYGAPGAGNGSLSGDWYRRNQIHLFGVLLAILGNLVISISLNIQKYSHLQLAQQEHPRPYFKSVLWWGGVLLMAVGETGNFAAYGFAPITLIAPLGCVSVTGSAIISVTFLKDNLRASDLLGTTLAFAGTYLLVNFAPNITQAISARTVQYYLVGWQFLIYVIYIKWKPHRDKAQELFL

SEQ ID NO: 826617 - protein, 233 aa, Homo sapiens
AGRPREAADRRAPRGHLAPEEERRQRPARLGAPTAARGREPGGLGAPASPGHRAGSGCGAASSRCNRAGRRPQPEPEPERRERDLMAAVAPAGPGDSASAALDELSLNFTYGAPGAGNGSLSGDWYRRNQVRAAPQPPQPGGDAARAAGSGRLCASAAFLPALRKTPGLSEWEEVTCNVSRIDLSPPHPEARGSAQSSSPGHPALGVGAQVFGLDLSHPFLGPPGPDPASPAC

SEQ ID NO: 826618 - protein, 468 aa, Homo sapiens
AGRPREAADRRAPRGHLAPEEERRQRPARLGAPTAARGREPGGLGAPASPGHRAGSGCGAASSRCNRAGRRPQPEPEPERRERDLMAAVAPAGPGDSASAALDELSLNFTYGAPGAGNGSLSGDWYRRNQIHLFGVLLAILGNLVISISLNIQKYSHLQLAQQEHPRPYFKSVLWWGGVLLMAVGETGNFAAYGFAPITLIAPLGCVSVTGSAIISVTFLKDNLRASDLLGTTLAFAGTYLLVNFAPNITQAISARTVQYYLVGWQFLIYVILEILIFCILLYFYKRKGMKHMVILLTLVAILASLTVISVKAVSGMITFSVMDKMQLTYPIFYIMFIIMIASCVFQVKFLNQATKLYNTTTVVPVNHIFFTISAIIAGIIFYQEFLGAPFLTVFIYLFGCFLSFLGVFLVTRNREKEHLQQSYIDFGNIPGKQMLDKIQPDSHSLSYGTLPDGSDSTKSQSGEKKEV

SEQ ID NO: 826619 - protein, 112 aa, Homo sapiens
MEKILILLLVALSVAYAAPGPRGIIINLENGELCMNSAQCKSNCCQHSSALGLARCTSMASENSECSVKTLYGIYYKCPCERGLTCEGDKTIVGSITNTNFGICHDAGRSKQ

SEQ ID NO: 826620 - protein, 112 aa, Homo sapiens; identical to SEQ ID NO: 826619

SEQ ID NO: 826621 - protein, 112 aa, Homo sapiens; identical to SEQ ID NO: 826619

SEQ ID NO: 826622 - protein, 83 aa, Homo sapiens
CLPPPTPAVPLTMEKILILLLVALSVAYAAPGPRGIIINLTLYGIYYKCPCERGLTCEGDKTIVGSITNTNFGICHDAGRSKQ

SEQ ID NO: 826623 - protein, 157 aa, Homo sapiens
LSPATHTSCPTHHGEDPDPPACRPLCGLCSSWPPGDHYQPGWSVVAQSRLTAISASRVQMILLPQPPKKLGLQENGELCMNSAQCKSNCCQHSSALGLARCTSMASENSECSVKTLYGIYYKCPCERGLTCEGDKTIVGSITNTNFGICHDAGRSKQ

SEQ ID NO: 826624 - protein, 112 aa, Homo sapiens; identical to SEQ ID NO: 826619

SEQ ID NO: 826625 - protein, 83 aa, Homo sapiens; identical to SEQ ID NO: 826622

SEQ ID NO: 826626 - protein, 196 aa, Homo sapiens
AVPLTMEKILILLLVALSVAYAAPGPRGIIINLVRGSSGEAPPESPDEDFLSLDLDLCMSPPGLAGAGRSGILHPSVYFHVLSYASSQRPQERLISPSPAPTGACSEQQLNLAMRDLFFLFFLFETESCSVTRLECSGTISAHCNLCFPGSNDSPASASQEAGITGACHNAQLFFVFLVEIGFHHVAQASLKLLTS

SEQ ID NO: 826627 - protein, 199 aa, Homo sapiens
GSPRWVDRLSPGVQDQPGQHDAEEYQPPIWKSYLYQLQQEAPRPKRIICPREVENRPKYYGREFHGIISREQADELLGGVEGAYILRESQRQPGCYTLALRFGNQTLNYRLFHDGKHFVGEKRFESIHDLVTDGLITLYIETKAAEYISKMTTNPIYEHIGYATLLREKVSRRLSRSKNEPRKTNVTHEEHTAVEKCLA

SEQ ID NO: 826628 - protein, 468 aa, Homo sapiens
MAASSNSSLSGSSVSSDAEEYQPPIWKSYLYQLQQEAPRPKRIICPREVENRPKYYGREFHGIISREQADELLGGVEGAYILRESQRQPGCYTLALRFGNQTLNYRLFHDGKHFVGEKRFESIHDLVTDGLITLYIETKAAEYISKMTTNPIYEHIGYATLLREKVSRRLSRSKNEPRKTNVTHEEHTAVEKISSLVRRAALTHNDNHFNYEKTHNFKVHTFRGPHWCEYCANFMWGLIAQGVRCSDCGLNVHKQCSKHVPNDCQPDLKRIKKVYCCDLTTLVKAHNTQRPMVVDICIREIEARGLKSEGLYRVSGFTEHIEDVKMAFDRDGEKADISANVYPDINIITGALKLYFRDLPIPVITYDTYSKFIDAAKISNADERLEAVHEVLMLLPPAHYETLRYLMIHLKKVTMNEKDNFMNAENLGIVFGPTLMRPPEDSTLTTLHDMRYQKLIVQILIENEDVLF

SEQ ID NO: 826629 - protein, 412 aa, Homo sapiens
MAASSNSSLSGSSVSSDAEEYQPPIWKSYLYQLQQEAPRPKRIICPREVENRPKYYGREFHGIISREQADELLGGVEGAYILRESQRQPGCYTLALRFGNQTLNYRLFHDGKHFVGEKRFESIHDLVTDGLITLYIETKAAEYISKMTTNPIYEHIGYATLLREKVSRRLSRSKNEPRKTNVTHEEHTAVEKISSLVRRAALTHNDNHFNYEKTHNFKVHTFRGPHWCEYCANFMWGLIAQGVRCSDCGLNVHKQCSKHVPNDCQPDLKRIKKVYCCDLTTLVKAHNTQRPMVVDICIREIEARGLKSEGLYRVSGFTEHIEDVKMAFDRDGEKADISANVYPDINIITGALKLYFRDLPIPVITYDTYSKFIDAAKISNADERLEAVHEVLMLLPPAHYETLRYLMIHLKK

SEQ ID NO: 826630 - protein, 332 aa, Homo sapiens
MFSEELWLENEKKCAVVRKSKQGRKRQELLAVAFGVKVGVKGGFLWPPLKLFACSQISSLVRRAALTHNDNHFNYEKTHNFKVHTFRGPHWCEYCANFMWGLIAQGVRCSDCGLNVHKQCSKHVPNDCQPDLKRIKKVYCCDLTTLVKAHNTQRPMVVDICIREIEARGLKSEGLYRVSGFTEHIEDVKMAFDRDGEKADISANVYPDINIITGALKLYFRDLPIPVITYDTYSKFIDAAKISNADERLEAVHEVLMLLPPAHYETLRYLMIHLKKVTMNEKDNFMNAENLGIVFGPTLMRPPEDSTLTTLHDMRYQKLIVQILIENEDVLF

SEQ ID NO: 826631 - protein, 614 aa, Homo sapiens
NSASQWPGPVPDCPSQPPAGRCWRELIEPQPQLSQLSLVDVCQLGGLLGPQLVQPQQPAPCFAVPGSEPSRCSWQSGIELHHLCPLTGPGLLEASIECPSQGEIHPGRSGGGIRARERRVQDPDGGQEPGPPPSSPLRRRRSGEQQEVMRLLSSLSGSSVSSDAEEYQPPIWKSYLYQLQQEAPRPKRIICPREVENRPKYYGREFHGIISREQADELLGGVEGAYILRESQRQPGCYTLALRFGNQTLNYRLFHDGKHFVGEKRFESIHDLVTDGLITLYIETKAAEYISKMTTNPIYEHIGYATLLREKVSRRLSRSKNEPRKTNVTHEEHTAVEKISSLVRRAALTHNDNHFNYEKTHNFKVHTFRGPHWCEYCANFMWGLIAQGVRCSDCGLNVHKQCSKHVPNDCQPDLKRIKKVYCCDLTTLVKAHNTQRPMVVDICIREIEARGLKSEGLYRVSGFTEHIEDVKMAFDRDGEKADISANVYPDINIITGALKLYFRDLPIPVITYDTYSKFIDAAKISNADERLEAVHEVLMLLPPAHYETLRYLMIHLKKVTMNEKDNFMNAENLGIVFGPTLMRPPEDSTLTTLHDMRYQKLIVQILIENEDVLF

SEQ ID NO: 826632 - protein, 322 aa, Homo sapiens
MTTNPIYEHIGYATLLREKVSRRLSRSKNEPRKTNVTHEEHTAVEKISSLVRRAALTHNDNHFNYEKTHNFKVHTFRGPHWCEYCANFMWGLIAQGVRCSDCGLNVHKQCSKHVPNDCQPDLKRIKKVYCCDLTTLVKAHNTQRPMVVDICIREIEARGLKSEGLYRVSGFTEHIEDVKMAFDRDGEKADISANVYPDINIITGALKLYFRDLPIPVITYDTYSKFIDAAKISNADERLEAVHEVLMLLPPAHYETLRYLMIHLKKVTMNEKDNFMNAENLGIVFGPTLMRPPEDSTLTTLHDMRYQKLIVQILIENEDVLF

SEQ ID NO: 826633 - protein, 146 aa, Homo sapiens
AGPVARALPASGAGNRPQGQDSRRGRRMALSVLRLALLLLAVTFAGSARSGPGERGPPEKSGFGSQTGGGPCPAPGGLGDASLIPQFGLFSKYRTPNCSQYRLPGCPRHFNPVCGSDMSTYANECTLCMKIREGGHNIKIIRNGPC

SEQ ID NO: 826634 - protein, 109 aa, Homo sapiens [sequence omitted]

SEQ ID NO: 826635 - protein, 109 aa, Homo sapiens [sequence omitted]

SEQ ID NO: 826636 - protein, 109 aa, Homo sapiens [sequence omitted]

SEQ ID NO: 826637 - protein, 111 aa, Homo sapiens
AGPVARALPASGAGNRPQGQDSRRGRRMALSVLRLALLLLAVTFAASLIPQFGLFSKYRTPNCSQYRLPGCPRHFNPVCGSDMSTYANECTLCMKIREGGHNIKIIRNGPC

SEQ ID NO: 826638 - protein, 111 aa, Homo sapiens; identical to SEQ ID NO: 826637

SEQ ID NO: 826639 - protein, 134 aa, Homo sapiens
MALSVLRLALLLLAVTFAGSARSGPGERGPPEKSGFGSQTGGGPCPAPGGLGDGTRAPVTGGSPEDLPASLIPQFGLFSKYRTPNCSQYRLPGCPRHFNPVCGSDMSTYANECTLCMKIREGGHNIKIIRNGPC

SEQ ID NO: 826640 - protein, 131 aa, Homo sapiens
RAPSHERSLRVAQVTDRRGKTAGAGGGWRCRCCAWRCCSWQLPSQVALGAVLASGDLRRKAGLGVRPAADPALLRAASATPNCSQYRLPGCPRHFNPVCGSDMSTYANECTLCMKIREGGHNIKIIRNGPC

SEQ ID NO: 826641 - protein, 109 aa, Homo sapiens [sequence omitted]

SEQ ID NO: 826642 - protein, 134 aa, Homo sapiens
MALSVLRLALLLLAVTFAGSARSGPGERGPPEKSGFGSQTGGGPCPAPGGLGDGTRAPVTGGSPEDLPGKVVIILKSFEMDPADGAVYRKEDGETTFTGRLDKLHFPFFSFPVFLYMRFVNTHFLRAGMEDSHV

SEQ ID NO: 826643 - protein, 476 aa, Homo sapiens
MSGPTWLPPKQPEPARAPQGRAIPRGTPGPPPAHGAALQPHPRVNFCPLPSEQCYQAPGGPEDRGPAWVGSHGVLQHTQGLPADRGGLRPGSLDAEIDLLSSTLAELNGGRGHASRRPDRQAYEPPPPPAYRTGSLKPNPASPLPASPYGGPTPASYTTASTPAGPAFPVQVKVAQPVRGCGPPRRGASQASGPLPGPHFPLPGRGEVWGPGYRSQREPGPGAKEEAAGVSGPAGRGRGGEHGPQVPLSQPPEDELDRLTKKLVHDMNHPPSGEYFGQCGGCGEDVVGDGAGVVALDRVFHVGCFVCSTCRAQLRGQHFYAVERRAYCEGCYVATLEKCATCSQPILDRILRAMGKAYHPGCFTCVVCHRGLDGIPFTVDATSQIHCIEDFHRKFAPRCSVCGGAIMPEPGQEETVRIVALDRSFHIGCYKCEECGLLLSSEGECQGCYPLDGHILCKACSAWRIQELSATVTTDC

SEQ ID NO: 826644 - protein, 476 aa, Homo sapiens; identical to SEQ ID NO: 826643

SEQ ID NO: 826645 - protein, 446 aa, Homo sapiens [sequence omitted]

SEQ ID NO: 826646 - protein, 402 aa, Homo sapiens
MSGPTWLPPKQPEPARAPQGRAIPRGTPGPPPAHGAALQPHPRVNFCPLPSEQCYQAPGGPEDRGPAWVGSHGVLQHTQGLPADRGGLRPGSLDAEIDLLSSTLAELNGGRGHASRRPDRQAYEPPPPPAYRTGSLKPNPASPLPASPYGGPTPASYTTASTPAGPAFPVQVKVAQPVRGCGPPRRGASQASGPLPGPHFPLPGRGEVWGPGYRSQREPGPGAKEEAAGVSGPAGRGRGGEHGPQVPLSQPPEDELDRLTKKLVHDMNHPPSGEYFGQCGGCGEDVVGDGAGVVALDRVFHVGCFVCSTCRAQLRGQHFYAVERRAYCEGCYVATLEKCATCSQVALDRSFHIGCYKCEECGLLLSSEGECQGCYPLDGHILCKACSAWRIQELSATVTTDC

SEQ ID NO: 826647 - protein, 210 aa, Homo sapiens [sequence omitted]

SEQ ID NO: 826648 - protein, 561 aa, Homo sapiens
MSGPTWLPPKQPEPARAPQGRAIPRGTPGPPPAHGAGKAALVRQKSHPAVALTSVLPLQPPALAASSCPFPKPRRGEQPPALSWDPRFGGGGNERLERVAPQIYTPPVLRHPTFDFSSLNPALQPHPRVNFCPLPSEQCYQAPGGPEDRGPAWVGSHGVLQHTQGLPADRGGLRPGSLDAEIDLLSSTLAELNGGRGHASRRPDRQAYEPPPPPAYRTGSLKPNPASPLPASPYGGPTPASYTTASTPAGPAFPVQVKVAQPVRGCGPPRRGASQASGPLPGPHFPLPGRGEVWGPGYRSQREPGPGAKEEAAGVSGPAGRGRGGEHGPQVPLSQPPEDELDRLTKKLVHDMNHPPSGEYFGQCGGCGEDVVGDGAGVVALDRVFHVGCFVCSTCRAQLRGQHFYAVERRAYCEGCYVATLEKCATCSQPILDRILRAMGKAYHPGCFTCVVCHRGLDGIPFTVDATSQIHCIEDFHRKFAPRCSVCGGAIMPEPGQEETVRIVALDRSFHIGCYKCEECGLLLSSEGECQGCYPLDGHILCKACSAWRIQELSATVTTDC

SEQ ID NO: 826649 - protein, 362 aa, Homo sapiens
MSGPTWLPPKQPEPARAPQGRAIPRGTPGPPPAHGAALQPHPRVNFCPLPSEQCYQAPGGPEDRGPAWVGSHGVLQHTQGLPADRGGLRPGSLDAEIDLLSSTLAELNGGRGHASRRPDRQAYEPPPPPAYRTGSLKPNPASPLPASPYGGPTPASYTTASTPAGPAFPVQVKVAQPVRGCGPPRRGASQASGPLPGPHFPLPGRGEVWGPGYRSQREPGPGAKEEAAGVSGPAGRGRGGEHGPQVPLSQPPEDELDRLTKKLVHDMNHPPSGEYFGQCGGCGEDVVGDGAGVVALDRVFHVGCFVCSTCRAQLRGQHFYAVERRAYCEGCYVIKAPPAKGASSSQTFLDRMVKTIAKAYRY

SEQ ID NO: 826650 - protein, 421 aa, Homo sapiens
DRSPMCVMCTPAWRKRGCKYQHVSHLRTGPCQMQKACASPQPGSFPQMWVLEWGPCLRLLACVSPQAYEPPPPPAYRTGSLKPNPASPLPASPYGGPTPASYTTASTPAGPAFPVQVKVAQPVRGCGPPRRGASQASGPLPGPHFPLPGRGEVWGPGYRSQREPGPGAKEEAAGVSGPAGRGRGGEHGPQVPLSQPPEDELDRLTKKLVHDMNHPPSGEYFGQCGGCGEDVVGDGAGVVALDRVFHVGCFVCSTCRAQLRGQHFYAVERRAYCEGCYVATLEKCATCSQPILDRILRAMGKAYHPGCFTCVVCHRGLDGIPFTVDATSQIHCIEDFHRKFAPRCSVCGGAIMPEPGQEETVRIVALDRSFHIGCYKCEECGLLLSSEGECQGCYPLDGHILCKACSAWRIQELSATVTTDC

SEQ ID NO: 826651 - protein, 182 aa, Homo sapiens [sequence omitted]

SEQ ID NO: 826652 - protein, 123 aa, Homo sapiens
MGKAYHPGCFTCVVCHRGLDGIPFTVDATSQIHCIEDFHRKFAPRCSVCGGAIMPEPGQEETVRIVALDRSFHIGCYKCEECGLLLSSEGECQGCYPLDGHILCKACSAWRIQELSATVTTDC

SEQ ID NO: 826653 - protein, 476 aa, Homo sapiens; identical to SEQ ID NO: 826643

SEQ ID NO: 826654 - protein, 522 aa, Homo sapiens
MSGPTWLPPKQPEPARAPQGRAIPRGTPGPPPAHGAALQPHPRVNFCPLPSEQCYQAPGGPEDRGPAWVGSHGVLQHTQGLPADRGGLRPGSLDAEIDLLSSTLAELNGGRGHASRRPDRQAYEPPPPPAYRTGSLKPNPASPLPASPYGGPTPASYTTASTPAGPAFPVQVKVAQPVRGCGPPRRGASQASGPLPGPHFPLPGRGEVWGPGYRSQREPGPGAKEEAAGVSGPAGRGRGGEHGPQVPLSQPPEDELDRLTKKLVHDMNHPPSGEYFGQCGGCGEDVVGDGAGVVALDRVFHVGCFVCSTCRAQLRGQHFYAVERRAYCEGCYVATLEKCATCSQPILDRILRAMGKAYHPGCFTCVVCHRGLDGIPFTVDATSQIHCIEDFHRKFAPRCSVCGGAIMPEPGQEETVRIVALDRSFHIGCYKCEECWLLRCHPGVTVSCAPMPSWSRILRAMGKAYHPGCFTCVVCHRGLDGIPFTVDATSQIHCIEDFHRKFAPRCSVCGGAIMPEPGQEET

SEQ ID NO: 826655 - protein, 451 aa, Homo sapiens
MSGPTWLPPKQPEPARAPQGRAIPRGTPGPPPAHGAALQPHPRVNFCPLPSEQCYQAPGGPEDRGPAWVGSHGVLQHTQGLPADRGGLRPGSLDAEIDLLSSTLAELNGGRGHASRRPDRQAYEPPPPPAYRTGSLKPNPASPLPASPYGGPTPASYTTASTPAGPAFPVQVKVAQPVRGCGPPRRGASQASGPLPGPHFPLPGRGEVWGPGYRSQREPGPGAKEEAAGVSGPAGRGRGGEHGPQVPLSQPPEDELDRLTKKLVHDMNHPPSGEYFGQCGGCGEDVVGDGAGVVALDRVFHVGCFVCSTCRAQLRGQHFYAVERRAYCEGCYVATLEKCATCSQPILDRILRAMGKAYHPGCFTCVVCHRGLDGIPFTVDATSQIHCIEDFHRKFAPRCSVCGGAIMPEPGQEETVRIVALDRSFHIGCYKCEPPRHPGATTGPRSSTPAP

SEQ ID NO: 826656 - protein, 210 aa, Homo sapiens [sequence omitted]

SEQ ID NO: 826657 - protein, 355 aa, Homo sapiens
MSGPTWLPPKQPEPARAPQGRAIPRGTPGPPPAHGAALQPHPRVNFCPLPSEQCYQAPGGPEDRGPAWVGSHGVLQHTQGLPADRGGLRPGSLDAEIDLLSSTLAELNGGRGHASRRPDRQAYEPPPPPAYRTGSLKPNPASPLPASPYGGPTPASYTTASTPAGPAFPVQVKVAQPVRGCGPPRRGASQASGPLPGPHFPLPGRGEVWGPGYRSQREPGPGAKEEAAGVSGPAGRGRGGEHGPQVPLSQPPEDELDRLTKKLVHDMNHPPSGEYFGQCGGCGEDVVGDGAGVVALDRVFHVGCFVCSTCRAQLRGQHFYAVERRAYCEGCYVGEWLGLGGGSQWLDAGGFHPRW

SEQ ID NO: 826658 - protein, 298 aa, Homo sapiens
MSGPTWLPPKQPEPARAPQGRAIPRGTPGPPPAHGAALQPHPRVNFCPLPSEQCYQAPGGPEDRGPAWVGSHGVLQHTQGLPADRGGLRPGSLDAEIDLLSSTLAELNGGRGHASRRPDRQAYEPPPPPAYRTGSLKPNPASPLPASPYGGPTPASYTTASTPAGPAFPVQVKVAQPVRGCGPPRRGASQASGPLPGPHFPLPGRGEVWGPGYRSQREPGPGAKEEAAGVSGPAGRGRGGEHGPQVPLSQPPEDELDRLTKKLVHDMNHPPSGEYFANVVGCEKNVVGDWAWDIYLCL

SEQ ID NO: 826659 - protein, 197 aa, Homo sapiens
DPPTSASQNAGTTGMSHRAQPAFSLVQCIKCVHIVVQPSPLSISRTLFHLPKLKATLEKCATCSQPILDRILRAMGKAYHPGCFTCVVCHRGLDGIPFTVDATSQIHCIEDFHRKFAPRCSVCGGAIMPEPGQEETVRIVALDRSFHIGCYKCEECGLLLSSEGECQGCYPLDGHILCKACSAWRIQELSATVTTDC

SEQ ID NO: 826660 - protein, 117 aa, Homo sapiens
TPPVLRHPTFDFSSLNPALQPHPRVNFCPLPSEQCYQAPGGPEDRGPAWVGSHGVLQHTQVRPGIVGWDMWDPPEPSLRDPGQEKAYGDLHSSCPGSILRGSLQTGGAFALEAWTPR

SEQ ID NO: 826661 - protein, 208 aa, Homo sapiens
EVTLEEDLTLSPSFPQRMSGFQINLNPLKEPLGFIKVLEWIASIFAFATCGGFKGQTEIQVNCPPAVTENKTVTATFGYPFRLNEASFQPPPGVNICDVNWKDYVLIGDYSSSAQFYVTFAVFVFLYCIAALLLYVGYTSLYLDSRKLPMIDFVVTLVATFLWLVSTSAWAKALTDIKIATGHNIIDELPPCKKKAPGKSLGYLAFSI

SEQ ID NO: 826662 - protein, 276 aa, Homo sapiens
RASPACPSSPPGCSGLVGPLLRPVVLTLSPSFPQRMSGFQINLNPLKEPLGFIKVLEWIASIFAFATCGGFKGQTEIQVNCPPAVTENKTVTATFGYPFRLNEASFQPPPGVNICDVNWKDYVLIGDYSSSAQFYVTFAVFVFLYCIAALLLYVGYTSLYLDSRKLPMIDFVVTLVATFLWLVSTSAWAKALTDIKIATGHNIIDELPPCKKKAVLCYFGSVTSMGSLNVSVIFGFLNMILWGGNAWFVYKETSLHSPSNTSAPHSQGGIPPPTGI

SEQ ID NO: 826663 - protein, 276 aa, Homo sapiens; identical to SEQ ID NO: 826662

SEQ ID NO: 826664 - protein, 240 aa, Homo sapiens
EVTLEEDLTLSPSFPQRMSGFQINLNPLKEPLGFIKVLEWIASIFAFATCGGFKGQTEIQVNCPPAVTENQPPPGVNICDVNWKDYVLIGDYSSSAQFYVTFAVFVFLYCIAALLLYVGYTSLYLDSRKLPMIDFVVTLVATFLWLVSTSAWAKALTDIKIATGHNIIDELPPCKKKAVLCYFGSVTSMGSLNVSVIFGFLNMILWGGNAWFVYKETSLHSPSNTSAPHSQGGIPPPTGI

SEQ ID NO: 826665 - protein, 218 aa, Homo sapiens
RASPACPSSPPGCSGLVGPLLRPVVLTLSPSFPQRMSGFQINLNPLKEPLGFIKVLEWIASIFAFATCGGFKGQTEIQVNCPPAVTENKTVTATFGYPFRLNEASFQPPPGVNICDVNWKDYVLIGDYSSSAQFYVTFAVFVFLYCIAALLLYVGYTSLYLDSRKLPMIDFVVTLVATFLWLVSTSAWAKALTDIKIATGHNIIDELPPCKKKAYLAF

SEQ ID NO: 826666 - protein, 203 aa, Homo sapiens
RASPACPSSPPGCSGLVGPLLRPVVLTLSPSFPQRMSGFQINLNPLKEPLGFIKVLEWIASIFAFATCGGFKGQTEIQVNCPPAVTENKTVTATFGYPFRLNEASFQPPPGVNICDVNWKDYVLIGDYSSSAQFYVTFAVFVFLYCIAALLLYVGYTSLYLDSRKLPMIDFVVTLVATFLWLVSTSAWAKALTDIKYCVTLAL

SEQ ID NO: 826667 - protein, 237 aa, Homo sapiens
RASPACPSSPPGCSGLVGPLLRPVVLTLSPSFPQRMSGFQINLNPLKEPLGFIKVLEWIASIFAFATCGGFKGQTEIQVNCPPAVTENKTVTATFGYPFRLNEASFQPPPGVNICDVNWKDYVLIGDYSSSAQFYVTFAVFVFLYCIAALLLYVGYTSLYLDSRKLPMIDFVVTLVATFLWLVSTSAWAKALTDIKIATGHNIIDELPPCKKKAVLCYFGSVTSMGSLNVSVGYLAF

SEQ ID NO: 826668 - protein, 259 aa, Homo sapiens
MAPNIYLVRQRISRLGQRMSGFQINLNPLKEPLGFIKVLEWIASIFAFATCGGFKGQTEIQVNCPPAVTENKTVTATFGYPFRLNEASFQPPPGVNICDVNWKDYVLIGDYSSSAQFYVTFAVFVFLYCIAALLLYVGYTSLYLDSRKLPMIDFVVTLVATFLWLVSTSAWAKALTDIKIATGHNIIDELPPCKKKAVLCYFGSVTSMGSLNVSVIFGFLNMILWGGNAWFVYKETSLHSPSNTSAPHSQGGIPPPTGI

SEQ ID NO: 826669 - protein, 276 aa, Homo sapiens; identical to SEQ ID NO: 826662

SEQ ID NO: 826670 - protein, 276 aa, Homo sapiens; identical to SEQ ID NO: 826662

SEQ ID NO: 826671 - protein, 259 aa, Homo sapiens
RASPACPSSPPGCSGLVGPLLRPVVLTLSPSFPQRMSGFQINLNPLKEPLGFIKVLEWIASIFAFATCGGFKGQTEIQVNCPPAVTENKTVTATFGYPFRLNEASFQPPPGVNICDVNWKDYVLIGDYSSSAQFYVTFAVFVFLYCIAALLLYVGYTSLYLDSRKLPMIDFVVTLVATFLWLVSTSAWAKALTDIKIATGHNIIDELPPCKKKAVLCYFGSVTSMGSLNVSVMEFRYVAQTGVQWHDLGTLQPPPPGFK

SEQ ID NO: 826672 - protein, 185 aa, Homo sapiens
EVTLEEDLTLSPSFPQRMSGFQINLNPLKEPLGFIKVLEWIASIFAFATCGGFKGQTEIQVNCPPAVTENKTVTATFGYPFRLNEASFQPPPGVNICDVNWKDYVLIGDYSSSAQFYVTFAVFVFLYCIAALLLYVGYTSLYLDSRKLPMIDFVVTLVATFLWLVSTSAWAKALTDIKYCVTLAL

SEQ ID NO: 826673 - protein, 220 aa, Homo sapiens
RASPACPSSPPGCSGLVGPLLRPVVLTLSPSFPQRMSGFQINLNPLKEPLGFIKVLEWIASIFAFATCGGFKGQTEIQVNCPPAVTENKTVTATFGYPFRLNEASFQPPPGVNICDVNWKDYVLIGDYSSSAQFYVTFAVFVFLYCIAALLLYVGYTSLYLDSRKLPMIDFVVTLVATFLWLVSTSAWAKALTDIKIATGHNIIDELPPCKKKAKYHRYI

SEQ ID NO: 826674 - protein, 223 aa, Homo sapiens
ERKWHGSPSGSPGLQACPIFSSALNSMLSKWDLPVFTLPFNMALSMYLSATGHYNPFFPAKLVIPITTAPNISWSDLSALELLKSIPVGVGQIYGCDNPWTGGIFLGAILLSSPLMCLHAAIGSLLGIAAGLSLSAPFEDIYFGLWGFNSSLACIAMGGMFMALTWQTHLLALGCALFTAYLGVGMANFMAEVGLPACTWPFCLATLLFLIMTTYPILYLHAT

SEQ ID NO: 826675 - protein, 389 aa, Homo sapiens
MEDSPTMVRVDSPTMVRGENQVSPCQGRRCFPKALGYVTGDMKELANQLKDKPVVLQFIDWILRGISQVVFVNNPVSGILILVGLLVQNPWWALTGWLGTVVSTLMALLLSQDRSLIASGLYGYNATLVGVLMAVFSDKGDYFWWLLLPVCAMSMTCPIFSSALNSMLSKWDLPVFTLPFNMALSMYLSATGHYNPFFPAKLVIPITTAPNISWSDLSALELLKSIPVGVGQIYGCDNPWTGGIFLGAILLSSPLMCLHAAIGSLLGIAAGLSLSAPFEDIYFGLWGFNSSLACIAMGGMFMALTWQTHLLALGCALFTAYLGVGMANFMAEVGLPACTWPFCLATLLFLIMTTKNSNIYKMPLSKVTYPEENRIFYLQAKKRMVESPL

SEQ ID NO: 826676 - protein, 257 aa, Homo sapiens
MAVFSDKGDYFWWLLLPVCAMSMTCPIFSSALNSMLSKWDLPVFTLPFNMALSMYLSATGHYNPFFPAKLVIPITTAPNISWSDLSALELLKSIPVGVGQIYGCDNPWTGGIFLGAILLSSPLMCLHAAIGSLLGIAAGLSLSAPFEDIYFGLWGFNSSLACIAMGGMFMALTWQTHLLALGCALFTAYLGVGMANFMAEVGLPACTWPFCLATLLFLIMTTKNSNIYKMPLSKVTYPEENRIFYLQAKKRMVESPL

SEQ ID NO: 826677 - protein, 249 aa, Homo sapiens
ERKWHGSPSGSPGLQACPIFSSALNSMLSKWDLPVFTLPFNMALSMYLSATGHYNPFFPAKLVIPITTAPNISWSDLSALELLKSIPVGVGQIYGCDNPWTGGIFLGAILLSSPLMCLHAAIGSLLGIAAGLSLSAPFEDIYFGLWGFNSSLACIAMGGMFMALTWQTHLLALGCALFTAYLGVGMANFMAEVGLPACTWPFCLATLLFLIMTTKNSNIYKMPLSKVTYPEENRIFYLQAKKRMVESPL

SEQ ID NO: 826678 - protein, 383 aa, Homo sapiens
MNGRSLIGGAGDARHGPVWKDPFGTKAGDAARRGIARLSLALADGSQEQEPEEEIAMEDSPTMVRVDSPTMVRGENQVSPCQGRRCFPKALGYVTGDMKELANQLKDKPVVLQFIDWILRGISQVVFVNNPVSGILILVGLLVQNPWWALTGWLGTVVSTLMALLLSQDRSLIASGLYGYNATLVGVLMAVFSDKGDYFWWLLLPVCAMSMTCPIFSSALNSMLSKWDLPVFTLPFNMALSMYLSATGHYNPFFPAKLVIPITTAPNISWSDLSALELLKSIPVGVGQIYGCDNPWTGGIFLGAILLSSPLMCLHAAIGSLLGIAAGLSLSAPFEDIYFGLWGFNSSLACIAMGGMFMALTWQTHLLALGCGESPTPLGEGCS

SEQ ID NO: 826679 - protein, 445 aa, Homo sapiens
MNGRSLIGGAGDARHGPVWKDPFGTKAGDAARRGIARLSLALADGSQEQEPEEEIAMEDSPTMVRVDSPTMVRGENQVSPCQGRRCFPKALGYVTGDMKELANQLKDKPVVLQFIDWILRGISQVVFVNNPVSGILILVGLLVQNPWWALTGWLGTVVSTLMALLLSQDRSLIASGLYGYNATLVGVLMAVFSDKGDYFWWLLLPVCAMSMTCPIFSSALNSMLSKWDLPVFTLPFNMALSMYLSATGHYNPFFPAKLVIPITTAPNISWSDLSALELLKSIPVGVGQIYGCDNPWTGGIFLGAILLSSPLMCLHAAIGSLLGIAAGLSLSAPFEDIYFGLWGFNSSLACIAMGGMFMALTWQTHLLALGCALFTAYLGVGMANFMAEVGLPACTWPFCLATLLFLIMTTKNSNIYKMPLSKVTYPEENRIFYLQAKKRMVESPL

SEQ ID NO: 826680 - protein, 402 aa, Homo sapiens
MNGRSLIGGAGDARHGPVWKDPFGTKAGDAARRGIARLSLALADGSQEQEPEEEIAMEDSPTMVRVDSPTMVRGENQVSPCQGRRCFPKALGYVTGDMKELANQLKDKPVVLQFIDWILRGISQVVFVNNPVSGILILVGLLVQNPWWALTGWLGTVVSTLMALLLSQDRSLIASGLYGYNATLVGVLMAVFSDKGDYFWWLLLPVCAMSMTCPIFSSALNSMLSKWDLPVFTLPFNMALSMYLSATGHYNPFFPAKLVIPITTAPNISWSDLSALELLKSIPVGVGQIYGCDNPWTGGIFLGAILLSSPLMCLHAAIGSLLGIAAGLSLSAPFEDIYFGLWGFNSSLACIAMGGMFMALTWQTHLLALGCALFTAYLGVGMANFMAEGTCERRIVGKKKQA

SEQ ID NO: 826681 - protein, 79 aa, Homo sapiens
EDSLNVADLTSLRAPLDIPIPDPPPKDDEMETDKQEFVEDLGFWRVLLLIFVIALLSLGIAYYVSGVLPFVENQPELVH

SEQ ID NO: 826682 - protein, 93 aa, Homo sapiens
EDSLNVADLTSLRAPLDIPIPDPPPKDDEMETDKQEFVEDLGFWRVLLLIFVIALLSLGIAYYVSGVLPFVVACFLASNVCSQFLRIFLSAKQ

SEQ ID NO: 826683 - protein, 113 aa, Homo sapiens
RVWPLPSARHRLLEAAAVAAARSSRRYLARGLWAAPGLEPLDISCTVHCSTGGPVGLAGALRGEGARASHTFRGDWREPGRGSDRGSVMASSRSVCSRGPGRGLRGFSFALAG

SEQ ID NO: 826684 - protein, 3114 aa, Homo sapiens
MSWALEEWKEGLPTRALQKIQELEGQLDKLKKEKQQRQFQLDSLEAALQKQKQKVENEKTEGTNLKRENQRLMEICESLEKTKQKISHELQVKESQVNFQEGQLNSGKKQIEKLEQELKRCKSELERSQQAAQSADVSLNPCNTPQKIFTTPLTPSQYYSGSKYEDLKEKYNKEVEERKRLEAEVKALQAKKASQTLPQATMNHRDIARHQASSSVFSWQQEKTPSHLSSNSQRTPIRRDFSASYFSGEQEVTPSRSTLQIGKRDANSSFFDNSSSPHLLDQLKAQNQELRNKINELELRLQGHEKEMKGQVNKFQELQLQLEKAKVELIEKEKVLNKCRDELVRTTAQYDQASTKYTALEQKLKKLTEDLSCQRQNAESARCSLEQKIKEKEKEFQEELSRQQRSFQTLDQECIQMKARLTQELQQAKNMHNVLQAELDKLTSVKQQLENNLEEFKQKLCRAEQAFQASQIKENELRRSMEEMKKENNLLKSHSEQKAREVCHLEAELKNIKQCLNQSQNFAEEMKAKNTSQETMLRDLQEKNKQQENSLTLEKLKLAVADLEKQRDCSQDLLKKREHHIEQLNDKLSKTEKESKALLSALELKKKEYEELKEEKTLFSCWKSENEKLLTQMESEKENLQSKINHLETCLKTQQIKSHEYNERVRTLEMDRENLSVEIRNLHNVLDSKSVEVETQKLAYMELQQKAEFSDQKHQKEIENMCLKTSQLTGQVEDLEHKLQLLSNEIMDKDRCYQDLHAEYESLRDLLKSKDASLVTNEDHQRSLLAFDQQPAMHHSFANIIGEQGSMPSERSECRLEADQSPKNSAILQNRVDSLEFSLESQKQMNSDLQKQCEELVQIKGEIEENLMKAEQMHQSFVAETSQRISKLQEDTSAHQNVVAETLSALENKEKELQLLNDKVETEQAEIQELKKSNHLLEDSLKELQLLSETLSLEKKEMSSIISLNKREIEELTQENGTLKEINASLNQEKMNLIQKSESFANYIDEREKSISELSDQYKQEKLILLQRCEETGNAYEDLSQKYKAAQEKNSKLECLLNECTSLCENRKNELEQLKEAFAKEHQEFLTKLAFAEERNQNLMLELETVQQALRSEMTDNQNNSKSEAGGLKQEIMTLKEEQNKMQKEVNDLLQENEQLMKVMKTKHECQNLESEPIRNSVKERESERNQCNFKPQMDLEVKEISLDSYNAQLVQLEAMLRNKELKLQESEKEKECLQHELQTIRGDLETSNLQDMQSQEISGLKDCEIDAEEKYISGPHELSTSQNDNAHLQCSLQTTMNKLNELEKICEILQAEKYELVTELNDSRSECITATRKMAEEVGKLLNEVKILNDDSGLLHGELVEDIPGGEFGEQPNEQHPVSLAPLDESNSYEHLTLSDKEVQMHFAELQEKFLSLQSEHKILHDQHCQMSSKMSELQTYVDSLKAENLVLSTNLRNFQGDLVKEMQLGLEEGLVPSLSSSCVPDSSSLSSLGDSSFYRALLEQTGDMSLLSNLEGAVSANQCSVDEVFCSSLQEENLTRKETPSAPAKGVEELESLCEVYRQSLEKLEEKMESQGIMKNKEIQELEQLLSSERQELDCLRKQYLSENEQWQQKLTSVTLEMESKLAAEKKQTEQLSLELEVARLQLQGLDLSSRSLLGIDTEDAIQGRNESCDISKEHTSETTERTPKHDVHQICDKDAQQDLNLDIEKITETGAVKPTGECSGEQSPDTNYEPPGEDKTQGSSECISELSFSGPNALVPMDFLGNQEDIHNLQLRVKETSNENLRLLHVIEDRDRKVESLLNEMKELDSKLHLQEVQLMTKIEACIELEKIVGELKKENSDLSEKLEYFSCDHQELLQRVETSEGLNSDLEMHADKSSREDIGDNVAKVNDSWKERFLDVENELSRIRSEKASIEHEALYLEADLEVVQTEKLCLEKDNENKQKVIVCLEEELSVVTSERNQLRGELDTMSKKTTALDQLSEKMKEKTQELESHQSECLHCIQVAEAEVKEKTELLQTLSSDVSELLKDKTHLQEKLQSLEKDSQALSLTKCELENQIAQLNKEKELLVKESESLQARLSESDYEKLNVSKALEAALVEKGEFALRLSSTQEEVHQLRRGIEKLRVRIEADEKKQLHIAEKLKERERENDSLKDKVENLERELQMSEENQELVILDAENSKAEVETLKTQIEEMARSLKVFELDLVTLRSEKENLTKQIQEKQGQLSELDKLLSSFKSLLEEKEQAEIQIKEESKTAVEMLQNQLKELNEAVAALCGDQEIMKATEQSLDPPIEEEHQLRNSIEKLRARLEADEKKQLCVLQQLKESEHHADLLKGRVENLERELEIARTNQEHAALEAENSKGEVETLKAKIEGMTQSLRGLELDVVTIRSEKENLTNELQKEQERISELEIINSSFENILQEKEQEKVQMKEKSSTAMEMLQTQLKELNERVAALHNDQEACKAKEQNLSSQVECLELEKAQLLQGLDEAKNNYIVLQSSVNGLIQEVEDGKQKLEKKDEEISRLKNQIQDQEQLVSKLSQVEGEHQLWKEQNLELRNLTVELEQKIQVLQSKNASLQDTLEVLQSSYKNLENELELTKMDKMSFVEKVNKMTAKETELQREMHEMAQKTAELQEELSGEKNRLAGELQLLLEEIKSSKDQLKELTLENSELKKSLDCMHKDQVEKEGKVREEIAEYQLRLHEAEKKHQALLLDTNKQYEVEIQTYREKLTSKEECLSSQKLEIDLLKSSKEELNNSLKATTQILEELKKTKMDNLKYVNQLKKENERAQGKMKLLIKSCKQLEEEKEILQKELSQLQAAQEKQKTGTVMDTKVDELTTEIKELKETLEEKTKEADEYLDKYCSLLISHEKLEKAKEMLETQVAHLCSQQSKQDSRGSPLLGPVVPGPSPIPSVTEKRLSSGQNKASGKRQRSSGIWENGGGPTPATPESFSKKSKKAVMSGIHPAEDTEGTEFEPEGLPEVVKKGFADIPTGKTSPYILRRTTMATRTSPRLAAQKLALSPLSLGKENLAESSKPTAGGSRSQKVKVAQRSPVDSGTILREPTTKSVPVNNLPERSPTDSPREGLRVKRGRLVPSPKAGLESKGSENCKVQ

SEQ ID NO: 826685 - protein, 3114 aa, Homo sapiens [sequence omitted]

SEQ ID NO: 826686 - protein, 340 aa, Homo sapiens [sequence omitted]

SEQ ID NO: 826687 - protein, 3114 aa, Homo sapiens; identical to SEQ ID NO: 826684

SEQ ID NO: 826688 - protein, 2776 aa, Homo sapiens
MSWALEEWKEGLPTRALQKIQELEGQLDKLKKEKQQRQFQLDSLEAALQKQKQKVENEKTEGTNLKRENQRLMEICESLEKTKQKISHELQVKESQVNFQEGQLNSGKKQIEKLEQELKRCKSELERSQQAAQSADVSLNPCNTPQKIFTTPLTPSQYYSGSKYEDLKEKYNKEVEERKRLEAEVKALQAKKASQTLPQATMNHRDIARHQASSSVFSWQQEKTPSHLSSNSQRTPIRRDFSASYFSGEQEVTPSRSTLQIGKRDANSSFFDNSSSPHLLDQLKAQNQELRNKINELELRLQGHEKEMKGQVNKFQELQLQLEKAKVELIEKEKVLNKCRDELVRTTAQYDQASTKYTALEQKLKKLTEDLSCQRQNAESARCSLEQKIKEKEKEFQEELSRQQRSFQTLDQECIQMKARLTQELQQAKNMHNVLQAELDKLTSVKQQLENNLEEFKQKLCRAEQAFQASQIKENELRRSMEEMKKENNLLKSHSEQKAREVCHLEAELKNIKQCLNQSQNFAEEMKAKNTSQETMLRDLQEKNKQQENSLTLEKLKLAVADLEKQRDCSQDLLKKREHHIEQLNDKLSKTEKESKALLSALELKKKEYEELKEEKTLFSCWKSENEKLLTQMESEKENLQSKINHLETCLKTQQIKSHEYNERVRTLEMDRENLSVEIRNLHNVLDSKSVEVETQKLAYMELQQKAEFSDQKHQKEIENMCLKTSQLTGQVEDLEHKLQLLSNEIMDKDRCYQDLHAEYESLRDLLKSKDASLVTNEDHQRSLLAFDQQPAMHHSFANIIGEQGSMPSERSECRLEADQSPKNSAILQNRVDSLEFSLESQKQMNSDLQKQCEELVQIKGEIEENLMKAEQMHQSFVAETSQRISKLQEDTSAHQNVVAETLSALENKEKELQLLNDKVETEQAEIQELKKSNHLLEDSLKELQLLSETLSLEKKEMSSIISLNKREIEELTQENGTLKEINASLNQEKMNLIQKSESFANYIDEREKSISELSDQYKQEKLILLQRCEETGNAYEDLSQKYKAAQEKNSKLECLLNECTSLCENRKNELEQLKEAFAKEHQEFLTKLAFAEERNQNLMLELETVQQALRSEMTDNQNNSKSEAGGLKQEIMTLKEEQNKMQKEVNDLLQENEQLMKVMKTKHECQNLESEPIRNSVKERESERNQCNFKPQMDLEVKEISLDSYNAQLVQLEAMLRNKELKLQESEKEKECLQHELQTIRGDLETSNLQDMQSQEISGLKDCEIDAEEKYISGPHELSTSQNDNAHLQCSLQTTMNKLNELEKICEILQAEKYELVTELNDSRSECITATRKMAEEVGKLLNEVKILNDDSGLLHGELVEDIPGGEFGEQPNEQHPVSLAPLDESNSYEHLTLSDKEVQMHFAELQEKFLSLQSEHKILHDQHCQMSSKMSELQTYVDSLKAENLVLSTNLRNFQGDLVKEMQLGLEEGLVPSLSSSCVPDSSSLSSLGDSSFYRALLEQTGDMSLLSNLEGAVSANQCSVDEVFCSSLQEENLTRKETPSAPAKGVEELESLCEVYRQSLEKLEEKMESQGIMKNKEIQELEQLLSSERQELDCLRKQYLSENEQWQQKLTSVTLEMESKLAAEKKQTEQLSLELEVARLQLQGLDLSSRSLLGIDTEDAIQGRNESCDISKEHTSETTERTPKHDVHQICDKDAQQDLNLDIEKITETGAVKPTGECSGEQSPDTNYEPPGEDKTQGSSECISELSFSGPNALVPMDFLGNQEDIHNLQLRVKETSNENLRLLHVIEDRDRKVESLLNEMKELDSKLHLQEVQLMTKIEACIELEKIVGELKKENSDLSEKLEYFSCDHQELLQRVETSEGLNSDLEMHADKSSREDIGDNVAKVNDSWKERFLDVENELSRIRSEKASIEHEALYLEADLEVVQTEKLCLEKDNENKQKVIVCLEEELSVVTSERNQLRGELDTMSKKTTALDQLSEKMKEKTQELESHQSECLHCIQVAEAEVKEKTELLQTLSSDVSELLKDKTHLQEKLQSLEKDSQALSLTKCELENQIAQLNKEKELLVKESESLQARLSESDYEKLNVSKALEAALVEKGEFALRLSSTQEEVHQLRRGIEKLRVRIEADEKKQLHIAEKLKERERENDSLKDKVENLERELQMSEENQELVILDAENSKAEVETLKTQIEEMARSLKVFELDLVTLRSEKENLTKQIQEKQGQLSELDKLLSSFKSLLEEKEQAEIQIKEESKTAVEMLQNQLKELNEAVAALCGDQEIMKATEQSLDPPIEEEHQLRNSIEKLRARLEADEKKQLCVLQQLKESEHHADLLKGRVENLERELEIARTNQEHAALEAENSKGEVETLKAKIEGMTQSLRGLELDVVTIRSEKENLTNELQKEQERISELEIINSSFENILQEKEQEKVQMKEKSSTAMEMLQTQLKELNERVAALHNDQEACKAKEQNLSSQVECLELEKAQLLQGLDEAKNNYIVLQSSVNGLIQEVEDGKQKLEKKDEEISRLKNQIQDQEQLVSKLSQVEGEHQLWKEQNLELRNLTVELEQKIQVLQSKNASLQDTLEVLQSSYKNLENELELTKMDKMSFVEKVNKMTAKETELQREMHEMAQKTAELQEELSGEKNRLAGELQLLLEEIKSSKDQLKELTLENSELKKSLDCMHKDQVEKEGKVREEIAEYQLRLHEAEKKHQALLLDTNKQYEVEIQTYREKLTSKEECLSSQKLEIDLLKSSKEELNNSLKATTQILEELKKTKEQ

SEQ ID NO: 826689 - protein, 175 aa, Homo sapiens
MCIQCQKGKVNKMTAKETELQREMHEMAQKTAELQEELSGEKNRLAGELQLLLEEIKSSKDQLKELTLENSELKKSLDCMHKDQVEKEGKVREEIAEYQLRLHEAEKKHQALLLDTNKQYEVEIQTYREKLTSKEECLSSQKLEIDLLKSSKEELNNSLKATTQILEELKKTKEQ

SEQ ID NO: 826690 - protein, 3114 aa, Homo sapiens; identical to SEQ ID NO: 826684

SEQ ID NO: 826691 - protein, 3114 aa, Homo sapiens; identical to SEQ ID NO: 826684

SEQ ID NO: 826692 - protein, 3088 aa, Homo sapiens
MSWALEEWKEGLPTRALQKIQELEGQLDKLKKEKQQRQFQLDSLEAALQKQKQKVENEKTEGTNLKRENQRLMEICESLEKTKQKISHELQVKESQVNFQEGQLNSGKKQIEKLEQELKRCKSELERSQQAAQSADVSLNPCNTPQKIFTTPLTPSQYYSGSKYEDLKEKYNKEVEERKRLEAEVKALQAKKASQTLPQATMNHRDIARHQASSSVFSWQQEKTPSHLSSNSQRTPIRRDFSASYFSGEQEVTPSRSTLQIGKRDANSSFFDNSSSPHLLDQLKAQNQELRNKINELELRLQGHEKEMKGQVNKFQELQLQLEKAKVELIEKEKVLNKCRDELVRTTAQYDQASTKYTALEQKLKKLTEDLSCQRQNAESARCSLEQKIKEKEKEFQEELSRQQRSFQTLDQECIQMKARLTQELQQAKNMHNVLQAELDKLTSVKQQLENNLEEFKQKLCRAEQAFQASQIKENELRRSMEEMKKENNLLKSHSEQKAREVCHLEAELKNIKQCLNQSQNFAEEMKAKNTSQETMLRDLQEKNKQQENSLTLEKLKLAVADLEKQRDCSQDLLKKREHHIEQLNDKLSKTEKESKALLSALELKKKEYEELKEEKTLFSCWKSENEKLLTQMESEKENLQSKINHLETCLKTQQIKSHEYNERVRTLEMDRENLSVEIRNLHNVLDSKSVEVETQKLAYMELQQKAEFSDQKHQKEIENMCLKTSQLTGQVEDLEHKLQLLSNEIMDKDRCYQDLHAEYESLRDLLKSKDASLVTNEDHQRSLLAFDQQPAMHHSFANIIGEQGSMPSERSECRLEADQSPKNSAILQNRVDSLEFSLESQKQMNSDLQKQCEELVQIKGEIEENLMKAEQMHQSFVAETSQRISKLQEDTSAHQNVVAETLSALENKEKELQLLNDKVETEQAEIQELKKSNHLLEDSLKELQLLSETLSLEKKEMSSIISLNKREIEELTQENGTLKEINASLNQEKMNLIQKSESFANYIDEREKSISELSDQYKQEKLILLQRCEETGNAYEDLSQKYKAAQEKNSKLECLLNECTSLCENRKNELEQLKEAFAKEHQEFLTKLAFAEERNQNLMLELETVQQALRSEMTDNQNNSKSEAGGLKQEIMTLKEEQNKMQKEVNDLLQENEQLMKVMKTKHECQNLESEPIRNSVKERESERNQCNFKPQMDLEVKEISLDSYNAQLVQLEAMLRNKELKLQESEKEKECLQHELQTIRGDLETSNLQDMQSQEISGLKDCEIDAEEKYISGPHELSTSQNDNAHLQCSLQTTMNKLNELEKICEILQAEKYELVTELNDSRSECITATRKMAEEVGKLLNEVKILNDDSGLLHGELVEDIPGGEFGEQPNEQHPVSLAPLDESNSYEHLTLSDKEVQMHFAELQEKFLSLQSEHKILHDQHCQMSSKMSELQTYVDSLKAENLVLSTNLRNFQGDLVKEMQLGLEEGLVPSLSSSCVPDSSSLSSLGDSSFYRALLEQTGDMSLLSNLEGAVSANQCSVDEVFCSSLQEENLTRKETPSAPAKGVEELESLCEVYRQSLEKLEEKMESQGIMKNKEIQELEQLLSSERQELDCLRKQYLSENEQWQQKLTSVTLEMESKLAAEKKQTEQLSLELEVARLQLQGLDLSSRSLLGIDTEDAIQGRNESCDISKEHTSETTERTPKHDVHQICDKDAQQDLNLDIEKITETGAVKPTGECSGEQSPDTNYEPPGEDKTQGSSECISELSFSGPNALVPMDFLGNQEDIHNLQLRVKETSNENLRLLHVIEDRDRKVESLLNEMKELDSKLHLQEVQLMTKIEACIELEKIVGELKKENSDLSEKLEYFSCDHQELLQRVETSEGLNSDLEMHADKSSREDIGDNVAKVNDSWKERFLDVENELSRIRSEKASIEHEALYLEADLEVVQTEKLCLEKDNENKQKVIVCLEEELSVVTSERNQLRGELDTMSKKTTALDQLSEKMKEKTQELESHQSECLHCIQVAEAEVKEKTELLQTLSSDVSELLKDKTHLQEKLQSLEKDSQALSLTKCELENQIAQLNKEKELLVKESESLQARLSESDYEKLNVSKALEAALVEKGEFALRLSSTQEEVHQLRRGIEKLRVRIEADEKKQLHIAEKLKERERENDSLKDKVENLERELQMSEENQELVILDAENSKAEVETLKTQIEEMARSLKVFELDLVTLRSEKENLTKQIQEKQGQLSELDKLLSSFKSLLEEKEQAEIQIKEESKTAVEMLQNQLKELNEAVAALCGDQEIMKATEQSLDPPIEEEHQLRNSIEKLRARLEADEKKQLCVLQQLKESEHHADLLKGRVENLERELEIARTNQEHAALEAENSKGEVETLKAKIEGMTQSLRGLELDVVTIRSEKENLTNELQKEQERISELEIINSSFENILQEKEQEKVQMKEKSSTAMEMLQTQLKELNERVAALHNDQEACKAKEQNLSSQVECLELEKAQLLQGLDEAKNNYIVLQSSVNGLIQEVEDGKQKLEKKDEEISRLKNQIQDQEQLVSKLSQVEGEHQLWKEQNLELRNLTVELEQKIQVLQSKNASLQDTLEVLQSSYKNLENELELTKMDKMSFVEKVNKMTAKETELQREMHEMAQKTAELQEELSGEKNRLAGELQLLLEEIKSSKDQLKELTLENSELKKSLDCMHKDQVEKEGKVREEIAEYQLRLHEAEKKHQALLLDTNKQYEVEIQTYREKLTSKEECLSSQKLEIDLLKSSKEELNNSLKATTQILEELKKTKMDNLKYVNQLKKENERAQGKMKLLIKSCKQLEEEKEILQKELSQLQAAQEKQKTGTVMDTKVDELTTEIKELKETLEEKTKEADEYLDKYCSLLISHEKLEKAKEMLETQVAHLCSQQSKQDSRGSPLLGPVVPGPSPIPSVTEKRLSSGQNKASGKRQRSSGIWENGGGPTPATPESFSKKSKKAVMSGIHPAEDTEGTEFEPEGLPEVVKKGFADIPTGKTSPYILRRTTMATRTSPRLAAQKLALSPLSLGKENLAESSKPTAGGSRSQKVKVAQRSPVDSGTILREPTTKSVPSPKAGLESKGSENCKVQ

SEQ ID NO: 826693 - protein, 1708 aa, Homo sapiens
MSWALEEWKEGLPTRALQKIQELEGQLDKLKKEKQQRQFQLDSLEAALQKQKQKVENEKTEGTNLKRENQRLMEICESLEKTKQKISHELQVKESQVNFQEGQLNSGKKQIEKLEQELKRCKSELERSQQAAQSADVSLNPCNTPQKIFTTPLTPSQYYSGSKYEDLKEKYNKEVEERKRLEAEVKALQAKKASQTLPQATMNHRDIARHQASSSVFSWQQEKTPSHLSSNSQRTPIRRDFSASYFSGEQEVTPSRSTLQIGKRDANSSFFDNSSSPHLLDQLKAQNQELRNKINELELRLQGHEKEMKGQVNKFQELQLQLEKAKVELIEKEKVLNKCRDELVRTTAQYDQASTKYTALEQKLKKLTEDLSCQRQNAESARCSLEQKIKEKEKEFQEELSRQQRSFQTLDQECIQMKARLTQELQQAKNMHNVLQAELDKLTSVKQQLENNLEEFKQKLCRAEQAFQASQIKENELRRSMEEMKKENNLLKSHSEQKAREVCHLEAELKNIKQCLNQSQNFAEEMKAKNTSQETMLRDLQEKNKQQENSLTLEKLKLAVADLEKQRDCSQDLLKKREHHIEQLNDKLSKTEKESKALLSALELKKKEYEELKEEKTLFSCWKSENEKLLTQMESEKENLQSKINHLETCLKTQQIKSHEYNERVRTLEMDRENLSVEIRNLHNVLDSKSVEVETQKLAYMELQQKAEFSDQKHQKEIENMCLKTSQLTGQVEDLEHKLQLLSNEIMDKDRCYQDLHAEYESLRDLLKSKDASLVTNEDHQRSLLAFDQQPAMHHSFANIIGEQGSMPSERSECRLEADQSPKNSAILQNRVDSLEFSLESQKQMNSDLQKQCEELVQIKGEIEENLMKAEQMHQSFVAETSQRISKLQEDTSAHQNVVAETLSALENKEKELQLLNDKVETEQAEIQELKKSNHLLEDSLKELQLLSETLSLEKKEMSSIISLNKREIEELTQENGTLKEINASLNQEKMNLIQKSESFANYIDEREKSISELSDQYKQEKLILLQRCEETGNAYEDLSQKYKAAQEKNSKLECLLNECTSLCENRKNELEQLKEAFAKEHQEFLTKLAFAEERNQNLMLELETVQQALRSEMTDNQNNSKSEAGGLKQEIMTLKEEQNKMQKEVNDLLQENEQLMKVMKTKHECQNLESEPIRNSVKERESERNQCNFKPQMDLEVKEISLDSYNAQLVQLEAMLRNKELKLQESEKEKECLQHELQTIRGDLETSNLQDMQSQEISGLKDCEIDAEEKYISGPHELSTSQNDNAHLQCSLQTTMNKLNELEKICEILQAEKYELVTELNDSRSECITATRKMAEEVGKLLNEVKILNDDSGLLHGELVEDIPGGEFGEQPNEQHPVSLAPLDESNSYEHLTLSDKEVQMHFAELQEKFLSLQSEHKILHDQHCQMSSKMSELQTYVDSLKAENLVLSTNLRNFQGDLVKEMQLGLEEGLVPSLSSSCVPDSSSLSSLGDSSFYRALLEQTGDMSLLSNLEGAVSANQCSVDEVFCSSLQEENLTRKETPSAPAKGVEELESLCEVYRQSLEKLEEKMESQGIMKNKEIQELEQLLSSERQELDCLRKQYLSEKKKKKKKKKFLGGWAPGKFLNPWVEPRGPRGYGYQWAHRGTTGGHRGRRNKKGVRIPHPNKKDAGGENKERLENKPQRGNNERHNRGAHITGRSTGELEFNLR

SEQ ID NO: 826694 - protein, 268 aa, Homo sapiens
AETASESAPEQRPRPPRLLRRDLERKTPARRPALASLPTGHTAPPPRPRCARPVRCTPACWRLRRRARPGLLLRATMSSRIARALALVVTLLHLTRLALSTCPAACHCPLEAPKCAPGVGLVRDGCGCCKVCAKQLNEDCSKTQPCDHTKGLECNFGASSTALKGICRAQSEGRPCEYNSRIILKTGKVSSPTVNISAHVLMAPWAAFLCVPKNYLSPTWAVPTLGWSKLPGSAARSGSVTRIVSRTPWRTRTASLARSWDSMPPRWS

SEQ ID NO: 826695 - protein, 167 aa, Homo sapiens
MEPRILYNPLQGQKCIVQTTSWSQCSKTCGTGISTRVTNDNPECRLVKETRICEVRPCGQPVYSSLKKGKKCSKTKKSPEPVRFTYAGCLSVKKYRPKYCGSCVDGRCCTPQLTRTVKMRFRCEDGETFSKNVMMIQSCKCNYNCPHANEAAFPFYRLFNDIHKFRD

SEQ ID NO: 826696 - protein, 167 aa, Homo sapiens; identical to SEQ ID NO: 826695

SEQ ID NO: 826697 - protein, 167 aa, Homo sapiens; identical to SEQ ID NO: 826695

SEQ ID NO: 826698 - protein, 268 aa, Homo sapiens; identical to SEQ ID NO: 826694

SEQ ID NO: 826699 - protein, 268 aa, Homo sapiens; identical to SEQ ID NO: 826694

SEQ ID NO: 826700 - protein, 268 aa, Homo sapiens; identical to SEQ ID NO: 826694

SEQ ID NO: 826701 - protein, 167 aa, Homo sapiens; identical to SEQ ID NO: 826695

SEQ ID NO: 826702 - protein, 268 aa, Homo sapiens; identical to SEQ ID NO: 826694

SEQ ID NO: 826703 - protein, 268 aa, Homo sapiens; identical to SEQ ID NO: 826694

SEQ ID NO: 826704 - protein, 167 aa, Homo sapiens; identical to SEQ ID NO: 826695

SEQ ID NO: 826705 - protein, 268 aa, Homo sapiens; identical to SEQ ID NO: 826694

SEQ ID NO: 826706 - protein, 268 aa, Homo sapiens; identical to SEQ ID NO: 826694

SEQ ID NO: 826707 - protein, 268 aa, Homo sapiens; identical to SEQ ID NO: 826694

SEQ ID NO: 826708 - protein, 167 aa, Homo sapiens; identical to SEQ ID NO: 826695

SEQ ID NO: 826709 - protein, 268 aa, Homo sapiens; identical to SEQ ID NO: 826694

SEQ ID NO: 826710 - protein, 167 aa, Homo sapiens; identical to SEQ ID NO: 826695

SEQ ID NO: 826711 - protein, 268 aa, Homo sapiens; identical to SEQ ID NO: 826694

SEQ ID NO: 826712 - protein, 268 aa, Homo sapiens; identical to SEQ ID NO: 826694

SEQ ID NO: 826713 - protein, 268 aa, Homo sapiens; identical to SEQ ID NO: 826694

SEQ ID NO: 826714 - protein, 268 aa, Homo sapiens; identical to SEQ ID NO: 826694

SEQ ID NO: 826715 - protein, 218 aa, Homo sapiens
MTWTLICTKGSPARWRDFHSATMLGSHMYVFGGRADRFGPFHSNNEIYCNRIRVFDTRTEAWLDCPPTPVLPEGRRSHSAFGYNGELYIFGGYNARLNRHFHDLWKFNPVSFTWKKIEPKGKGPCPRRRQCCCIVGDKIVLFGGTSPSPEEGLGDEFDLIDHSDLHILDFSPSLKTLCKLAVIQYNLDQSCLPHDIRWELNAMTTNSNISRPIVSSHG

SEQ ID NO: 826716 - protein, 218 aa, Homo sapiens; identical to SEQ ID NO: 826715

SEQ ID NO: 826717 - protein, 223 aa, Homo sapiens
MTWTLICTKGSPARWRDFHSATMLGSHMYVFGGRADRFGPFHSNNEIYCNRIRVFDTRTEAWLDCPPTPVLPEGRRSHSAFGYNGELYIFGGYNARLNRHFHDLWKFNPVSFTWKKIEPKGKGPCPRRRQCCCIVGDKIVLFGGTSPSPEEGLGDEFDLIDHSDLHILDFSPSLKTLCKLAVIQYNLDQSCLPHDIRWELNAMTTNSNISRPISPFAYPLPSA

SEQ ID NO: 826718 - protein, 218 aa, Homo sapiens; identical to SEQ ID NO: 826715

SEQ ID NO: 826719 - protein, 226 aa, Homo sapiens
MTWTLICTKGSPARWRDFHSATMLGSHMYVFGGRADRFGPFHSNNEIYCNRIRVFDTRTEAWLDCPPTPVLPEGRRSHSAFGYNGELYIFGGYNARLNRHFHDLWKFNPVSFTWKKIEPKGKGPCPRRRQCCCIVGDKIVLFGGTSPSPEEGLGDEFDLIDHSDLHILDFSPSLKTLCKLAVIQYNLDQSCLPHDIRWELNAMTTNSNISRPIWGGGDQQINPTLP

SEQ ID NO: 826720 - protein, 206 aa, Homo sapiens
MTWTLICTKGSPARWRDFHSATMLGSHMYVFGGRADRFGPFHSNNEIYCNRIRVFDTRTEAWLDCPPTPVLPEGRRSHSAFGYNGELYIFGGYNARLNRHFHDLWKFNPVSFTWKKIEPKGKGPCPRRRQCCCIVGDKIVLFGGTSPSPEEGLGDEFDLIDHSDLHILDFSPSLKTLCKLAVIQYNLDQSCLPHDIRYSEWLEGRD

SEQ ID NO: 826721 - protein, 155 aa, Homo sapiens
MLRWTVHLEGGPRRVNHAAVAVGHRVYSFGGYCSGEDYETLRQIDVHIFNAVSLRWTKLPPVKSAIRGQAPVVPYMRYGHSTVLIDDTVLLWGGRNDTEGACNVLYAFDVNTHKWFTPRVSGTVPGARDGHSACVLGKIMYIFGGYEQQADCFSK

SEQ ID NO: 826722 - protein, 155 aa, Homo sapiens; identical to SEQ ID NO: 826721

SEQ ID NO: 826723 - protein, 218 aa, Homo sapiens; identical to SEQ ID NO: 826715

SEQ ID NO: 826724 - protein, 155 aa, Homo sapiens; identical to SEQ ID NO: 826721

SEQ ID NO: 826725 - protein, 218 aa, Homo sapiens; identical to SEQ ID NO: 826715

SEQ ID NO: 826726 - protein, 218 aa, Homo sapiens; identical to SEQ ID NO: 826715

SEQ ID NO: 826727 - protein, 218 aa, Homo sapiens
MIMDSYLYKGSPARWRDFHSATMLGSHMYVFGGRADRFGPFHSNNEIYCNRIRVFDTRTEAWLDCPPTPVLPEGRRSHSAFGYNGELYIFGGYNARLNRHFHDLWKFNPVSFTWKKIEPKGKGPCPRRRQCCCIVGDKIVLFGGTSPSPEEGLGDEFDLIDHSDLHILDFSPSLKTLCKLAVIQYNLDQSCLPHDIRWELNAMTTNSNISRPIVSSHG

SEQ ID NO: 826728 - protein, 81 aa, Homo sapiens
PPTIELVGQRAMCPPVRPGACFQLIGRQDESSLSVIPKSQSPLTDTASVSIDISTALYDSNLVPFYAEFIGLAPHLFIEYS

SEQ ID NO: 826729 - protein, 160 aa, Homo sapiens
MLRWTVHLEGGPRRVNHAAVAVGHRVYSFGGYCSGEDYETLRQIDVHIFNAVSLRWTKLPPVKSAIRGQAPVVPYMRYGHSTVLIDDTVLLWGGRNDTEGACNVLYAFDVNTHKWFTPRVSGTVPGARDGHSACVLGKIMYIFGGYEQQRTVFPCHAAGI

SEQ ID NO: 826730 - protein, 284 aa, Homo sapiens
MGRRKFLPPPLLSLLSSSLPLPICHPPVSTHHHHHQQQQQQQQQQQQQQQQQQQHHGNSGPPPPGAFPHPLEGGSSHHAHPYAMSPSLGSLRPYPPGTAHLPPPHSQVSYSQAGPNGPPVSSSSNSSSSTSQGSYPCSHPSPSQGPQGAPYPFPPVPTVTTSSATLSTVIATVASSPAGYKTASPPGPPPYGKRAPSPGAYKTATPPGYKPGSPPSFRTGTPPGYRGTSPPAGPGTFKPGSPTVGPGPLPPAGPSGLPSLPPPPAAPASGPPLSATQIKQEPGI

SEQ ID NO: 826731 - protein, 155 aa, Homo sapiens; identical to SEQ ID NO: 826721

SEQ ID NO: 826732 - protein, 284 aa, Homo sapiens; identical to SEQ ID NO: 826730

SEQ ID NO: 826733 - protein, 215 aa, Homo sapiens
MTWTLICTKGSPARWRDFHSATMLGSHMYVFGGRADRFGPFHSNNEIYCNRIRVFDTRTEAWLDCPPTPVLPEGRRSHSAFGYNGELYIFGGYNARLNRHFHDLWKFNPVSFTWKKIEPKGKGPCPRRRQCCCIVGDKIVLFGGTSPSPEEGLGDEFDLIDHSDLHILDFSPSLKTLCKLAVIQYNLDQSCLPHDIRWELNAMTTNSNISRPISA

SEQ ID NO: 826734 - protein, 210 aa, Homo sapiens
MTWTLICTKGSPARWRDFHSATMLGSHMYVFGGRADRFGPFHSNNEIYCNRIRVFDTRTEAWLDCPPTPVLPEGRRSHSAFGYNGELYIFGGYNARLNRHFHDLWKFNPVSFTWKKIEPKGKGPCPRRRQCCCIVGDKIVLFGGTSPSPEEGLGDEFDLIDHSDLHILDFSPSLKTLCKLAVIQYNLDQSCLPHDISWGGGDQQINPTLP

SEQ ID NO: 826735 - protein, 218 aa, Homo sapiens; identical to SEQ ID NO: 826715

SEQ ID NO: 826736 - protein, 218 aa, Homo sapiens; identical to SEQ ID NO: 826715

SEQ ID NO: 826737 - protein, 218 aa, Homo sapiens; identical to SEQ ID NO: 826715

SEQ ID NO: 826738 - protein, 218 aa, Homo sapiens; identical to SEQ ID NO: 826715

SEQ ID NO: 826739 - protein, 167 aa, Homo sapiens
SLGVRGGGMADTVLFEFLHTEMVAELWAHDPDPGPGGQKMSLSVLEGMGFRVGQALGERLPRETLAFREELDVLKFLCKDLWVAVFQKQMDSLRTNHQGTYVLQDNSFPLLLPMASGLQYLEEAPKFLAFTCGLLRGALYTLGIESVVTASVAALPVCKFQVVIPKS

SEQ ID NO: 826740 - protein, 181 aa, Homo sapiens
SLGVRGGGMADTVLFEFLHTEMVAELWAHDPDPGPGVSAGLRGEEAGATKGQKMSLSVLEGMGFRVGQALGERLPRETLAFREELDVLKFLCKDLWVAVFQKQMDSLRTNHQGTYVLQDNSFPLLLPMASGLQYLEEAPKFLAFTCGLLRGALYTLGIESVVTASVAALPVCKFQVVIPKS

SEQ ID NO: 826741 - protein, 167 aa, Homo sapiens; identical to SEQ ID NO: 826739

SEQ ID NO: 826742 - protein, 107 aa, Homo sapiens
MQESGLSSSLFLAWPHGLSLVLPHQAAPGDAGLQGGAGCPQVLVQRPVGGGVPEADGQPAHQSPGGSTPACPSSFLLRARPREWEGNPPAPEQRLPGPAQSFPTGGR

SEQ ID NO: 826743 - protein, 124 aa, Homo sapiens
SLGVRGGGMADTVLFEFLHTEMVAELWAHDPDPGPGVSAGLRGEEAGATKGQKMSLSVLEGMGFRVGQALGERLPRETLAFREELDVLKFLCKDLWVAVFQKQMDSLRTNHQVGAPRPARPASS

SEQ ID NO: 826744 - protein, 181 aa, Homo sapiens; identical to SEQ ID NO: 826740

SEQ ID NO: 826745 - protein, 205 aa, Homo sapiens
ELLQPTRSEPCMGRKPLVAACPTPSVMLLVPSWSSPPVTPRLYLPFCIFLGRVPSFSAQPWEARAGPTLPRAQAPTPSLEALGPTRALEAKAVTPVVLRKGAFPTSAQSKTWVPAYPPCASNVQAPTPPTSLSFPQGTYVLQDNSFPLLLPMASGLQYLEEAPKFLAFTCGLLRGALYTLGIESVVTASVAALPVCKFQVVIPKS

SEQ ID NO: 826746 - protein, 191 aa, Homo sapiens
SLGVRGGGMADTVLFEFLHTEMVAELWAHDPDPGPGGQKMSLSVLEGMGFRVGQALGERLPRETLAFREELDVLKFLCKDLWVAVFQKQMDSLRTNHQGTYVLQDNSFPLLLPMASGLQYLEEAPKPWPHRPQETVGPLHFGVVLGIPGPRGHICSGSGYQIEVGVSEEAKGSQLRSGLWWDSRLGSVTAQ

SEQ ID NO: 826747 - protein, 181 aa, Homo sapiens; identical to SEQ ID NO: 826740

SEQ ID NO: 826748 - protein, 144 aa, Homo sapiens
LEACEEGAWRILCCLSFFTRRWWLSCGLTTPTPARGLPRETLAFREELDVLKFLCKDLWVAVFQKQMDSLRTNHQGTYVLQDNSFPLLLPMASGLQYLEEAPKFLAFTCGLLRGALYTLGIESVVTASVAALPVCKFQVVIPKS

SEQ ID NO: 826749 - protein, 144 aa, Homo sapiens; identical to SEQ ID NO: 826748

SEQ ID NO: 826750 - protein, 178 aa, Homo sapiens
SLGVRGGGMADTVLFEFLHTEMVAELWAHDPDPGPGVSAGLRGEEAGATKAFCRAGSEGGTWGQWFNCTLPGANCCTGKSREGSKQCQVHTGAVTSCRLLGQVVQTAVDLQLWTHMGSHVHFGLEDVPLLTWLLGCLSLVLVVVTNEIVKLHEIRVRVRYQKRQKLQFETKLGMNSPF

SEQ ID NO: 826751 - protein, 99 aa, Homo sapiens
SLGVRGGGMADTVLFEFLHTEMVAELWAHDPDPGPGVSAGLRGEEAGATKVTPLGERRARQASGFEPGPAPALQGNVWPWLPPLESGVRDGAGSGLLLN

SEQ ID NO: 826752 - protein, 181 aa, Homo sapiens; identical to SEQ ID NO: 826740

SEQ ID NO: 826753 - protein, 847 aa, Homo sapiens
MEAARPSGSWNGALCRLLLLTLAILIFASDACKNVTLHVPSKLDAEKLVGRVNLKECFTAANLIHSSDPDFQILEDGSVYTTNTILLSSEKRSFTILLSNTENQEKKKIFVFLEHQTKVLKKRHTKEKVLRRAKRRWAPIPCSMLENSLGPFPLFLQQVQSDTAQNYTIYYSIRGPGVDQEPRNLFYVERDTGNLYCTRPVDREQYESFEIIAFATTPDGYTPELPLPLIIKIEDENDNYPIFTEETYTFTIFENCRVGTTVGQVCATDKDEPDTMHTRLKYSIIGQVPPSPTLFSMHPTTGVITTTSSQLDRELIDKYQLKIKVQDMDGQYFGLQTTSTCIINIDDVNDHLPTFTRTSYVTSVEENTVDVEILRVTVEDKDLVNTANWRANYTILKGNENGNFKIVTDAKTNEGVLCVVKPLNYEEKQQMILQIGVVNEAPFSREASPRSAMSTATVTVNVEDQDEGPECNPPIQTVRMKENAEVGTTSNGYKAYDPETRSSSGIRYKKLTDPTGWVTIDENTGSIKVFRSLDREAETIKNGIYNITVLASDQGGRTCTGTLGIILQDVNDNSPFIPKKTVIICKPTMSSAEIVAVDPDEPIHGPPFDFSLESSTSEVQRMWRLKAINDTAARLSYQNDPPFGSYVVPITVRDRLGMSSVTSLDVTLCDCITENDCTHRVDPRIGGGGVQLGKWAILAILLGIALLFCILFTLVCGASGTSKQPKVIPDDLAQQNLIVSNTEAPGDDKVYSANGFTTQTVGASAQGVCGTVGSGIKNGGQETIEMVKGGHQTSESCRGAGHHHTLDSCRGGHTEVDNCRYTYSEWHSFTQPRLGEESIRGHTLIKN

SEQ ID NO: 826754 - protein, 544 aa, Homo sapiens
LEDPVHFLHQVDGHSSKNDIHTLLKDLNSYLEDKVYLTGYNFTLADILLYYGLHRFIVSICIVKPLNYEEKQQMILQIGVVNEAPFSREASPRSAMSTATVTVNVEDQDEGPECNPPIQTVRMKENAEVGTTSNGYKAYDPETRSSSGIRYKKLTDPTGWVTIDENTGSIKVFRSLDREAETIKNGIYNITVLASDQGGRTCTGTLGIILQDVNDNSPFIPKKTVIICKPTMSSAEIVAVDPDEPIHGPPFDFSLESSTSEVQRMWRLKAINDTAARLSYQNDPPFGSYVVPITVRDRLGMSSVTSLDVTLCDCITENDCTHRVDPRIGGGGVQLGKWAILAILLGIALLFCILFTLVCGASGTSKQPKVIPDDLAQQNLIVSNTEAPGDDKVYSANGFTTQTVGASAQGVCGTVGSGIKNGGQETIEMVKGGHQTSESCRGAGHHHTLDSCRGGHTEVDNCRYTYSEWHSFTQPRLGEKVYLCNQDENHKHAQDYVLTYNYEGRGSVAGSVGCCSERQEEDGLEFLDNLEPKFRTLAEACMKR

SEQ ID NO: 826755 - protein, 901 aa, Homo sapiens
MEAARPSGSWNGALCRLLLLTLAILIFASDACKNVTLHVPSKLDAEKLVGRVNLKECFTAANLIHSSDPDFQILEDGSVYTTNTILLSSEKRSFTILLSNTENQEKKKIFVFLEHQTKVLKKRHTKEKVLRRAKRRWAPIPCSMLENSLGPFPLFLQQVQSDTAQNYTIYYSIRGPGVDQEPRNLFYVERDTGNLYCTRPVDREQYESFEIIAFATTPDGYTPELPLPLIIKIEDENDNYPIFTEETYTFTIFENCRVGTTVGQVCATDKDEPDTMHTRLKYSIIGQVPPSPTLFSMHPTTGVITTTSSQLDRELIDKYQLKIKVQDMDGQYFGLQTTSTCIINIDDVNDHLPTFTRTSYVTSVEENTVDVEILRVTVEDKDLVNTANWRANYTILKGNENGNFKIVTDAKTNEGVLCVVKPLNYEEKQQMILQIGVVNEAPFSREASPRSAMSTATVTVNVEDQDEGPECNPPIQTVRMKENAEVGTTSNGYKAYDPETRSSSGIRYKKLTDPTGWVTIDENTGSIKVFRSLDREAETIKNGIYNITVLASDQGGRTCTGTLGIILQDVNDNSPFIPKKTVIICKPTMSSAEIVAVDPDEPIHGPPFDFSLESSTSEVQRMWRLKAINDTAARLSYQNDPPFGSYVVPITVRDRLGMSSVTSLDVTLCDCITENDCTHRVDPRIGGGGVQLGKWAILAILLGIALLFCILFTLVCGASGTSKQPKVIPDDLAQQNLIVSNTEAPGDDKVYSANGFTTQTVGASAQGVCGTVGSGIKNGGQETIEMVKGGHQTSESCRGAGHHHTLDSCRGGHTEVDNCRYTYSEWHSFTQPRLGEKVYLCNQDENHKHAQDYVLTYNYEGRGSVAGSVGCCSERQEEDGLEFLDNLEPKFRTLAEACMKR

SEQ ID NO: 826756 - protein, 847 aa, Homo sapiens; identical to SEQ ID NO: 826753

SEQ ID NO: 826757 - protein, 901 aa, Homo sapiens; identical to SEQ ID NO: 826755

SEQ ID NO: 826758 - protein, 923 aa, Homo sapiens
MEAARPSGSWNGALCRLLLLTLAILIFASDACKNVTLHVPSKLDAEKLVGRVNLKECFTAANLIHSSDPDFQILEDGSVYTTNTILLSSEKRSFTILLSNTENQEKKKIFVFLEHQTKVLKKRHTKEKVLRRAKRRWAPIPCSMLENSLGPFPLFLQQVQSDTAQNYTIYYSIRGPGVDQEPRNLFYVERDTGNLYCTRPVDREQYESFEIIAFATTPDGYTPELPLPLIIKIEDENDNYPIFTEETYTFTIFENCRVGTTVGQVCATDKDEPDTMHTRLKYSIIGQVPPSPTLFSMHPTTGVITTTSSQLDRELIDKYQLKIKVQDMDGQYFGLQTTSTCIINIDDVNDHLPTFTRTSYVTSVEENTVDVEILRVTVEDKDLVNTANWRANYTILKGNENGNFKIVTDAKTNEGVLCVVKPLNYEEKQQMILQIGVVNEAPFSREASPRSAMSTATVTVNVEDQDEGPECNPPIQTVRMKENAEVGTTSNGYKAYDPETRSSSGIRYKKLTDPTGWVTIDENTGSIKVFRSLDREAETIKNGIYNITVLASDQGGRTCTGTLGIILQDVNDNSPFIPKKTVIICKPTMSSAEIVAVDPDEPIHGPPFDFSLESSTSEVQRMWRLKAINDTAARLSYQNDPPFGSYVVPITVRDRLGMSSVTSLDVTLCDCITENDCTHRVDPRIGGGGVQLGKWAILAILLGIALLFCILFTLVCGASGTSKQPKVIPDDLAQQNLIVSNTEAPGDDKVYSANGFTTQTVGASAQGVCGTVGSGIKNGGQETIEMVKGGHQTSESCRGAGHHHTLDSCRGGHTEVDNCRYTYSEWHSFTQPRLGEKVYLCNQDENHKHAQDYVLTYNYEGRGSVAGSVGCCSERQEEDGLEFFLKVIKPLAFRDLLEHTHLFMHASASVLNLGSKLSKNSSR

SEQ ID NO: 826759 - protein, 328 aa, Homo sapiens
FTLERNLISAMSVENHLVLVYPLSSIREFTLERNLMVVVCVGKPLVKRDILFSISEFTQERNPMNVVSVEKLSARVLILFTIKEHTMVRSPMNVMNVIKPSVCFLPLFNIREYIMETNPMSVTNVGRPLARGHTLFSIRGVTLVRNPMSVMSVGKPLGRYPPKLSMREHTMERSPMSAVTVGRPSARVHTLSTIKEFTLERIPMSAVNVGRPSMFVPLSFSITEFILVRNLMNVVTVARRSVSIHNLSNIREFTLERNPTCAMSVRNPSVHAYPLSNTREFTLERNPMYVPNVENPSDKALTLFNIREFTVGSNLIRVIDVKKPSVRE

SEQ ID NO: 826760 - protein, 328 aa, Homo sapiens; identical to SEQ ID NO: 826759

SEQ ID NO: 826761 - protein, 308 aa, Homo sapiens
WKTHSGSVWRVTWAHPEFGQVLASCSFDRTAAVWEEIVGESNDKLRGQSHWVKRTTLVDSRTSVTDVKFAPKHMGLMLATCSADGIVRIYEAPDVMNLSQWSLQHEISCKLSCSCISWNPSSSRAHSPMIAVGSDDSSPNAMAKVQIFEYNENTRKYAKAETLMTVTDPVHDIAFAPNLGRSFHILAIATKDVRIFTLKPVRKELTSSGGPTKFEIHIVAQFDNHNSQVWRVSWNITGTVLASSGDDGCVRLWKANYMDNWKCTGILKGNGSPVNGSSQQGTSNPSLGSTIPSLQNSLNGSSAGRKHS

SEQ ID NO: 826762 - protein, 308 aa, Homo sapiens; identical to SEQ ID NO: 826761

SEQ ID NO: 826763 - protein, 308 aa, Homo sapiens; identical to SEQ ID NO: 826761

SEQ ID NO: 826764 - protein, 308 aa, Homo sapiens; identical to SEQ ID NO: 826761

SEQ ID NO: 826765 - protein, 308 aa, Homo sapiens; identical to SEQ ID NO: 826761

SEQ ID NO: 826766 - protein, 369 aa, Homo sapiens
WKTHSGSVWRVTWAHPEFGQVLASCSFDRTAAVWEEIVGESNDKLRGQSHWVKRTTLVDSRTSVTDVKFAPKHMGLMLATCSADGIVRIYEAPDVMNLSQWSLQHEISCKLSCSCISWNPSSSRAHSPMIAVGSDDSSPNAMAKVQIFEYNENTRKYAKAETLMTVTDPVHDIAFAPNLGRSFHILAIATKDVRIFTLKPVRKELTSSGGPTKFEIHIVAQFDNHNSQVWRVSWNITGTVLASSGDDGCVRLWKANYMDNWKCTGILKGNGSPVNGSSQQGTSNPSLGSTIPSLQNSLNGSSAGRYFFTPLDSPRAGSRWSSYAQLLPPPPPPLVEHSCDADTANLQYPHPRRRYLSRPLNPLPENEGI

SEQ ID NO: 826767 - protein, 271 aa, Homo sapiens
GKGPVAAFIDQSNIFLTDPKIFLGQWREEPKMPLLLLGETEPLKLERDCRSPVDPWAAASPDLALACLCHCQDLSSGAFPNRGVLGGVLFPTVEMVIKVFVATSSGSIAIRKKQQEVVGFLEANKIDFKELDIAGDEDNRRWMRENVPGEKKPQNGIPLPPQIFNEEQYCGDFDSFFSAKEENIIYSFLGLAPPPDSKGSEKAEEGGETEAQKEGSEDVGNLPEAQEKNEEEGETATEETEEIAMEGAEGEAEEEEETAEGEEEPGEDEDS

SEQ ID NO: 826768 - protein, 175 aa, Homo sapiens
AGAAAGRGVLGLEIRKKQQEVVGFLEANKIDFKELDIAGDEDNRRWMRENVPGEKKPQNGIPLPPQIFNEEQYCGDFDSFFSAKEENIIYSFLGLAPPPDSKGSEKAEEGGETEAQKEGSEDVGNLPEAQEKNEEEGETATEETEEIAMEGAEGEAEEEEETAEGEEEPGEDEDS

SEQ ID NO: 826769 - protein, 240 aa, Homo sapiens
GKGPVAAFIDQSNIFLTDPKIFLGQWREEPKMPLLLLGETEPLKLERDCRSPVDPWAAASPDLALACLCHCQDLSSGAFPNRGVLGGVLFPTVEMVIKVFVATSSGSIAIRKKQQEVVGFLEANKIDFKELDIAGDEDNRRWMRENVPGEKKPQNGIPLPPQIFNEEQYCGDFDSFFSAKEENIIYSFLGLAPPPDSKEEEGETATEETEEIAMEGAEGEAEEEEETAEGEEEPGEDEDS

SEQ ID NO: 826770 - protein, 132 aa, Homo sapiens
MIRKKQQEVVGFLEANKIDFKELDIAGDEDNRRWMRENVPGEKKPQNGIPLPPQIFNEEQYCGDFDSFFSAKEENIIYSFLGLAPPPDSKEEEGETATEETEEIAMEGAEGEAEEEEETAEGEEEPGEDEDS

SEQ ID NO: 826771 - protein, 108 aa, Homo sapiens
MRENVPGEKKPQNGIPLPPQIFNEEQYCGDFDSFFSAKEENIIYSFLGLAPPPDSKGSEKAEEGGETEAQKEGSEDTEEIAMEGAEGEAEEEEETAEGEEEPGEDEDS

SEQ ID NO: 826772 - protein, 271 aa, Homo sapiens; identical to SEQ ID NO: 826767

SEQ ID NO: 826773 - protein, 108 aa, Homo sapiens
GKGPVAAFIDQSNIFLTDPKIFLGQWREEPKMPLLLLGETEPLKLERDCRSPVDPWAAASPDLALACLCHCQDLSSGAFPNRGVLGGVLFPTVEMVIKGIREAEKVRT

SEQ ID NO: 826774 - protein, 271 aa, Homo sapiens; identical to SEQ ID NO: 826767

SEQ ID NO: 826775 - protein, 129 aa, Homo sapiens
MRENVPGEKKPQNGIPLPPQIFNEEQYCGDFDSFFSAKEENIIYSFLGLAPPPDSKGSEKAEEGGETEAQKEGSEDVGNLPEAQEKNEEEGETATEETEEIAMEGAEGEAEEEEETAEGEEEPGEDEDS

SEQ ID NO: 826776 - protein, 271 aa, Homo sapiens; identical to SEQ ID NO: 826767

SEQ ID NO: 826777 - protein, 252 aa, Homo sapiens
GKGPVAAFIDQSNIFLTDPKIFLGQWREEPKMPLLLLGETEPLKLERDCRSPVDPWAAASPDLALACLCHCQDLSSGAFPNRGVLGGVLFPTVEMVIKVFVATSSGSIAIRKKQQEVVGFLEANKIDFKELDIAGDEDNRRWMRENVPGEKKPQNGIPLPPQIFNEEQYCGDFDSFFSAKEENIIYSFLGLAPPPDSKGSEKAEEGGETEAQKEGSEDVGNLPEAQEKNKMEAMKQHFKCLSTNQTQQNTLA

SEQ ID NO: 826778 - protein, 271 aa, Homo sapiens; identical to SEQ ID NO: 826767

SEQ ID NO: 826779 - protein, 102 aa, Homo sapiens
MEGRRYINTTDPSIMTNPERTPTEPTRADRHEPSDGRGAESTAQGRRTANCDHDPDTPARGHTRRATHDRDSTTPQTESPHRNERPHRTGRPTEKPDGPADD

SEQ ID NO: 826780 - protein, 127 aa, Homo sapiens
MGDKPIWEQIGSSFIQHYYQLFDNDRTQLGAIYIDASCLTWEGQQFQGKAAIVEKLSSLPFQKIQHSITAQDHQPTPDSCIISMVVGQLKADEDPIMGFHQMFLLKNINDAWVCTNDMFRLALHNFG

SEQ ID NO: 826781 - protein, 127 aa, Homo sapiens; identical to SEQ ID NO: 826780

SEQ ID NO: 826782 - protein, 127 aa, Homo sapiens; identical to SEQ ID NO: 826780

SEQ ID NO: 826783 - protein, 127 aa, Homo sapiens; identical to SEQ ID NO: 826780

SEQ ID NO: 826784 - protein, 127 aa, Homo sapiens; identical to SEQ ID NO: 826780

SEQ ID NO: 826785 - protein, 127 aa, Homo sapiens; identical to SEQ ID NO: 826780

SEQ ID NO: 826786 - protein, 127 aa, Homo sapiens; identical to SEQ ID NO: 826780

SEQ ID NO: 826787 - protein, 138 aa, Homo sapiens
GRQGGRDSRPQTALGCRCRCRHRASPSGECRGQHAGAGAGPQEPLSGLPGGSAESPRAAPPLPPPRRPEAARGPGHVSRAAPPPAGPVRRRPGVTHREPAGRLSGPYRAGGWCTGLRHGQAFFSSQDRPDGALGPRPV

SEQ ID NO: 826788 - protein, 127 aa, Homo sapiens; identical to SEQ ID NO: 826780

SEQ ID NO: 826789 - protein, 127 aa, Homo sapiens; identical to SEQ ID NO: 826780

SEQ ID NO: 826790 - protein, 127 aa, Homo sapiens; identical to SEQ ID NO: 826780

SEQ ID NO: 826791 - protein, 127 aa, Homo sapiens; identical to SEQ ID NO: 826780

SEQ ID NO: 826792 - protein, 127 aa, Homo sapiens; identical to SEQ ID NO: 826780

SEQ ID NO: 826793 - protein, 126 aa, Homo sapiens
RARYPTMVIGSSFIQHYYQLFDNDRTQLGAIYIDASCLTWEGQQFQGKAAIVEKLSSLPFQKIQHSITAQDHQPTPDSCIISMVVGQLKADEDPIMGFHQMFLLKNINDAWVCTNDMFRLALHNFG

SEQ ID NO: 826794 - protein, 127 aa, Homo sapiens; identical to SEQ ID NO: 826780

SEQ ID NO: 826795 - protein, 101 aa, Homo sapiens
TKAEWFLSLGNCAGLCSQPLGKLPVAPAPQSLAPPQSCLGHLNPLNSALPTPPCRTRCCGCCTCGRSAETRTSSTPTRPGGSWTSRPPAPSRFSECGAGAR

SEQ ID NO: 826796 - protein, 452 aa, Homo sapiens
MAAAALRSGWCRCPRRCLGSGIQFLSSHNLPHGSTYQMRRPGGELPLSKSYSSGNRKGFLSGLLDNVKQELAKNKEMKESIKKFRDEARRLEESDVLQEARRKYKTIESETVRTSEVLRKKLGELTGTVKESLHEVSKSDLGRKIKEGVEEAAKTAKQSAESVSKGGEKLGRTAAFRALSQGVESVKKEIDDSVLGQTGPYRRPQRLRKRTEFAGDKFKEEKVFEPNEEALGVVLHKDSKWYQQWKDFKENNVVFNRFFEMKMKYDESDNAFIRASRALTDKVTDLLGGLFSKTEMSEVLTEILRVDPAFDKDRFLKQCENDIIPNVLEAMISGELDILKDWCYEATYSQLAHPIQQAKALGLQFHSRILDIDNVDLAMGKMMEQGPVLIITFQAQLVMVVRNPKGEVVEGDPDKVLRMLYVWALCRDQDELNPYAAWRLLDISASSTEQIL

SEQ ID NO: 826797 - protein, 452 aa, Homo sapiens; identical to SEQ ID NO: 826796

SEQ ID NO: 826798 - protein, 157 aa, Homo sapiens [sequence omitted]

SEQ ID NO: 826799 - protein, 422 aa, Homo sapiens
MAAAALRSGWCRCPRRCLGSGIQFLSSHNLPHGSTYQMRRPGGELPLSKSYSSGNRKGFLSGLLDNVKQELAKNKEMKESIKKFRDEARRLEESDVLQEARRKYKTIESETVRTSEVLRKKLGELTGTVKESLHEVSKSDLGRKIKEGVEEAAKTAKQSAESVSKGGEKLGRTAAFRALSQGVESVKKEIDDSVLGQTGPYRRPQRLRKRTEFAGDKFKEEKVFEPNEEALGVVLHKDSKWYQQWKDFKENNVVFNRFFEMKMKYDESDNAFIRASRALTDKVTDLLGGLFSKTEMSEVLTEILRVDPAFDKDRFLKQCENDIIPNVLEAMISGELDILKDWCYEATYSLLHWPESVPGPCPLWKVTGHTRGPVSCLSEANAVWLRHFCAFMFNFMRATGLCRLSLRDDSDLLATEDSLAHT

SEQ ID NO: 826800 - protein, 532 aa, Homo sapiens
  misc_feature (2)..(2): Xaa can be any naturally occurring amino acid
AXPVAEDWVKLAWKLDTGGPGLLPGKKVALTVARCPKRASPCSWIGCTFAWPPFKLPTRSSPFFVFSLEKSKEVSKEEDRDVIFLSVSPMEGTVVTGSCRIRHELAEAADDATGPRREKVTRFSNMAAAALRSGWCRCPRRCLGSGIQFLSSHNLPHGSTYQMRRPGGELPLSKSYSSGNRKGFLSGLLDNVKQELAKNKEMKESIKKFRDEARRLEESDRSRHLPPPHRIRPRLQDPVEAAPSPGTPPAAHPSLSLPPAVRRQPVPWWALQSEMWSPGGTEDMGSLREPELGPHLPGLDFLTRLKAGSPATFLFLHQVPGGSPCGVPPGWSPAGRPPPVPRPEPGTDTSRDGPGGDTQCHSSTRAPQVAAGGVLRKLPTPHHWRMFPGPRLLPEKPTLVLVLIFPSFLAMISGELDILKDWCYEATYSQLAHPIQQAKALGLQFHSRILDIDNVDLAMGKMMEQGPVLIITFQAQLVMVVRNPKGEVVEGDPDKVLRMLYVWALCRDQDELNPYAAWRLLDISASSTEQIL

SEQ ID NO: 826801 - protein, 218 aa, Homo sapiens
MEGTVVTGSCRIRHELAEAADDATGPRREKVTRFSNMAAAALRSGWCRCPRRCLGSGIQFLSSHNLPHGSTYQMRRPGGELPLSKSYSSGNRKGFLSGLLDNVKQELAKNKEMKESIKKFRDEARRLEESDVLQEARRKYKTIESETVRTSEVLRKKLGELTGTVKESLHEVSKSDLGRKIKEGVEEAAKTAKQSAESVSKGGEKLGRTAAFRALSQL

SEQ ID NO: 826802 - protein, 577 aa, Homo sapiens
  misc_feature (2)..(2): Xaa can be any naturally occurring amino acid
AXPVAEDWVKLAWKLDTGGPGLLPGKKVALTVARCPKRASPCSWIGCTFAWPPFKLPTRSSPFFVFSLEKSKEVSKEEDRDVIFLSVSPMEGTVVTGSCRIRHELAEAADDATGPRREKVTRFSNMAAAALRSGWCRCPRRCLGSGIQFLSSHNLPHGSTYQMRRPGGELPLSKSYSSGNRKGFLSGLLDNVKQELAKNKEMKESIKKFRDEARRLEESDVLQEARRKYKTIESETVRTSEVLRKKLGELTGTVKESLHEVSKSDLGRKIKEGVEEAAKTAKQSAESVSKGGEKLGRTAAFRALSQGVESVKKEIDDSVLGQTGPYRRPQRLRKRTEFAGDKFKEEKVFEPNEEALGVVLHKDSKWYQQWKDFKENNVVFNRFFEMKMKYDESDNAFIRASRALTDKVTDLLGGLFSKTEMSEVLTEILRVDPAFDKDRFLKQCENDIIPNVLEAMISGELDILKDWCYEATYSQLAHPIQQAKALGLQFHSRILDIDNVDLAMGKMMEQGPVLIITFQAQLVMVVRNPKGEVVEGDPDKVLRMLYVWALCRDQDELNPYAAWRLLDISASSTEQIL

SEQ ID NO: 826803 - protein, 452 aa, Homo sapiens; identical to SEQ ID NO: 826796

SEQ ID NO: 826804 - protein, 408 aa, Homo sapiens
MAAAALRSGWCRCPRRCLGSGIQFLSSHNLPHGSTYQMRRPGGELPLSKSYSSGNRKGFLSGLLDNVKQELAKNKEMKESIKKFRDEARRLEESDVLQEARRKYKTIESETVRTSEVLRKKLGELTGTVKESLHEVSKSDLGRKIKEGVEEAAKTAKQSAESVSKGGEKLGRTAAFRALSQGVESVKKEIDDSVLGQTGPYRRPQRLRKRTEFAGDKFKEEKVFEPNEEALGVVLHKDSKWYQQWKDFKENNVVFNRFFEMKMKYDESDNAFIRASRALTDKVTDLLGGLFSKTEMSEVLTEILRVDPAFDKDRFLKQCENDIIPNVLEVGATPPGPLPGGRSWLHHLPRRSRHPGCCQGTLLPRLFSEEAGCTRAPARLQLPHELCPKPFLGLTGTSGTSRSVSLTP

SEQ ID NO: 826805 - protein, 418 aa, Homo sapiens
SPQDAGGAWTPSAQSGQASGRPFMGLSILGPAGLRPTSSSSSSFPYPSRHFGQGWEVVRMGAMPQNSSLSTAVPSGMGDGCQVFLATRPLPLTAFTTSIRLLPALLPAPGTSLPLIGSGPGSRILWKQLPAQARPLQPTPPSRCPQQLGGSRSHGGPCSPKCGPLGGQRTWAHCGSRSWVLISLAWIPDQAESWVPSHLSLPPPGSRGSPCGVPPGWSPAGRPPPVPRPEPGTDTSRDGPGGDTQCHSSTRAPQVAAGGVLRKLPTPHHWRMFPGPRLLPEKPTLVLVLIFPSFLAMISGELDILKDWCYEATYSQLAHPIQQAKALGLQFHSRILDIDNVDLAMGKMMEQGPVLIITFQAQLVMVVRNPKGEVVEGDPDKVLRMLYVWALCRDQDELNPYAAWRLLDISASSTEQIL

SEQ ID NO: 826806 - protein, 376 aa, Homo sapiens
MANSANTNTVPKLYRSVIEDVINDVRDIFLDDGVDEQVLMELKTLWENKLMQSRAVDGFHSEEQQLLLQVQQQHQPQQQQHHHHHHHQQAQPQQTVPQQAQTQQVLIPASQQATAPQVIVPDSKLIQHMNASNMSAAATAATLALPAGVTPVQQILTNSGQLLQVVRAANGAQYIFQPQQSVVLQQQVIPQMQPGGVQAPVIQQVLAPLPGGISPQTGVIIQPQQILFTGNKTQVIPTTVAAPTPAQAQITATGQQQPQAQPAQTQAPLVLQVDGTGDTSSEEDEDEEEDYDDDEEEDKEKDGAEDGQVEEEPLNSEDDVSDEEGQELFDTENVVVCQYDKIHRSKNKWKFHLKDGIMNLNGRDYIFSKAIGDAEW

SEQ ID NO: 826807 - protein, 255 aa, Homo sapiens [sequence omitted]

SEQ ID NO: 826808 - protein, 376 aa, Homo sapiens; identical to SEQ ID NO: 826806

SEQ ID NO: 826809 - protein, 393 aa, Homo sapiens
FASSSPQRTAADFRLGANHVITRALESPKLYRSVIEDVINDVRDIFLDDGVDEQVLMELKTLWENKLMQSRAVDGFHSEEQQLLLQVQQQHQPQQQQHHHHHHHQQAQPQQTVPQQAQTQQVLIPASQQATAPQVIVPDSKLIQHMNASNMSAAATAATLALPAGVTPVQQILTNSGQLLQVVRAANGAQYIFQPQQSVVLQQQVIPQMQPGGVQAPVIQQVLAPLPGGISPQTGVIIQPQQILFTGNKTQVIPTTVAAPTPAQAQITATGQQQPQAQPAQTQAPLVLQVDGTGDTSSEEDEDEEEDYDDDEEEDKEKDGAEDGQVEEEPLNSEDDVSDEEGQELFDTENVVVCQYDKIHRSKNKWKFHLKDGIMNLNGRDYIFSKAIGDAEW

SEQ ID NO: 826810 - protein, 409 aa, Homo sapiens
MSSLRARLPATRRRVAQPFARPASPSLVPRSGSAMESNKDEAERCISIALKAIQSNQPDRALRFLEKAQRLYPTPRVRALIESLNQKPQTAGDQPPPTDTTHATHRKAGGTDAPSANGEAGGESTKGYTAEQVAAVKRVKQCKDYYEILGVSRGASDEDLKKAYRRLALKFHPDKNHAPGATEAFKAIGTAYAVLSNPEKRKQYDQFGDDKSQAARHGHGHGDFHRGFEADISPEDLFNMFFGGGFPSSNVHVYSNGRMRYTYQQRQDRRDNQGDGGLGVFVQLMPILILILVSALSQLMVSSPPYSLSPRPSVGHIHRRVTDHLGVVYYVGDTFSEEYTGSSLKTVERNVEDDYIANLRNNCWKEKQQKEGLLYRARYFGDTDMYHRAQKMGTPSCSRLSEVQASLHG

SEQ ID NO: 826811 - protein, 282 aa, Homo sapiens
MSSLRARLPATRRRVAQPFARPASPSLVPRSGSAMESNKDEAERCISIALKAIQSNQPDRALRFLEKAQRLYPTPRVRALIESLNQKPQTAGDQPPPTDTTHATHRKAGGTDAPSANGEAGGESTKGYTAEQVAAVKRVKQCKDYYEILGVSRGASDEDLKKAYRRLALKFHPDKNHAPGATEAFKAIGTAYAVLSNPEKRKQYDQFGDDKSQAARHGHGHGDFHRGFEADISPEDLFNMFFGGGFPSSNVHVYSNGRMRYTYQQRQDRRDNQGDVSEEGAR

SEQ ID NO: 826812 - protein, 114 aa, Homo sapiens
MRILLKTALAASGRREVLFIPTVSPGPSGMTMFSCGGGCVIAPAVFQSLTSPSCQPGGDNHPPRVSLGSFFKSPPTNRILAGKGSSVRKCQIWFLNKVQPCNEAATSAQRDYKN

SEQ ID NO: 826813 - protein, 409 aa, Homo sapiens; identical to SEQ ID NO: 826810

SEQ ID NO: 826814 - protein, 411 aa, Homo sapiens
MSSLRARLPATRRRVAQPFARPASPSLVPRSGSAMESNKDEAERCISIALKAIQSNQPDRALRFLEKAQRLYPTPRVRALIESLNQKPQTAGDQPPPTDTTHATHRKAGGTDAPSANGEAGGESTKGYTAEQVAAVKRVKQCKDYYEILGVSRGASDEDLKKAYRRLALKFHPDKNHAPGATEAFKAIGTAYAVLSNPEKRKQYDQFGDDKSQAARHGHGHGDFHRGFEADISPEDLFNMFFGGGFPSSNVHVYSNGRMRYTYQQRQDRRDNQGDGGLGVFVQLMPILILILVSALSQLMVSSPPYSLSPRPSVGHIHRRVTDHLGVVYYVGDTFSEEYTGSSLKTVERNVEDDYIANLRNNCWKEKQQKEGLLYRARYFGDTDMYHRAQKMGTPSCSRLSETMKSLENFW

SEQ ID NO: 826815 - protein, 285 aa, Homo sapiens
MSSLRARLPATRRRVAQPFARPASPSLVPRSGSAMESNKDEAERCISIALKAIQSNQPDRALRFLEKAQRLYPTPRVRALIESLNQKPQTAGDQPPPTDTTHATHRKAGGTDAPSANGEAGGESTKGYTAEQVAAVKRVKQCKDYYEILGVSRGASDEDLKKAYRRLALKFHPDKNHAPGATEAFKAIGTAYAVLSNPEKRKQYDQFGDDKSQAARHGHGHGDFHRGFEADISPEDLFNMFFGGGFPSSNVHVYSNGRMRYTYQQRQDRRDNQGDVRGPHPQASH

SEQ ID NO: 826816 - protein, 285 aa, Homo sapiens
MGFGLYLPGHLRVKQCKDYYEILGVSRGASDEDLKKAYRRLALKFHPDKNHAPGATEAFKAIGTAYAVLSNPEKRKQYDQFGDDKSQAARHGHGHGDFHRGFEADISPEDLFNMFFGGGFPSSNVHVYSNGRMRYTYQQRQDRRDNQGDGGLGVFVQLMPILILILVSALSQLMVSSPPYSLSPRPSVGHIHRRVTDHLGVVYYVGDTFSEEYTGSSLKTVERNVEDDYIANLRNNCWKEKQQKEGLLYRARYFGDTDMYHRAQKMGTPSCSRLSETMKSLENFW

SEQ ID NO: 826817 - protein, 409 aa, Homo sapiens; identical to SEQ ID NO: 826810

SEQ ID NO: 826818 - protein, 411 aa, Homo sapiens; identical to SEQ ID NO: 826814

SEQ ID NO: 826819 - protein, 411 aa, Homo sapiens; identical to SEQ ID NO: 826814

SEQ ID NO: 826820 - protein, 312 aa, Homo sapiens
MSSLRARLPATRRRVAQPFARPASPSLVPRSGSAMESNKDEAERCISIALKAIQSNQPDRALRFLEKAQRLYPTPRVRALIESLNQKPQTAGDQPPPTDTTHATHRKAGGTDAPSANGEAGGESTKGYTAEQVAAVKRVKQCKDYYEILGVSRGASDEDLKKAYRRLALKFHPDKNHAPGATEAFKAIGTAYAVLSNPEKRKQYDQFGDDKSQAARHGHGHGDFHRGFEADISPEDLFNMFFGGGFPSSNVHVYSNGRMRYTYQQRQDRRDNQGDGGLGVFVQLMPILILILVSALSQLMVSSPPYSLSPRP

SEQ ID NO: 826821 - protein, 285 aa, Homo sapiens; identical to SEQ ID NO: 826816

SEQ ID NO: 826822 - protein, 109 aa, Homo sapiens
MWETLSPKSTQAPASKQSSGMWKMIISPTSGTTAGRRSSRRKACCTGHATLATQICTTEHRRWAPPAAADCQRCRPPCMDSPGPATPPRSKYEPGLPPPCNSWQLWPWS

SEQ ID NO: 826823 - protein, 409 aa, Homo sapiens; identical to SEQ ID NO: 826810

SEQ ID NO: 826824 - protein, 409 aa, Homo sapiens; identical to SEQ ID NO: 826810

SEQ ID NO: 826825 - protein, 275 aa, Homo sapiens
THASADAWVDPRVRVSRGASDEDLKKAYRRLALKFHPDKNHAPGATEAFKAIGTAYAVLSNPEKRKQYDQFGDDKSQAARHGHGHGDFHRGFEADISPEDLFNMFFGGGFPSSNVHVYSNGRMRYTYQQRQDRRDNQGDGGLGVFVQLMPILILILVSALSQLMVSSPPYSLSPRPSVGHIHRRVTDHLGVVYYVGDTFSEEYTGSSLKTVERNVEDDYIANLRNNCWKEKQQKEGLLYRARYFGDTDMYHRAQKMGTPSCSRLSETMKSLENFW

SEQ ID NO: 826826 - protein, 285 aa, Homo sapiens; identical to SEQ ID NO: 826816

SEQ ID NO: 826827 - protein, 150 aa, Homo sapiens [sequence omitted]

SEQ ID NO: 826828 - protein, 409 aa, Homo sapiens; identical to SEQ ID NO: 826810

SEQ ID NO: 826829 - protein, 327 aa, Homo sapiens
MSSLRARLPATRRRVAQPFARPASPSLVPRSGSAMESNKDEAERCISIALKAIQSNQPDRALRFLEKAQRLYPTPRVRALIESLNQKPQTAGDQPPPTDTTHATHRKAGGTDAPSANGEAGGESTKGYTAEQVAAVKRVKQCKDYYEILGVSRGASDEDLKKAYRRLALKFHPDKNHAPGATEAFKAIGTAYAVLSNPEKRKQYDQFGDDKSQAARHGHGHGDFHRGFEADISPEDLFNMFFGGGFPSSNVHVYSNGRMRYTYQQRQDRRDNQGDRKACCTGHATLATQICTTEHRRWAPPAAADCQRCRPPCMDSPGPATPPRSKL

SEQ ID NO: 826830 - protein, 157 aa, Homo sapiens
MSSEEGKLFVGGLNFNTDEQALEDHFSSFGPISEVVVVKDRETQRSRGFGFITFTNPEHASVAMRAMNGESLDGRQIRVDHAGKSARGTRGGGFGAHGRGRSYSRGGGDQGYGSGRYYDSRPGGYGYGYGRSRDYNGRNQGGYDRYSGGNYRDNYDN

SEQ ID NO: 826831 - protein, 157 aa, Homo sapiens; identical to SEQ ID NO: 826830

SEQ ID NO: 826832 - protein, 157 aa, Homo sapiens; identical to SEQ ID NO: 826830

SEQ ID NO: 826833 - protein, 157 aa, Homo sapiens; identical to SEQ ID NO: 826830

SEQ ID NO: 826834 - protein, 157 aa, Homo sapiens; identical to SEQ ID NO: 826830

SEQ ID NO: 826835 - protein, 119 aa, Homo sapiens
MVVRSVWIMQASLLGEPEEVALGPMGVVAATLEVVGTRAMGVAGIMTVDLEGMDMDMDVPETIMAETRVVMTATQEEITETIMTTEMRHAHNIDTQGIISDPGSSFQMAVFITRFLELH

SEQ ID NO: 826836 - protein, 118 aa, Homo sapiens [sequence omitted]

SEQ ID NO: 826837 - protein, 119 aa, Homo sapiens; identical to SEQ ID NO: 826835

SEQ ID NO: 826838 - protein, 211 aa, Homo sapiens
MSSEEGKLFVGGLNFNTDEQALEDHFSSFGPISEVVVVKDRETQRSRGFGFITFTNPEHASVAMRAMNGEVVESADLWAWPGEDLVSLLTWTLKPQTKRGVCLALIVGQLRGVGRRTQPEFSQDSLDGRQIRVDHAGKSARGTRGGGFGAHGRGRSYSRGGGDQGYGSGRYYDSRPGGYGYGYGRSRDYNGRNQGGYDRYSGGNYRDNYDN

SEQ ID NO: 826839 - protein, 179 aa, Homo sapiens
MSSEEGKLFVGGLNFNTDEQALEDHFSSFGPISEVVVVKDRETQRSRGFGFITFTNPDLWMVVRSVWIMQASLLGEPEEVALGPMGVVAATLEVVGTRAMGVAGIMTVDLEGMDMDMDVPETIMAETRVVMTATQEEITETIMTTEMRHAHNIDTQGIISDPGSSFQMAVFITRFLELH

SEQ ID NO: 826840 - protein, 118 aa, Homo sapiens [sequence omitted]

SEQ ID NO: 826841 - protein, 118 aa, Homo sapiens [sequence omitted]

SEQ ID NO: 826842 - protein, 157 aa, Homo sapiens; identical to SEQ ID NO: 826830

SEQ ID NO: 826843 - protein, 157 aa, Homo sapiens; identical to SEQ ID NO: 826830

SEQ ID NO: 826844 - protein, 67 aa, Homo sapiens
AAAYYYYYYCSEFKLLNDVREHDYPGVFSNSDHQTDYIEELALKCLQMSFFFLILEEKIFCCVSYSA

SEQ ID NO: 826845 - protein, 157 aa, Homo sapiens; identical to SEQ ID NO: 826830

SEQ ID NO: 826846 - protein, 157 aa, Homo sapiens; identical to SEQ ID NO: 826830

SEQ ID NO: 826847 - protein, 118 aa, Homo sapiens [sequence omitted]

SEQ ID NO: 826848 - protein, 119 aa, Homo sapiens; identical to SEQ ID NO: 826835

SEQ ID NO: 826849 - protein, 119 aa, Homo sapiens; identical to SEQ ID NO: 826835

SEQ ID NO: 826850 - protein, 119 aa, Homo sapiens; identical to SEQ ID NO: 826835

SEQ ID NO: 826851 - protein, 157 aa, Homo sapiens; identical to SEQ ID NO: 826830

SEQ ID NO: 826852 - protein, 198 aa, Homo sapiens
RPRKFEMADGSLTGGGLEAAAMAPERTGWAVEQELASLEKVFQKKLKSKMQEPFAISGESWRFLITGCSCEQPNADDTGCTCRQPTVTCARITSTDHPYFQKILNEDMVAGDKSNYVPLKNRDDYLWIQLHIENQHCVPCGLDLWYTTCDPYRKWEPDSLSIDYLDTQKQLSVACTTSGYQQDLLPFLTRQQRSYQQL

SEQ ID NO: 826853 - protein, 678 aa, Homo sapiens
RPRKFEMADGSLTGGGLEAAAMAPERTGWAVEQELASLEKGLFQDEDSCSDCSYRDKPGSSLQSFMPEGKTFFPEIFQTNQLLFYERFRAYQDYILADCKASEVQEFTAEFLEKVLEPSGWRAVWHTNVFKVLVEITDVDFAALKAVVRLAEPYLCDSQVSTFTMECMKELLDLKEHRLPLQELWVVFDDSGVFDQTALAIEHVRFFYQNIWRSWDEEEEDEYDYFVRCVEPRLRLHYDILEDRVPSGLIVDYHNLLSQCEESYRKFLNLRSSLSNCNSDSEQENISMVEGLKLYSEMEQLKQKLKLIENPLLRYVFGYQKNSNIQAKGVRSSGQKITHVVSSTMMAGLLRSLLTDRLCQEPGEEEREIQFHSDPLSAINACFEGDTVIVCPGHYVVHGTFSIADSIELEGYGLPDDIVIEKRGKGDTFVDCTGADIKISGIKFVQHDAVEGILIVHRGKTTLENCVLQCETTGVTVRTSAEFLMKNSDLYGAKGAGIEIYPGSQCTLSDNGIHHCKEGILIKDFLDEHYDIPKISMVNNIIHNNEGYGVVLVKPTIFSDLQENAEDGTEENKALKIQTSGEPDVAERVDLEELIECATGKMELCARTDPSEQVEGNCEIVNELIAASTQKGQIKKKRLSELGITQADDNLMSQEMFVGIVGNQFKWNGKGSFGTFLF

SEQ ID NO: 826854 - protein, 678 aa, Homo sapiens; identical to SEQ ID NO: 826853

SEQ ID NO: 826855 - protein, 600 aa, Homo sapiens
RPRKFEMADGSLTGGGLEAAAMAPERTGWAVEQELASLEKGLFQDEDSCSDCSYRDKPGSSLQSFMPEGKTFFPEIFQTNQLLFYERFRAYQDYILADCKASEVQEFTAEFLEKVLEPSGWRAVWHTNVFKVLVEITDVDFAALKAVVRLAEPYLCDSQVSTFTMECMKELLDLKEHRLPLQELWVVFDDSGVFDQTALAIEHVRFFYQNIWRSWDEEEEDEYDYFVRCVEPRLRLYVFGYQKNSNIQAKGVRSSGQKITHVVSSTMMAGLLRSLLTDRLCQEPGEEEREIQFHSDPLSAINACFEGDTVIVCPGHYVVHGTFSIADSIELEGYGLPDDIVIEKRGKGDTFVDCTGADIKISGIKFVQHDAVEGILIVHRGKTTLENCVLQCETTGVTVRTSAEFLMKNSDLYGAKGAGIEIYPGSQCTLSDNGIHHCKEGILIKDFLDEHYDIPKISMVNNIIHNNEGYGVVLVKPTIFSDLQENAEDGTEENKALKIQTSGEPDVAERVDLEELIECATGKMELCARTDPSEQVEGNCEIVNELIAASTQKGQIKKKRLSELGITQADDNLMSQEMFVGIVGNQFKWNGKGSFGTFLF

SEQ ID NO: 826856 - protein, 354 aa, Homo sapiens
MGCTLSAEDKAAVERSKMIDRNLREDGEKAAKEVKLLLLGAGESGKSTIVKQMKIIHEDGYSEDECKQYKVVVYSNTIQSIIAIIRAMGRLKIDFGEAARADDARQLFVLAGSAEEGVMTPELAGVIKRLWRDGGVQACFSRSREYQLNDSASYYLNDLDRISQSNYIPTQQDVLRTRVKTTGIVETHFTFKDLYFKMFDVGGQRSERKKWIHCFEGVTAIIFCVALSDYDLVLAEDEEMNRMHESMKLFDSICNNKWFTETSIILFLNKKDLFEEKIKRSPLTICYPEYTGSNTYEEAAAYIQCQFEDLNRRKDTKEIYTHFTCATDTKNVQFVFDAVTDVIIKNNLKECGLY

SEQ ID NO: 826857 - protein, 354 aa, Homo sapiens; identical to SEQ ID NO: 826856

SEQ ID NO: 826858 - protein, 354 aa, Homo sapiens; identical to SEQ ID NO: 826856

SEQ ID NO: 826859 - protein, 302 aa, Homo sapiens [sequence omitted]

SEQ ID NO: 826860 - protein, 354 aa, Homo sapiens; identical to SEQ ID NO: 826856

SEQ ID NO: 826861 - protein, 354 aa, Homo sapiens; identical to SEQ ID NO: 826856

SEQ ID NO: 826862 - protein, 354 aa, Homo sapiens; identical to SEQ ID NO: 826856

SEQ ID NO: 826863 - protein, 354 aa, Homo sapiens; identical to SEQ ID NO: 826856

SEQ ID NO: 826864 - protein, 146 aa, Homo sapiens
  misc_feature (16)..(16): Xaa can be any naturally occurring amino acid
AYIKSVDVGAKGRVGXDSNYLLCAQYSEDEEMNRMHESMKLFDSICNNKWFTETSIILFLNKKDLFEEKIKRSPLTICYPEYTGSNTYEEAAAYIQCQFEDLNRRKDTKEIYTHFTCATDTKNVQFVFDAVTDVIIKNNLKECGLY

SEQ ID NO: 826865 - protein, 248 aa, Homo sapiens
MGCTLSAEDKAAVERSKMIDRNLREDGEKAAKEVKLLLLGAGESGKSTIVKQMKIIHEDGYSEDECKQYKVVVYSNTIQSIIAIIRAMGRLKIDFGEAARADDARQLFVLAGSAEEGVMTPELAGVIKRLWRDGGVQACFSRSREYQLNDSASYYLNDLDRISQSNYIPTQQDVLRTRVKTTGIVETHFTFKDLYFKMFDVGGQRSERKKWIHCFEGFDDHRNPKYEDEINKRTEMENEFVLIKKGLM

SEQ ID NO: 826866 - protein, 113 aa, Homo sapiens
MFPGAAYGIQENCMRGVTFGLEAKIQVNICQMGSGKQSSTERKQNLLGISEQVDFLQLSTVLRRSGQVQSVGSQHSQQLGVGVLWLPTALKPTALTTASFSIFRTHPSLPGGC

SEQ ID NO: 826867 - protein, 329 aa, Homo sapiens
MPWVCTQARSPDGINTPPTEAEESFEFVVVSLTGQTWHFEASTAEERELWVQSVQAQILASLQGCRSAKDKTRLGNQNAALAVQAVRTVRGNSFCIDCDAPNPDWASLNLGALMCIECSGIHRHLGAHLSRVRSLDLDDWPPELLAVMTAMGNALANSVWEGALGGYSKPGPDACREEKERWIRAKYEQKLFLAPLPSSDVPLGQQLLRAVVEDDLRLLVMLLAHGSKEEVNETYGDGDGRTALHLSSAMANVVFTQLLIWYGVDVRSRDARGLTPLAYARRAGSQECADILIQHGCPGEGCGLAPTPNREPANGTNPSAELHRSPSLL

SEQ ID NO: 826868 - protein, 106 aa, Homo sapiens
SLSRGAGCGGAVVQAPLVQVRVQGRQPGRPHALVRAVAVQTTWLCRACFPSPGGAALLFLLHSVISVFFSFFPFSVPHPHLTLIGSHSSVLSAPAVPESLSLPWAC

SEQ ID NO: 826869 - protein, 881 aa, Homo sapiens
VCGGQFGGAGPGAGGGGGPSQQLAGGPPQQFALSNSAAIRAEIQRFESVHPNIYAIYDLIERIEDLALQNQIREHVISIEDSFVNSQEWTLSRSVPELKVGIVGNLSSGKSALVHRYLTGTYVQEESPEGGRFKKEIVVDGQSYLLLIRDEGGPPELQFAAWVDAVVFVFSLEDEISFQTVYNYFLRLCSFRNASEVPMVLVGTQDAISAANPRVIDDSRARKLSTDLKRCTYYETCATYGLNVERVFQDVAQKVVALRKKQQLAIGPCKSLPNSPSHSAVSAASIPAVHINQATNGGGSAFSDYSSSVPSTPSISQRELRIETIAASSTPTPIRKQSKRRSNIFTSRKGADLDREKKAAECKVDSIGSGRAIPIKQGILLKRSGKSLNKEWKKKYVTLCDNGLLTYHPSLHDYMQNIHGKEIDLLRTTVKVPGKRLPRATPATAPGTSPRANGLSVERSNTQLGGGTGAPHSASSASLHSERPLSSSAWAGPRPEGLHQRSCSVSSADQWSEATTSLPPGMQHPASGPAEVLSSSPKLDPPPSPHSNRKKHRRKKSTGTPRPDGPSSATEEAEESFEFVVVSLTGQTWHFEASTAEERELWVQSVQAQILASLQGCRSAKDKTRLGNQNAALAVQAVRTVRGNSFCIDCDAPNPDWASLNLGALMCIECSGIHRHLGAHLSRVRSLDLDDWPPELLAVMTAMGNALANSVWEGALGGYSKPGPDACREEKERWIRAKYEQKLFLAPLPSSDVPLGQQLLRAVVEDDLRLLVMLLAHGSKEEVNETYGDGDGRTALHLSSAMANVVFTQLLIWYGVDVRSRDARGLTPLAYARRAGSQECADILIQHGCPGEGCGLAPTPNREPANGTNPSAELHRSPSLL

SEQ ID NO: 826870 - protein, 599 aa, Homo sapiens
MVPCVRINPLEYSWSQFLPVPPPRPDPLLGLPRRREAGGRPGSPGGQLSADPGPLYHASCFLFQSRKGADLDREKKAAECKVDSIGSGRAIPIKQGILLKRSGKSLNKEWKKKYVTLCDNGLLTYHPSLHDYMQNIHGKEIDLLRTTVKVPGKRLPRATPATAPGTSPRANGLSVERSNTQLGGGTGAPHSASSASLHSERPLSSSAWAGPRPEGLHQRSCSVSSADQWSEATTSLPPGMQHPASGPAEVLSSSPKLDPPPSPHSNRKKHRRKKSTGTPRPDGPSSATEEAEESFEFVVVSLTGQTWHFEASTAEERELWVQSVQAQILASLQGCRSAKDKTRLGNQNAALAVQAVRTVRGNSFCIDCDAPNPDWASLNLGALMCIECSGIHRHLGAHLSRVRSLDLDDWPPELLAVMTAMGNALANSVWEGALGGYSKPGPDACREEKERWIRAKYEQKLFLAPLPSSDVPLGQQLLRAVVEDDLRLLVMLLAHGSKEEVNETYGDGDGRTALHLSSAMANVVFTQLLIWYGVDVRSRDARGLTPLAYARRAGSQECADILIQHGCPGEGCGLAPTPNREPANGTNPSAELHRSPSLL

SEQ ID NO: 826871 - protein, 536 aa, Homo sapiens
MSRKGADLDREKKAAECKVDSIGSGRAIPIKQGILLKRSGKSLNKEWKKKYVTLCDNGLLTYHPSLHDYMQNIHGKEIDLLRTTVKVPGKRLPRATPATAPGTSPRANGLSVERSNTQLGGGTGAPHSASSASLHSERPLSSSAWAGPRPEGLHQRSCSVSSADQWSEATTSLPPGMQHPASGPAEVLSSSPKLDPPPSPHSNRKKHRRKKSTGTPRPDGPSSATEEAEESFEFVVVSLTGQTWHFEASTAEERELWVQSVQAQILASLQGCRSAKDKTRLGNQNAALAVQAVRTVRGNSFCIDCDAPNPDWASLNLGALMCIECSGIHRHLGAHLSRVRSLDLDDWPPELLAVMTAMGNALANSVWEGALGGYSKPGPDACREEKERWIRAKYEQKLFLAPLPSSDVPLGQQLLRAVVEDDLRLLVMLLAHGSKEEVNETYGDGDGRTALHLSSAMANVVFTQLLIWYGVDVRSRDARGLTPLAYARRAGSQECADILIQHGCPGEGCGLAPTPNREPANGTNPSAELHRSPSLL

SEQ ID NO: 826872 - protein, 565 aa, Homo sapiens
MLSTHRCDWFNKGLAIFSWASPRCLVPPSQSRKGADLDREKKAAECKVDSIGSGRAIPIKQGILLKRSGKSLNKEWKKKYVTLCDNGLLTYHPSLHDYMQNIHGKEIDLLRTTVKVPGKRLPRATPATAPGTSPRANGLSVERSNTQLGGGTGAPHSASSASLHSERPLSSSAWAGPRPEGLHQRSCSVSSADQWSEATTSLPPGMQHPASGPAEVLSSSPKLDPPPSPHSNRKKHRRKKSTGTPRPDGPSSATEEAEESFEFVVVSLTGQTWHFEASTAEERELWVQSVQAQILASLQGCRSAKDKTRLGNQNAALAVQAVRTVRGNSFCIDCDAPNPDWASLNLGALMCIECSGIHRHLGAHLSRVRSLDLDDWPPELLAVMTAMGNALANSVWEGALGGYSKPGPDACREEKERWIRAKYEQKLFLAPLPSSDVPLGQQLLRAVVEDDLRLLVMLLAHGSKEEVNETYGDGDGRTALHLSSAMANVVFTQLLIWYGVDVRSRDARGLTPLAYARRAGSQECADILIQHGCPGEGCGLAPTPNREPANGTNPSAELHRSPSLL

SEQ ID NO: 826873 - protein, 496 aa, Homo sapiens
MVPCVRINPLEYSWSQFLPVPPPRPDPLLGLPRRREAGGRPGSPGGQLSADPGPLYHASCFLFQSRKGADLDREKKAAECKVDSIGSGRAIPIKQGILLKRSGKSLNKEWKKKYVTLCDNGLLTYHPSLHDYMQNIHGKEIDLLRTTVKVPGKRLPRATPATAPGTSPRANGLSVERSNTQLGGGTEAEESFEFVVVSLTGQTWHFEASTAEERELWVQSVQAQILASLQGCRSAKDKTRLGNQNAALAVQAVRTVRGNSFCIDCDAPNPDWASLNLGALMCIECSGIHRHLGAHLSRVRSLDLDDWPPELLAVMTAMGNALANSVWEGALGGYSKPGPDACREEKERWIRAKYEQKLFLAPLPSSDVPLGQQLLRAVVEDDLRLLVMLLAHGSKEEVNETYGDGDGRTALHLSSAMANVVFTQLLIWYGVDVRSRDARGLTPLAYARRAGSQECADILIQHGCPGEGCGLAPTPNREPANGTNPSAELHRSPSLL

SEQ ID NO: 826874 - protein, 599 aa, Homo sapiens; identical to SEQ ID NO: 826870

SEQ ID NO: 826875 - protein, 774 aa, Homo sapiens
RRSPRWGLPGTRPGRTLQARCMEKKAARPHARRWPADEAQRAGGVQARLAQFAAWVDAVVFVFSLEDEISFQTVYNYFLRLCSFRNASEVPMVLVGTQDAISAANPRVIDDSRARKLSTDLKRCTYYETCATYGLNVERVFQDVAQKVVALRKKQQLAIGPCKSLPNSPSHSAVSAASIPAVHINQATNGGGSAFSDYSSSVPSTPSISQRELRIETIAASSTPTPIRKQSKRRSNIFTSRKGADLDREKKAAECKVDSIGSGRAIPIKQGILLKRSGKSLNKEWKKKYVTLCDNGLLTYHPSLHDYMQNIHGKEIDLLRTTVKVPGKRLPRATPATAPGTSPRANGLSVERSNTQLGGGTGAPHSASSASLHSERPLSSSAWAGPRPEGLHQRSCSVSSADQWSEATTSLPPGMQHPASGPAEVLSSSPKLDPPPSPHSNRKKHRRKKSTGTPRPDGPSSATEEAEESFEFVVVSLTGQTWHFEASTAEERELWVQSVQAQILASLQGCRSAKDKTRLGNQNAALAVQAVRTVRGNSFCIDCDAPNPDWASLNLGALMCIECSGIHRHLGAHLSRVRSLDLDDWPPELLAVMTAMGNALANSVWEGALGGYSKPGPDACREEKERWIRAKYEQKLFLAPLPSSDVPLGQQLLRAVVEDDLRLLVMLLAHGSKEEVNETYGDGDGRTALHLSSAMANVVFTQLLIWYGVDVRSRDARGLTPLAYARRAGSQECADILIQHGCPGEGCGLAPTPNREPANGTNPSAELHRSPSLL

SEQ ID NO: 826876 - protein, 822 aa, Homo sapiens
MNFQAGGGQSPQQQQQLAGGPPQQFALSNSAAIRAEIQRFESVHPNIYAIYDLIERIEDLALQNQIREHVISIEDSFVNSQEWTLSRSVPELKVGIVGNLSSGKSALVHRYLTGTYVQEESPEGGRFKKEIVVDGQSYLLLIRDEGGPPELQFAAWVDAVVFVFSLEDEISFQTVYNYFLRLCSFRNASEVPMVLVGTQDAISAANPRVIDDSRARKLSTDLKRCTYYETCATYGLNVERVFQDVAQKVVALRKKQQLAIGPCKSLPNSPSHSAVSAASIPAVHINQSRKGADLDREKKAAECKVDSIGSGRAIPIKQGILLKRSGKSLNKEWKKKYVTLCDNGLLTYHPSLHDYMQNIHGKEIDLLRTTVKVPGKRLPRATPATAPGTSPRANGLSVERSNTQLGGGTGAPHSASSASLHSERPLSSSAWAGPRPEGLHQRSCSVSSADQWSEATTSLPPGMQHPASGPAEVLSSSPKLDPPPSPHSNRKKHRRKKSTGTPRPDGPSSATEEAEESFEFVVVSLTGQTWHFEASTAEERELWVQSVQAQILASLQGCRSAKDKTRLGNQNAALAVQAVRTVRGNSFCIDCDAPNPDWASLNLGALMCIECSGIHRHLGAHLSRVRSLDLDDWPPELLAVMTAMGNALANSVWEGALGGYSKPGPDACREEKERWIRAKYEQKLFLAPLPSSDVPLGQQLLRAVVEDDLRLLVMLLAHGSKEEVNETYGDGDGRTALHLSSAMANVVFTQLLIWYGVDVRSRDARGLTPLAYARRAGSQECADILIQHGCPGEGCGLAPTPNREPANGTNPSAELHRSPSLL

SEQ ID NO: 826877 - protein, 360 aa, Homo sapiens
MNFQAGGGQSPQQQQQLAGGPPQQFALSNSAAIRAEIQRFESVHPNIYAIYDLIERIEDLALQNQIREHVISIEDSFVNSQEWTLSRSVPELKVGIVGNLSSGKSALVHRYLTGTYVQEESPEGGRFKKEIVVDGQSYLLLIRDEGGPPELQFAAWVDAVVFVFSLEDEISFQTVYNYFLRLCSFRNASEVPMVLVGTQDAISAANPRVIDDSRARKLSTDLKRCTYYETCATYGLNVERVFQDVAQKVVALRKKQQLAIGPCKSLPNSPSHSAVSAASIPAVHINQATNGGGSAFSDYSSSVPSTPSISQRELRIETIAASSTPTPIRKQSKRRSNIFTICATVSNFSSTKRPFQLLPN

SEQ ID NO: 826878 - protein, 599 aa, Homo sapiens; identical to SEQ ID NO: 826870

SEQ ID NO: 826879 - protein, 678 aa, Homo sapiens
  misc_feature (6)..(6): Xaa can be any naturally occurring amino acid
  misc_feature (11)..(11): Xaa can be any naturally occurring amino acid
MCPRAXKIRQXGTDLKRCTYYETCATYGLNVERVFQDVGIIDSAAPAVAQKVVALRKKQQLAIGPCKSLPNSPSHSAVSAASIPAVHINQATNGGGSAFSDYSSSVPSTPSISQRELRIETIAASSTPTPIRKQSKRRSNIFTSRKGADLDREKKAAECKVDSIGSGRAIPIKQGILLKRSGKSLNKEWKKKYVTLCDNGLLTYHPSLHDYMQNIHGKEIDLLRTTVKVPGKRLPRATPATAPGTSPRANGLSVERSNTQLGGGTGAPHSASSASLHSERPLSSSAWAGPRPEGLHQRSCSVSSADQWSEATTSLPPGMQHPASGPAEVLSSSPKLDPPPSPHSNRKKHRRKKSTGTPRPDGPSSATEEAEESFEFVVVSLTGQTWHFEASTAEERELWVQSVQAQILASLQGCRSAKDKTRLGNQNAALAVQAVRTVRGNSFCIDCDAPNPDWASLNLGALMCIECSGIHRHLGAHLSRVRSLDLDDWPPELLAVMTAMGNALANSVWEGALGGYSKPGPDACREEKERWIRAKYEQKLFLAPLPSSDVPLGQQLLRAVVEDDLRLLVMLLAHGSKEEVNETYGDGDGRTALHLSSAMANVVFTQLLIWYGVDVRSRDARGLTPLAYARRAGSQECADILIQHGCPGEGCGLAPTPNREPANGTNPSAELHRSPSLL

SEQ ID NO: 826880 - protein, 360 aa, Homo sapiens; identical to SEQ ID NO: 826877

SEQ ID NO: 826881 - protein, 360 aa, Homo sapiens; identical to SEQ ID NO: 826877

SEQ ID NO: 826882 - protein, 360 aa, Homo sapiens; identical to SEQ ID NO: 826877

SEQ ID NO: 826883 - protein, 93 aa, Homo sapiens
MSVLPLCVLPLLLASCSHLSTFLWPPSLACCLETLVGIPFSRHRSLGLIPAPRCLPLPAAIPTSLCSPPFHSLHSLPRCPLLKVLGHPQVAWS

SEQ ID NO: 826884 - protein, 66 aa, Homo sapiens
MPYDLGGWLLVSDQTSVLQGILLKRSGKSLNKEWKKKYVTLCDNGLLTYHPSLHVSLGGGASWGSM

SEQ ID NO: 826885 - protein, 875 aa, Homo sapiens
MNFQAGGGQSPQQQQQLAGGPPQQFALSNSAAIRAEIQRFESVHPNIYAIYDLIERIEDLALQNQIREHVISIEDSFVNSQEWTLSRSVPELKVGIVGNLSSGKSALVHRYLTGTYVQEESPEGGRFKKEIVVDGQSYLLLIRDEGGPPELQFAAWVDAVVFVFSLEDEISFQTVYNYFLRLCSFRNASEVPMVLVGTQDAISAANPRVIDDSRARKLSTDLKRCTYYETCATYGLNVERVFQDVAQKVVALRKKQQLAIGPCKSLPNSPSHSAVSAASIPAVHINQATNGGGSAFSDYSSSVPSTPSISQRELRIETIAASSTPTPIRKQSKRRSNIFTSRKGADLDREKKAAECKVDSIGSGRAIPIKQGILLKRSGKSLNKEWKKKYVTLCDNGLLTYHPSLHDYMQNIHGKEIDLLRTTVKVPGKRLPRATPATAPGTSPRANGLSVERSNTQLGGGTGAPHSASSASLHSERPLSSSAWAGPRPEGLHQRSCSVSSADQWSEATTSLPPGMQHPASGPAEVLSSSPKLDPPPSPHSNRKKHRRKKSTGTPRPDGPSSATEEAEESFEFVVVSLTGQTWHFEASTAEERELWVQSVQAQILASLQGCRSAKDKTRLGNQNAALAVQAVRTVRGNSFCIDCDAPNPDWASLNLGALMCIECSGIHRHLGAHLSRVRSLDLDDWPPELLAVMTAMGNALANSVWEGALGGYSKPGPDACREEKERWIRAKYEQKLFLAPLPSSDVPLGQQLLRAVVEDDLRLLVMLLAHGSKEEVNETYGDGDGRTALHLSSAMANVVFTQLLIWYGVDVRSRDARGLTPLAYARRAGSQECADILIQHGCPGEGCGLAPTPNREPANGTNPSAELHRSPSLL

SEQ ID NO: 826886 - protein, 115 aa, Homo sapiens
MVKPRFHYKYKNERGVLMCIECSGIHRHLGAHLSRVRSLDLDDWPPELLAVMTAMGNALANSVWEGALGGIDKQLVFIDATQSKDKQKKYINKNPSKAQTGSGTCMRRSYEHRVP

SEQ ID NO: 826887 - protein, 599 aa, Homo sapiens; identical to SEQ ID NO: 826870

SEQ ID NO: 826888 - protein, 881 aa, Homo sapiens; identical to SEQ ID NO: 826869

SEQ ID NO: 826889 - protein, 536 aa, Homo sapiens; identical to SEQ ID NO: 826871

SEQ ID NO: 826890 - protein, 881 aa, Homo sapiens; identical to SEQ ID NO: 826869

SEQ ID NO: 826891 - protein, 1248 aa, Homo sapiens
VCGGQFGGAGPGAGGGGGPSQQLAGGPPQQFALSNSAAIRAEIQRFESVHPNIYAIYDLIERIEDLALQNQIREHVISIEDSFVNSQEWTLSRSVPELKVGIVGNLSSGKSALVHRYLTGTYVQEESPEGGRFKKEIVVDGQSYLLLIRDEGGPPELQFAAWVDAVVFVFSLEDEISFQTVYNYFLRLCSFRNASEVPMVLVGTQDAISAANPRVIDDSRARKLSTDLKRCTYYETCATYGLNVERVFQDVGIIDSAVPCSGPEGSGLAKEAATGHRALQVTAQLAQPLGRVRRLHPGRAHQPGHEWRRQRLQRLLVLSPLHPQHQPAGAAHRDHRCLLHPHTHPKAVQAALQHLHDMCHCFQLFINKKAFPTPSKLEDQLVTHSTSGHAPCAGPEAGRALGLLSDEKRPRAPHSRDPREPFVTNPTPREGYERRSPRWGLPGTRPGRTLQARCMEKKAARPHARRWPARRGPEGRGSPSPPGPAAPGGRFPAPPLLCSFLHGPLPFLLLLRKPPPPPRLPCPLFLASPYFLGSAFGWTLPQELDRVQGLFWPLSSLCPSTVPLGPRRRARCHVPCGVCAADGPSARSLVDFALPVVAPCAPDQQPHRPPPRPRFSYAPAPGVLLAPSASLSLLFCKGRARLSDLLLLCMVPCVRINPLEYSWSQFLPVPPPRPDPLLGLPRRREAGGRPGSPGGQLSADPGPLYHASCFLFQSRKGADLDREKKAAECKVDSIGSGRAIPIKQGILLKRSGKSLNKEWKKKYVTLCDNGLLTYHPSLHDYMQNIHGKEIDLLRTTVKVPGKRLPRATPATAPGTSPRANGLSVERSNTQLGGGTGAPHSASSASLHSERPLSSSAWAGPRPEGLHQRSCSVSSADQWSEATTSLPPGMQHPASGPAEVLSSSPKLDPPPSPHSNRKKHRRKKSTGTPRPDGPSSATEEAEESFEFVVVSLTGQTWHFEASTAEERELWVQSVQAQILASLQGCRSAKDKTRLGNQNAALAVQAVRTVRGNSFCIDCDAPNPDWASLNLGALMCIECSGIHRHLGAHLSRVRSLDLDDWPPELLAVMTAMGNALANSVWEGALGGYSKPGPDACREEKERWIRAKYEQKLFLAPLPSSDVPLGQQLLRAVVEDDLRLLVMLLAHGSKEEVNETYGDGDGRTALHLSSAMANVVFTQLLIWYGVDVRSRDARGLTPLAYARRAGSQECADILIQHGCPGEGCGLAPTPNREPANGTNPSAELHRSPSLL

SEQ ID NO: 826892 - protein, 360 aa, Homo sapiens; identical to SEQ ID NO: 826877

SEQ ID NO: 826893 - protein, 599 aa, Homo sapiens; identical to SEQ ID NO: 826870

SEQ ID NO: 826894 - protein, 360 aa, Homo sapiens; identical to SEQ ID NO: 826877

SEQ ID NO: 826895 - protein, 360 aa, Homo sapiens; identical to SEQ ID NO: 826877

SEQ ID NO: 826896 - protein, 361 aa, Homo sapiens
MNFQAGGGQSPQQQQQLAGGPPQQFALSNSAAIRAEIQRFESVHPNIYAIYDLIERIEDLALQNQIREHVISIEDSFVNSQEWTLSRSVPELKVGIVGNLSSGKSALVHRYLTGTYVQEESPEGGRFKKEIVVDGQSYLLLIRDEGGPPELQFAAWVDAVVFVFSLEDEISFQTVYNYFLRLCSFRNASEVPMVLVGTQDAISAANPRVIDDSRARKLSTDLKRCTYYETCATYGLNVERVFQDVAQKVVALRKKQQLAIGPCKSLPNSPSHSAVSAASIPAVHINQATNGGGSAFSDYSSSVPSTPSISQRELRIETIAASSTPTPIRKQSKRRSNIFTLMNRRPEGCLPKATQRVSWPS

SEQ ID NO: 826897 - protein, 186 aa, Homo sapiens
RVIKDPGIEWHVDLYYEALCGGCRAFLIRELFPTWLLVMEILNVTLVPYGNAQEQNVSGRWEFKCQHGEEECKFNKVEACVLDELDMELAFLTIVCMEEFEDMERSLPLCLQLYAPGLSPDTIMECAMGDRGMQLMHANAQRTDALQPPHEYVPWVTVNGKPLEDQTQLLTLVCQLYQEARDRMSV

SEQ ID NO: 826898 - protein, 74 aa, Homo sapiens
GGGQTWEYVQPFLGWNQGAWVGVAAGNMRPLSCFVQKPLEDQTQLLTLVCQLYQGKKPDVCPSSTSSLRSVCFK

SEQ ID NO: 826899 - protein, 250 aa, Homo sapiens
MTLSPLLLFLPPLLLLLDVPTAAVQASPLQALDFFGNGPPVNYKTGNLYLRGPLKKSNAPLVNVTLYYEALCGGCRAFLIRELFPTWLLVMEILNVTLVPYGNAQEQNVSGRWEFKCQHGEEECKFNKVEACVLDELDMELAFLTIVCMEEFEDMERSLPLCLQLYAPGLSPDTIMECAMGDRGMQLMHANAQRTDALQPPHEYVPWVTVNGKPLEDQTQLLTLVCQLYQGKKPDVCPSSTSSLRSVCFK

SEQ ID NO: 826900 - protein, 250 aa, Homo sapiens; identical to SEQ ID NO: 826899

SEQ ID NO: 826901 - protein, 279 aa, Homo sapiens
MTLSPLLLFLPPLLLLLDVPTAAVQASPLQALDFFGNGPPVNYKTGNLYLRGPLKKSNAPLVNVTLYYEALCGGCRAFLIRELFPTWLLVMEILNVTLVPYGNAQVCGAGETEARGQGSRGPSLPAGSHPAALQEQNVSGRWEFKCQHGEEECKFNKVEACVLDELDMELAFLTIVCMEEFEDMERSLPLCLQLYAPGLSPDTIMECAMGDRGMQLMHANAQRTDALQPPHEYVPWVTVNGKPLEDQTQLLTLVCQLYQGKKPDVCPSSTSSLRSVCFK

SEQ ID NO: 826902 - protein, 250 aa, Homo sapiens; identical to SEQ ID NO: 826899

SEQ ID NO: 826903 - protein, 231 aa, Homo sapiens
MTLSPLLLFLPPLLLLLDVPTAAVQASPLQALDFFGNGPPVNYKTGNLYLRGPLKKSNAPLVNVTLYYEALCGGCRAFLIRELFPTWLLVMEILNVTLVPYGNAQPLSKPQACVLDELDMELAFLTIVCMEEFEDMERSLPLCLQLYAPGLSPDTIMECAMGDRGMQLMHANAQRTDALQPPHEYVPWVTVNGKPLEDQTQLLTLVCQLYQGKKPDVCPSSTSSLRSVCFK

SEQ ID NO: 826904 - protein, 219 aa, Homo sapiens
MTLSPLLLFLPPLLLLLDVPTAAVQASPLQALDFFGNGPPVNYKTGNLYLRGPLKKSNAPLVNVTLYYEALCGGCRAFLIRELFPTWLLVMEILNVTLVPYGNAQEQNVSGRWEFKCQHGEEECKFNKVECLQLYAPGLSPDTIMECAMGDRGMQLMHANAQRTDALQPPHEYVPWVTVNGKPLEDQTQLLTLVCQLYQGKKPDVCPSSTSSLRSVCFK

SEQ ID NO: 826905 - protein, 244 aa, Homo sapiens
MTLSPLLLFLPPLLLLLDVPTAAVQASPLQALDFFGNGPPVNYKTGNLYLRGPLKKSNAPLVNVTLYYEALCGGCRAFLIRELFPTWLLVMEILNVTLVPYGNAQEQNVSGRWEFKCQHGEEECKFNKVEACVLDELDMELAFLTIVCMEEFEDMERSLPLCLQLYAPGLSPDTIMECAMGDRGMQLMHANAQRTDALQPPHENPWKIRPSSLPLSASCTRARSRMSALPQPAPSGVFASSDGR

SEQ ID NO: 826906 - protein, 204 aa, Homo sapiens
MTLSPLLLFLPPLLLLLDVPTAAVQASPLQALDFFGNGPPVNYKTGNLYLRGPLKKSNAPLVNVTLYYEALCGGCRAFLIRELFPTWLLVMEILNVTLVPYGNAQEQNVSGRWEFKCQHGEEECKFNKVEACVLDELDMELAFLTIVCMEEFEDMERSLPLCLQLYAPGLSPDTIMECAMGDRGMQLMHAQPAPSGVFASSDGR

SEQ ID NO: 826907 - protein, 124 aa, Homo sapiens
RVGSTRFIVQHSTWIGHTFAPAAMTLSPLLLFLPPLLLLLDVPTAAVQASPLQALDFFGNGPPVNYKTGNLYLRGPLKKSNAPLVNKPLEDQTQLLTLVCQLYQGKKPDVCPSSTSSLRSVCFK

SEQ ID NO: 826908 - protein, 136 aa, Homo sapiens
MTLSPLLLFLPPLLLLLDVPTAAVQASPLQALDFFGNGPPVNYKTGNLYLRGPLKKSNAPLVNVTLYYEALCGGCRAFLIRELFPTWLLVMEILNVTLVPYGNAQEQNVSGRWEFKCQHGEEECKFNKVEIEEAPG

SEQ ID NO: 826909 - protein, 107 aa, Homo sapiens
RVGSTRFIVQHSTWIGHTFAPAAMTLSPLLLFLPPLLLLLDVPTAAVQASPLQALDFFGNGPPVNYKTGNLYLRGPLKKSNAPLVNPTSTVIHIRSETFVPDHVVWS

SEQ ID NO: 826910 - protein, 196 aa, Homo sapiens
HTFAPAAMTLSPLLLFLPPLLLLLDVPTAAVQASPLQALDFFGNGPPVNYKVGTATGRAGWREQAPCRGTRLLLSPQTSQGKTRAPRGRCPCRVPGKTLFSSRRCGHTPSVPFRFRIPHLRGAAASTRLVPPKGSMSAYCVLLGQELGSPFVAQGTSSAAGQGPPACILAATLDAFIPARAGLACLWDLLGRCPRG

SEQ ID NO: 826911 - protein, 273 aa, Homo sapiens
RVGSTRFIVQHSTWIGHTFAPAAMTLSPLLLFLPPLLLLLDVPTAAVQASPLQALDFFGNGPPVNYKTGNLYLRGPLKKSNAPLVNVTLYYEALCGGCRAFLIRELFPTWLLVMEILNVTLVPYGNAQEQNVSGRWEFKCQHGEEECKFNKVEACVLDELDMELAFLTIVCMEEFEDMERSLPLCLQLYAPGLSPDTIMECAMGDRGMQLMHANAQRTDALQPPHEYVPWVTVNGKPLEDQTQLLTLVCQLYQGKKPDVCPSSTSSLRSVCFK

SEQ ID NO: 826912 - protein, 250 aa, Homo sapiens; identical to SEQ ID NO: 826899

SEQ ID NO: 826913 - protein, 250 aa, Homo sapiens; identical to SEQ ID NO: 826899

SEQ ID NO: 826914 - protein, 232 aa, Homo sapiens
MTLSPLLLFLPPLLLLLDVPTAAVQASPLQALDFFGNGPPVNYKTGNLYLRGPLKKSNAPLVNVTLYYEALCGGCRAFLIRELFPTWLLVMEILNVTLVPYGNAQKQFNKVEACVLDELDMELAFLTIVCMEEFEDMERSLPLCLQLYAPGLSPDTIMECAMGDRGMQLMHANAQRTDALQPPHEYVPWVTVNGKPLEDQTQLLTLVCQLYQGKKPDVCPSSTSSLRSVCFK

SEQ ID NO: 826915 - protein, 250 aa, Homo sapiens; identical to SEQ ID NO: 826899

SEQ ID NO: 826916 - protein, 226 aa, Homo sapiens
VQLADKGKELGLIFQGFPIDGDPGHILVWWLESICPLGVGVHELQCRGPPLPPLLLLLDVPTAAVQASPLQALDFFGNGPPVNYKTGNLYLRGPLKKSNAPLVNVTLYYEALCGGCLAFLTIVCMEEFEDMERSLPLCLQLYAPGLSPDTIMECAMGDRGMQLMHANAQRTDALQPPHEYVPWVTVNGKPLEDQTQLLTLVCQLYQGKKPDVCPSSTSSLRSVCFK

SEQ ID NO: 826917 - protein, 234 aa, Homo sapiens
MTLSPLLLFLPPLLLLLDVPTAAVQASPLQALDFFGNGPPVNYKTGNLYLRGPLKKSNAPLVNVTLYYEALCGGCRAFLIRELFPTWLLVMEILNVTLVPYGNAQEQNVSGRWEFKCQHGEEECKFNKVEACVLDELDMELAFLTIVCMEEFEDMERSLPLCLQLYAPGLSPDTIMECAMGDRGMQLMHANAQRTDALQPPHEYVPWVTVNGKPLEDQTQQPAPSGVFASSDGR

SEQ ID NO: 826918 - protein, 224 aa, Homo sapiens
MTLSPLLLFLPPLLLLLDVPTAAVQASPLQALDFFGNGPPVNYKTGNLYLRGPLKKSNAPLVNVTLYYEALCGGCRAFLIRELFPTWLLVMEILNVTLVPYGNAQEQNVSGRWEFKCQHGEEECKFNKVEACVLDELDMELAFLTIVCMEEFEDMERSLPLCLQLYAPGLSPDTIMECAMGDRGMQLMHAWCPTETHRNKMSVAGGSSSAAWRRGVNSPGAGTE

SEQ ID NO: 826919 - protein, 67 aa, Homo sapiens
TKEEIVDKYDLFVGSQATDFGEALMGNPWKIRPSSLPLSASCTRARSRMSALPQPAPSGVFASSDGR

SEQ ID NO: 826920 - protein, 180 aa, Homo sapiens
VQLADKGKELGLIFQGFPIDGDPGHILVWWLESICPLGVGVHELQCRGPPLPPLLLLLDVPTAAVQASPLQALDFFGNGPPVNYKTGNLYLRGPLKKSNAPLVNVTLYYEALCGGCLAFLTIVCMEEFEDMERSLPLCLQLYAPGLSPDTIMECAMGDRGMQLMHAQPAPSGVFASSDGR

SEQ ID NO: 826921 - protein, 92 aa, Homo sapiens
YQVGLREVGTAQGYTCLPRLPNPQTGNLYLRGPLKKSNAPLVNVTLYYEALCGGCRAFLIRELFPTWLLVMEILNVTLVPYGNAQVCGRWGN

SEQ ID NO: 826922 - protein, 103 aa, Homo sapiens
EDPGIMAEQEAVSPPRPQLHQKDLSDVTILELWKLLKACNFQGRLGWQIGVNFGFSSWHSSGYPCPTDSHAHVLGAPRTQLEGFRVSKKDPFLQIVGICAQDP

SEQ ID NO: 826923 - protein, 1153 aa, Homo sapiens
MACPWKFLFKTKFHQYAMNGEKDINNNVEKAPCATSSPVTQDDLQYHNLSKQQNESPQPLVETGKKSPESLVKLDATPLSSPRHVRIKNWGSGMTFQDTLHHKAKGILTCRSKSCLGSIMTPKSLTRGPRDKPTPPDELLPQAIEFVNQYYGSFKEAKIEEHLARVEAVTKEIETTGTYQLTGDELIFATKQAWRNAPRCIGRIQWSNLQVFDARSCSTAREMFEHICRHVRYSTNNGNIRSAITVFPQRSDGKHDFRVWNAQLIRYAGYQMPDGSIRGDPANVEFTQLCIDLGWKPKYGRFDVVPLVLQANGRDPELFEIPPDLVLEVAMEHPKYEWFRELELKWYALPAVANMLLEVGGLEFPGCPFNGWYMGTEIGVRDFCDVQRYNILEEVGRRMGLETHKLASLWKDQAVVEINIAVLHSFQKQNVTIMDHHSAAESFMKYMQNEYRSRGGCPADWIWLVPPMSGSITPVFHQEMLNYVLSPFYYYQVEAWKTHVWQDEKRRPKRREIPLKVLVKAVLFACMLMRKTMASRVRVTILFATETGKSEALAWDLGALFSCAFNPKVVCMDKYRLSCLEEERLLLVVTSTFGNGDCPGNGEKLKKSLFMLKELNNKFRYAVFGLGSSMYPRFCAFAHDIDQKLSHLGASQLTPMGEGDELSGQEDAFRSWAVQTFKAACETFDVRGKQHIQIPKLYTSNVTWDPHHYRLVQDSQPLDLSKALSSMHAKNVFTMRLKSRQNLQSPTSSRATILVELSCEDGQGLNYLPGEHLGVCPGNQPALVQGILERVVDGPTPHQTVRLEALDESGSYWVSDKRLPPCSLSQALTYFLDITTPPTQLLLQKLAQVATEEPERQRLEALCQPSEYSKWKFTNSPTFLEVLEEFPSLRVSAGFLLSQLPILKPRFYSISSSRDHTPTEIHLTVAVVTYHTRDGQGPLHHGVCSTWLNSLKPQDPVPCFVRNASGFHLPEDPSHPCILIGPGTGIAPFRSFWQQRLHDSQHKGVRGGRMTLVFGCRRPDEDHIYQEEMLEMAQKGVLHAVHTAYSRLPGKPKVYVQDILRQQLASEVLRVLHKEPGHLYVCGDVRMARDVAHTLKQLVAAKLKLNEEQVEDYFFQLKSQKRYHEDIFGAVFPYEAKKDRVAVQPSSLEMSAL

SEQ ID NO: 826924 - protein, 163 aa, Homo sapiens
ARSRNARTADGADRREPVRRRNGSLGVRVESGLVGDDRDEHGAVAGELTVRLLAERDGGAHLRLLHHHRLQRQERPGAAARLADHAVSEAGPAVQDAGTGLGRKPKPGRRAGAAVPGPRAGRPDRPPERQFAPEGGRQGWTSQAFPASPRNLHPSTVNSRACS

SEQ ID NO: 826925 - protein, 219 aa, Homo sapiens
ARAPGTRAPQTARIAGSRSAAGTGAWVCVWSPDSWETIAMNTVLSRANSLFAFSLSVMAALTFGCFITTAFKDRSVPVRLHVSRIMLKNVEDFTGPRERSDLGFITFDITADLENIFDWNVKQLFLYLSAEYSTKNNALNQVVLWDKIVLRGDNPKLLLKDMKTKYFFFDDGNGLKGNRNVTLTLSWNVVPNAGILPLVTGSGHVSVPFPDTYEITKSY

SEQ ID NO: 826926 - protein, 219 aa, Homo sapiens; identical to SEQ ID NO: 826925

SEQ ID NO: 826927 - protein, 219 aa, Homo sapiens; identical to SEQ ID NO: 826925

SEQ ID NO: 826928 - protein, 95 aa, Homo sapiens
ARSRNARTADGADRREPVRRRNGSLGVRVESGLVGDDRDEHGAVAGELTVRLLAERDGGAHLRLLHHHRLQRQERPGAAARLADHAKKCRRFHWT

SEQ ID NO: 826929 - protein, 219 aa, Homo sapiens; identical to SEQ ID NO: 826925

SEQ ID NO: 826930 - protein, 219 aa, Homo sapiens; identical to SEQ ID NO: 826925

SEQ ID NO: 826931 - protein, 219 aa, Homo sapiens; identical to SEQ ID NO: 826925

SEQ ID NO: 826932 - protein, 346 aa, Homo sapiens
PFVVSCINLAVPCIYSMFRLVERYEMPRHEVYVLLIRNIFLKISIIGILCYYWLNTVALSGEECWETLIGQDIYRLLLMDFVFSLVNSFLGEFLRRIIGMQLITSLGLQEFDIARNVLELIYAQTLVWIGIFFCPLLPFIQMIMLFIMFYSKNISLMMNFQPPSKAWRASQMMTFFIFLLFFPSFTGVLCTLAITIWRLKPSADCGPFRGLPLFIHSIYSWIDTLSTRPGYLWVVWIYRNLIGSVHFFFILTLIVLIITYLYWQITEGRKIMIRLLHEQIINEGKDKMFLIEKLIKLQDMEKKANPSSLVLERREVEQQGFLHLGEHDGSLDLRSRRSVQEGNPRA

SEQ ID NO: 826933 - protein, 268 aa, Homo sapiens [sequence omitted]

SEQ ID NO: 826934 - protein, 268 aa, Homo sapiens [sequence omitted]

SEQ ID NO: 826935 - protein, 96 aa, Homo sapiens
PFVVSCINLAVPCIYSMFRLVERYEMPRHEVYVLLIRNIFLKISIIGILCYYWLNTVALSGEECWETLIGQDIYRLLLMDFVFSLVNSFLGEFLRR

SEQ ID NO: 826936 - protein, 230 aa, Homo sapiens
PASDSLTSHRYRIGIFFCPLLPFIQMIMLFIMFYSKNISLMMNFQPPSKAWRASQMMTFFIFLLFFPSFTGVLCTLAITIWRLKPSADCGPFRGLPLFIHSIYSWIDTLSTRPGYLWVVWIYRNLIGSVHFFFILTLIVLIITYLYWQITEGRKIMIRLLHEQIINEGKDKMFLIEKLIKLQDMEKKANPSSLVLERREVEQQGFLHLGEHDGSLDLRSRRSVQEGNPRA

SEQ ID NO: 826937 - protein, 255 aa, Homo sapiens
MDFVFSLVNSFLGEFLRRIIGMQLITSLGLQEFDIARNVLELIYAQTLVWIGIFFCPLLPFIQMIMLFIMFYSKNISLMMNFQPPSKAWRASQMMTFFIFLLFFPSFTGVLCTLAITIWRLKPSADCGPFRGLPLFIHSIYSWIDTLSTRPGYLWVVWIYRNLIGSVHFFFILTLIVLIITYLYWQITEGRKIMIRLLHEQIINEGKDKMFLIEKLIKLQDMEKKANPSSLVLERREVEQQGFLHLGEHDGSLGE

SEQ ID NO: 826938 - protein, 386 aa, Homo sapiens
AERGRHHRAGKMAPPTELLARPERGSAPGSRAMGRLVAVGLLGIALALLGERLLALRNRLKASREVESVDLPHCHLIKGIEAGSEDIDILPNGLAFFSVGLKFPGLHSFAPDKPGGILMMDLKEEKPRARELRISRGFDLASFNPHGISTFIDNDDTVYLFVVNHPEFKNTVEIFKFEEAENSLLHLKTVKHELLPSVNDITAVGPAHFYATNDHYFSDPFLKYLETYLNLHWANVVYYSPNEVKVVAEGFDSANGINISPDDKYIYVADILAHEIHVLEKHTNMNLTQLKVLELDTLVDNLSIDPSSGDIWVGCHPNGQKLFVYDPNNPPSSEVLRIQNILSEKPTVTTVYANNGSVLQGSSVASVYDGKLLIGTLYHRALYCEL

SEQ ID NO: 826939 - protein, 268 aa, Homo sapiens
MMDLKEEKPRARELRISRGFDLASFNPHGISTFIDNDDTVYLFVVNHPEFKNTVEIFKFEEAENSLLHLKTVKHELLPSVNDITAVGPAHFYATNDHYFSDPFLKYLETYLNLHWANVVYYSPNEVKVVAEGFDSANGINISPDDKYIYVADILAHEIHVLEKHTNMNLTQLKVLELDTLVDNLSIDPSSGDIWVGCHPNGQKLFVYDPNNPPSSEVLRIQNILSEKPTVTTVYANNGSVLQGSSVASVYDGKLLIGTLYHRALYCEL

SEQ ID NO: 826940 - protein, 268 aa, Homo sapiens; identical to SEQ ID NO: 826939

SEQ ID NO: 826941 - protein, 286 aa, Homo sapiens
MVWLFLVCFAPDKPGGILMMDLKEEKPRARELRISRGFDLASFNPHGISTFIDNDDTVYLFVVNHPEFKNTVEIFKFEEAENSLLHLKTVKHELLPSVNDITAVGPAHFYATNDHYFSDPFLKYLETYLNLHWANVVYYSPNEVKVVAEGFDSANGINISPDDKYIYVADILAHEIHVLEKHTNMNLTQLKVLELDTLVDNLSIDPSSGDIWVGCHPNGQKLFVYDPNNPPSSEVLRIQNILSEKPTVTTVYANNGSVLQGSSVASVYDGKLLIGTLYHRALYCEL

SEQ ID NO: 826942 - protein, 409 aa, Homo sapiens
AERGRHHRAGKMAPPTELLARPERGSAPGSRAMGRLVAVGLLGIALALLGERLLALRNRLKASREVESVDLPHCHLIKGIEAGSEDIDILPNGLAFFSVGECLLPSPNSAEEIQGYLMRAAEGLKFPGLHSFAPDKPGGILMMDLKEEKPRARELRISRGFDLASFNPHGISTFIDNDDTVYLFVVNHPEFKNTVEIFKFEEAENSLLHLKTVKHELLPSVNDITAVGPAHFYATNDHYFSDPFLKYLETYLNLHWANVVYYSPNEVKVVAEGFDSANGINISPDDKYIYVADILAHEIHVLEKHTNMNLTQLKVLELDTLVDNLSIDPSSGDIWVGCHPNGQKLFVYDPNNPPSSEVLRIQNILSEKPTVTTVYANNGSVLQGSSVASVYDGKLLIGTLYHRALYCEL

SEQ ID NO: 826943 - protein, 362 aa, Homo sapiens
RSAAGTIEPGRWHRPRSCWPGRSEAARPAPAPWGGWWLWACWGSRWRSWARGFWHSEAGSEDIDILPNGLAFFSVGLKFPGLHSFAPDKPGGILMMDLKEEKPRARELRISRGFDLASFNPHGISTFIDNDDTVYLFVVNHPEFKNTVEIFKFEEAENSLLHLKTVKHELLPSVNDITAVGPAHFYATNDHYFSDPFLKYLETYLNLHWANVVYYSPNEVKVVAEGFDSANGINISPDDKYIYVADILAHEIHVLEKHTNMNLTQLKVLELDTLVDNLSIDPSSGDIWVGCHPNGQKLFVYDPNNPPSSEVLRIQNILSEKPTVTTVYANNGSVLQGSSVASVYDGKLLIGTLYHRALYCEL

SEQ ID NO: 826944 - protein, 324 aa, Homo sapiens
  misc_feature (10)..(10): Xaa can be any naturally occurring amino acid
GAPPDRLSPXARPLHPSPPFPSGPHTRLLSPHALSRTGLKFPGLHSFAPDKPGGILMMDLKEEKPRARELRISRGFDLASFNPHGISTFIDNDDTVYLFVVNHPEFKNTVEIFKFEEAENSLLHLKTVKHELLPSVNDITAVGPAHFYATNDHYFSDPFLKYLETYLNLHWANVVYYSPNEVKVVAEGFDSANGINISPDDKYIYVADILAHEIHVLEKHTNMNLTQLKVLELDTLVDNLSIDPSSGDIWVGCHPNGQKLFVYDPNNPPSSEVLRIQNILSEKPTVTTVYANNGSVLQGSSVASVYDGKLLIGTLYHRALYCEL

SEQ ID NO: 826945 - protein, 374 aa, Homo sapiens
AERGRHHRAGKMAPPTELLARPERGSAPGSRAMGRLVAVGLLGIALALLGERLLALRNRLKASREVESVDLPHCHLIKGIEAGSEDIDILPNGLAFFSVGLKFPGLHSFAPDKPGGILMMDLKEEKPRARELRISRGFDLASFNPHGISTFIDNEFKNTVEIFKFEEAENSLLHLKTVKHELLPSVNDITAVGPAHFYATNDHYFSDPFLKYLETYLNLHWANVVYYSPNEVKVVAEGFDSANGINISPDDKYIYVADILAHEIHVLEKHTNMNLTQLKVLELDTLVDNLSIDPSSGDIWVGCHPNGQKLFVYDPNNPPSSEVLRIQNILSEKPTVTTVYANNGSVLQGSSVASVYDGKLLIGTLYHRALYCEL

SEQ ID NO: 826946 - protein, 368 aa, Homo sapiens
AERGRHHRAGKMAPPTELLARPERGSAPGSRAMGRLVAVGLLGIALALLGERLLALRNRLKASREVESVDLPHCHLIKGIEAGSEDIDILPNGLAFFSVGLKFPGLHSFAPDKPGGILMMDLKEDNPHGISTFIDNDDTVYLFVVNHPEFKNTVEIFKFEEAENSLLHLKTVKHELLPSVNDITAVGPAHFYATNDHYFSDPFLKYLETYLNLHWANVVYYSPNEVKVVAEGFDSANGINISPDDKYIYVADILAHEIHVLEKHTNMNLTQLKVLELDTLVDNLSIDPSSGDIWVGCHPNGQKLFVYDPNNPPSSEVLRIQNILSEKPTVTTVYANNGSVLQGSSVASVYDGKLLIGTLYHRALYCEL

SEQ ID NO: 826947 - protein, 301 aa, Homo sapiens
AERGRHHRAGKMAPPTELLARPERGSAPGSRAMGRLVAVGLLGIALALLGERLLALRNRLKASREVESVDLPHCHLIKGIEAGSEDIDILPNGLAFFSVGLKFPGLHSFAPDKPGGILMMDLKEEKPRARELRISRGFDLASFNPHGISTFIDNDDTVYLFVVNHPEFKNTVEIFKFEEAENSLLHLKTVKHELLPSVNDITAVGPAHFYATNDHYFSDPFLKYLETYLNLHWANVVYYSPNEVKVVAEGFDSANGINISPDDKYIYVADILAHEIHVLEKHTNMNLTQLKILTISHLEGT

SEQ ID NO: 826948 - protein, 334 aa, Homo sapiens
VKDPLTLYTSRSGFVDSNRLKASREVESVDLPHCHLIKGIEAGSEDIDILPNGLAFFSVGLKFPGLHSFAPDKPGGILMMDLKEEKPRARELRISRGFDLASFNPHGISTFIDNEFKNTVEIFKFEEAENSLLHLKTVKHELLPSVNDITAVGPAHFYATNDHYFSDPFLKYLETYLNLHWANVVYYSPNEVKVVAEGFDSANGINISPDDKYIYVADILAHEIHVLEKHTNMNLTQLKVLELDTLVDNLSIDPSSGDIWVGCHPNGQKLFVYDPNNPPSSEVLRIQNILSEKPTVTTVYANNGSVLQGSSVASVYDGKLLIGTLYHRALYCEL

SEQ ID NO: 826949 - protein, 368 aa, Homo sapiens
AERGRHHRAGKMAPPTELLARPERGSAPGSRAMGRLVAVGLLGIALALLGERLLALRNRLKASREVESVDLPHCHLIKGIEAGSEDIDILPNGLAFFSVGLKFPGLHSFAPDKPGGILMMDLKEEKPRARELRISRGFDLASFNPHGISTFIDNDDTVYLFVVNHPEFKNTVEIFKFEEAENSLLHLTAHFYATNDHYFSDPFLKYLETYLNLHWANVVYYSPNEVKVVAEGFDSANGINISPDDKYIYVADILAHEIHVLEKHTNMNLTQLKVLELDTLVDNLSIDPSSGDIWVGCHPNGQKLFVYDPNNPPSSEVLRIQNILSEKPTVTTVYANNGSVLQGSSVASVYDGKLLIGTLYHRALYCEL

SEQ ID NO: 826950 - protein, 282 aa, Homo sapiens
AERGRHHRAGKMAPPTELLARPERGSAPGSRAMGRLVAVGLLGIALALLGERLLALRNRLKASREVESVDLPHCHLIKGIEAGSEDIDILPNGLAFFSVGLKFPGLHSFAPDKPGGILMMDLKEEKPRARELRISRGFDLASFNPHGISTFIDNDDTVYLFVVNHPEFKNTVEIFKFEEAENSLLHLKTVKHELLPSVNDITAVGPAHFYATNDHYFSDPFLKYLETYLNLHWANVVYYSPNEVKVVAEGFDSANGINISPDDKYIYVADILAHEIHVLDGG

SEQ ID NO: 826951 - protein, 220 aa, Homo sapiens
MTIVVIFSSSFPLTKTNRPFVSSHMLFFFFSVNDITAVGPAHFYATNDHYFSDPFLKYLETYLNLHWANVVYYSPNEVKVVAEGFDSANGINISPDDKYIYVADILAHEIHVLEKHTNMNLTQLKVLELDTLVDNLSIDPSSGDIWVGCHPNGQKLFVYDPNNPPSSEVLRIQNILSEKPTVTTVYANNGSVLQGSSVASVYDGKLLIGTLYHRALYCEL

SEQ ID NO: 826952 - protein, 285 aa, Homo sapiens
AERGRHHRAGKMAPPTELLARPERGSAPGSRAMGRLVAVGLLGIALALLGERLLALRNRLKASREVESVDLPHCHLIKGIEAGSEDIDILPNGLAFFSVGLKFPGLHSFAPDKPGGILMMDLKEEKPRARELRISRGFDLASFNPHGISTFIDNDDTVYLFVVNHPEFKNTVEIFKFEEAENSLLHLKTVKHELLPSVNDITAVGPAHFYATNDHYFSDPFLKYLETYLNLHWANVVYYSPNEVKVVAEGFDSANGINISPDDKYLSWIHWWIIYLLILPRGTSG

SEQ ID NO: 826953 - protein, 386 aa, Homo sapiens; identical to SEQ ID NO: 826938

SEQ ID NO: 826954 - protein, 301 aa, Homo sapiens
AERGRHHRAGKMAPPTELLARPERGSAPGSRAMGRLVAVGLLGIALALLGERLLALRNRLKASREVESVDLPHCHLIKGIEAGSEDIDILPNGLAFFSVGLKFPGLHSFAPDKPGGILMMDLKEEKPRARELRISRGFDLASFNPHGISTFIDNDDTVYLFVVNHPEFKNTVEIFKFEEAENSLLHLKTVKHELLPSVNDITAVGPAHFYATNDHYFSDPFLKYLETYLNLHWANVVYYSPNEVKVVAEGFDSANGINISPDDKYIYVADILAHEIHVLEKHTNMNLTQLKVLEAGIHWVG

SEQ ID NO: 826955 - protein, 268 aa, Homo sapiens
AERGRHHRAGKMAPPTELLARPERGSAPGSRAMGRLVAVGLLGIALALLGERLLALRNRLKASREVESVDLPHCHLIKGIEAGSEDIDILPNGLAFFSVGLKFPGLHSFAPDKPGGILMMDLKEEKPRARELRISRGFDLASFNPHGISTFIDNDDTVYLFVVNHPEFKNTVEIFKFEEAENSLLHLKTVKHELLPSVNDITAVGPAHFYATNDHYFSDPFLKYLETYLNLHWANVVYYSPNEVKVVAEGFDSANGINISPDDKYGPL

SEQ ID NO: 826956 - protein, 205 aa, Homo sapiens
AERGRHHRAGKMAPPTELLARPERGSAPGSRAMGRLVAVGLLGIALALLGERLLALRNRLKASREVESVDLPHCHLIKGIEAGSEDIDILPNGLAFFSVGLKFPGLHSFAPDKPGGILMMDLKEEKPRARELRISRGFDLASFNPHGISTFIDNDDTVYLFVVNHPEFKNTVEIFKFEEAENSLLHLKTVKHELLPRYFLILFLL

SEQ ID NO: 826957 - protein, 133 aa, Homo sapiens
AERGRHHRAGKMAPPTELLARPERGSAPGSRAMGRLVAVGLLGIALALLGERLLALRNRLKASREVESVDLPHCHLIKGIVRAKALSPSFPVCDLEQLLNFSKASNSLHSKIKDNHMRYCMQGIYKEPGTWCT

SEQ ID NO: 826958 - protein, 106 aa, Homo sapiens
MNSVYGVGNTFLKVREPMIRNNTRRTAIGKTENDLLGRLTAYTFNLSLPVVFKCQCLPRGPVVMSCKLTLFFQFFSKFEEAENSLLHLKTVKHELLPRYFLILFLL

SEQ ID NO: 826959 - protein, 386 aa, Homo sapiens; identical to SEQ ID NO: 826938

SEQ ID NO: 826960 - protein, 386 aa, Homo sapiens; identical to SEQ ID NO: 826938

SEQ ID NO: 826961 - protein, 401 aa, Homo sapiens
AERGRHHRAGKMAPPTELLARPERGSAPGSRAMGRLVAVGLLGIALALLGERLLALRNRLKASREVESVDLPHCHLIKGIEAGSEDIDILPNGLAFFSVGECLLPSPNSAEEIQGYLMRAAEHFAPDKPGGILMMDLKEEKPRARELRISRGFDLASFNPHGISTFIDNDDTVYLFVVNHPEFKNTVEIFKFEEAENSLLHLKTVKHELLPSVNDITAVGPAHFYATNDHYFSDPFLKYLETYLNLHWANVVYYSPNEVKVVAEGFDSANGINISPDDKYIYVADILAHEIHVLEKHTNMNLTQLKVLELDTLVDNLSIDPSSGDIWVGCHPNGQKLFVYDPNNPPSSEVLRIQNILSEKPTVTTVYANNGSVLQGSSVASVYDGKLLIGTLYHRALYCEL

SEQ ID NO: 826962 - protein, 284 aa, Homo sapiens
MRAAEHFAPDKPGGILMMDLKEEKPRARELRISRGFDLASFNPHGISTFIDNDDTVYLFVVNHPEFKNTVEIFKFEEAENSLLHLKTVKHELLPSVNDITAVGPAHFYATNDHYFSDPFLKYLETYLNLHWANVVYYSPNEVKVVAEGFDSANGINISPDDKYIYVADILAHEIHVLEKHTNMNLTQLKVLELDTLVDNLSIDPSSGDIWVGCHPNGQKLFVYDPNNPPSSEVLRIQNILSEKPTVTTVYANNGSVLQGSSVASVYDGKLLIGTLYHRALYCEL

SEQ ID NO: 826963 - protein, 155 aa, Homo sapiens
ASWGYPARASAASLAATRGEPEDELNLAAAAISSAHHRVWCLSEEYFTFKGKMLSPNDKMLGKLDPFYQPSVSKQKTSAEIISEARNALRTVRTQRPFTPQEAQRKLFGPASSRTSENRPPSSFRNRKFQHLPPERRIPAFPFLSPQWTLRRLEE

SEQ ID NO: 826964 - protein, 919 aa, Homo sapiens
ASWGYPARASAASLAATRGEPEDELNLAAAAISSAHHRVWCLSEEYFTFKGKMLSPNDKMLGKLDPFYQPSVSKQKTSAEIISEARNALRTVRTQRPFTPQEAQRKLFGPASSRTSENRPPSSFSLHASSFESSDSRPISGTRLSPLELKPKVPASPTREEDSCFSFPKPPVDPAKIRRVSNARARLFRAASQRALLPDRSLPPSDSKKTVESKETVMMGDSMVKINGIYLTKSNAICHLKSHPLQLTDDGGFSEIKEQEMFKGTTSLPSHLKNGGDQGKRHARASSCPSSSDLSRLQTKAVPKADLQEEDAEIEVDEVFWNTRIVPILRELEKEENIETVCAACTQLHHALEEGNMLGNKFKGRSILLKTLCKLVDVGSDSLSLKLAKIILALKVSRKNLLNVCKLIFKISRNEKNDSLIQNDSILESLLEVLRSEDLQTNMEAFLYCMGSIKFISGNLGFLNEMISKGAVEILINLIKQINENIKKCGTFLPNSGHLLVQVTATLRNLVDSSLVRSKFLNISALPQLCTAMEQYKGDKDVCTNIARIFSKLTSYRDCCTALASYSRCYALFLNLINKYQKKQDLVVRVVFILGNLTAKNNQAREQFSKEKGSIQTLLSLFQTFHQLDLHSQKPVGQRGEQHRAQRPPSEAEDVLIKLTRVLANIAIHPGVGPVLAANPGIVGLLLTTLEYKSLDDCEELVINATATINNLSYYQVKNSIIQDKKLYIAELLLKLLVSNNMDGILEAVRVFGNLSQDHDVCDFIVQNNVHRFMMALLDAQHQDICFSACGVLLNLTVDKDKRVILKEGGGIKKLVDCLRDLGPTDWQLACLVCKTLWNFSENITNASSCFGNEDTNTLLLLLSSFLDEELALDGSFDPDLKNYHKLHWETEFKPVAQQLLNRIQRHHTFLEPLPIPSF

SEQ ID NO: 826965 - protein, 702 aa, Homo sapiens
MMGDSMVKINGIYLTKSNAICHLKSHPLQLTDDGGFSEIKEQEMFKGTTSLPSHLKNGGDQGKRHARASSCPSSSDLSRLQTKAVPKADLQEEDAEIEVDEVFWNTRIVPILRELEKEENIETVCAACTQLHHALEEGNMLGNKFKGRSILLKTLCKLVDVGSDSLSLKLAKIILALKVSRKNLLNVCKLIFKISRNEKNDSLIQNDSILESLLEVLRSEDLQTNMEAFLYCMGSIKFISGNLGFLNEMISKGAVEILINLIKQINENIKKCGTFLPNSGHLLVQVTATLRNLVDSSLVRSKFLNISALPQLCTAMEQYKGDKDVCTNIARIFSKLTSYRDCCTALASYSRCYALFLNLINKYQKKQDLVVRVVFILGNLTAKNNQAREQFSKEKGSIQTLLSLFQTFHQLDLHSQKPVGQRGEQHRAQRPPSEAEDVLIKLTRVLANIAIHPGVGPVLAANPGIVGLLLTTLEYKSLDDCEELVINATATINNLSYYQVKNSIIQDKKLYIAELLLKLLVSNNMDGILEAVRVFGNLSQDHDVCDFIVQNNVHRFMMALLDAQHQDICFSACGVLLNLTVDKDKRVILKEGGGIKKLVDCLRDLGPTDWQLACLVCKTLWNFSENITNASSCFGNEDTNTLLLLLSSFLDEELALDGSFDPDLKNYHKLHWETEFKPVAQQLLNRIQRHHTFLEPLPIPSF

SEQ ID NO: 826966 - protein, 814 aa, Homo sapiens
ASWGYPARASAASLAATRGEPEDELNLAAAAISSAHHRVWCLSEEYFTFKGKMLSPNDKMLGKLDPFYQPSVSKQKTSAEIISEARNALRTVRTQRPFTPQEAQRKLFGPASSRTSENRPPSSFSLHASSFESSDSRPISGTRLSPLELKPKVPASPTREEDSCFSFPKPPVDPAKIRRVSNARARLFRAASQRALLPDRSLPPSDSKKTVESKETVMMGDSMVKINGIYLTKSNAICHLKSHPLQLTDDGGFSEIKEQEMFKGTTSLPSHLKNGGDQGKRHARASSCPSSSDLSRLQTKAVPKADLQEEDAEIEVDEVFWNTRIVPILRELEKEENIETVCAACTQLHHALEEGNMLGNKFKGRSILLKTLCKLVDVGSDSLSLKLAKIILALKVSRKNLLNVCKLIFKISRNEKNDSLIQNDSILESLLEVLRSEDLQTNMEAFLYCMGSIKFISGNLGFLNEMISKGAVEILINLIKQINENIKKCGTFLPNSGHLLVQVTATLRNLVDSSLVRSKFLNISALPQLCTAMEQYKGDKDVCTNIARIFSKLTSYRDCCTALASYSRCYALFLNLINKYQKKQDLVVRVVFILGNLTAKNNQAREQFSKEKGSIQTLLSLFQTFHQLDLHSQKPVGQRGEQHRAQRPPSEAEDVLIKLTRVLANIAIHPGVGPVLAANPGIVGLLLTTLEYKSLDDCEELVINATATINNLSYYQVKNSIIQDKKLYIAELLLKLLVSNNMDGILEAVRVFGNLSQDHDVCDFIVQNNVHRFMMALLDAQHQDICFSACGVLLNLTVDKDKRVILKEGGGIKK

SEQ ID NO: 826967 - protein, 342 aa, Homo sapiens
ASWGYPARASAASLAATRGEPEDELNLAAAAISSAHHRVWCLSEEYFTFKGKMLSPNDKMLGKLDPFYQPSVSKQKTSAEIISEARNALRTVRTQRPFTPQEAQRKLFGPASSRTSENRPPSSFSLHASSFESSDSRPISGTRLSPLELKPKVPASPTREEDSCFSFPKPPVDPAKIRRVSNARARLFRAASQRALLPDRSLPPSDSKKTVESKETVMMGDSMVKINGIYLTKSNAICHLKSHPLQLTDDGGFSEIKEQEMFKGTTSLPSHLKNGGDQGKRHARASSCPSSSDLSRLQTKAVPKADLQEEDAEIEVDEVFWNTRIVPILRELEKGKTQTNKQ

SEQ ID NO: 826968 - protein, 249 aa, Homo sapiens
KLCAGAELASLAGWDWASGAEYKSLDDCEELVINATATINNLSYYQVKNSIIQDKKLYIAELLLKLLVSNNMDGILEAVRVFGNLSQDHDVCDFIVQNNVHRFMMALLDAQHQDICFSACGVLLNLTVDKDKRVILKEGGGIKKLVDCLRDLGPTDWQLACLVCKTLWNFSENITNASSCFGNEDTNTLLLLLSSFLDEELALDGSFDPDLKNYHKLHWETEFKPVAQQLLNRIQRHHTFLEPLPIPSF

SEQ ID NO: 826969 - protein, 210 aa, Homo sapiens
ASWGYPARASAASLAATRGEPEDELNLAAAAISSAHHRVWCLSEEYFTFKGKMLSPNDKMLGKLDPFYQPSVSKQKTSAEIISEARNALRTVRTQRPFTPQEAQRKLFGPASSRTSENRPPSSFSLHASSFESSDSRPISGTRLSPLELKPKVPASPTREEDSCFSFPKPPVDPAKIRRVSNARARLFRAASQRALLPDRSLPPSDCKAM

SEQ ID NO: 826970 - protein, 190 aa, Homo sapiens
ASWGYPARASAASLAATRGEPEDELNLAAAAISSAHHRVWCLSEEYFTFKGKMLSPNDKMLGKLDPFYQPSVSKQKTSAEIISEARNALRTVRTQRPFTPQEAQRKLFGPASSRTSENRPPSSFSLHASSFESSDSRPISGTRLSPLELKPKVPASPTREEDSCFSFPKPPVDPAKIRRQRRQWNPKKQL

SEQ ID NO: 826971 - protein, 867 aa, Homo sapiens
MLSPNDKMLGKLDPFYQPSVSKQKTSAEIISEARNALRTVRTQRPFTPQEAQRKLFGPASSRTSENRPPSSFSLHASSFESSDSRPISGTRLSPLELKPKVPASPTREEDSCFSFPKPPVDPAKIRRVSNARARLFRAASQRALLPDRSLPPSDSKKTVESKETVMMGDSMVKINGIYLTKSNAICHLKSHPLQLTDDGGFSEIKEQEMFKGTTSLPSHLKNGGDQGKRHARASSCPSSSDLSRLQTKAVPKADLQEEDAEIEVDEVFWNTRIVPILRELEKEENIETVCAACTQLHHALEEGNMLGNKFKGRSILLKTLCKLVDVGSDSLSLKLAKIILALKVSRKNLLNVCKLIFKISRNEKNDSLIQNDSILESLLEVLRSEDLQTNMEAFLYCMGSIKFISGNLGFLNEMISKGAVEILINLIKQINENIKKCGTFLPNSGHLLVQVTATLRNLVDSSLVRSKFLNISALPQLCTAMEQYKGDKDVCTNIARIFSKLTSYRDCCTALASYSRCYALFLNLINKYQKKQDLVVRVVFILGNLTAKNNQAREQFSKEKGSIQTLLSLFQTFHQLDLHSQKPVGQRGEQHRAQRPPSEAEDVLIKLTRVLANIAIHPGVGPVLAANPGIVGLLLTTLEYKSLDDCEELVINATATINNLSYYQVKNSIIQDKKLYIAELLLKLLVSNNMDGILEAVRVFGNLSQDHDVCDFIVQNNVHRFMMALLDAQHQDICFSACGVLLNLTVDKDKRVILKEGGGIKKLVDCLRDLGPTDWQLACLVCKTLWNFSENITNASSCFGNEDTNTLLLLLSSFLDEELALDGSFDPDLKNYHKLHWETEFKPVAQQLLNRIQRHHTFLEPLPIPSF

SEQ ID NO: 826972 - protein, 909 aa, Homo sapiens
DQRGFSEIKEQEMFKGTTSLPSHLKNGGVWCLSEEYFTFKGKMLSPNDKMLGKLDPFYQPSVSKQKTSAEIISEARNALRTVRTQRPFTPQEAQRKLFGPASSRTSENRPPSSFSLHASSFESSDSRPISGTRLSPLELKPKVPASPTREEDSCFSFPKPPVDPAKIRRVSNARARLFRAASQRALLPDRSLPPSDSKKTVESKETVMMGDSMVKINGIYLTKSNAICHLKSHPLQLTDDGGFSEIKEQEMFKGTTSLPSHLKNGGDQGKRHARASSCPSSSDLSRLQTKAVPKADLQEEDAEIEVDEVFWNTRIVPILRELEKEENIETVCAACTQLHHALEEGNMLGNKFKGRSILLKTLCKLVDVGSDSLSLKLAKIILALKVSRKNLLNVCKLIFKISRNEKNDSLIQNDSILESLLEVLRSEDLQTNMEAFLYCMGSIKFISGNLGFLNEMISKGAVEILINLIKQINENIKKCGTFLPNSGHLLVQVTATLRNLVDSSLVRSKFLNISALPQLCTAMEQYKGDKDVCTNIARIFSKLTSYRDCCTALASYSRCYALFLNLINKYQKKQDLVVRVVFILGNLTAKNNQAREQFSKEKGSIQTLLSLFQTFHQLDLHSQKPVGQRGEQHRAQRPPSEAEDVLIKLTRVLANIAIHPGVGPVLAANPGIVGLLLTTLEYKSLDDCEELVINATATINNLSYYQVKNSIIQDKKLYIAELLLKLLVSNNMDGILEAVRVFGNLSQDHDVCDFIVQNNVHRFMMALLDAQHQDICFSACGVLLNLTVDKDKRVILKEGGGIKKLVDCLRDLGPTDWQLACLVCKTLWNFSENITNASSCFGNEDTNTLLLLLSSFLDEELALDGSFDPDLKNYHKLHWETEFKPVAQQLLNRIQRHHTFLEPLPIPSF

SEQ ID NO: 826973 - protein, 285 aa, Homo sapiens
ASWGYPARASAASLAATRGEPEDELNLAAAAISSAHHRVWCLSEEYFTFKGKMLSPNDKMLGKLDPFYQPSVSKQKTSAEIISEARNALRTVRTQRPFTPQEAQRKLFGPASSRTSENRPPSSFSLHASSFESSDSRPISGTRLSPLELKPKVPASPTREEDSCFSFPKPPVDPAKIRRVSNARARLFRAASQRALLPDRSLPPSDSKKTVESKETVMMGDSMVKINGIYLTKSNAICHLKSHPLQLTDDGGFSEIKEQEMFKGTTSLPSHLKNGGPHCRLWNDD

SEQ ID NO: 826974 - protein, 862 aa, Homo sapiens
PAGPGRWPQVGLTARPIRRGPGMAGPGSTGGQIGAAALAGGARSKVAPSVDFDHSCSDSVEYLTLNFGPFETVHRWRRLPPCDEFVGARRSKHTVVAYKDAIYVFGGDNGKTMLNDLLRFDVKDCSWCRAFTTGTPPAPRYHHSAVVYGSSMFVFGGYTGDIYSNSNLKNKNDLFEYKFATGQWTEWKIEGRLPVARSAHGATVYSDKLWIFAGYDGNARLNDMWTIGLQDRELTCWEEVAQSGEIPPSCCNFPVAVCRDKMFVFSGQSGAKITNNLFQFEFKDKTWTRIPTEHLLRGSPPPPQRRYGHTMVAFDRHLYVFGGAADNTLPNELHCYDVDFQTWEVVQPSSDSEVGGAEVPERACASEEVPTLTYEERVGFKKSRDVFGLDFGTTSAKQPTQPASELPSGRLFHAAAVISDAMYIFGGTVDNNIRSGEMYRFQFSCYPKCTLHEDYGRLWESRQFCDVEFVLGEKEECVQGHVAIVTARSRWLRRKITQARERLAQKLEQEAAPVPREAPGVAAGGARPPLLHVAIREAEARPFEVLMQFLYTDKIKYPRKGHVEDVLLIMDVYKLALSFQLCRLEQLCRQYIEASVDLQNVLVVCESAARLQLSQLKEHCLNFVVKESHFNQVIMMKEFERLSSPLIVEIVRRKQQPPPRTPLDQPVDIGTSLIQDMKAYLEGAGAEFCDITLLLDGHPRPAHKAILAARSSYFEAMFRSFMPEDGQVNISIGEMVPSRQAFESMLRYIYYGEVNMPPEDSLYLFAAPYYYGFYNNRLQAYCKQNLEMNVTVQNVLQILEAADKTQALDMKRHCLHIIVHQFTKVSKLPTLRSLSQQLLLDIIDSLASHISDKQCAELGADI

SEQ ID NO: 826975 - protein, 139 aa, Homo sapiens
PAGPGRWPQVGLTARPIRRGPGMAGPGSTGGQIGAAALAGGARSKVAPSVDFDHSCSDSVEYLTLNFGPFETVHRWRRLPPCDEFVGARRSKHTVVAYKDAIYVFGGDNGKTMLNDLLRFDVKDCSWCRGLHWGHLFQF

SEQ ID NO: 826976 - protein, 862 aa, Homo sapiens; identical to SEQ ID NO: 826974

SEQ ID NO: 826977 - protein, 901 aa, Homo sapiens
PAGPGRWPQVGLTARPIRRGPGMAGPGSTGGQIGAAALAGGARSKVAPSVDFDHSCSDSVEYLTLNFGPFETVHRWRRLPPCDEFVGARRSKHTVVAYKDAIYVFGGDNGKTMLNDLLRFDVKDCSWCRAFTTGTPPAPRYHHSAVVYGSSMFVFGGYTGDIYSNSNLKNKNDLFEYKFATGQWTEWKIEGRLPVARSAHGATVYSDKLWIFAGYDGNARLNDMWTIGLQDRELTCWEEVAQSGEIPPSCCNFPVAVCRDKMFVFSGQSGAKITNNLFQFEFKDKTWTRIPTEHLLRGSPPPPQRRYGHTMVAFDRHLYVFGGAADNTLPNELHCYDVDFQTWEVVQPSSDSEVGGAEVPERACASEEVPTLTYEERVGFKKSRDVFGLDFGTTSAKQPTQPASELPSGRLFHAAAVISDAMYIFGGTVDNNIRSGEMYRFQFSCYPKCTLHEDYGRLWESRQFCDVEFVLGEKEECVQGHVAIVTARSRWLRRKITQARERLAQKLEQEAAPVPREAPGVAAGGARPPLLHVAIREAEARPFEVLMQFLYTDKIKYPRKGHVEDVLLIMDVYKLALSFQLCRLEQLCRQYIEASVDLQNVLVVCESAARLQLSQLKEHCLNFVVKESHFNQVIMMKEFERLSSPLIVEIVRRKQQPPPRTPLDQPVDIGPFIPPAFPGACADPGCWLLVMSAGTRGHAVGLEGAVIMGTSLIQDMKAYLEGAGAEFCDITLLLDGHPRPAHKAILAARSSYFEAMFRSFMPEDGQVNISIGEMVPSRQAFESMLRYIYYGEVNMPPEDSLYLFAAPYYYGFYNNRLQAYCKQNLEMNVTVQNVLQILEAADKTQALDMKRHCLHIIVHQFTKVSKLPTLRSLSQQLLLDIIDSLASHISDKQCAELGADI

SEQ ID NO: 826978 - protein, 890 aa, Homo sapiens
PAGPGRWPQVGLTARPIRRGPGMAGPGSTGGQIGAAALAGGARSKVAPSVDFDHSCSDSVEYLTLNFGPFETVHRWRRLPPCDEFVGARRSKHTVVAYKDAIYVFGGDNGKTMLNDLLRFDVKDCSWCRAFTTGTPPAPRYHHSAVVYGSSMFVFGGYTGDIYSNSNLKNKNDLFEYKFATGQWTEWKIEGRLPVARSAHGATVYSDKLWIFAGYDGNARLNDMWTIGLQDRELTCWEEVAQSGEIPPSCCNFPVAVCRDKMFVFSGQSGAKITNNLFQFEFKDKTWTRIPTEHLLRGSPPPPQRRYGHTMVAFDRHLYVFGGAADNTLPNELHCYDVDFQTWEVVQPSSDSEVGGAEVPERACASEEVPTLTYEERVGFKKSRDVFGLDFGTTSAKQPTQPASELPSGRLFHAAAVISDAMYIFGGTVDNNIRSGEMYRFQFSCYPKCTLHEDYGRLWESRQFCDVEFVLGEKEECVQGHVAIVTARSRWLRRKITQARERLAQKLEQEAAPVPREAPGVAAGGARPPLLHVAIREAEARPFEVLMQFLYTDKIKYPRKGHVEDVLLIMDVYKLALSFQLCRLEQLCRQYIEASVDLQNVLVVCESAARLQLSQLKEHCLNFVVKESHFNQVIMMKEFERLSSPLIVEIVRRKQQPPPRTPLDQPVDIGTSLIQDMKAYLEGAGAEFCDITLLLDGHPRPAHKAILAARSSYFEAMFRSFMPEDGQVNISIGEMVPSRQAFESMLRYIYYGEVNMPPEDSLYLFAAPYYYGFYNNRLQAYCKQNLEMNVTVQNVLQVAPQPRAHGCSSHCVGERGSASRSLPLQILEAADKTQALDMKRHCLHIIVHQFTKVSKLPTLRSLSQQLLLDIIDSLASHISDKQCAELGADI

SEQ ID NO: 826979 - protein, 862 aa, Homo sapiens; identical to SEQ ID NO: 826974

SEQ ID NO: 826980 - protein, 862 aa, Homo sapiens; identical to SEQ ID NO: 826974

SEQ ID NO: 826981 - protein, 432 aa, Homo sapiens
PAGPGRWPQVGLTARPIRRGPGMAGPGSTGGQIGAAALAGGARSKVAPSVDFDHSCSDSVEYLTLNFGPFETVHRWRRLPPCDEFVGARRSKHTVVAYKDAIYVFGGDNGKTMLNDLLRFDVKDCSWCRAFTTGTPPAPRYHHSAVVYGSSMFVFGGYTGDIYSNSNLKNKNDLFEYKFATGQWTEWKIEGRLPVARSAHGATVYSDKLWIFAGYDGNARLNDMWTIGLQDRELTCWEEVAQSGEIPPSCCNFPVAVCRDKMFVFSGQSGAKITNNLFQFEFKDKTWTRIPTEHLLRGSPPPPQRRYGHTMVAFDRHLYVFGGAADNTLPNELHCYDVDFQTWEVVQPSSDSEVGGAEVPERACASEEVPTLTYEERVGFKKSRDVFGLDFGTTSAKQPTQPASEVQAGILIKTPSPPETGPVINPSHTWGD

SEQ ID NO: 826982 - protein, 279 aa, Homo sapiens
PAGPGRWPQVGLTARPIRRGPGMAGPGSTGGQIGAAALAGGARSKVAPSVDFDHSCSDSVEYLTLNFGPFETVHRWRRLPPCDEFVGARRSKHTVVAYKDAIYVFGGDNGKTMLNDLLRFDVKDCSWCRAFTTGTPPAPRYHHSAVVYGSSMFVFGGYTGDIYSNSNLKNKNDLFEYKFATGQWTEWKIEGRLPVARSAHGATVYSDKLWIFAGYDGNASHVGQVHSLRVGPHTHLPSFHKMWLLPHPQGSLLQIPPGGAYPEASLNQSATLLYADPCH

SEQ ID NO: 826983 - protein, 122 aa, Homo sapiens
NISIGEMVPSRQAFESMLRYIYYGEVNMPPEDSLHPHSPVNSQVPTKGSWHPPRVALRPALLPQLGDLGPAPPSRGFAGAWGWAWCSLKQLAAGKEGFAARRNQWVPDPHNCPEDGVGHCFV

SEQ ID NO: 826984 - protein, 73 aa, Homo sapiens
GGGSKDLCGSKLGSAASWRFVPCHQLFPQAPGCACLGRWAPGSVLTLVSLHGVDDHLQEAKLMKDKGSSPNRH

SEQ ID NO: 826985 - protein, 1651 aa, Homo sapiens
MKWKHVPFLVMISLLSLSPNHLFLAQLIPDPEDVERGNDHGTPIPTSDNDDNSLGYTGSRLRQEDFPPRIVEHPSDLIVSKGEPATLNCKAEGRPTPTIEWYKGGERVETDKDDPRSHRMLLPSGSLFFLRIVHGRKSRPDEGVYVCVARNYLGEAVSHNASLEVAILRDDFRQNPSDVMVAVGEPAVMECQPPRGHPEPTISWKKDGSPLDDKDERITIRGGKLMITYTRKSDAGKYVCVGTNMVGERESEVAELTVLERPSFVKRPSNLAVTVDDSAEFKCEARGDPVPTVRWRKDDGELPKSRYEIRDDHTLKIRKVTAGDMGSYTCVAENMVGKAEASATLTVQEPPHFVVKPRDQVVALGRTVTFQCEATGNPQPAIFWRREGSQNLLFSYQPPQSSSRFSVSQTGDLTITNVQRSDVGYYICQTLNVAGSIITKAYLEVTDVIADRPPPVIRQGPVNQTVAVDGTFVLSCVATGSPVPTILWRKDGVLVSTQDSRIKQLENGVLQIRYAKLGDTGRYTCIASTPSGEATWSAYIEVQEFGVPVQPPRPTDPNLIPSAPSKPEVTDVSRNTVTLSWQPNLNSGATPTSYIIEAFSHASGSSWQTVAENVKTETSAIKGLKPNAIYLFLVRAANAYGISDPSQISDPVKTQDVLPTSQGVDHKQVQRELGNAVLHLHNPTVLSSSSIEVHWTVDQQSQYIQGYKILYRPSGANHGESDWLVFEVRTPAKNSVVIPDLRKGVNYEIKARPFFNEFQGADSEIKFAKTLEEAPSAPPQGVTVSKNDGNGTAILVSWQPPPEDTQNGMVQEYKVWCLGNETRYHINKTVDGSTFSVVIPFLVPGIRYSVEVAASTGAGSGVKSEPQFIQLDAHGNPVSPEDQVSLAQQISDVVKQPAFIAGIGAACWIILMVFSIWLYRHRKKRNGLTSTYAGIRKVPSFTFTPTVTYQRGGEAVSSGGRPGLLNISEPAAQPWLADTWPNTGNNHNDCSISCCTAGNGNSDSNLTTYSRPADCIANYNNQLDNKQTNLMLPESTVYGDVDLSNKINEMKTFNSPNLKDGRFVNPSGQPTPYATTQLIQSNLSNNMNNGSGDSGEKHWKPLGQQKQEVAPVQYNIVEQNKLNKDYRANDTVPPTIPYNQSYDQNTGGSYNSSDRGSSTSGSQGHKKGARTPKVPKQGGMNWADLLPPPPAHPPPHSNSEEYNISVDESYDQEMPCPVPPARMYLQQDELEEEEDERGPTPPVRGAASSPAAVSYSHQSTATLTPSPQEELQPMLQDCPEETGHMQHQPDRRRQPVSPPPPPRPISPPHTYGYISGPLVSDMDTDAPEEEEDEADMEVAKMQTRRLLLRGLEQTPASSVGDLESSVTGSMINGWGSASEEDNISSGRSSVSSSDGSFFTDADFAQAVAAAAEYAGLKVARRQMQDAAGRRHFHASQCPRPTSPVSTDSNMSAAVMQKTRPAKKLKHQPGHLRRETYTDDLPPPPVPPPAIKSPTAQSKTQLEVRPVVVPKLPSMDARTDRSSDRKGSSYKGREVLDGRQVVDMRTNPGDPREAQEQQNDGKGRGNKAAKRDLPPAKTHLIQEDILPYCRPTFPTSNNPRDPSSSSSMSSRGSGSRQREQANVGRRNIAEMQVLGGYERGEDNNEELEETES

SEQ ID NO: 826986 - protein, 1651 aa, Homo sapiens; identical to SEQ ID NO: 826985

SEQ ID NO: 826987 - protein, 1651 aa, Homo sapiens; identical to SEQ ID NO: 826985

SEQ ID NO: 826988 - protein, 1612 aa, Homo sapiens
MIAEPAHFYLFGLICLCSGSRLRQEDFPPRIVEHPSDLIVSKGEPATLNCKAEGRPTPTIEWYKGGERVETDKDDPRSHRMLLPSGSLFFLRIVHGRKSRPDEGVYVCVARNYLGEAVSHNASLEVAILRDDFRQNPSDVMVAVGEPAVMECQPPRGHPEPTISWKKDGSPLDDKDERITIRGGKLMITYTRKSDAGKYVCVGTNMVGERESEVAELTVLERPSFVKRPSNLAVTVDDSAEFKCEARGDPVPTVRWRKDDGELPKSRYEIRDDHTLKIRKVTAGDMGSYTCVAENMVGKAEASATLTVQEPPHFVVKPRDQVVALGRTVTFQCEATGNPQPAIFWRREGSQNLLFSYQPPQSSSRFSVSQTGDLTITNVQRSDVGYYICQTLNVAGSIITKAYLEVTDVIADRPPPVIRQGPVNQTVAVDGTFVLSCVATGSPVPTILWRKDGVLVSTQDSRIKQLENGVLQIRYAKLGDTGRYTCIASTPSGEATWSAYIEVQEFGVPVQPPRPTDPNLIPSAPSKPEVTDVSRNTVTLSWQPNLNSGATPTSYIIEAFSHASGSSWQTVAENVKTETSAIKGLKPNAIYLFLVRAANAYGISDPSQISDPVKTQDVLPTSQGVDHKQVQRELGNAVLHLHNPTVLSSSSIEVHWTVDQQSQYIQGYKILYRPSGANHGESDWLVFEVRTPAKNSVVIPDLRKGVNYEIKARPFFNEFQGADSEIKFAKTLEEAPSAPPQGVTVSKNDGNGTAILVSWQPPPEDTQNGMVQEYKVWCLGNETRYHINKTVDGSTFSVVIPFLVPGIRYSVEVAASTGAGSGVKSEPQFIQLDAHGNPVSPEDQVSLAQQISDVVKQPAFIAGIGAACWIILMVFSIWLYRHRKKRNGLTSTYAGIRKVPSFTFTPTVTYQRGGEAVSSGGRPGLLNISEPAAQPWLADTWPNTGNNHNDCSISCCTAGNGNSDSNLTTYSRPADCIANYNNQLDNKQTNLMLPESTVYGDVDLSNKINEMKTFNSPNLKDGRFVNPSGQPTPYATTQLIQSNLSNNMNNGSGDSGEKHWKPLGQQKQEVAPVQYNIVEQNKLNKDYRANDTVPPTIPYNQSYDQNTGGSYNSSDRGSSTSGSQGHKKGARTPKVPKQGGMNWADLLPPPPAHPPPHSNSEEYNISVDESYDQEMPCPVPPARMYLQQDELEEEEDERGPTPPVRGAASSPAAVSYSHQSTATLTPSPQEELQPMLQDCPEETGHMQHQPDRRRQPVSPPPPPRPISPPHTYGYISGPLVSDMDTDAPEEEEDEADMEVAKMQTRRLLLRGLEQTPASSVGDLESSVTGSMINGWGSASEEDNISSGRSSVSSSDGSFFTDADFAQAVAAAAEYAGLKVARRQMQDAAGRRHFHASQCPRPTSPVSTDSNMSAAVMQKTRPAKKLKHQPGHLRRETYTDDLPPPPVPPPAIKSPTAQSKTQLEVRPVVVPKLPSMDARTDRSSDRKGSSYKGREVLDGRQVVDMRTNPGDPREAQEQQNDGKGRGNKAAKRDLPPAKTHLIQEDILPYCRPTFPTSNNPRDPSSSSSMSSRGSGSRQREQANVGRRNIAEMQVLGGYERGEDNNEELEETES

SEQ ID NO: 826989 - protein, 1646 aa, Homo sapiens
  misc_feature (8)..(8): Xaa can be any naturally occurring amino acid
GISRFPRXFPSTRVDPISTPSSWHETVYRIHPRTMIAEPAHFYLFGLICLCSGSRLRQEDFPPRIVEHPSDLIVSKGEPATLNCKAEGRPTPTIEWYKGGERVETDKDDPRSHRMLLPSGSLFFLRIVHGRKSRPDEGVYVCVARNYLGEAVSHNASLEVAILRDDFRQNPSDVMVAVGEPAVMECQPPRGHPEPTISWKKDGSPLDDKDERITIRGGKLMITYTRKSDAGKYVCVGTNMVGERESEVAELTVLERPSFVKRPSNLAVTVDDSAEFKCEARGDPVPTVRWRKDDGELPKSRYEIRDDHTLKIRKVTAGDMGSYTCVAENMVGKAEASATLTVQEPPHFVVKPRDQVVALGRTVTFQCEATGNPQPAIFWRREGSQNLLFSYQPPQSSSRFSVSQTGDLTITNVQRSDVGYYICQTLNVAGSIITKAYLEVTDVIADRPPPVIRQGPVNQTVAVDGTFVLSCVATGSPVPTILWRKDGVLVSTQDSRIKQLENGVLQIRYAKLGDTGRYTCIASTPSGEATWSAYIEVQEFGVPVQPPRPTDPNLIPSAPSKPEVTDVSRNTVTLSWQPNLNSGATPTSYIIEAFSHASGSSWQTVAENVKTETSAIKGLKPNAIYLFLVRAANAYGISDPSQISDPVKTQDVLPTSQGVDHKQVQRELGNAVLHLHNPTVLSSSSIEVHWTVDQQSQYIQGYKILYRPSGANHGESDWLVFEVRTPAKNSVVIPDLRKGVNYEIKARPFFNEFQGADSEIKFAKTLEEAPSAPPQGVTVSKNDGNGTAILVSWQPPPEDTQNGMVQEYKVWCLGNETRYHINKTVDGSTFSVVIPFLVPGIRYSVEVAASTGAGSGVKSEPQFIQLDAHGNPVSPEDQVSLAQQISDVVKQPAFIAGIGAACWIILMVFSIWLYRHRKKRNGLTSTYAGIRKVPSFTFTPTVTYQRGGEAVSSGGRPGLLNISEPAAQPWLADTWPNTGNNHNDCSISCCTAGNGNSDSNLTTYSRPADCIANYNNQLDNKQTNLMLPESTVYGDVDLSNKINEMKTFNSPNLKDGRFVNPSGQPTPYATTQLIQSNLSNNMNNGSGDSGEKHWKPLGQQKQEVAPVQYNIVEQNKLNKDYRANDTVPPTIPYNQSYDQNTGGSYNSSDRGSSTSGSQGHKKGARTPKVPKQGGMNWADLLPPPPAHPPPHSNSEEYNISVDESYDQEMPCPVPPARMYLQQDELEEEEDERGPTPPVRGAASSPAAVSYSHQSTATLTPSPQEELQPMLQDCPEETGHMQHQPDRRRQPVSPPPPPRPISPPHTYGYISGPLVSDMDTDAPEEEEDEADMEVAKMQTRRLLLRGLEQTPASSVGDLESSVTGSMINGWGSASEEDNISSGRSSVSSSDGSFFTDADFAQAVAAAAEYAGLKVARRQMQDAAGRRHFHASQCPRPTSPVSTDSNMSAAVMQKTRPAKKLKHQPGHLRRETYTDDLPPPPVPPPAIKSPTAQSKTQLEVRPVVVPKLPSMDARTDRSSDRKGSSYKGREVLDGRQVVDMRTNPGDPREAQEQQNDGKGRGNKAAKRDLPPAKTHLIQEDILPYCRPTFPTSNNPRDPSSSSSMSSRGSGSRQREQANVGRRNIAEMQVLGGYERGEDNNEELEETES

SEQ ID NO: 826990 - protein, 1544 aa, Homo sapiens
MIAEPAHFYLFGLICLCSGSRLRQEDFPPRIVEHPSDLIVSKGEPATLNCKAEGRPTPTIEWYKGGERVETDKDDPRSHRMLLPSGSLFFLRIVHGRKSRPDEGVYVCVARNYLGEAVSHNASLEVAILRDDFRQNPSDVMVAVGEPAVMECQPPRGHPEPTISWKKDGSPLDDKDERITIRGGKLMITYTRKSDAGKYVCVGTNMVGERESEVAELTVLERPSFVKRPSNLAVTVDDSAEFKCEARGDPVPTVRWRKDDGELPKSRYEIRDDHTLKIRKVTAGDMGSYTCVAENMVGKAEASATLTVQEPPHFVVKPRDQVVALGRTVTFQCEATGNPQPAIFWRREGSQNLLFSYQPPQSSSRFSVSQTGDLTITNVQRSDVGYYICQTLNVAGSIITKAYLEVTDVIADRPPPVIRQGPVNQTVAVDGTFVLSCVATGSPVPTILWRKDGVLVSTQDSRIKQLENGVLQIRYAKLGDTGRYTCIASTPSGEATWSAYIEVQEFGVPVQPPRPTDPNLIPSAPSKPEVTDVSRNTVTLSWQPNLNSGATPTSYIIEAFSHASGSSWQTVAENVKTETSAIKGLKPNAIYLFLVRAANAYGISDPSQISDPVKTQDVLPTSQGVDHKQVQRELGNAVLHLHNPTVLSSSSIEVHWTVDQQSQYIQGYKILYRPSGANHGESDWLVFEVRTPAKNSVVIPDLRKGVNYEIKARPFFNEFQGADSEIKFAKTLEEAPSAPPQGVTVSKNDGNGTAILVSWQPPPEDTQNGMVQEYKVWCLGNETRYHINKTVDGSTFSVVIPFLVPGIRYSVEVAASTGAGSGVKSEPQFIQLDAHGNPVSPEDQVSLAQQISDVVKQPAFIAGIGAACWIILMVFSIWLYRHRKKRNGLTSTYAGIRKVPSFTFTPTVTYQRGGEAVSSGGRPGLLNISEPAAQPWLADTWPNTGNNHNDCSISCCTAGNGNSDSNLTTYSRPADCIANYNNQLDNKQTNLMLPESTVYGDVDLSNKINEMKTFNSPNLKDGRFVNPSGQPTPYATTQLIQSNLSNNMNNGSGDSGEKHWKPLGQQKQEVAPVQYNIVEQNKLNKDYRANDTVPPTIPYNQSYDQNTGGSYNSSDRGSSTSGSQGHKKGARTPKVPKQGGMNWADLLPPPPAHPPPHSNSEEYNISVDESYDQEMPCPVPPARMYLQQDELEEEEDERGPTPPVRGAASSPAAVSYSHQSTATLTPSPQEELQPMLQDCPEETGHMQHQPDRRRQPVSPPPPPRPISPPHTYGYISGPLVSDMDTDAPEEEEDEADMEVAKMQTRRLLLRGLEQTPASSVGDLESSVTGSMINGWGSASEEDNISSGRSSVSSSDGSFFTDADFAQAVAAAAEYAGLKVARRQMQDAAGRRHFHASQCPRPTSPVSTDSNMSAAVMQKTRPAKKLKHQPGHLRRETYTDDLPPPPVPPPAIKSPTAQSKTQLEVRPVVVPKLPSMDARTDRSSDRKGSSYKGREVLDGRQVVDMRTNPGDPREAQEQQNDGKGRGNKAAKRDLPPAKTHLIQGN

SEQ ID NO: 826991 - protein, 129 aa, Homo sapiens
MIAEPAHFYLFGLICLCSGSRLRQEDFPPRIVEHPSDLIVSKGEPATLNCKAEGRPTPTIEWYKGGERVETDKDDPRSHRMLLPSGSLFFLRIVHGRKSRPDEGVYVCVARNYLGEAVSHNASLEVASK

SEQ ID NO: 826992 - protein, 66 aa, Homo sapiens
LVFEVRTPAKNSVVIPDLRKGVNYEIKARPFFNEFQGADSEIKFAKTLEEGKYDEAFDFHALQYIC

SEQ ID NO: 826993 - protein, 397 aa, Homo sapiens [sequence omitted]

SEQ ID NO: 826994 - protein, 397 aa, Homo sapiens [sequence omitted]

SEQ ID NO: 826995 - protein, 116 aa, Homo sapiens
PPFPPPPPPPPTLLHTPPSLIPTYQPWGSSAKNYFHYNQSYPPTYNVKDMLVPTAVWSGGHDWLADVYDVNILLTQITNLVFHESIPEWEHLDFIWGLDAPWRLYNKIINLMRKYQ

SEQ ID NO: 826996 - protein, 178 aa, Homo sapiens
MRFLGLVVCLVLWTLHSEGSGGKLTAVDPETNMNVSEIISYWGFPSEEYLVETEDGYILCLNRIPHGRKNHSDKGPKPVVFLQHGLLADSSNWVTNLANSSLGFILADAGFDVWMGNSRGNTWSRKHKTLSVSQDEFWAFSYDEMAKYDLPASINFILNKTGQEQVYYVGHSQGTTIG

SEQ ID NO: 826997 - protein, 289 aa, Homo sapiens
MRFLGLVVCLVLWTLHSEGSGGKLTAVDPETNMNVSEIISYWGFPSEEYLVETEDGYILCLNRIPHGRKNHSDKGPKPVVFLQHGLLADSSNWVTNLANSSLGFILADAGFDVWMGNSRGNTWSRKHKTLSVSQDEFWAFSYDEMAKYDLPASINFILNKTGQEQVYYVGHSQGTTIGFIAFSQIPELAKRIKMFFALGPVASVAFCTSPMAKLGRLPDHLIKDLFGDKEFLPQSAFLKWLGTHVCTHVILKELCGNLCFLLCGFNERNLNMSRVDVYTTHSPCSFSPK

SEQ ID NO: 826998 - protein, 397 aa, Homo sapiens [sequence omitted]

SEQ ID NO: 826999 - protein, 379 aa, Homo sapiens
MRFLGLVVCLVLWTLHSEGSGGKLTAVDPETNMNVSEIISYWGFPSEEYLVETEDGYILCLNRIPHGRKNHSDKGPKPVVFLQHGLLADSSNWVTNLANSSLGFILADAGFDVWMGNSRGNTWSRKHKTLSVSQDEFWAFSYDEMAKYDLPASINFILNKTGQEQVYYVGHSQGTTIGFIAFSQIPELAKRIMAKLGRLPDHLIKDLFGDKEFLPQSAFLKWLGTHVCTHVILKELCGNLCFLLCGFNERNLNMSRVDVYTTHSPAGTSVQNMLHWSQAVKFQKFQAFDWGSSAKNYFHYNQSYPPTYNVKDMLVPTAVWSGGHDWLADVYDVNILLTQITNLVFHESIPEWEHLDFIWGLDAPWRLYNKIINLMRKYQ

SEQ ID NO: 827000 - protein, 397 aa, Homo sapiens [sequence omitted]

SEQ ID NO: 827001 - protein, 320 aa, Homo sapiens
MRFLGLVVCLVLWTLHSEGSGGKLTAVDPETNMNVSEIISYWGFPSEEYLVETEDGYILCLNRIPHGRKNHSDKGPKPVVFLQHGLLADSSNWVTNLANSSLGFILADAGFDVWMGNSRGNTWSRKHKTLSVSQDEFWAFSYDEMAKYDLPASINFILNKTGQEQVYYVGHSQGTTIGFIAFSQIPELAKRIKMFFALGPVASVAFCTSPMAKLGRLPDHLIKDLFGDKEFLPQSAFLKWLGTHVCTHVILKELCGNLCFLLCGFNERNLNMSRVDVYTTHSPAGTSVQNMLHWSQAVKFQKFQAFEFFATVHIAAALRT

SEQ ID NO: 827002 - protein, 179 aa, Homo sapiens
MRFLGLVVCLVLWTLHSEGSGGKLTAVDPETNMNVSEIISYWGFPSEEYLVETEDGYILCLNRIPHGRKNHSDKGPKPVVFLQHGLLADSSNWVTNLANSSLGFILADAGFDVWMGNSRGNTWSRKHKTLSVSQDEFWAFSYDEMAKYDLPASINFILNKTGQEQVYYVGHSQGTTIGL

SEQ ID NO: 827003 - protein, 226 aa, Homo sapiens
MDWGTLQTILGGVNKHSTSIGKIWLTVLFIFRIMILVVAAKEVWGDEQADFVCNTLQPGCKNVCYDHYFPISHIRLWALQLIFVSTPALLVAMHVAYRRHEKKRKFIKGEIKSEFKDIEEIKTQKVRIEGSLWWTYTSSIFFRVIFEAAFMYVFYVMYDGFSMQRLVKCNAWPCPNTVDCFVSRPTEKTVFTVFMIAVSGICILLNVTELCYLLIRYCSGKSKKPV

SEQ ID NO: 827004 - protein, 148 aa, Homo sapiens
MDWGTLQTILGGVNKHSTSIGKIWLTVLFIFRIMILVVAAKEVWGDEQADFVCNTLQPGCKNVCYDHYFPISHIRLWALQLIFVSTPALLVAMHVAYRRHEKKRKFIKGEIKSEFKDIEEISSSGSSSKPPSCTSSMSCTTASPCSGW

SEQ ID NO: 827005 - protein, 226 aa, Homo sapiens; identical to SEQ ID NO: 827003

SEQ ID NO: 827006 - protein, 261 aa, Homo sapiens; identical to SEQ ID NO: 767500

SEQ ID NO: 827007 - protein, 124 aa, Homo sapiens
MAGPELLLDSNIRLWVVLPIVIITFFVGMIRHYVSILLQSDKKLTQEQVSDSQVLIRSRVLRENGKYIPKQSFLTRKYYFNNPVWRELHTGHLIYKCGGIDKRTIEKFEKEAAEMGQGSFKYAW

SEQ ID NO: 827008 - protein, 87 aa, Homo sapiens
PGSPQVGLRPFTSAGPMLARAHSRLIRARFRDSPWLSPQTLSSLSTEWEALELTDHQWALDDVEEELMAKDLHFEGMFKKELQTSIF

SEQ ID NO: 827009 - protein, 261 aa, Homo sapiens; identical to SEQ ID NO: 767500

SEQ ID NO: 827010 - protein, 299 aa, Homo sapiens
MAGPELLLDSNIRLWVVLPIVIITFFVGMIRHYVSILLQSDKKLTQEQVSDRKYLSGLVQWLTPIIPALWGAEMGGSLEPRNLRPTLAACQVLIRSRVLRENGKYIPKQSFLTRKYYFNNPEDGFFKKTKRKVVPPSPMTDPTMLTDMMKGNVTNVLPMILIGGWINMTFSGFVTTKVPFPLTLRFKPMLQQGIELLTLDASWVSSASWYFLNVFGLRSIYSLILGQDNAADQSRMMQEQMTGAAMAMPADTNKAFKTEWEALELTDHQWALDDVEEELMAKDLHFEGMFKKELQTSIF

SEQ ID NO: 827011 - protein, 156 aa, Homo sapiens
MLTDMMKGNVTNVLPMILIGGWINMTFSGFVTTKVPFPLTLRFKPMLQQGIELLTLDASWVSSASWYFLNVFGLRSIYSLILGQDNAADQSRMMQEQMTGAAMAMPADTNKAFKTEWEALELTDHQWALDDVEEELMAKDLHFEGMFKKELQTSIF

SEQ ID NO: 827012 - protein, 236 aa, Homo sapiens
MAGPELLLDSNIRLWVVLPIVIITFFVGMIRHYVSILLQSDKKLTQEQVSDSQVLIRSRVLRENGKYIPKQSFLTRKYYFNNPEDGFFKKTKRKVVPPSPMTDPTMLTDMMKGNVTNVLPMILIGGWINMTFSGFVTTKVPFPLTLRFKPMLQQGIELLTLDASWVSSASWYFLNVFGLRTAMAMPADTNKAFKTEWEALELTDHQWALDDVEEELMAKDLHFEGMFKKELQTSIF

SEQ ID NO: 827013 - protein, 111 aa, Homo sapiens
MAGPELLLDSNIRLWVVLPIVIITFFVGMIRHYVSILLQSDKKLTQEQVSDSQVLIRSRVLRENGKYIPKQSFLTRKYYFNNPEDGFFKKTKRKVVPPSPMTGMFVPFTHL

SEQ ID NO: 827014 - protein, 261 aa, Homo sapiens; identical to SEQ ID NO: 767500

SEQ ID NO: 827015 - protein, 83 aa, Homo sapiens
MAGPELLLDSNIRLWVVLPIVIITFFVGMIRHYVSILLQSDKKLTQEQVSDSQVLIRSRVLRENGKYIPKQSFLTRIFQPQRW

SEQ ID NO: 827016 - protein, 107 aa, Homo sapiens
PSHPFVEKSARCVTASHRVTFRTSHQAFWVLGFFHYTTAITLSFCSISFRTDQSQHPTLERTLRSQLTGRAWWLMPVLPALWEAEADGSRGQEIETILANMVKPRLY

SEQ ID NO: 827017 - protein, 262 aa, Homo sapiens
MAGPELLLDSNIRLWVVLPIVIITFFVGMIRHYVSILLQSDKKLTQEQVSDSQVLIRSRVLRENGKYIPKQSFLTRKYYFNNPEDGFFKKTKRKVVPPSPMTDPTMLTDMMKGNVTNVLPMILIGGWINMTFSGFVTTKVPFPLTLRFKPMLQQGIELLTLDASWVSSASWYFLNVFGLRSIYSLILGQDNAADQSRMMQEQMTGAAMAMPADTNKAFKVYSFTFQSCSNALKGVTKSYFKNSFLEGSVVWFHRFNLNLVKT

SEQ ID NO: 827018 - protein, 226 aa, Homo sapiens
MGGSLEPRNLRPTLAACQVLIRSRVLRENGKYIPKQSFLTRKYYFNNPEDGFFKKTKRKVVPPSPMTDPTMLTDMMKGNVTNVLPMILIGGWINMTFSGFVTTKVPFPLTLRFKPMLQQGIELLTLDASWVSSASWYFLNVFGLRSIYSLILGQDNAADQSRMMQEQMTGAAMAMPADTNKAFKTEWEALELTDHQWALDDVEEELMAKDLHFEGMFKKELQTSIF

SEQ ID NO: 827019 - protein, 236 aa, Homo sapiens; identical to SEQ ID NO: 827012

SEQ ID NO: 827020 - protein, 108 aa, Homo sapiens
PASEAVVQFSNLCEAHSSPWVLGCLLSPGTHVSVSYATAADQSRMMQEQMTGAAMAMPADTNKAFKTEWEALELTDHQWALDDVEEELMAKDLHFEGMFKKELQTSIF

SEQ ID NO: 827021 - protein, 427 aa, Homo sapiens
MTLVTAGGAWTGPGCWHEVKDEESSSEQSISIAVSHVNTSKAGLPAQTALPCDICGPILKDILHLDEHQGTHHGLKLHTCGACGRQFWFSANLHQYQKCYSIEQPLRRDKSEASIVKNCTVSKEPHPSEKPFTCKEEQKNFQATLGGCQQKAIHSKRKTHRSTESGDAFHGEQMHYKCSECGKAFSRKDTLVQHQRIHSGEKPYECSECGKAFSRKATLVQHQRIHTGERPYECSECGKTFSRKDNLTQHKRIHTGEMPYKCNECGKYFSHHSNLIVHQRVHNGARPYKCSDCGKVFRHKSTLVQHESIHTGENPYDCSDCGKSFGHKYTLIKHQRIHTESKPFECIECGKFFSRSSDYIAHQRVHTGERPFVCSKCGKDFIRTSHLVRHQRVHTGERPYECSECGKAYSLSSHLNRHQKVHTAGRL

SEQ ID NO: 827022 - protein, 505 aa, Homo sapiens
GIFLAVDILSALRWNHRSRSSGLLGGSEVTEAGGCGRSRCSLCGVARQRRPRLRPRGRTTAVPGSRDLGPPRGSGWSTNCDGGGRGDGPGAGCWHEVKDEESSSEQSISIAVSHVNTSKAGLPAQTALPCDICGPILKDILHLDEHQGTHHGLKLHTCGACGRQFWFSANLHQYQKCYSIEQPLRRDKSEASIVKNCTVSKEPHPSEKPFTCKEEQKNFQATLGGCQQKAIHSKRKTHRSTESGDAFHGEQMHYKCSECGKAFSRKDTLVQHQRIHSGEKPYECSECGKAFSRKATLVQHQRIHTGERPYECSECGKTFSRKDNLTQHKRIHTGEMPYKCNECGKYFSHHSNLIVHQRVHNGARPYKCSDCGKVFRHKSTLVQHESIHTGENPYDCSDCGKSFGHKYTLIKHQRIHTESKPFECIECGKFFSRSSDYIAHQRVHTGERPFVCSKCGKDFIRTSHLVRHQRVHTGERPYECSECGKAYSLSSHLNRHQKVHTAGRL

SEQ ID NO: 827023 - protein, 1912 aa, Homo sapiens
MVHVARLLLLLLTFFLRTDAETPPRFTRTPVDQTGVSGGVASFICQATGDPRPKIVWNKKGKKVSNQRFEVIEFDDGSGSVLRIQPLRTPRDEAIYECVASNNVGEISVSTRLTVLREDQIPRGFPTIDMGPQLKVVERTRTATMLCAASGNPDPEITWFKDFLPVDTSNNNGRIKQLRSESIGGTPIRGALQIEQSEESDQGKYECVATNSAGTRYSAPANLYVRELREVRRVPPRFSIPPTNHEIMPGGSVNITCVAVGSPMPYVKWMLGAEDLTPEDDMPIGRNVLELNDVRQSANYTCVAMSTLGVIEAIAQITVKALPKPPGTPVVTESTATSITLTWDSGNPEPVSYYIIQHKPKNSEELYKEIDGVATTRYSVAGLSPYSDYEFRVVAVNNIGRGPPSEPVLTQTSEQAPSSAPRDVQARMLSSTTILVQWKEPEEPNGQIQGYRVYYTMDPTQHVNNWMKHNVADSQITTIGNLVPQKTYSVKVLAFTSIGDGPLSSDIQVITQTGVPGQPLNFKAEPESETSILLSWTPPRSDTIANYELVYKDGEHGEEQRITIEPGTSYRLQGLKPNSLYYFRLAARSPQGLGASTAEISARTMQSKPSAPPQDISCTSPSSTSILVSWQPPPVEKQNGIITEYSIKYTAVDGEDDKPHEILGIPSDTTKYLLEQLEKWTEYRITVTAHTDVGPGPESLSVLIRTNEDVPSGPPRKVEVEAVNSTSVKVSWRSPVPNKQHGQIRGYQVHYVRMENGEPKGQPMLKDVMLADAQWEFDDTTEHDMIISGLQPETSYSLTVTAYTTKGDGARSKPKLVSTTGAVPGKPRLVINHTQMNTALIQWHPPVDTFGPLQGYRLKFGRKDMEPLTTLEFSEKEDHFTATDIHKGASYVFRLSARNKVGFGEEMVKEISIPEEVPTGFPQNLHSEGTTSTSVQLSWQPPVLAERNGIITKYTLLYRDINIPLLPMEQLIVPADTTMTLTGLKPDTTYDVKVRAHTSKGPGPYSPSVQFRTLPVDQVFAKNFHVKAVMKTSVLLSWEIPENYNSAMPFKILYDDGKMVEEVDGRATQKLIVNLKPEKSYSFVLTNRGNSAGGLQHRVTAKTAPDVLRTKPAFIGKTNLDGMITVQLPEVPANENIKGYYIIIVPLKKSRGKFIKPWESPDEMELDELLKEISRKRRSIRYGREVELKPYIAAHFDVLPTEFTLGDDKHYGGFTNKQLQSGQEYVFFVLAVMEHAESKMYATSPYSDPVVSMDLDPQPITDEEEGLIWVVGPVLAVVFIICIVIAILLYKRKRAESDSRKSSIPNNKEIPSHHPTDPVELRRLNFQTPGMASHPPIPILELADHIERLKANDNLKFSQEYESIDPGQQFTWEHSNLEVNKPKNRYANVIAYDHSRVLLSAIEGIPGSDYVNANYIDGYRKQNAYIATQGSLPETFGDFWRMIWEQRSATVVMMTKLEERSRVKCDQYWPSRGTETHGLVQVTLLDTVELATYCVRTFALYKNGSSEKREVRQFQFTAWPDHGVPEHPTPFLAFLRRVKTCNPPDAGPMVVHCSAGVGRTGCFIVIDAMLERIKHEKTVDIYGHVTLMRAQRNYMVQTEDQYIFIHDALLEAVTCGNTEVPARNLYAYIQKLTQIETGENVTGMELEFKRLASSKAHTSRFISANLPCNKFKNRLVNIMPYESTRVCLQPIRGVEGSDYINASFIDGYRQQKAYIATQGPLAETTEDFWRMLWEHNSTIVVMLTKLREMGREKCHQYWPAERSARYQYFVVDPMAEYNMPQYILREFKVTDARDGQSRTVRQFQFTDWPEQGVPKSGEGFIDFIGQVHKTKEQFGQDGPISVHCSAGVGRTGVFITLSIVLERMRYEGVVDIFQTVKMLRTQRPAMVQTEDQYQFSYRAALEYLGSFDHYAT

SEQ ID NO: 827024 - protein, 1912 aa, Homo sapiens; identical to SEQ ID NO: 827023

SEQ ID NO: 827025 - protein, 1885 aa, Homo sapiens
MVHVARLLLLLLTFFLRTDAETPPRFTRTPVDQTGVSGGVASFICQATGDPRPKIVWNKKGKKVSNQRFEVIEFDDGSGSVLRIQPLRTPRDEAIYECVASNNVGEISVSTRLTVLREDQIPRGFPTIDMGPQLKVVERTRTATMLCAASGNPDPEITWFKDFLPVDTSNNNGRIKQLRSGALQIEQSEESDQGKYECVATNSAGTRYSAPANLYVRELREVRRVPPRFSIPPTNHEIMPGGSVNITCVAVGSPMPYVKWMLGAEDLTPEDDMPIGRNVLELNDVRQSANYTCVAMSTLGVIEAIAQITVKALPKPPGTPVVTESTATSITLTWDSGNPEPVSYYIIQHKPKNSEELYKEIDGVATTRYSVAGLSPYSDYEFRVVAVNNIGRGPPSEPVLTQTSEQAPSSAPRDVQARMLSSTTILVQWKEPEEPNGQIQGYRVYYTMDPTQHVNNWMKHNVADSQITTIGNLVPQKTYSVKVLAFTSIGDGPLSSDIQVITQTGVPGQPLNFKAEPESETSILLSWTPPRSDTIANYELVYKDGEHGEEQRITIEPGTSYRLQGLKPNSLYYFRLAARSPQGLGASTAEISARTMQSKPSAPPQDISCTSPSSTSILVSWQPPPVEKQNGIITEYSIKYTAVDGEDDKPHEILGIPSDTTKYLLEQLEKWTEYRITVTAHTDVGPGPESLSVLIRTNEDVPSGPPRKVEVEAVNSTSVKVSWRSPVPNKQHGQIRGYQVHYVRMENGEPKGQPMLKDVMLADAQWEFDDTTEHDMIISGLQPETSYSLTVTAYTTKGDGARSKPKLVSTTGAVPGKPRLVINHTQMNTALIQWHPPVDTFGPLQGYRLKFGRKDMEPLTTLEFSEKEDHFTATDIHKGASYVFRLSARNKVGFGEEMVKEISIPEEVPTGFPQNLHSEGTTSTSVQLSWQPPVLAERNGIITKYTLLYRDINIPLLPMEQLIVPADTTMTLTGLKPDTTYDVKVRAHTSKGPGPYSPSVQFRTLPVDQVFAKNFHVKAVMKTSVLLSWEIPENYNSAMPFKILYDDGKMVEEVDGRATQKLIVNLKPEKSYSFVLTNRGNSAGGLQHRVTAKTAPDVLRTKPAFIGKTNLDGMITVQLPEVPANENIKGYYIIIVPLKKSRGKFIKPWESPDEMELDELLKEISRKRRSIRYGREVELKPYIAAHFDVLPTEFTLGDDKHYGGFTNKQLQSGQEYVFFVLAVMEHAESKMYATSPYSDPVVSMDLDPQPITDEEEGLIWVVGPVLAVVFIICIVIAILLYKRKRAESDSRKSSIPNNKEIPSHHPTDPVELRRLNFQTPGMASHPPIPILELADHIERLKANDNLKFSQEYESIDPGQQFTWEHSNLEVNKPKNRYANVIAYDHSRVLLSAIEGIPGSDYVNANYIDGYRKQNAYIATQGSLPETFGDFWRMIWEQRSATVVMMTKLEERSRVKCDQYWPSRGTETHGLVQVTLLDTVELATYCVRTFALYKNGSSEKREVRQFQFTAWPDHGVPEHPTPFLAFLRRVKTCNPPDAGPMVVHCSAGVGRTGCFIVIDAMLERIKHEKTVDIYGHVTLMRAQRNYMVQTEDQYIFIHDALLEAVTCGNTEVPARNLYAYIQKLTQIETGENVTGMELEFKRLASSKAHTSRFISANLPCNKFTIRGVEGSDYINASFIDGYRQQKAYIATQGPLAETTEDFWRMLWEHNSTIVVMLTKLREMGREKCHQYWPAERSARYQYFVVDPMAEYNMPQYILREFKVTDARDGQSRTVRQFQFTDWPEQGVPKSGEGFIDFIGQVHKTKEQFGQDGPISVHCSAGVGRTGVFITLSIVLERMRYEGVVDIFQTVKMLRTQRPAMVQTEDQYQFSYRAALEYLGSFDHYAT

SEQ ID NO: 827026 - protein, 1885 aa, Homo sapiens
MVHVARLLLLLLTFFLRTDAETPPRFTRTPVDQTGVSGGVASFICQATGDPRPKIVWNKKGKKVSNQRFEVIEFDDGSGSVLRIQPLRTPRDEAIYECVASNNVGEISVSTRLTVLREDQIPRGFPTIDMGPQLKVVERTRTATMLCAASGNPDPEITWFKDFLPVDTSNNNGRIKQLRSGALQIEQSEESDQGKYECVATNSAGTRYSAPANLYVRELREVRRVPPRFSIPPTNHEIMPGGSVNITCVAVGSPMPYVKWMLGAEDLTPEDDMPIGRNVLELNDVRQSANYTCVAMSTLGVIEAIAQITVKALPKPPGTPVVTESTATSITLTWDSGNPEPVSYYIIQHKPKNSEELYKEIDGVATTRYSVAGLSPYSDYEFRVVAVNNIGRGPPSEPVLTQTSEQAPSSAPRDVQARMLSSTTILVQWKEPEEPNGQIQGYRVYYTMDPTQHVNNWMKHNVADSQITTIGNLVPQKTYSVKVLAFTSIGDGPLSSDIQVITQTGVPGQPLNFKAEPESETSILLSWTPPRSDTIANYELVYKDGEHGEEQRITIEPGTSYRLQGLKPNSLYYFRLAARSPQGLGASTAEISARTMQSKPSAPPQDISCTSPSSTSILVSWQPPPVEKQNGIITEYSIKYTAVDGEDDKPHEILGIPSDTTKYLLEQLEKWTEYRITVTAHTDVGPGPESLSVLIRTNEDVPSGPPRKVEVEAVNSTSVKVSWRSPVPNKQHGQIRGYQVHYVRMENGEPKGQPMLKDVMLADAQWEFDDTTEHDMIISGLQPETSYSLTVTAYTTKGDGARSKPKLVSTTGAVPGKPRLVINHTQMNTALIQWHPPVDTFGPLQGYRLKFGRKDMEPLTTLEFSEKEDHFTATDIHKGASYVFRLSARNKVGFGEEMVKEISIPEEVPTGFPQNLHSEGTTSTSVQLSWQPPVLAERNGIITKYTLLYRDINIPLLPMEQLIVPADTTMTLTGLKPDTTYDVKVRAHTSKGPGPYSPSVQFRTLPVDQVFAKNFHVKAVMKTSVLLSWEIPENYNSAMPFKILYDDGKMVEEVDGRATQKLIVNLKPEKSYSFVLTNRGNSAGGLQHRVTAKTAPDVLRTKPAFIGKTNLDGMITVQLPEVPANENIKGYYIIIVPLKKSRGKFIKPWESPDEMELDELLKEISRKRRSIRYGREVELKPYIAAHFDVLPTEFTLGDDKHYGGFTNKQLQSGQEYVFFVLAVMEHAESKMYATSPYSDPVVSMDLDPQPITDEEEGLIWVVGPVLAVVFIICIVIAILLYKSKPDRKRAESDSRVELRRLNFQTPGSDDSGYPGNLHSSSMASHPPIPILELADHIERLKANDNLKFSQEYESIDPGQQFTWEHSNLEVNKPKNRYANVIAYDHSRVLLSAIEGIPGSDYVNANYIDGYRKQNAYIATQGSLPETFGDFWRMIWEQRSATVVMMTKLEERSRVKCDQYWPSRGTETHGLVQVTLLDTVELATYCVRTFALYKNGSSEKREVRQFQFTAWPDHGVPEHPTPFLAFLRRVKTCNPPDAGPMVVHCSAGVGRTGCFIVIDAMLERIKHEKTVDIYGHVTLMRAQRNYMVQTEDQYIFIHDALLEAVTCGNTEVPARNLYAYIQKLTQIETGENVTGMELEFKRLASSKAHTSRFISANLPCNKFTIRGVEGSDYINASFIDGYRQQKAYIATQGPLAETTEDFWRMLWEHNSTIVVMLTKLREMGREKCHQYWPAERSARYQYFVVDPMAEYNMPQYILREFKVTDARDGQSRTVRQFQFTDWPEQGVPKSGEGFIDFIGQVHKTKEQFGQDGPISVHCSAGVGRTGVFITLSIVLERMRYEGVVDIFQTVKMLRTQRPAMVQTEDQYQFSYRAALEYLGSFDHYAT

SEQ ID NO: 827027 - protein, 1059 aa, Homo sapiens
MNTALIQWHPPVDTFGPLQGYRLKFGRKDMEPLTTLEFSEKEDHFTATDIHKGASYVFRLSARNKVGFGEEMVKEISIPEEVPTGFPQNLHSEGTTSTSVQLSWQPPVLAERNGIITKYTLLYRDINIPLLPMEQLIVPADTTMTLTGLKPDTTYDVKVRAHTSKGPGPYSPSVQFRTLPVDQVFAKNFHVKAVMKTSVLLSWEIPENYNSAMPFKILYDDGKMVEEVDGRATQKLIVNLKPEKSYSFVLTNRGNSAGGLQHRVTAKTAPDVLRTKPAFIGKTNLDGMITVQLPEVPANENIKGYYIIIVPLKKSRGKFIKPWESPDEMELDELLKEISRKRRSIRYGREVELKPYIAAHFDVLPTEFTLGDDKHYGGFTNKQLQSGQEYVFFVLAVMEHAESKMYATSPYSDPVVSMDLDPQPITDEEEGLIWVVGPVLAVVFIICIVIAILLYKRKRAESDSRKSSIPNNKEIPSHHPTDPVELRRLNFQTPGMASHPPIPILELADHIERLKANDNLKFSQEYESIDPGQQFTWEHSNLEVNKPKNRYANVIAYDHSRVLLSAIEGIPGSDYVNANYIDGYRKQNAYIATQGSLPETFGDFWRMIWEQRSATVVMMTKLEERSRVKCDQYWPSRGTETHGLVQVTLLDTVELATYCVRTFALYKNGSSEKREVRQFQFTAWPDHGVPEHPTPFLAFLRRVKTCNPPDAGPMVVHCSAGVGRTGCFIVIDAMLERIKHEKTVDIYGHVTLMRAQRNYMVQTEDQYIFIHDALLEAVTCGNTEVPARNLYAYIQKLTQIETGENVTGMELEFKRLASSKAHTSRFISANLPCNKFTIRGVEGSDYINASFIDGYRQQKAYIATQGPLAETTEDFWRMLWEHNSTIVVMLTKLREMGREKCHQYWPAERSARYQYFVVDPMAEYNMPQYILREFKVTDARDGQSRTVRQFQFTDWPEQGVPKSGEGFIDFIGQVHKTKEQFGQDGPISVHCSAGVGRTGVFITLSIVLERMRYEGVVDIFQTVKMLRTQRPAMVQTEDQYQFSYRAALEYLGSFDHYAT

SEQ ID NO: 827028 - protein, 1484 aa, Homo sapiens
MVHVARLLLLLLTFFLRTDAETPPRFTRTPVDQTGVSGGVASFICQATGDPRPKIVWNKKGKKVSNQRFEVIEFDDGSGSVLRIQPLRTPRDEAIYECVASNNVGEISVSTRLTVLREDQIPRGFPTIDMGPQLKVVERTRTATMLCAASGNPDPEITWFKDFLPVDTSNNNGRIKQLRSGALQIEQSEESDQGKYECVATNSAGTRYSAPANLYVRELREVRRVPPRFSIPPTNHEIMPGGSVNITCVAVGSPMPYVKWMLGAEDLTPEDDMPIGRNVLELNDVRQSANYTCVAMSTLGVIEAIAQITVKALPKPPGTPVVTESTATSITLTWDSGNPEPVSYYIIQHKPKNSEELYKEIDGVATTRYSVAGLSPYSDYEFRVVAVNNIGRGPPSEPVLTQTSEQAPSSAPRDVQARMLSSTTILVQWKEPEEPNGQIQGYRVYYTMDPTQHVNNWMKHNVADSQITTIGNLVPQKTYSVKVLAFTSIGDGPLSSDIQVITQTGVPGQPLNFKAEPESETSILLSWTPPRSDTIANYELVYKDGEHGEEQRITIEPGTSYRLQGLKPNSLYYFRLAARSPQGLGASTAEISARTMQSKPSAPPQDISCTSPSSTSILVSWQPPPVEKQNGIITEYSIKYTAVDGEDDKPHEILGIPSDTTKYLLEQLEKWTEYRITVTAHTDVGPGPESLSVLIRTNEDVPSGPPRKVEVEAVNSTSVKVSWRSPVPNKQHGQIRGYQVHYVRMENGEPKGQPMLKDVMLADAQWEFDDTTEHDMIISGLQPETSYSLTVTAYTTKGDGARSKPKLVSTTGAVPGKPRLVINHTQMNTALIQWHPPVDTFGPLQGYRLKFGRKDMEPLTTLEFSEKEDHFTATDIHKGASYVFRLSARNKVGFGEEMVKEISIPEEVPTGFPQNLHSEGTTSTSVQLSWQPPVLAERNGIITKYTLLYRDINIPLLPMEQLIVPADTTMTLTGLKPDTTYDVKVRAHTSKGPGPYSPSVQFRTLPVDQVFAKNFHVKAVMKTSVLLSWEIPENYNSAMPFKILYDDGKMVEEVDGRATQKLIVNLKPEKSYSFVLTNRGNSAGGLQHRVTAKTAPDVLRTKPAFIGKTNLDGMITVQLPEVPANENIKGYYIIIVPLKKSRGKFIKPWESPDEMELDELLKEISRKRRSIRYGREVELKPYIAAHFDVLPTEFTLGDDKHYGGFTNKQLQSGQEYVFFVLAVMEHAESKMYATSPYSDPVVSMDLDPQPITDEEEGLIWVVGPVLAVVFIICIVIAILLYKRKRAESDSRKSSIPNNKEIPSHHPTDPVELRRLNFQTPGMASHPPIPILELADHIERLKANDNLKFSQEYESIDPGQQFTWEHSNLEVNKPKNRYANVIAYDHSRVLLSAIEGIPGSDYVNANYIDGYRKQNAYIATQGSLPETFGDFWRMIWEQRSATVVMMTKLEERSRVRISIHLFPFKNFPSESLCCIFYSVQNLTFP

SEQ ID NO: 827029 - protein, 617 aa, Homo sapiens
MVHVARLLLLLLTFFLRTDAETPPRFTRTPVDQTGVSGGVASFICQATGDPRPKIVWNKKGKKVSNQRFEVIEFDDGSGSVLRIQPLRTPRDEAIYECVASNNVGEISVSTRLTVLREDQIPRGFPTIDMGPQLKVVERTRTATMLCAASGNPDPEITWFKDFLPVDTSNNNGRIKQLRSGALQIEQSEESDQGKYECVATNSAGTRYSAPANLYVRELREVRRVPPRFSIPPTNHEIMPGGSVNITCVAVGSPMPYVKWMLGAEDLTPEDDMPIGRNVLELNDVRQSANYTCVAMSTLGVIEAIAQITVKALPKPPGTPVVTESTATSITLTWDSGNPEPVSYYIIQHKPKNSEELYKEIDGVATTRYSVAGLSPYSDYEFRVVAVNNIGRGPPSEPVLTQTSEQAPSSAPRDVQARMLSSTTILVQWKEPEEPNGQIQGYRVYYTMDPTQHVNNWMKHNVADSQITTIGNLVPQKTYSVKVLAFTSIGDGPLSSDIQVITQTGVPGQPLNFKAEPESETSILLSWTPPRSDTIANYELVYKDGEHGEEQRITIEPGTSYRLQGLKPNSLYYFRLAARSPQGLGASTAEISARTMQSSRCLSLLTFCLFISSGRCC

SEQ ID NO: 827030 - protein, 202 aa, Homo sapiens
MVHVARLLLLLLTFFLRTDAETPPRFTRTPVDQTGVSGGVASFICQATGDPRPKIVWNKKGKKVSNQRFEVIEFDDGSGSVLRIQPLRTPRDEAIYECVASNNVGEISVSTRLTVLREDQIPRGFPTIDMGPQLKVVERTRTATMLCAASGNPDPEITWFKDFLPVDTSNNNGRIKQLRSGTDFSPSSLSLLLNGWSMFVMS

SEQ ID NO: 827031 - protein, 101 aa, Homo sapiens
LTWLNNTPCFPGIPGSDYVNANYIDGYRKQNAYIATQGSLPETFGDFWRMIWEQRSATVVMMTKLEERSRVRISIHLFPFKNFPSESLCCIFYSVQNLTFP

SEQ ID NO: 827032 - protein, 1912 aa, Homo sapiens; identical to SEQ ID NO: 827023

SEQ ID NO: 827033 - protein, 1903 aa, Homo sapiens
MVHVARLLLLLLTFFLRTDAETPPRFTRTPVDQTGVSGGVASFICQATGDPRPKIVWNKKGKKVSNQRFEVIEFDDGSGSVLRIQPLRTPRDEAIYECVASNNVGEISVSTRLTVLREDQIPRGFPTIDMGPQLKVVERTRTATMLCAASGNPDPEITWFKDFLPVDTSNNNGRIKQLRSGALQIEQSEESDQGKYECVATNSAGTRYSAPANLYVRELREVRRVPPRFSIPPTNHEIMPGGSVNITCVAVGSPMPYVKWMLGAEDLTPEDDMPIGRNVLELNDVRQSANYTCVAMSTLGVIEAIAQITVKALPKPPGTPVVTESTATSITLTWDSGNPEPVSYYIIQHKPKNSEELYKEIDGVATTRYSVAGLSPYSDYEFRVVAVNNIGRGPPSEPVLTQTSEQAPSSAPRDVQARMLSSTTILVQWKEPEEPNGQIQGYRVYYTMDPTQHVNNWMKHNVADSQITTIGNLVPQKTYSVKVLAFTSIGDGPLSSDIQVITQTGVPGQPLNFKAEPESETSILLSWTPPRSDTIANYELVYKDGEHGEEQRITIEPGTSYRLQGLKPNSLYYFRLAARSPQGLGASTAEISARTMQSKPSAPPQDISCTSPSSTSILVSWQPPPVEKQNGIITEYSIKYTAVDGEDDKPHEILGIPSDTTKYLLEQLEKWTEYRITVTAHTDVGPGPESLSVLIRTNEDVPSGPPRKVEVEAVNSTSVKVSWRSPVPNKQHGQIRGYQVHYVRMENGEPKGQPMLKDVMLADAQWEFDDTTEHDMIISGLQPETSYSLTVTAYTTKGDGARSKPKLVSTTGAVPGKPRLVINHTQMNTALIQWHPPVDTFGPLQGYRLKFGRKDMEPLTTLEFSEKEDHFTATDIHKGASYVFRLSARNKVGFGEEMVKEISIPEEVPTGFPQNLHSEGTTSTSVQLSWQPPVLAERNGIITKYTLLYRDINIPLLPMEQLIVPADTTMTLTGLKPDTTYDVKVRAHTSKGPGPYSPSVQFRTLPVDQVFAKNFHVKAVMKTSVLLSWEIPENYNSAMPFKILYDDGKMVEEVDGRATQKLIVNLKPEKSYSFVLTNRGNSAGGLQHRVTAKTAPDVLRTKPAFIGKTNLDGMITVQLPEVPANENIKGYYIIIVPLKKSRGKFIKPWESPDEMELDELLKEISRKRRSIRYGREVELKPYIAAHFDVLPTEFTLGDDKHYGGFTNKQLQSGQEYVFFVLAVMEHAESKMYATSPYSDPVVSMDLDPQPITDEEEGLIWVVGPVLAVVFIICIVIAILLYKRKRAESDSRKSSIPNNKEIPSHHPTDPVELRRLNFQTPGMASHPPIPILELADHIERLKANDNLKFSQEYESIDPGQQFTWEHSNLEVNKPKNRYANVIAYDHSRVLLSAIEGIPGSDYVNANYIDGYRKQNAYIATQGSLPETFGDFWRMIWEQRSATVVMMTKLEERSRVKCDQYWPSRGTETHGLVQVTLLDTVELATYCVRTFALYKNGSSEKREVRQFQFTAWPDHGVPEHPTPFLAFLRRVKTCNPPDAGPMVVHCSAGVGRTGCFIVIDAMLERIKHEKTVDIYGHVTLMRAQRNYMVQTEDQYIFIHDALLEAVTCGNTEVPARNLYAYIQKLTQIETGENVTGMELEFKRLASSKAHTSRFISANLPCNKFKNRLVNIMPYESTRVCLQPIRGVEGSDYINASFIDGYRQQKAYIATQGPLAETTEDFWRMLWEHNSTIVVMLTKLREMGREKCHQYWPAERSARYQYFVVDPMAEYNMPQYILREFKVTDARDGQSRTVRQFQFTDWPEQGVPKSGEGFIDFIGQVHKTKEQFGQDGPISVHCSAGVGRTGVFITLSIVLERMRYEGVVDIFQTVKMLRTQRPAMVQTEDQYQFSYRAALEYLGSFDHYAT

SEQ ID NO: 827034 - protein, 1141 aa, Homo sapiens
MENGEPKGQPMLKDVMLADAQWEFDDTTEHDMIISGLQPETSYSLTVTAYTTKGDGARSKPKLVSTTGAVPGKPRLVINHTQMNTALIQWHPPVDTFGPLQGYRLKFGRKDMEPLTTLEFSEKEDHFTATDIHKGASYVFRLSARNKVGFGEEMVKEISIPEEVPTGFPQNLHSEGTTSTSVQLSWQPPVLAERNGIITKYTLLYRDINIPLLPMEQLIVPADTTMTLTGLKPDTTYDVKVRAHTSKGPGPYSPSVQFRTLPVDQVFAKNFHVKAVMKTSVLLSWEIPENYNSAMPFKILYDDGKMVEEVDGRATQKLIVNLKPEKSYSFVLTNRGNSAGGLQHRVTAKTAPDVLRTKPAFIGKTNLDGMITVQLPEVPANENIKGYYIIIVPLKKSRGKFIKPWESPDEMELDELLKEISRKRRSIRYGREVELKPYIAAHFDVLPTEFTLGDDKHYGGFTNKQLQSGQEYVFFVLAVMEHAESKMYATSPYSDPVVSMDLDPQPITDEEEGLIWVVGPVLAVVFIICIVIAILLYKRKRAESDSRKSSIPNNKEIPSHHPTDPVELRRLNFQTPGMASHPPIPILELADHIERLKANDNLKFSQEYESIDPGQQFTWEHSNLEVNKPKNRYANVIAYDHSRVLLSAIEGIPGSDYVNANYIDGYRKQNAYIATQGSLPETFGDFWRMIWEQRSATVVMMTKLEERSRVKCDQYWPSRGTETHGLVQVTLLDTVELATYCVRTFALYKNGSSEKREVRQFQFTAWPDHGVPEHPTPFLAFLRRVKTCNPPDAGPMVVHCSAGVGRTGCFIVIDAMLERIKHEKTVDIYGHVTLMRAQRNYMVQTEDQYIFIHDALLEAVTCGNTEVPARNLYAYIQKLTQIETGENVTGMELEFKRLASSKAHTSRFISANLPCNKFTIRGVEGSDYINASFIDGYRQQKAYIATQGPLAETTEDFWRMLWEHNSTIVVMLTKLREMGREKCHQYWPAERSARYQYFVVDPMAEYNMPQYILREFKVTDARDGQSRTVRQFQFTDWPEQGVPKSGEGFIDFIGQVHKTKEQFGQDGPISVHCSAGVGRTGVFITLSIVLERMRYEGVVDIFQTVKMLRTQRPAMVQTEDQYQFSYRAALEYLGSFDHYAT

SEQ ID NO: 827035 - protein, 712 aa, Homo sapiens
LERLKKIRAQEGCVTSGAFVSSSCRIRHYGGFTNKQLQSGQEYVFFVLAVMEHAESKMYATSPYSDPVVSMDLDPQPITDEEEGLIWVVGPVLAVVFIICIVIAILLYKSKPDRKRAESDSRVELRRLNFQTPGSDDSGYPGNLHSSSMASHPPIPILELADHIERLKANDNLKFSQEYESIDPGQQFTWEHSNLEVNKPKNRYANVIAYDHSRVLLSAIEGIPGSDYVNANYIDGYRKQNAYIATQGSLPETFGDFWRMIWEQRSATVVMMTKLEERSRVKCDQYWPSRGTETHGLVQVTLLDTVELATYCVRTFALYKNGSSEKREVRQFQFTAWPDHGVPEHPTPFLAFLRRVKTCNPPDAGPMVVHCSAGVGRTGCFIVIDAMLERIKHEKTVDIYGHVTLMRAQRNYMVQTEDQYIFIHDALLEAVTCGNTEVPARNLYAYIQKLTQIETGENVTGMELEFKRLASSKAHTSRFISANLPCNKFTIRGVEGSDYINASFIDGYRQQKAYIATQGPLAETTEDFWRMLWEHNSTIVVMLTKLREMGREKCHQYWPAERSARYQYFVVDPMAEYNMPQYILREFKVTDARDGQSRTVRQFQFTDWPEQGVPKSGEGFIDFIGQVHKTKEQFGQDGPISVHCSAGVGRTGVFITLSIVLERMRYEGVVDIFQTVKMLRTQRPAMVQTEDQYQFSYRAALEYLGSFDHYAT

SEQ ID NO: 827036 - protein, 712 aa, Homo sapiens
MVHVARLLLLLLTFFLRTDAETPPRFTRTPVDQTGVSGGVASFICQATGDPRPKIVWNKKGKKVSNQRFEVIEFDDGSGSVLRIQPLRTPRDEAIYECVASNNVGEISVSTRLTVLREDQIPRGFPTIDMGPQLKVVERTRTATMLCAASGNPDPEITWFKDFLPVDTSNNNGRIKQLRSGALQIEQSEESDQGKYECVATNSAGTRYSAPANLYVRELREVRRVPPRFSIPPTNHEIMPGGSVNITCVAVGSPMPYVKWMLGAEDLTPEDDMPIGRNVLELNDVRQSANYTCVAMSTLGVIEAIAQITVKALPKPPGTPVVTESTATSITLTWDSGNPEPVSYYIIQHKPKNSEELYKEIDGVATTRYSVAGLSPYSDYEFRVVAVNNIGRGPPSEPVLTQTSEQAPSSAPRDVQARMLSSTTILVQWKEPEEPNGQIQGYRVYYTMDPTQHVNNWMKHNVADSQITTIGNLVPQKTYSVKVLAFTSIGDGPLSSDIQVITQTGVPGQPLNFKAEPESETSILLSWTPPRSDTIANYELVYKDGEHGEEQRITIEPGTSYRLQGLKPNSLYYFRLAARSPQGLGASTAEISARTMQSKPSAPPQDISCTSPSSTSILVSWQPPPVEKQNGIITEYSIKYTAVDGEDDKPHEILGIPSDTTKYLLEQLEKWTEYRITVTAHTDVGPGPESLSVLIRTNEDGMLPPLRQFAPF

SEQ ID NO: 827037 - protein, 768 aa, Homo sapiens
MVHVARLLLLLLTFFLRTDAETPPRFTRTPVDQTGVSGGVASFICQATGDPRPKIVWNKKGKKVSNQRFEVIEFDDGSGSVLRIQPLRTPRDEAIYECVASNNVGEISVSTRLTVLREDQIPRGFPTIDMGPQLKVVERTRTATMLCAASGNPDPEITWFKDFLPVDTSNNNGRIKQLRSGALQIEQSEESDQGKYECVATNSAGTRYSAPANLYVRELREVRRVPPRFSIPPTNHEIMPGGSVNITCVAVGSPMPYVKWMLGAEDLTPEDDMPIGRNVLELNDVRQSANYTCVAMSTLGVIEAIAQITVKALPKPPGTPVVTESTATSITLTWDSGNPEPVSYYIIQHKPKNSEELYKEIDGVATTRYSVAGLSPYSDYEFRVVAVNNIGRGPPSEPVLTQTSEQAPSSAPRDVQARMLSSTTILVQWKEPEEPNGQIQGYRVYYTMDPTQHVNNWMKHNVADSQITTIGNLVPQKTYSVKVLAFTSIGDGPLSSDIQVITQTGVPGQPLNFKAEPESETSILLSWTPPRSDTIANYELVYKDGEHGEEQRITIEPGTSYRLQGLKPNSLYYFRLAARSPQGLGASTAEISARTMQSKPSAPPQDISCTSPSSTSILVSWQPPPVEKQNGIITEYSIKYTAVDGEDDKPHEILGIPSDTTKYLLEQLEKWTEYRITVTAHTDVGPGPESLSVLIRTNEDVPSGPPRKVEVEAVNSTSVKVSWRSPVPNKQHGQIRGYQVHYVRMENGEPKGQPMLKDVMLADAQVSL

SEQ ID NO: 827038 - protein, 113 aa, Homo sapiens
MSLSAFTLFLALIGGTSGQYYDYDFPLSIYGQSSPNCAPECNCPESYPSAMYCDELKLKSVPMVPPGIKYLYLRNNQIDHIDEKAFENVTDLQWLILDHNLLENSKINRESFL

SEQ ID NO: 827039 - protein, 113 aa, Homo sapiens; identical to SEQ ID NO: 827038

SEQ ID NO: 827040 - protein, 113 aa, Homo sapiens; identical to SEQ ID NO: 827038

SEQ ID NO: 827041 - protein, 113 aa, Homo sapiens; identical to SEQ ID NO: 827038

SEQ ID NO: 827042 - protein, 113 aa, Homo sapiens; identical to SEQ ID NO: 827038

SEQ ID NO: 827043 - protein, 113 aa, Homo sapiens; identical to SEQ ID NO: 827038

SEQ ID NO: 827044 - protein, 113 aa, Homo sapiens; identical to SEQ ID NO: 827038

SEQ ID NO: 827045 - protein, 113 aa, Homo sapiens; identical to SEQ ID NO: 827038

SEQ ID NO: 827046 - protein, 370 aa, Homo sapiens
  misc_feature (25)..(25): Xaa can be any naturally occurring amino acid
  misc_feature (155)..(155): Xaa can be any naturally occurring amino acid
SLLAVCSFRRLVRSGFPGLPCQDSXDSNHLPKMSLSAFTLFLALIGGTSGQYYDYDFPLSIYGQSSPNCAPECNCPESYPSAMYCDELKLKSVPMVPPGIKYLYLGVPRFAPFGGRAFGIVAGLPWLFLGPPLLGPSRVPGGVFSSLAPLTRLPXARHALTESVGPLPKSLEDLQLTHNKITKLGSFEGLVNLTFIHLQHNRLKEDAVSAAFKGLKSLEYLDLSFNQIARLPSGLPVSLLTLYLDNNKISNIPDEYFKRFNALQYLRLSHNELADSGIPGNSFNVSSLVELDLSYNKLKNIPTVNENLENYYLEVNQLEKFDIKSFCKILGPLSYSKIKHLRLDGNRISETSLPPDMYECLRVANEVTLN

SEQ ID NO: 827047 - protein, 113 aa, Homo sapiens; identical to SEQ ID NO: 827038

SEQ ID NO: 827048 - protein, 113 aa, Homo sapiens; identical to SEQ ID NO: 827038

SEQ ID NO: 827049 - protein, 113 aa, Homo sapiens; identical to SEQ ID NO: 827038

SEQ ID NO: 827050 - protein, 113 aa, Homo sapiens; identical to SEQ ID NO: 827038

SEQ ID NO: 827051 - protein, 113 aa, Homo sapiens; identical to SEQ ID NO: 827038

SEQ ID NO: 827052 - protein, 113 aa, Homo sapiens; identical to SEQ ID NO: 827038

SEQ ID NO: 827053 - protein, 126 aa, Homo sapiens
MSLSAFTLFLALIGGTSGQYYDYDFPLSIYGQSSPNCAPECNCPESYPSAMYCDELKLKSVPMVPPGIKYLYLRNNQIDHIDEKAFENVTDLQWLILDHNLLENSKIPDRVCGPTSQISGGSAAYS

SEQ ID NO: 827054 - protein, 142 aa, Homo sapiens
SLLQPIRFAQPWPCYGKCPCSSLIPYEILGALLVLAFSALSLARAWNPDPLYANDIFQELLRYLDRSSKHRVSYHYYEPLPESKSTALSKVQFDIKSFCKILGPLSYSKIKHLRLDGNRISETSLPPDMYECLRVANEVTLN

SEQ ID NO: 827055 - protein, 896 aa, Homo sapiens
MAAAAQLSLTQLSSGNPVYEKYYRQVDTGNTGRVLASDAAAFLKKSGLPDLILGKIWDLADTDGKGILNKQEFFVALRLVACAQNGLEVSLSSLNLAVPPPRFHDTSSPLLISGTSAAELPWAVKPEDKAKYDAIFDSLSPVNGFLSGDKVKPVLLNSKLPVDILGRVWELSDIDHDGMLDRDEFAVAMFLVYCALEKEPVPMSLPPALVPPSKRKTWVVSPAEKAKYDEIFLKTDKDMDGFVSGLEVREIFLKTGLPSTLLAHIWSLCDTKDCGKLSKDQFALAFHLISQKLIKGIDPPHVLTPEMIPPSDRASLQKNIIGSSPVADFSAIKELDTLNNEIVDLQREKNNVEQDLKEKEDTIKQRTSEVQDLQDEVQRENTNLQKLQAQKQQVQELLDELDEQKAQLEEQLKEVRKKCAEEAQLISSLKAELTSQESQISTYEEELAKAREELSRLQQETAELEESVESGKAQLEPLQQHLQDSQQEISSMQMKLMEMKDLENHNSQLNWCSSPHSILVNGATDYCSLSTSSSETANLNEHVEGQSNLESEPIHQESPARSSPELLPSGVTDENEVTTAVTEKVCSELDNNRHSKEEDPFNVDSSSLTGPVADTNLDFFQSDPFVGSDPFKDDPFGKIDPFGGDPFKGSDPFASDCFFRQSTDPFATSSTDPFSAANNSSITSVETLKHNDPFAPGGTVVAASDSATDPFASVFGNESFGGGFADFSTLSKVNNEDPFRSATSSSVSNVVITKNVFEETSVKSEDEPPALPPKIGTPTRPCPLPPGKRSINKLDSPDPFKLNDPFQPFPGNDSPKEKDPEIFCDPFTSATTTTNKEADPSNFANFSAYPSEEDMIEWAKRESEREEEQRLARLNQQEQEDLELAIALSKSEISEA

SEQ ID NO: 827056 - protein, 582 aa, Homo sapiens
MYLKSDSGLGGWITIPAVADVLKYSCIVCWSSREKNNVEQDLKEKEDTIKQRTSEVQDLQDEVQRENTNLQKLQAQKQQVQELLDELDEQKAQLEEQLKEVRKKCAEEAQLISSLKAELTSQESQISTYEEELAKAREELSRLQQETAELEESVESGKAQLEPLQQHLQDSQQEISSMQMKLMEMKDLENHNSQLNWCSSPHSILVNGATDYCSLSTSSSETANLNEHVEGQSNLESEPIHQESPARSSPELLPSGVTDENEVTTAVTEKVCSELDNNRHSKEEDPFNVDSSSLTGPVADTNLDFFQSDPFVGSDPFKDDPFGKIDPFGGDPFKGSDPFASDCFFRQSTDPFATSSTDPFSAANNSSITSVETLKHNDPFAPGGTVVAASDSATDPFASVFGNESFGGGFADFSTLSKVNNEDPFRSATSSSVSNVVITKNVFEETSVKSEDEPPALPPKIGTPTRPCPLPPGKRSINKLDSPDPFKLNDPFQPFPGNDSPKEKDPEIFCDPFTSATTTTNKEADPSNFANFSAYPSEEDMIEWAKRESEREEEQRLARLNQQEQEDLELAIALSKSEISEA

SEQ ID NO: 827057 - protein, 403 aa, Homo sapiens
MKLMEMKDLENHNSQLNWCSSPHSILVNGATDYCSLSTSSSETANLNEHVEGQSNLESEPIHQESPARSSPELLPSGVTDENEVTTAVTEKVCSELDNNRHSKEEDPFNVDSSSLTGPVADTNLDFFQSDPFVGSDPFKDDPFGKIDPFGGDPFKGSDPFASDCFFRQSTDPFATSSTDPFSAANNSSITSVETLKHNDPFAPGGTVVAASDSATDPFASVFGNESFGGGFADFSTLSKVNNEDPFRSATSSSVSNVVITKNVFEETSVKSEDEPPALPPKIGTPTRPCPLPPGKRSINKLDSPDPFKLNDPFQPFPGNDSPKEKDPEIFCDPFTSATTTTNKEADPSNFANFSAYPSEEDMIEWAKRESEREEEQRLARLNQQEQEDLELAIALSKSEISEA

SEQ ID NO: 827058 - protein, 896 aa, Homo sapiens; identical to SEQ ID NO: 827055

SEQ ID NO: 827059 - protein, 896 aa, Homo sapiens; identical to SEQ ID NO: 827055

SEQ ID NO: 827060 - protein, 684 aa, Homo sapiens
MAAAAQLSLTQLSSGNPVYEKYYRQVDTGNTGRVLASDAAAFLKKSGLPDLILGKIWDLADTDGKGILNKQEFFVALRLVACAQNGLEVSLSSLNLAVPPPRFHDTSSPLLISGTSAAELPWAVKPEDKAKYDAIFDSLSPVNGFLSGDKVKPVLLNSKLPVDILGRVWELSDIDHDGMLDRDEFAVAMFLVYCALEKEPVPMSLPPALVPPSKRKTWVVSPAEKAKYDEIFLKTDKDMDGFVSGLEVREIFLKTGLPSTLLAHIWSLCDTKDCGKLSKDQFALAFHLISQKLIKGIDPPHVLTPEMIPPSDRASLQKNIIGSSPVADFSAIKELDTLNNEIVDLQREKNNVEQDLKEKEDTIKQRTSEVQDLQDEVQRENTNLQKLQAQKQQVQELLDELDEQKAQLEEQLKEVRKKCAEEAQLISSLKAELTSQESQISTYEEELAKAREELSRLQQETAELEESVESGKAQLEPLQQHLQDSQQEISSMQMKLMEMKDLENHNSQLNWCSSPHSILVNGATDYCSLSTSSSETANLNEHVEGQSNLESEPIHQESPARSSPELLPSGVTDENEVTTAVTEKVCSELDNNRHSKEEDPFNVDSSSLTGPVADTNLDFFQSDPFVGSDPFKDDPFGKIDPFGGDPFKGSDPFASDCFFRQSTDPFATSSTDPFSAANNSSITS

SEQ ID NO: 827061 - protein, 370 aa, Homo sapiens
MAAAAQLSLTQLSSGNPVYEKYYRQVDTGNTGRVLASDAAAFLKKSGLPDLILGKIWDLADTDGKGILNKQEFFVALRLVACAQNGLEVSLSSLNLAVPPPRFHDTSSPLLISGTSAAELPWAVKPEDKAKYDAIFDSLSPVNGFLSGDKVKPVLLNSKLPVDILGRVWELSDIDHDGMLDRDEFAVAMFLVYCALEKEPVPMSLPPALVPPSKRKTWVVSPAEKAKYDEIFLKTDKDMDGFVSGLEVREIFLKTGLPSTLLAHIWSLCDTKDCGKLSKDQFALAFHLISQKLIKGIDPPHVLTPEMIPPSDRASLQKNIIGSSPVADFSAIKELDTLNNEIVDLQRAQEIMWDRIMKVPGDKYDTEVNR

SEQ ID NO: 827062 - protein, 896 aa, Homo sapiens; identical to SEQ ID NO: 827055

SEQ ID NO: 827063 - protein, 759 aa, Homo sapiens
MGCKMNGFLSGDKVKPVLLNSKLPVDILGRVWELSDIDHDGMLDRDEFAVAMFLVYCALEKEPVPMSLPPALVPPSKRKTWVVSPAEKAKYDEIFLKTDKDMDGFVSGLEVREIFLKTGLPSTLLAHIWSLCDTKDCGKLSKDQFALAFHLISQKLIKGIDPPHVLTPEMIPPSDRASLQKNIIGSSPVADFSAIKELDTLNNEIVDLQREKNNVEQDLKEKEDTIKQRTSEVQDLQDEVQRENTNLQKLQAQKQQVQELLDELDEQKAQLEEQLKEVRKKCAEEAQLISSLKAELTSQESQISTYEEELAKAREELSRLQQETAELEESVESGKAQLEPLQQHLQDSQQEISSMQMKLMEMKDLENHNSQLNWCSSPHSILVNGATDYCSLSTSSSETANLNEHVEGQSNLESEPIHQESPARSSPELLPSGVTDENEVTTAVTEKVCSELDNNRHSKEEDPFNVDSSSLTGPVADTNLDFFQSDPFVGSDPFKDDPFGKIDPFGGDPFKGSDPFASDCFFRQSTDPFATSSTDPFSAANNSSITSVETLKHNDPFAPGGTVVAASDSATDPFASVFGNESFGGGFADFSTLSKVNNEDPFRSATSSSVSNVVITKNVFEETSVKSEDEPPALPPKIGTPTRPCPLPPGKRSINKLDSPDPFKLNDPFQPFPGNDSPKEKDPEIFCDPFTSATTTTNKEADPSNFANFSAYPSEEDMIEWAKRESEREEEQRLARLNQQEQEDLELAIALSKSEISEA

SEQ ID NO: 827064 - protein, 514 aa, Homo sapiens
MYLKSDSGLGGWITIPAVADVLKYSCIVCWSSREKNNVEQDLKEKEDTIKQRTSEVQDLQDEVQRENTNLQKLQAQKQQVQELLDELDEQKAQLEEQLKEVRKKCAEEAQLISSLKAELTSQESQISTYEEELAKAREELSRLQQETAELEESVESGKAQLEPLQQHLQDSQQEISSARSSPELLPSGVTDENEVTTAVTEKVCSELDNNRHSKEEDPFNVDSSSLTGPVADTNLDFFQSDPFVGSDPFKDDPFGKIDPFGGDPFKGSDPFASDCFFRQSTDPFATSSTDPFSAANNSSITSVETLKHNDPFAPGGTVVAASDSATDPFASVFGNESFGGGFADFSTLSKVNNEDPFRSATSSSVSNVVITKNVFEETSVKSEDEPPALPPKIGTPTRPCPLPPGKRSINKLDSPDPFKLNDPFQPFPGNDSPKEKDPEIFCDPFTSATTTTNKEADPSNFANFSAYPSEEDMIEWAKRESEREEEQRLARLNQQEQEDLELAIALSKSEISEA

SEQ ID NO: 827065 - protein, 896 aa, Homo sapiens; identical to SEQ ID NO: 827055

SEQ ID NO: 827066 - protein, 896 aa, Homo sapiens; identical to SEQ ID NO: 827055

SEQ ID NO: 827067 - protein, 198 aa, Homo sapiens
MAAAAQLSLTQLSSGNPVYEKYYRQVDTGNTGRVLASDAAAFLKKSGLPDLILGKIWDLADTDGKGILNKQEFFVALRLVACAQNGLEVSLSSLNLAVPPPRFHDTSSPLLISGTSAAELPWAVKPEDKAKYDAIFDSLSPVNGFLSGDKVKPVLLNSKLPVDILGRVWELSDIDHDGMLDRDEFAVIFLIFHKSQMK

SEQ ID NO: 827068 - protein, 339 aa, Homo sapiens [sequence omitted]

SEQ ID NO: 827069 - protein, 203 aa, Homo sapiens
MAEASSDPGAEEREELLGPTAQWSVEDEEEAVHEQCQHERDRQLQAQDEEGGGHVPERPKQEMLLSLKPSEAPELDEDEGFGDWSQRPEQRQQHEGAQGTLDSGEPPQCRSPEGEQEDRPGLHAYEKEDSDEVHLEELSLSKEGPGPEDTVQDNLGAAGAEEEQEEHQKCQQPRTPSPLVLEGTIEQSSPPLSPTTKSSTDRS

SEQ ID NO: 827070 - protein, 339 aa, Homo sapiens [sequence omitted]

SEQ ID NO: 827071 - protein, 339 aa, Homo sapiens [sequence omitted]

SEQ ID NO: 827072 - protein, 339 aa, Homo sapiens [sequence omitted]

SEQ ID NO: 827073 - protein, 277 aa, Homo sapiens [sequence omitted]

SEQ ID NO: 827074 - protein, 339 aa, Homo sapiens [sequence omitted]

SEQ ID NO: 827075 - protein, 339 aa, Homo sapiens [sequence omitted]

SEQ ID NO: 827076 - protein, 258 aa, Homo sapiens
MAEASSDPGAEEREELLGPTAQWSVEDEEEAVHEQCQHERDRQLQAQDEEGGGHVPERPKQEMLLSLKPSEAPELDEDEGFGDWSQRPEQRQQHEGAQGTLDSGEPPQCRSPEGEQEDRPGLHAYEKEDSDEVHLEELSLSKEGPGPEDTVQDNLGAAGAEEEQEEHQKCQQPRTPSPLVLEGTIEQSSPPLSPTTKLIDRTESLNRSIEKSNSVKKSQPDLPISKIDQWLEQYTQAIETAGRTPKLARQYQESVGDG

SEQ ID NO: 827077 - protein, 173 aa, Homo sapiens
MVPSKTKGLGVLGCWHFWCSSCSSSAPAAPKLIDRTESLNRSIEKSNSVKKSQPDLPISKIDQWLEQYTQAIETAGRTPKLARQASIELPSMAVASTKSRWETGEVQAQSAAKTPSCKDIVAGDMSKKSLWEQKGGSKTSSTIKSTPSGKRYKFVATGHGKYEKVLVEGGPAP

SEQ ID NO: 827078 - protein, 325 aa, Homo sapiens
MAEASSDPGAEEREELLGPTAQWSVEDEEEAVHEQCQHERDRQLQAQDEEGGGHVPERPKQEMLLSLKPSEAPELDEDEGFGDWSQRPEQRQQHEGAQGTLDSGEPPQCRSPEGEQEDRPGLHAYEKEDSDEVHLEELSLSKEGPGPEDTVQDNLGAAGAEEEQEEHQKCQQPRTPSPLVLEGTIEQSSPPLSPTTKLIDRTESLNRSIEKSNSVKKSQPDLPISKIDQWLEQYTQAIETAGRTPKLARQASIELPSMAVASTKSRWETGEVQAQSAAKTPSCKDIVAGDMSKKSLWEQKGGSKTSSTIKSTPSGKRYKFASSEQ

SEQ ID NO: 827079 - protein, 240 aa, Homo sapiens [sequence omitted]

SEQ ID NO: 827080 - protein, 130 aa, Homo sapiens
PRPPGQVRQGGREGPRASTPQDPGVCPCDIPFCCPQDIVAGDMSKKSLWEQKGGSKTSSTIKVEPKCGWCRQGGCSRGGQRGTVLCASGRASQRRRQHHLLSAALTFTLGLLSQQSTPSGKRYKFVATGH

SEQ ID NO: 827081 - protein, 154 aa, Homo sapiens
CGVTVPLCPPLGPLLSGAWRTRRRPSTSNASMRETGSFRPRTRREAAMSPSGRSRRCCEQPHNACLGSSPYPCTLGPGQRGRSRAWAWGFQCRMRARKGPQEQAWEWVSAPGARVATALEEGLPIPGCLLGADPGSVSVPWPLLGPPLTPATQP

SEQ ID NO: 827082 - protein, 240 aa, Homo sapiens [sequence omitted]

SEQ ID NO: 827083 - protein, 150 aa, Homo sapiens
ESQGRDLETEGGSGRGLGRLGEALWETWGLTHLLPSSNSVKKSQPDLPISKIDQWLEQYTQAIETAGRTPKLARQASIELPSMAVASTKSRWETGEVQAQSAAKTPSCKDIVAGDMSKKSLWEQKGGSKTSSTIKSTPSGKRYKFASSEQ

SEQ ID NO: 827084 - protein, 339 aa, Homo sapiens [sequence omitted]

SEQ ID NO: 827085 - protein, 277 aa, Homo sapiens [sequence omitted]

SEQ ID NO: 827086 - protein, 330 aa, Homo sapiens [sequence omitted]

SEQ ID NO: 827087 - protein, 356 aa, Homo sapiens
RQELCQGSPSWPRRRSAPEGRRAKAGGAAGLSVDLPTAQWSVEDEEEAVHEQCQHERDRQLQAQDEEGGGHVPERPKQEMLLSLKPSEAPELDEDEGFGDWSQRPEQRQQHEGAQGTLDSGEPPQCRSPEGEQEDRPGLHAYEKEDSDEVHLEELSLSKEGPGPEDTVQDNLGAAGAEEEQEEHQKCQQPRTPSPLVLEGTIEQSSPPLSPTTKLIDRTESLNRSIEKSNSVKKSQPDLPISKIDQWLEQYTQAIETAGRTPKLARQASIELPSMAVASTKSRWETGEVQAQSAAKTPSCKDIVAGDMSKKSLWEQKGGSKTSSTIKSTPSGKRYKFVATGHGKYEKVLVEGGPAP

SEQ ID NO: 827088 - protein, 339 aa, Homo sapiens [sequence omitted]

SEQ ID NO: 827089 - protein, 322 aa, Homo sapiens
MAEASSDPGAEEREELLGPTAQWSVEDEEEAVHEQCQHERDRQLQAQDEEGGGHVPERPKQEMLLSLKPSEAPELDEDEGFGDWSQRPEQRQQHEGAQGTLDSGEPPQCRSPEGEQEDRPGLHAYEKEDSDEVHLEELSLSKEGPGPEDTVQDNLGAAGAEEEQEEHQKCQQPRTPSPLVLEGTIEQSSPPLSPTTKLIDRTESLNRSIEKSNSVKKSQPDLPISKIDQWLEQYTQAIETAGRTPKLARQASIELPSMAVASTKSRWETGEVQAQSAAKTPSCKDIVAGDMSKSTPSGKRYKFVATGHGKYEKVLVEGGPAP

SEQ ID NO: 827090 - protein, 123 aa, Homo sapiens
MGSMRRCLWKGARLPRRPISLPGSAGPAGWHPPCTQGRFQPDTRPPALAKKLLPVASMTYPRLFDAIRCHLLLLLDPLASLPFHSLTTAPALPTQLRFLLLGGGKKLLIIGQRDLPLERPSAF

SEQ ID NO: 827091 - protein, 249 aa, Homo sapiens
MAEASSDPGAEEREELLGPTAQWSVEDEEEAVHEQCQHERDRQLQAQDEEGGGHVPERPKQEMLLSLKPSEAPELDEDEGFGDWSQRPEQRQQHEGAQGTLDSGEPPQCRSPEGEQEDRPGLHAYEKEDSDEVHLEELSLSKEGPGPEDTVQDNLGAAGAEEEQEEHQKCQQPRTPSPLVLEGTIEQSSPPLSPTTKLIDRTESLNRSIEKSNSVKKSQPDLPISKIDQWLEQYTQAIETWPDPATAGS

SEQ ID NO: 827092 - protein, 134 aa, Homo sapiens
LTPIVGLKAATKLRKPQHVHPLQGSASTLWGPDYRLMAEASSDPGAEEREELLGPTAQWSVEDEEEAVHEQCQHERDRQLQAQDEEGGGHVPERPKQEMLLSLKPSEAPELDEDEGFGDWSQRPEQRQQFLLPA

SEQ ID NO: 827093 - protein, 286 aa, Homo sapiens
MSYPADDYESEAAYDPYAYPSDYDMHTGDPKQDLAYERQYEQQTYQVIPEVIKNFIQYFHKTVSDLIDQKVYELQASRVSSDVIDQKVYEIQDIYENSWTKLTERFFKNTPWPEAEAIAPQVGNDAVFLILYKELYYRHIYAKVSGGPSLEQRFESYYNYCNLFNYILNADGPAPLELPNQWLWDIIDEFIYQFQSFSQYRCKTAKKSEEEIDFLRSNPKIWNVHSVLNVLHSLGRQIQHQPTVGGIHKRRVTLRVWVGVWGGPSTMAGTSAGRVSAGPGGDFPAR

SEQ ID NO: 827094 - protein, 424 aa, Homo sapiens
MPKSVGDLPWSRGLNPITTTAISSTTFLMPMVLLPLNYPTSGSGILSMSSSTSFSHSVSTAVRLPRSQRRRLTFFVPIPKSGMFIVSSMSFIPWVDKSNINRQLEVYTSGGDPESVAGEYGRHSLYKMLGYFSLVGLLRLHSLLGDYYQAIKVLENIELNKKSMYSRVPECQVTTYYYVGFAYLMMRRYQDAIRVFANILLYIQRTKSMFQRTTYKYEMINKQNEQMHALLAIALTMYPMRIDESIHLQLREKYGDKMLRMQKGDPQVYEELFSYSCPKFLSPVVPNYDNVHPNYHKEPFLQQLKVFSDEVQQQAQLSTIRSFLKLYTTMPVAKLAGFLDLTEQEFRIQLLVFKHKMKNLVWTSGISALDGEFQSASEVDFYIDKDMIHIADTKVARRYGDFFIRQIHKFEELNRTLKKMGQRP

SEQ ID NO: 827095 - protein, 424 aa, Homo sapiens; identical to SEQ ID NO: 827094

SEQ ID NO: 827096 - protein, 424 aa, Homo sapiens; identical to SEQ ID NO: 827094

SEQ ID NO: 827097 - protein, 424 aa, Homo sapiens; identical to SEQ ID NO: 827094

SEQ ID NO: 827098 - protein, 424 aa, Homo sapiens; identical to SEQ ID NO: 827094

SEQ ID NO: 827099 - protein, 424 aa, Homo sapiens; identical to SEQ ID NO: 827094

SEQ ID NO: 827100 - protein, 424 aa, Homo sapiens; identical to SEQ ID NO: 827094

SEQ ID NO: 827101 - protein, 397 aa, Homo sapiens
MPKSVGDLPWSRGLNPITTTAISSTTFLMPMVLLPLNYPTSGSGILSMSSSTSFSHSVSTAVRLPRSQRRRLTFFVPIPKSGMFIVSSMSFIPWVDKSNINRQLEVYTSGGDPESVAGEYGRHSLYKMLGYFSLVGLLRLHSLLGDYYQAIKVLENIELNKKSMYSRVPECQVTTYYYVGFAYLMMRRYQDAIRVFANILLYIQRTKSMFQRTTYKYEMINKQNEQMHALLAIALTMYPMRIDESIHLQLREKYGDKMLRMQKGDPQVYEELFSYSCPKFLSPVVPNYDNVHPNYHKEPFLQQLKVFSDEVQQQAQLSTIRSFLKLYTTMPVAKLAGFLDLTEQEFRIQLLVFKHKMKNLVWTSGISALDGEFQSASEVDFYIDKLNRTLKKMGQRP

SEQ ID NO: 827102 - protein, 396 aa, Homo sapiens
MPKSVGDLPWSRGLNPITTTAISSTTFLMPMVLLPLNYPTSGSGILSMSSSTSFSHSVSTAVRLPRSQRRRLTFFVPIPKSGMFIVSSMSFIPWVDKSNINRQLEVYTSGGDPESVAGEYGRHSLYKMLGYFSLVGLLRLHSLLGDYYQAIKVLENIELNKKSMYSRVPECQVTTYYYVGFAYLMMRRYQDAIRVFANILLYIQRTKSMFQRTTYKYEMINKQNEQMHALLAIALTMYPMRIDESIHLQLREKYGDKMLRMQKGDPQVYEELFSYSCPKFLSPVVPNYDNVHPNYHKEPFLQQLKVFSDEVQQQAQLSTIRSFLKLYTTMPVAKLAGFLDLTEQEFRIQLLVFKHKMKNLVWTSGISALDGEFQSASEVDFYIDKVCLSPGLGVLY

SEQ ID NO: 827103 - protein, 424 aa, Homo sapiens; identical to SEQ ID NO: 827094

SEQ ID NO: 827104 - protein, 265 aa, Homo sapiens
SFSVFPAVLASEAAMSYPADDYESEAAYDPYAYPSDYDMHTGDPKQDLAYERQYEQQTYQVIPEVIKNFIQYFHKTVSDLIDQKVYELQASRVSSDVIDQKVYEIQDIYENSWTKLTERFFKNTPWPEAEAIAPQVGNDAVFLILYKELYYRHIYAKVSGGPSLEQRFESYYNYCNLFNYILNADGPAPLELPNQWLWDIIDEFIYQFQSFSQYRCKTAKKSEEEIDFLRSNPKIWNVHSVLNVLHSLGRQIQHQPTVGGIHKRR

SEQ ID NO: 827105 - protein, 424 aa, Homo sapiens; identical to SEQ ID NO: 827094

SEQ ID NO: 827106 - protein, 424 aa, Homo sapiens; identical to SEQ ID NO: 827094

SEQ ID NO: 827107 - protein, 424 aa, Homo sapiens; identical to SEQ ID NO: 827094

SEQ ID NO: 827108 - protein, 265 aa, Homo sapiens; identical to SEQ ID NO: 827104

SEQ ID NO: 827109 - protein, 265 aa, Homo sapiens; identical to SEQ ID NO: 827104

SEQ ID NO: 827110 - protein, 404 aa, Homo sapiens
MPKSVGDLPWSRGLNPITTTAISSTTFLMPMVLLPLNYPTSGSGILSMSSSTSFSHSVSTAVRLPRSQRRRLTFFVPIPKSGMFIVSSMSFIPWVDKSNINRQLEVYTSGGDPESVAGEYGRHSRDYYQAIKVLENIELNKKSMYSRVPECQVTTYYYVGFAYLMMRRYQDAIRVFANILLYIQRTKSMFQRTTYKYEMINKQNEQMHALLAIALTMYPMRIDESIHLQLREKYGDKMLRMQKGDPQVYEELFSYSCPKFLSPVVPNYDNVHPNYHKEPFLQQLKVFSDEVQQQAQLSTIRSFLKLYTTMPVAKLAGFLDLTEQEFRIQLLVFKHKMKNLVWTSGISALDGEFQSASEVDFYIDKDMIHIADTKVARRYGDFFIRQIHKFEELNRTLKKMGQRP

SEQ ID NO: 827111 - protein, 326 aa, Homo sapiens
TLRIRRWLWVAGSGFKARDGGREGGGRDRERETDILVGLLRLHSLLGDYYQAIKVLENIELNKKSMYSRVPECQVTTYYYVGFAYLMMRRYQDAIRVFANILLYIQRTKSMFQRTTYKYEMINKQNEQMHALLAIALTMYPMRIDESIHLQLREKYGDKMLRMQKGDPQVYEELFSYSCPKFLSPVVPNYDNVHPNYHKEPFLQQLKVFSDEVQQQAQLSTIRSFLKLYTTMPVAKLAGFLDLTEQEFRIQLLVFKHKMKNLVWTSGISALDGEFQSASEVDFYIDKDMIHIADTKVARRYGDFFIRQIHKFEELNRTLKKMGQRP

SEQ ID NO: 827112 - protein, 261 aa, Homo sapiens
MYSRVPECQVTTYYYVGFAYLMMRRYQDAIRVFANILLYIQRTKSMFQRTTYKYEMINKQNEQMHALLAIALTMYPMRIDESIHLQLREKYGDKMLRMQKGDPQVYEELFSYSCPKFLSPVVPNYDNVHPNYHKEPFLQQLKVFSDEVQQQAQLSTIRSFLKLYTTMPVAKLAGFLDLTEQEFRIQLLVFKHKMKNLVWTSGISALDGEFQSASEVDFYIDKDMIHIADTKVARRYGDFFIRQIHKFEELNRTLKKMGQRP

SEQ ID NO: 827113 - protein, 261 aa, Homo sapiens; identical to SEQ ID NO: 827112

SEQ ID NO: 827114 - protein, 185 aa, Homo sapiens
MRIDESIHLQLREKYGDKMLRMQKGDPQVYEELFSYSCPKFLSPVVPNYDNVHPNYHKEPFLQQLKVFSDEVQQQAQLSTIRSFLKLYTTMPVAKLAGFLDLTEQEFRIQLLVFKHKMKNLVWTSGISALDGEFQSASEVDFYIDKDMIHIADTKVARRYGDFFIRQIHKFEELNRTLKKMGQRP

SEQ ID NO: 827115 - protein, 424 aa, Homo sapiens; identical to SEQ ID NO: 827094

SEQ ID NO: 827116 - protein, 424 aa, Homo sapiens; identical to SEQ ID NO: 827094

SEQ ID NO: 827117 - protein, 424 aa, Homo sapiens; identical to SEQ ID NO: 827094

SEQ ID NO: 827118 - protein, 457 aa, Homo sapiens
MPKSVGDLPWSRGLNPITTTAISSTTFLMPMVLLPLNYPTSGSGILSMSSSTSFSHSVSTAVRLPRSQRRRLTFFVPIPKSGMFIVSSMSFIPWVDKSNINRQLEVYTSGGDPESVAGEYGRHSLYKMLGYFSLVGLLRLHSLLGDYYQAIKVLENIELNKKSMYSRVPECQVTTYYYVGFAYLMMRRYQDAIRVFANILLYIQRTKSMFQRTTYKYEMINKQNEQMHALLAIALTMYPMRIDESIHLQLREKYGDKMLRMQKGDPQVYEELFSYSCPKFLSPVVPNYDNVHPNYHKEPFLQQLKVFSDEVQQQAQLSTIRSFLKLYTTMPVAKLAGFLDLTEQEFRIQLLVFKHKMKNLVWTSGISALDGEFQSASEVDFYIDKDMIHIADTKVARRYGDFFIRQIHKFEEMESCAVTHAGVQRRDLSSLQPLPPGFKRVSLLSLPHSWNYSLIEP

SEQ ID NO: 827119 - protein, 432 aa, Homo sapiens
MPKSVGDLPWSRGLNPITTTAISSTTFLMPMVLLPLNYPTSGSGILSMSSSTSFSHSVSTAVRLPRSQRRRLTFFVPIPKSGMFIVSSMSFIPWVDKSNINRQLEVYTSGGDPESVAGEYGRHSLYKMLGYFSLVGLLRLHSLLGDYYQAIKVLENIELNKKSMYSRVPECQVTTYYYVGFAYLMMRRYQDAIRVFANILLYIQRTALGPLDVSKSMFQRTTYKYEMINKQNEQMHALLAIALTMYPMRIDESIHLQLREKYGDKMLRMQKGDPQVYEELFSYSCPKFLSPVVPNYDNVHPNYHKEPFLQQLKVFSDEVQQQAQLSTIRSFLKLYTTMPVAKLAGFLDLTEQEFRIQLLVFKHKMKNLVWTSGISALDGEFQSASEVDFYIDKDMIHIADTKVARRYGDFFIRQIHKFEELNRTLKKMGQRP

SEQ ID NO: 827120 - protein, 405 aa, Homo sapiens
MPKSVGDLPWSRGLNPITTTAISSTTFLMPMVLLPLNYPTSGSGILSMSSSTSFSHSVSTAVRLPRSQRRRLTFFVPIPKSGMFIVSSMSFIPWVDKSNINRQLEVYTSGGDPESVAGEYGRHSLYKMLGYFSLVGLLRLHSLLGDYYQAIKVLENIELNKKSMYSRVPECQVTTYYYVGFAYLMMRRYQDAIRVFANILLYIQRTKSMFQRTTYKYEMINKQNEQMHALLAIALTMYPMRIDESIHLQLREKYGDKMLRMQKGDPQVYEELFSYSCPKFLSPVVPNYDNVHPNYHKEPFLQQLKVFSDEVQQQAQLSTIRSFLKLYTTMPVAKLAGFLDLTEQEFRIQLLVFKHKMKNLVWTSGISALDGEFQSASEVDFYIDKVCLSPGLGLNRTLKKMGQRP

SEQ ID NO: 827121 - protein, 424 aa, Homo sapiens; identical to SEQ ID NO: 827094

SEQ ID NO: 827122 - protein, 404 aa, Homo sapiens; identical to SEQ ID NO: 827110

SEQ ID NO: 827123 - protein, 393 aa, Homo sapiens
MPKSVGDLPWSRGLNPITTTAISSTTFLMPMVLLPLNYPTSGSGILSMSSSTSFSHSVSTAVRLPRSQRRRLTFFVPIPKSGMFIVSSMSFIPWVDKSNINRQLEVYTSGGDPESVAGEYGRHSLYKMLGYFSLVGLLRLHSLLGDYYQAIKVLENIELNKKSMYSRVPECQVTTYYYVGFAYLMMRRYQDAIRVFANILLYIQRTKSMFQRTTYKYEMINKQNEQMHALLAIALTMYPMRIDESIHLQLREKYGDKMLRMQKGDPQVYEELFSYSCPKFLSPVVPNYDNVHPNYHKEPFLQQLKVFSDEVQQQAQLSTIRSFLKLYTTMPVAKLAGFLDLTGQKKIGAVCFTHKTGGPVTRGLNPGRRRTPATGRGVPQGPKGDNVGPTPLR

SEQ ID NO: 827124 - protein, 432 aa, Homo sapiens
GRVGRPTRPTHASGDLPWSRGLNPITTTAISSTTFLMPMVLLPLNYPTSGSGILSMSSSTSFSHSVSTAVRLPRSQRRRLTFFVPIPKSGMFIVSSMSFIPWVDKSNINRQLEVYTSGGDPESVAGEYGRHSLYKMLGYFSLVGLLRLHSLLGDYYQAIKVLENIELNKKSMYSRVPECQVTTYYYVGFAYLMMRRYQDAIRVFANILLYIQRTKSMFQRTTYKYEMINKQNEQMHALLAIALTMYPMRIDESIHLQLREKYGDKMLRMQKGDPQVYEELFSYSCPKFLSPVVPNYDNVHPNYHKEPFLQQLKVFSDEVQQQAQLSTIRSFLKLYTTMPVAKLAGFLDLTEQEFRIQLLVFKHKMKNLVWTSGISALDGEFQSASEVDFYIDKDMIHIADTKVARRYGDFFIRQIHKFEELNRTLKKMGQRP

SEQ ID NO: 827125 - protein, 601 aa, Homo sapiens
SFSGFPAVLASEAAMSYPADDYESEAAYDPYAYPSDYDMHTGDPKQDLAYERQYEQQTYQVIPEVIKNFIQYFHKTVSDLIDQKVYELQASRVSSDVIDQKVYEIQDIYENSWTKLTERFFKNTPWPEAEAIAPQVGNDAATCLHYYTRVIILSRGPSISDPNDQLERTRSIERSDVFRDLYYNFTGKSLFISNYFLRGRWKLFPLNLATIEEELFGVVTRLRFIYQFRGFSHSVSTAVRLPRSQRRRLTFFVPIPKSGMFIVSSMSFIPWVDKSNINRQLEVYTSGGDPESVAGEYGRHSLYKMLGYFSLVGLLRLHSLLGDYYQAIKVLENIELNKKSMYSRVPECQVTTYYYVGFAYLMMRRYQDAIRVFANILLYIQRTKSMFQRTTYKYEMINKQNEQMHALLAIALTMYPMRIDESIHLQLREKYGDKMLRMQKGDPQVYEELFSYSCPKFLSPVVPNYDNVHPNYHKEPFLQQLKVFSDEVQQQAQLSTIRSFLKLYTTMPVAKLAGFLDLTEQEFRIQLLVFKHKMKNLVWTSGISALDGEFQSASEVDFYIDKDMIHIADTKVARRYGDFFIRQIHKFEELNRTLKKMGQRP

SEQ ID NO: 827126 - protein, 265 aa, Homo sapiens; identical to SEQ ID NO: 827104

SEQ ID NO: 827127 - protein, 265 aa, Homo sapiens; identical to SEQ ID NO: 827104

SEQ ID NO: 827128 - protein, 280 aa, Homo sapiens
MAYGNYVLVQENIELNKKSMYSRVPECQVTTYYYVGFAYLMMRRYQDAIRVFANILLYIQRTKSMFQRTTYKYEMINKQNEQMHALLAIALTMYPMRIDESIHLQLREKYGDKMLRMQKGDPQVYEELFSYSCPKFLSPVVPNYDNVHPNYHKEPFLQQLKVFSDEVQQQAQLSTIRSFLKLYTTMPVAKLAGFLDLTEQEFRIQLLVFKHKMKNLVWTSGISALDGEFQSASEVDFYIDKDMIHIADTKVARRYGDFFIRQIHKFEELNRTLKKMGQRP

SEQ ID NO: 827129 - protein, 311 aa, Homo sapiens
MPKSVGDLPWSRGLNPITTTAISSTTFLMPMVLLPLNYPTSGSGILSMSSSTSFSHSVSTAVRLPRSQRRRLTFFVPIPKSGMFIVSSMSFIPWVDKSNINRQLEVYTSGGDPESVAGEYGRHSRDYYQAIKVLENIELNKKSMYSRVPECQVTTYYYVGFAYLMMRRYQDAIRVFANILLYIQRTKSMFQRTTYKYEMINKQNEQMHALLAIALTMYPMRIDESIHLQLREKYGDKMLRMQKGDPQVYEELFSYSCPKFLSPVVPNYDNVHPNYHKEPFLQQLKVFSDEVQRGPFNIGDQRLTQTWTWGL

SEQ ID NO: 827130 - protein, 231 aa, Homo sapiens
GRVGRPTRPTHASKSMFQRTTYKYEMINKQNEQMHALLAIALTMYPMRIDESIHLQLREKYGDKMLRMQKGDPQVYEELFSYSCPKFLSPVVPNYDNVHPNYHKEPFLQQLKVFSDEVQQQAQLSTIRSFLKLYTTMPVAKLAGFLDLTEQEFRIQLLVFKHKMKNLVWTSGISALDGEFQSASEVDFYIDKDMIHIADTKVARRYGDFFIRQIHKFEELNRTLKKMGQRP

SEQ ID NO: 827131 - protein, 166 aa, Homo sapiens
MSRQKGDPQVYEELFSYSCPKFLSPVVPNYDNVHPNYHKEPFLQQLKVFSDEVQQQAQLSTIRSFLKLYTTMPVAKLAGFLDLTEQEFRIQLLVFKHKMKNLVWTSGISALDGEFQSASEVDFYIDKDMIHIADTKVARRYGDFFIRQIHKFEELNRTLKKMGQRP

SEQ ID NO: 827132 - protein, 501 aa, Homo sapiens
ARCWAAAAAAAVVTMAESAGASSFFPLVVLLLAGSGGSGPRGVQALLCACTSCLQANYTCETDGACMVSIFNLDGMEHHVRTCIPKVELVPAGKPFYCLSSEDLRNTHCCYTDYCNRIDLRVPSGHLKEPEHPSMWGPVELVGIIAGPVFLLFLIIIIVFLVINYHQRVYHNRQRLDMEDPSCEMCLSKDKTLQDLVYDLSTSGSGSGLPLFVQRTVARTIVLQEIIGKGRFGEVWRGRWRGGDVAVKIFSSREERSWFREAEIYQTVMLRHENILGFIAADNKDNGTWTQLWLVSDYHEHGSLFDYLNRYTVTIEGMIKLALSAASGLAHLHMEIVGTQGKPGIAHRDLKSKNILVKKNGMCAIADLGLAVRHDAVTDTIDIAPNQRVGTKRYMAPEVLDETINMKHFDSFKCADIYALGLVYWEIARRCNSGGTFLFCLCSYLPFQDAGSPKAVLLPPFFLQPVGCLLPEPESSFKVAIKGVEVAVLRVRLFFRDQFVE

SEQ ID NO: 827133 - protein, 519 aa, Homo sapiens
ARCWAAAAAAAVVTMAESAGASSFFPLVVLLLAGSGGSGPRGVQALLCACTSCLQANYTCETDGACMVSIFNLDGMEHHVRTCIPKVELVPAGKPFYCLSSEDLRNTHCCYTDYCNRIDLRVPSGHLKEPEHPSMWGPVELVGIIAGPVFLLFLIIIIVFLVINYHQRVYHNRQRLDMEDPSCEMCLSKDKTLQDLVYDLSTSGSGSGLPLFVQRTVARTIVLQEIIGKGRFGEVWRGRWRGGDVAVKIFSSREERSWFREAEIYQTVMLRHENILGFIAADNKDNGTWTQLWLVSDYHEHGSLFDYLNRYTVTIEGMIKLALSAASGLAHLHMEIVGTQGKPGIAHRDLKSKNILVKKNGMCAIADLGLAVRHDAVTDTIDIAPNQRVGTKRYMAPEVLDETINMKHFDSFKCADIYALGLVYWEIARRCNSGGVHEEYQLPYYDLVPSDPSIEEMRKVVCDQKLRPNIPNWWQSYEALRVMGKMMRECWYANGAARLTALRIKKTLSQLSVQEDVKI

SEQ ID NO: 827134 - protein, 395 aa, Homo sapiens
ARCWAAAAAAAVVTMAESAGASSFFPLVVLLLAGSGGSGPRGVQALLCACTSCLQANYTCETDGACMVSIFNLDGMEHHVRTCIPKVELVPAGKPFYCLSSEDLRNTHCCYTDYCNRIDLRVPSGHLKEPEHPSMWGPVELVGIIAGPVFLLFLIIIIVFLVINYHQRVYHNRQRLDMEDPSCEMCLSKDKTLQDLVYDLSTSGSGSGLPLFVQRTVARTIVLQEIIGKGRFGEVWRGRWRGGDVAVKIFSSREERSWFREAEIYQTVMLRHENILGFIAADNKDNGTWTQLWLVSDYHEHGSLFDYLNRYTVTIEGMIKLALSAASGLAHLHMEIVGTQGKPGIAHRDLKSKNILVKKNGMCAIADLGLAVRHDAVTDTIDIAPNQRVGTKRSP

SEQ ID NO: 827135 - protein, 243 aa, Homo sapiens
GTHLWFSADNGTWTQLWLVSDYHEHGSLFDYLNRYTVTIEGMIKLALSAASGLAHLHMEIVGTQGKPGIAHRDLKSKNILVKKNGMCAIADLGLAVRHDAVTDTIDIAPNQRVGTKRYMAPEVLDETINMKHFDSFKCADIYALGLVYWEIARRCNSGGVHEEYQLPYYDLVPSDPSIEEMRKVVCDQKLRPNIPNWWQSYEALRVMGKMMRECWYANGAARLTALRIKKTLSQLSVQEDVKI

SEQ ID NO: 827136 - protein, 125 aa, Homo sapiens
MAPEVLDETINMKHFDSFKCADIYALGLVYWEIARRCNSGGVHEEYQLPYYDLVPSDPSIEEMRKVVCDQKLRPNIPNWWQSYEALRVMGKMMRECWYANGAARLTALRIKKTLSQLSVQEDVKI

SEQ ID NO: 827137 - protein, 227 aa, Homo sapiens
ARCWAAAAAAAVVTMAESAGASSFFPLVVLLLAGSGGSGPRGVQALLCACTSCLQANYTCETDGACMVSIFNLDGMEHHVRTCIPKVELVPAGKPFYCLSSEDLRNTHCCYTDYCNRIDLRVPSGHLKEPEHPSMWGPVELVGIIAGPVFLLFLIIIIVFLVINYHQRVYHNRQRLDMEDPSCEMCLSKDKTLQDLVYDLSTSGSGSGTKFFRASCLWLAFISFPAG

SEQ ID NO: 827138 - protein, 490 aa, Homo sapiens
ARCWAAAAAAAVVTMAESAGASSFFPLVVLLLAGSGGSGPRGVQALLCACTSCLQANYTCETDGACMVSIFNLDGMEHHVRTCIPKVELVPAGKPFYCLSSEDLRNTHCCYTDYCNRIDLRVPSGHLKEPEHPSMWGPVELVGIIAGPVFLLFLIIIIVFLVINYHQRVYHNRQRLDMEDPSCEMCLSKDKTLQDLVYDLSTSGSGSGLPLFVQRTVARTIVLQEIIGKGRFGEVWRGRWRGGDVAVKIFSSREERSWFREAEIYQTVMLRHENILGFIAADNKDNGTWTQLWLVSDYHEHGSLFDYLNRYTVTIEGMIKLALSAASGLAHLHMEIVGTQGKPGIAHRDLKSKNILVKKNGMCAIADLGLAVRHDAVTDTIDIAPNQRVGTKRYMAPEVLDETINMKHFDSFKCADIYALGLVYWEIARRCNSGGVHEEYQLPYYDLVPSDPSIEEMRKVVCDQKLRPNIPNWWQSYEVRSWPPAAFPSA

SEQ ID NO: 827139 - protein, 519 aa, Homo sapiens; identical to SEQ ID NO: 827133

SEQ ID NO: 827140 - protein, 101 aa, Homo sapiens
FMCDCKNRALDFGSVNLRSSEVQVALWIQGSLWDLPTHVHSQATSPLPSWPFCPYPTHSPTLPPLGKMEQVFGKLPHPPLPLLTLSESWGETEAVFLAPRG

SEQ ID NO: 827141 - protein, 81 aa, Homo sapiens
SCLQANYTCETDGACMVSIFNLDGMEHHVRTCIPKVELVPAGKPFYCLSSEDLRNTHCCYTDYCNRIDLRVPSGECMPLLG

SEQ ID NO: 827142 - protein, 461 aa, Homo sapiens
VRGCCCVRPPAGAGMELGGHWDMNSAPRLVSETAERKQEQKTGTEAEAADSGAVGARRFLLCLYLVGFLDLFGVSMVVPLLSLHVKSLGASPTVAGIVGSSYGILQLFSSTLVGCWSDVVGRRSSLLACILLSALGYLLLGAATNVFLFVLARVPAGIFKHTLSISRALLSDVVPEKERPLVIGHFNTASGVGFILGPVVGGYLTELEDGFYLTAFICFLVFILNAGLVWFFPWREAKPGSTEKGLPLRKTHVLLGRSHDTVQEAATSRRARASKKTAQPWVEVVLALRNMKNLLFSEMWDIFLVRLLMAMAVMLYYSNFVLALEERFGVRPKVTGYLISYSSMLGAVAGLALGPILRLYKHNSQALLLHSSILTCTLLLLYSLAPTMGAVVLSSTLLSFSTAIGRTCITDLQLTVGGAQASGTLIGVGQSVTAVGRIIAPLLSGVAQEVSPCGPPSLGLC

SEQ ID NO: 827143 - protein, 198 aa, Homo sapiens [sequence omitted]

SEQ ID NO: 827144 - protein, 526 aa, Homo sapiens
VRGCCCVRPPAGAGMELGGHWDMNSAPRLVSETAERKQEQKTGTEAEAADSGAVGARRFLLCLYLVGFLDLFGVSMVVPLLSLHVKSLGASPTVAGIVDDVCSKRFSDLSTITKSHATSGNRYLWSLCKELAVCKKGSSYGILQLFSSTLVGCWSDVVGRRSSLLACILLSALGYLLLGAATNVFLFVLARVPAGIFKHTLSISRALLSDVVPEKERPLVIGHFNTASGVGFILGPVVGGYLTELEDGFYLTAFICFLVFILNAGLVWFFPWREAKPGSTEKGLPLRKTHVLLGRSHDTVQEAATSRRARASKKTAQPWVEVVLALRNMKNLLFSEMWDIFLVRLLMAMAVMLYYSNFVLALEERFGVRPKVTGYLISYSSMLGAVAGLALGPILRLYKHNSQALLLHSSILTCTLLLLYSLAPTMGAVVLSSTLLSFSTAIGRTCITDLQLTVGGAQASGTLIGVGQSVTAVGRIIAPLLSGVAQEVSPCGPPSLGAVLALVAIFIMSLNKRHSSGDGNSKLKSE

SEQ ID NO: 827145 - protein, 526 aa, Homo sapiens; identical to SEQ ID NO: 827144

SEQ ID NO: 827146 - protein, 488 aa, Homo sapiens
VRGCCCVRPPAGAGMELGGHWDMNSAPRLVSETAERKQEQKTGTEAEAADSGAVGARRFLLCLYLVGFLDLFGVSMVVPLLSLHVKSLGASPTVAGIVGSSYGILQLFSSTLVGCWSDVVGRRSSLLACILLSALGYLLLGAATNVFLFVLARVPAGIFKHTLSISRALLSDVVPEKERPLVIGHFNTASGVGFILGPVVGGYLTELEDGFYLTAFICFLVFILNAGLVWFFPWREAKPGSTEKGLPLRKTHVLLGRSHDTVQEAATSRRARASKKTAQPWVEVVLALRNMKNLLFSEMWDIFLVRLLMAMAVMLYYSNFVLALEERFGVRPKVTGYLISYSSMLGAVAGLALGPILRLYKHNSQALLLHSSILTCTLLLLYSLAPTMGAVVLSSTLLSFSTAIGRTCITDLQLTVGGAQASGTLIGVGQSVTAVGRIIAPLLSGVAQEVSPCGPPSLGAVLALVAIFIMSLNKRHSSGDGNSKLKSE

SEQ ID NO: 827147 - protein, 198 aa, Homo sapiens [sequence omitted]

SEQ ID NO: 827148 - protein, 526 aa, Homo sapiens; identical to SEQ ID NO: 827144

SEQ ID NO: 827149 - protein, 488 aa, Homo sapiens
MVEVWRRSVLSPSEACGLLLGSTCGHWDIFSSWNISLPTVPKPPPKPPSPPAPGAPVSRILFLTDLHWDHDYLEGTDPDCADPLCCRRGSGLPPASRPGAGYWGEYSKCDLPLRTLESLLSGLGPAGPFDMVYWTGDIPAHDVWHQTRQDQLRALTTVTALVRKFLGPVPVYPAVGNHESTPVNSFPPPFIEGNHSSRWLYEAMAKAWEPWLPAEALRTLRIGGFYALSPYPGLRLISLNMNFCSRENFWLLINSTDPAGQLQWLVGELQAAEDRGDKVHIIGHIPPGHCLKSWSWNYYRIVARYENTLAAQFFGHTHVDEFEVFYDEETLSRPLAVAFLAPSATTYIGLNPGYRVYQIDGNYSGSSHVVLDHETYILNLTQANIPGAIPHWQLLYRARETYGLPNTLPTAWHNLVYRMRGDMQLFQTFWFLYHKGHPPSEPCGTPCRLATLCAQLSARADSPALCRHLMPDGSLPEAQSLWPRPLFC

SEQ ID NO: 827150 - protein, 540 aa, Homo sapiens
MVEVWRRSVLSPSEACGLLLGSTCGHWDIFSSWNISLPTVPKPPPKPPSPPAPGAPVSRILFLTDLHWDHDYLEGTDPDCADPLCCRRGSGLPPASRPGAGYWGEYSKCDLPLRTLESLLSGLGPAGPFDMVYWTGDIPAHDVWHQTRQDQLRALTTVTALVRKFLGPVPVYPAVGNHESTPVNSFPPPFIEGNHSSRWLYEAMAKAWEPWLPAEALRTLRIGGFYALSPYPGLRLISLNMNFCSRENFWLLINSTDPAGQLQWLVGELQAAEDRGDKVHIIGHIPPGHCLKSWSWNYYRIVARYENTLAAQFFGHTHVDEFEVFYDEETLSRPLAVAFLAPSATTYIGLNPGEEAEGSLPYPGVGGIGEGGWSQSLQSMGRMCGPSLELPLLLAPPVSPTSLQGYRVYQIDGNYSGSSHVVLDHETYILNLTQANIPGAIPHWQLLYRARETYGLPNTLPTAWHNLVYRMRGDMQLFQTFWFLYHKGHPPSEPCGTPCRLATLCAQLSARADSPALCRHLMPDGSLPEAQSLWPRPLFC

SEQ ID NO: 827151 - protein, 488 aa, Homo sapiens; identical to SEQ ID NO: 827149

SEQ ID NO: 827152 - protein, 324 aa, Homo sapiens
MVEVWRRSVLSPSEACGLLLGSTCGHWDIFSSWNISLPTVPKPPPKPPSPPAPGAPVSRILFLTDLHWDHDYLEGTDPDCADPLCCRRGSGLPPASRPGAGYWGEYSKCDLPLRTLESLLSGLGPAGPFDMVYWTGDIPAHDVWHQTRQDQLRALTTVTALVRKFLGPVPVYPAVGNHESTPVNSFPPPFIEGNHSSRWLYEAMAKAWEPWLPAEALRTLRIGGFYALSPYPGLRLISLNMNFCSRENFWLLINSTDPAGQLQWLVGELQAAEDRGDKVHIIGHIPPGHCLKSWSWNYYRIVARLPCVPNRWKLLRELSRGPGP

SEQ ID NO: 827153 - protein, 360 aa, Homo sapiens
YDGLLGNNQIFPKTGLLIIVLGTIAMEGDSASEEEIWEELGVWGCMMVYWTGDIPAHDVWHQTRQDQLRALTTVTALVRKFLGPVPVYPAVGNHESTPVNSFPPPFIEGNHSSRWLYEAMAKAWEPWLPAEALRTLRYLSSVETQEGKRKVHIIGHIPPGHCLKSWSWNYYRIVARYENTLAAQFFGHTHVDEFEVFYDEETLSRPLAVAFLAPSATTYIGLNPGYRVYQIDGNYSGSSHVVLDHETYILNLTQANIPGAIPHWQLLYRARETYGLPNTLPTAWHNLVYRMRGDMQLFQTFWFLYHKGHPPSEPCGTPCRLATLCAQLSARADSPALCRHLMPDGSLPEAQSLWPRPLFC

SEQ ID NO: 827154 - protein, 158 aa, Homo sapiens
MCGPSLELPLLLAPPVSPTSLQGYRVYQIDGNYSGSSHVVLDHETYILNLTQANIPGAIPHWQLLYRARETYGLPNTLPTAWHNLVYRMRGDMQLFQTFWFLYHKGHPPSEPCGTPCRLATLCAQLSARADSPALCRHLMPDGSLPEAQSLWPRPLFC

SEQ ID NO: 827155 - protein, 158 aa, Homo sapiens; identical to SEQ ID NO: 827154

SEQ ID NO: 827156 - protein, 104 aa, Homo sapiens
MLFRTVLHLPSVDVSTAEMMPENLRKNLTELLRAALKIRICLEKQPDPFAPRQKKTLQEVQEDFVFSKYRHRALLLPELRAACAQELDCLEAAVLSQPWSRGLS

SEQ ID NO: 827157 - protein, 444 aa, Homo sapiens
MVEVWRRSVLSPSEACGLLLGSTCGHWDIFSSWNISLPTVPKPPPKPPSPPAPGAPVSRILFLTDLHWDHDYLEGTDPDCADPLCCRRGSGLPPASRPGAGYWGEYSKCDLPLRTLESLLSGLGPAGPFDMVYWTGDIPAHDVWHQTRQDQLRALTTVTALVRKFLGPVPVYPAVGNHESTPVNSFPPPFIEGNHSSRWLYEAMAKAWEPWLPAEALRTLRYLSSVETQEGKRKVHIIGHIPPGHCLKSWSWNYYRIVARYENTLAAQFFGHTHVDEFEVFYDEETLSRPLAVAFLAPSATTYIGLNPGYRVYQIDGNYSGSSHVVLDHETYILNLTQANIPGAIPHWQLLYRARETYGLPNTLPTAWHNLVYRMRGDMQLFQTFWFLYHKGHPPSEPCGTPCRLATLCAQLSARADSPALCRHLMPDGSLPEAQSLWPRPLFC

SEQ ID NO: 827158 - protein, 501 aa, Homo sapiens
MVEVWRRSVLSPSEACGLLLGSTCGHWDIFSSWNISLPTVPKPPPKPPSPPAPGAPVSRILFLTDLHWDHDYLEGTDPDCADPLCCRRGSGLPPASRPGAGYWGEYSKCDLPLRTLESLLSGLGPAGPFDMVYWTGDIPAHDVWHQTRQDQLRALTTVTALVRKFLGPVPVYPAVGNHESTPVNSFPPPFIEGNHSSRWLYEAMAKAWEPWLPAEALRTLRYLSSVETQKGKERIGGFYALSPYPGLRLISLNMNFCSRENFWLLINSTDPAGQLQWLVGELQAAEDRGDKVHIIGHIPPGHCLKSWSWNYYRIVARYENTLAAQFFGHTHVDEFEVFYDEETLSRPLAVAFLAPSATTYIGLNPGYRVYQIDGNYSGSSHVVLDHETYILNLTQANIPGAIPHWQLLYRARETYGLPNTLPTAWHNLVYRMRGDMQLFQTFWFLYHKGHPPSEPCGTPCRLATLCAQLSARADSPALCRHLMPDGSLPEAQSLWPRPLFC

SEQ ID NO: 827159 - protein, 404 aa, Homo sapiens
YDGLLGNNQIFPKTGLLIIVLGTIAMEGDSASEEEIWEELGVWGCMMVYWTGDIPAHDVWHQTRQDQLRALTTVTALVRKFLGPVPVYPAVGNHESTPVNSFPPPFIEGNHSSRWLYEAMAKAWEPWLPAEALRTLRIGGFYALSPYPGLRLISLNMNFCSRENFWLLINSTDPAGQLQWLVGELQAAEDRGDKVHIIGHIPPGHCLKSWSWNYYRIVARYENTLAAQFFGHTHVDEFEVFYDEETLSRPLAVAFLAPSATTYIGLNPGYRVYQIDGNYSGSSHVVLDHETYILNLTQANIPGAIPHWQLLYRARETYGLPNTLPTAWHNLVYRMRGDMQLFQTFWFLYHKGHPPSEPCGTPCRLATLCAQLSARADSPALCRHLMPDGSLPEAQSLWPRPLFC

SEQ ID NO: 827160 - protein, 318 aa, Homo sapiens
VEKLPVRYGSRYVCLGQIQDVGLMVQDHVRAPGVVSIYLVHTVTRIKADVGSCTGCQEGYSQLAGSESLNMNFCSRENFWLLINSTDPAGQLQWLVGELQAAEDRGDKVHIIGHIPPGHCLKSWSWNYYRIVARYENTLAAQFFGHTHVDEFEVFYDEETLSRPLAVAFLAPSATTYIGLNPGYRVYQIDGNYSGSSHVVLDHETYILNLTQANIPGAIPHWQLLYRARETYGLPNTLPTAWHNLVYRMRGDMQLFQTFWFLYHKGHPPSEPCGTPCRLATLCAQLSARADSPALCRHLMPDGSLPEAQSLWPRPLFC

SEQ ID NO: 827161 - protein, 132 aa, Homo sapiens
MENAHTKTVEEVLGHFGVNESTGLSLEQVKKLKERWGSNELPAEERSAAGARRGRESQGRWLTGLHLVGFGSAPADSCGRRVGPARRPRGRERGCGPRLAFPGPLRFSGPRPFRRARLGGFSPAAAGPGGGR

SEQ ID NO: 827162 - protein, 111 aa, Homo sapiens
MFILDRVEGDTCSLNEFTITGSTYAPIGEVHKDDKPVNCHQYDGLVELATICALCNDSALDYNEAKGVYEKVGEATETALTCLVEKMNVFDTELKGLSKIERANACNSVSI

SEQ ID NO: 827163 - protein, 1043 aa, Homo sapiens
MENAHTKTVEEVLGHFGVNESTGLSLEQVKKLKERWGSNELPAEEGKTLLELVIEQFEDLLVRILLLAACISFVLAWFEEGEETITAFVEPFVILLILVANAIVGVWQERNAENAIEALKEYEPEMGKVYRQDRKSVQRIKAKDIVPGDIVEIAVGDKVPADIRLTSIKSTTLRVDQSILTGESVSVIKHTDPVPDPRAVNQDKKNMLFSGTNIAAGKAMGVVVATGVNTEIGKIRDEMVATEQERTPLQQKLDEFGEQLSKVISLICIAVWIINIGHFNDPVHGGSWIRGAIYYFKIAVALAVAAIPEGLPAVITTCLALGTRRMAKKNAIVRSLPSVETLGCTSVICSDKTGTLTTNQMSVCRMFILDRVEGDTCSLNEFTITGSTYAPIGEVHKDDKPVNCHQYDGLVELATICALCNDSALDYNEAKGVYEKVGEATETALTCLVEKMNVFDTELKGLSKIERANACNSVIKQLMKKEFTLEFSRDRKSMSVYCTPNKPSRTSMSKMFVKGAPEGVIDRCTHIRVGSTKVPMTSGVKQKIMSVIREWGSGSDTLRCLALATHDNPLRREEMHLEDSANFIKYETNLTFVGCVGMLDPPRIEVASSVKLCRQAGIRVIMITGDNKGTAVAICRRIGIFGQDEDVTSKAFTGREFDELNPSAQRDACLNARCFARVEPSHKSKIVEFLQSFDEITAMTGDGVNDAPALKKAEIGIAMGSGTAVAKTASEMVLADDNFSTIVAAVEEGRAIYNNMKQFIRYLISSNVGEVVCIFLTAALGFPEALIPVQLLWVNLVTDGLPATALGFNPPDLDIMNKPPRNPKEPLISGWLFFRYLAIGCYVGAATVGAAAWWFIAADGGPRVSFYQLSHFLQCKEDNPDFEGVDCAIFESPYPMTMALSVLVTIEMCNALNSLSENQSLLRMPPWENIWLVGSICLSMSLHFLILYVEPLPLIFQITPLNVTQWLMVLKISLPVILMDETLKFVARNYLEPAGKECVQPATKSCSFSACTDGISWPFVLLIMPLVIWVYSTDTNFSDMFWS

SEQ ID NO: 827164 - protein, 1043 aa, Homo sapiens; identical to SEQ ID NO: 827163

SEQ ID NO: 827165 - protein, 880 aa, Homo sapiens
RREEMHLEDSANFIKYETNLTFVGCVGMLDPPENRGVNQDKKNMLFSGTNIAAGKAMGVVVATGVNTEIGKIRDEMVATEQERTPLQQKLDEFGEQLSKVISLICIAVWIINIGHFNDPVHGGSWIRGAIYYFKIAVALAVAAIPEGLPAVITTCLALGTRRMAKKNAIVRSLPSVETLGCTSVICSDKTGTLTTNQMSVCRMFILDRVEGDTCSLNEFTITGSTYAPIGEVHKDDKPVNCHQYDGLVELATICALCNDSALDYNEAKGVYEKVGEATETALTCLVEKMNVFDTELKGLSKIERANACNSVIKQLMKKEFTLEFSRDRKSMSVYCTPNKPSRTSMSKMFVKGAPEGVIDRCTHIRVGSTKVPMTSGVKQKIMSVIREWGSGSDTLRCLALATHDNPLRREEMHLEDSANFIKYETNLTFVGCVGMLDPPRIEVASSVKLCRQAGIRVIMITGDNKGTAVAICRRIGIFGQDEDVTSKAFTGREFDELNPSAQRDACLNARCFARVEPSHKSKIVEFLQSFDEITAMTGDGVNDAPALKKAEIGIAMGSGTAVAKTASEMVLADDNFSTIVAAVEEGRAIYNNMKQFIRYLISSNVGEVVCIFLTAALGFPEALIPVQLLWVNLVTDGLPATALGFNPPDLDIMNKPPRNPKEPLISGWLFFRYLAIGCYVGAATVGAAAWWFIAADGGPRVSFYQLSHFLQCKEDNPDFEGVDCAIFESPYPMTMALSVLVTIEMCNALNSLSENQSLLRMPPWENIWLVGSICLSMSLHFLILYVEPLPLIFQITPLNVTQWLMVLKISLPVILMDETLKFVARNYLEPAGKECVQPATKSCSFSACTDGISWPFVLLIMPLVIWVYSTDTNFSDMFWS

SEQ ID NO: 827166 - protein, 1043 aa, Homo sapiens; identical to SEQ ID NO: 827163

SEQ ID NO: 827167 - protein, 468 aa, Homo sapiens
MVLRTSAFIKYETNLTFVGCVGMLDPPRIEVASSVKLCRQAGIRVIMITGDNKGTAVAICRRIGIFGQDEDVTSKAFTGREFDELNPSAQRDACLNARCFARVEPSHKSKIVEFLQSFDEITAMTGDGVNDAPALKKAEIGIAMGSGTAVAKTASEMVLADDNFSTIVAAVEEGRAIYNNMKQFIRYLISSNVGEVVCIFLTAALGFPEALIPVQLLWVNLVTDGLPATALGFNPPDLDIMNKPPRNPKEPLISGWLFFRYLAIGCYVGAATVGAAAWWFIAADGGPRVSFYQLSHFLQCKEDNPDFEGVDCAIFESPYPMTMALSVLVTIEMCNALNSLSENQSLLRMPPWENIWLVGSICLSMSLHFLILYVEPLPLIFQITPLNVTQWLMVLKISLPVILMDETLKFVARNYLEPAGKECVQPATKSCSFSACTDGISWPFVLLIMPLVIWVYSTDTNFSDMFWS

SEQ ID NO: 827168 - protein, 1043 aa, Homo sapiens; identical to SEQ ID NO: 827163

SEQ ID NO: 827169 - protein, 345 aa, Homo sapiens
MTGDGVNDAPALKKAEIGIAMGSGTAVAKTASEMVLADDNFSTIVAAVEEGRAIYNNMKQFIRYLISSNVGEVVCIFLTAALGFPEALIPVQLLWVNLVTDGLPATALGFNPPDLDIMNKPPRNPKEPLISGWLFFRYLAIGCYVGAATVGAAAWWFIAADGGPRVSFYQLSHFLQCKEDNPDFEGVDCAIFESPYPMTMALSVLVTIEMCNALNSLSENQSLLRMPPWENIWLVGSICLSMSLHFLILYVEPLPLIFQITPLNVTQWLMVLKISLPVILMDETLKFVARNYLEPAGKECVQPATKSCSFSACTDGISWPFVLLIMPLVIWVYSTDTNFSDMFWS

SEQ ID NO: 827170 - protein, 1043 aa, Homo sapiens; identical to SEQ ID NO: 827163

SEQ ID NO: 827171 - protein, 288 aa, Homo sapiens
MRERMNCFMLANVGEVVCIFLTAALGFPEALIPVQLLWVNLVTDGLPATALGFNPPDLDIMNKPPRNPKEPLISGWLFFRYLAIGCYVGAATVGAAAWWFIAADGGPRVSFYQLSHFLQCKEDNPDFEGVDCAIFESPYPMTMALSVLVTIEMCNALNSLSENQSLLRMPPWENIWLVGSICLSMSLHFLILYVEPLPLIFQITPLNVTQWLMVLKISLPVILMDETLKFVARNYLEPAGKECVQPATKSCSFSACTDGISWPFVLLIMPLVIWVYSTDTNFSDMFWS

SEQ ID NO: 827172 - protein, 1043 aa, Homo sapiens; identical to SEQ ID NO: 827163

SEQ ID NO: 827173 - protein, 1043 aa, Homo sapiens; identical to SEQ ID NO: 827163

SEQ ID NO: 827174 - protein, 1043 aa, Homo sapiens; identical to SEQ ID NO: 827163

SEQ ID NO: 827175 - protein, 267 aa, Homo sapiens
MENAHTKTVEEVLGHFGVNESTGLSLEQVKKLKERWGSNELPAEEGKTLLELVIEQFEDLLVRILLLAACISFVLAWFEEGEETITAFVEPFVILLILVANAIVGVWQERNAENAIEALKEYEPEMGKVYRQDRKSVQRIKAKDIVPGDIVEIAVGDKVPADIRLTSIKSTTLRVDQSILTGESVSVIKHTDPVPDPRAVNQDKKNMLFSGTNIAAGKAMGVVVATGVNTEIGKIRDEMVALFPLLGYWLLRRRCYRGCCCMVVHCC

SEQ ID NO: 827176 - protein, 109 aa, Homo sapiens
DPFMSGSDSTSSSLCRTLPLIFQITPLNVTQWLMVLKISLPVILMDETLKFVARNYLEPAGKECVQPATKSCSFSACTDGISWPFVLLIMPLVIWVYSTDTNFSDMFWS

SEQ ID NO: 827177 - protein, 1043 aa, Homo sapiens; identical to SEQ ID NO: 827163

SEQ ID NO: 827178 - protein, 1043 aa, Homo sapiens; identical to SEQ ID NO: 827163

SEQ ID NO: 827179 - protein, 930 aa, Homo sapiens
MENAHTKTVEEVLGHFGVNESTGLSLEQVKKLKERWGSNELPAEEGKTLLELVIEQFEDLLVRILLLAACISFVLAWFEEGEETITAFVEPFVILLILVANAIVGVWQERNAENAIEALKEYEPEMGKVYRQDRKSVQRIKAKDIVPGDIVEIAVGDKVPADIRLTSIKSTTLRVDQSILTGESVSVIKHTDPVPDPRAVNQDKKNMLFSGTNIAAGKAMGVVVATGVNTEIGKIRDEMVATEQERTPLQQKLDEFGEQLSKVISLICIAVWIINIGHFNDPVHGGSWIRGAIYYFKIAVALAVAAIPEGLPAVITTCLALGTRRMAKKNAIVRSLPSVETLGCTSVICSDKTGTLTTNQMSVCRMFILDRVEGDTCSLNEFTITGSTYAPIGEVHKDDKPVNCHQYDGLVELATICALCNDSALDYNEAKGVYEKVGEATETALTCLVEKMNVFDTELKGLSKIERANACNSVIKQLMKKEFTLEFSRDRKSMSVYCTPNKPSRTSMSKMFVKGAPEGVIDRCTHIRVGSTKVPMTSGVKQKIMSVIREWGSGSDTLRCLALATHDNPLRREEMHLEDSANFIKYETNLTFVGCVGMLDPPRIEVASSVKLCRQAGIRVIMITGDNKGTAVAICRRIGIFGQDEDVTSKAFTGREFDELNPSAQRDACLNARCFARVEPSHKSKIVEFLQSFDEITAMTGDGVNDAPALKKAEIGIAMGSGTAVAKTASEMVLADDNFSTIVAAVEEGRAIYNNMKQFIRYLISSNVGEVVCIFLTAALGFPEALIPVQLLWVNLVTDGLPATALGFNPPDLDIMNKPPRNPKEPLISGWLFFRYLAIGCYVGAATVGAAAWWFIAADGGPRVSFYQLSHFLQCKEDNPDFEGVDCAIFESPYPMTMALSVLVTIEMCNALNRTSGSWAPSACPCHSTS

SEQ ID NO: 827180 - protein, 82 aa, Homo sapiens
LRYGEFRRPASDQYDVQLSLQFVLKGAFGPKGGVKKTLVVLCLRGRRLLLCCVGSHRNCILNVQALIVICDVHFMQVSAGLV

SEQ ID NO: 827181 - protein, 913 aa, Homo sapiens
MENAHTKTVEEVLGHFGVNESTGLSLEQVKKLKERWGSNELPAEEGKTLLELVIEQFEDLLVRILLLAACISFVLAWFEEGEETITAFVEPFVILLILVANAIVGVWQERNAENAIEALKEYEPEMGKVYRQDRKSVQRIKAKDIVPGDIVEIAVGDKVPADIRLTSIKSTTLRVDQSILTGESVSVIKHTDPVPDPRAVNQDKKNMLFSGTNIAAGKAMGVVVATGVNTEIGKIRDEMVATEQERTPLQQKLDEFGEQLSKVISLICIAVWIINIGHFNDPVHGGSWIRGAIYYFKIAVALAVAAIPEGLPAVITTCLALGTRRMAKKNAIVRSLPSVETLGCTSVICSDKTGTLTTNQMSVCRMFILDRVEGDTCSLNEFTITGSTYAPIGEVHKDDKPVNCHQYDGLVELATICALCNDSALDYNEAKGVYEKVGEATETALTCLVEKMNVFDTELKGLSKIERANACNSVIKQLMKKEFTLEFSRDRKSMSVYCTPNKPSRTSMSKMFVKGAPEGVIDRCTHIRVGSTKVPMTSGVKQKIMSVIREWGSGSDTLRCLALATHDNPLRREEMHLEDSANFIKYETNLTFVGCVGMLDPPRIEVASSVKLCRQAGIRVIMITGDNKGTAVAICRRIGIFGQDEDVTSKAFTGREFDELNPSAQRDACLNARCFARVEPSHKSKIVEFLQSFDEITAMTGDGVNDAPALKKAEIGIAMGSGTAVAKTASEMVLADDNFSTIVAAVEEGRAIYNNMKQFIRYLISSNVGEVVCIFLTAALGFPEALIPVQLLWVNLVTDGLPATALGFNPPDLDIMNKPPRNPKEPLISGWLFFRYLAIGCYVGAATVGAAAWWFIAADGGPRVSFYQLSHFLQCKEDNPDFEGVDCAIFESPYPMTMALSVLSKSEMLVLKP

SEQ ID NO: 827182 - protein, 112 aa, Homo sapiens [sequence omitted]

SEQ ID NO: 827183 - protein, 1043 aa, Homo sapiens; identical to SEQ ID NO: 827163

SEQ ID NO: 827184 - protein, 112 aa, Homo sapiens [sequence omitted]

SEQ ID NO: 827185 - protein, 135 aa, Homo sapiens
KSHRCMPRTSRIGGRLHTLFTRFQVVAGHKLERLIHENHGQGDFQHHQPLGHVQRCDLEDEWQGFDIEDRKAVLLLAAHFSINLTLCTTNQDLVLLPVSLLSQLQRLCLPHGVFLQSLYSVARRHEESVSLSQCF

SEQ ID NO: 827186 - protein, 1025 aa, Homo sapiens
MENAHTKTVEEVLGHFGVNESTGLSLEQVKKLKERWGSNELPAEEGKTLLELVIEQFEDLLVRILLLAACISFVLAWFEEGEETITAFVEPFVILLILVANAIVGVWQERNAENAIEALKEYEPEMGKVYRQDRKSVQRIKAKDIVPGDIVEIAVGDKVPADIRLTSIKSTTLRVDQSILTGESVSVIKHTDPVPDPRAVNQDKKNMLFSGTNIAAGKAMGVVVATGVNTEIGKIRDEMVATEQERTPLQQKLDEFGEQLSKVISLICIAVWIINIGHFNDPVHGGSWIRGAIYYFKIAVALAVAAIPEGLPAVITTCLALGTRRMAKKNAIVRSLPSVETLGCTSVICSDKTGTLTTNQMSVCRMFILDRVEGDTCSLNEFTITGSTYAPIGEVHKDDKPVNCHQYDGLVELATICALCNDSALDYNEAKGVYEKVGEATETALTCLVEKMNVFDTELKGLSKIERANACNSVIKQLMKKEFTLEFSRDRKSMSVYCTPNKPSRTSMSKMFVKGAPEGVIDRCTHIRVGSTKVPMTSGVKQKIMSVIREWGSGSDTLRCLALATHDNPLRREEMHLEDSANFIKYETNLTFVGCVGMLDPPRIEVASSVKLCRQAGIRVIMITGDNKGTAVAICRRIGIFGQDEDVTSKAFTGREFDELNPSAQRDACLNARCFARVEPSHKSKIVEFLQSFDEITAMTGDGVNDAPALKKAEIGIAMGSGTAVAKTASEMVLADDNFSTIVAAVEEGRAIYNNMKQFIRYLISSNVGEVVCIFLTAALGFPEALIPVQLLWVNLVTDGLPATALGFNPPDLDIMNKPPRNPKEPLISGWLFFRYLAIGCYVGAATVGAAAWWFIAADGGPRVSFYQLSHFLQCKEDNPDFEGVDCAIFESPYPMTMALSVLVTIEMCNALNSLSENQSLLRMPPWENIWLVGSICLSMSLHFLILYVEPLPLIFQITPLNVTQWLMVLKISLPVILMDETLKFVARNYLEPGLLKISLPVILMDETLKEIFSTISHENLLARD

SEQ ID NO: 827187 - protein, 374 aa, Homo sapiens
MENAHTKTVEEVLGHFGVNESTGLSLEQVKKLKERWGSNELPAEEGKTLLELVIEQFEDLLVRILLLAACISFVLAWFEEGEETITAFVEPFVILLILVANAIVGVWQERNAENAIEALKEYEPEMGKVYRQDRKSVQRIKAKDIVPGDIVEIAVGDKVPADIRLTSIKSTTLRVDQSILTGESVSVIKHTDPVPDPRAVNQDKKNMLFSGTNIAAGKAMGVVVATGVNTEIGKIRDEMVATEQERTPLQQKLDEFGEQLSKVISLICIAVWIINIGHFNDPVHGGSWIRGAIYYFKIAVALAVAAIPEGLPAVITTCLALGTRRMAKKNAIVRSLPSDGNPWLYFCYLLRQDWYTYNKPDVSLQDVHSGQSGR

SEQ ID NO: 827188 - protein, 450 aa, Homo sapiens
MENAHTKTVEEVLGHFGVNESTGLSLEQVKKLKERWGSNELPAEEGKTLLELVIEQFEDLLVRILLLAACISFVLAWFEEGEETITAFVEPFVILLILVANAIVGVWQERNAENAIEALKEYEPEMGKVYRQDRKSVQRIKAKDIVPGDIVEIAVGDKVPADIRLTSIKSTTLRVDQSILTGESVSVIKHTDPVPDPRAVNQDKKNMLFSGTNIAAGKAMGVVVATGVNTEIGKIRDEMVATEQERTPLQQKLDEFGEQLSKVISLICIAVWIINIGHFNDPVHGGSWIRGAIYYFKIAVALAVAAIPEGLPAVITTCLALGTRRMAKKNAIVRSLPSVETLGCTSVICSDKTGTLTTNQMSVCRMFILDRVEGDTCSLNEFTITGSTYAPIGEVHKDDKPVNCHQYDGLVELATICALCNDSALDYNEAKGVYEKNVSLGKQLQFVNLK

SEQ ID NO: 827189 - protein, 370 aa, Homo sapiens
MENAHTKTVEEVLGHFGVNESTGLSLEQVKKLKERWGSNELPAEEGKTLLELVIEQFEDLLVRILLLAACISFVLAWFEEGEETITAFVEPFVILLILVANAIVGVWQERNAENAIEALKEYEPEMGKVYRQDRKSVQRIKAKDIVPGDIVEIAVGDKVPADIRLTSIKSTTLRVDQSILTGESVSVIKHTDPVPDPRAVNQDKKNMLFSGTNIAAGKAMGVVVATGVNTEIGKIRDEMVATEQERTPLQQKLDEFGEQLSKVISLICIAVWIINIGHFNDPVHGGSWIRGAIYYFKIAVALAVAAIPEGLPAVITTCLALGTRRMAKKNAIVRSLPSVETLGCTSVICSDKTGTLTTNQMSVCRVRGVI

SEQ ID NO: 827190 - protein, 189 aa, Homo sapiens
MENAHTKTVEEVLGHFGVNESTGLSLEQVKKLKERWGSNELPAEEGKTLLELVIEQFEDLLVRILLLAACISFVLAWFEEGEETITAFVEPFVILLILVANAIVGVWQERNAENAIEALKEYEPEMGKVYRQDRKSVQRIKAKDIVPGDIVEIAVGDKVPADIRLTSIKSTTLRVDQSILTGKYDILSH

SEQ ID NO: 827191 - protein, 92 aa, Homo sapiens
GAFPHLSLLCSLSENQSLLRMPPWENIWLVGSICLSMSLHFLILYVEPLPVSGWVGLGTSHLLPGEAGGVTRLPCVSAHLPDHTAERDPVAD

SEQ ID NO: 827192 - protein, 997 aa, Homo sapiens
MENAHTKTVEEVLGHFGVNESTGLSLEQVKKLKERWGSNELPAEEGKTLLELVIEQFEDLLVRILLLAACISFVLAWFEEGEETITAFVEPFVILLILVANAIVGVWQERNAENAIEALKEYEPEMGKVYRQDRKSVQRIKAKDIVPGDIVEIAVGDKVPADIRLTSIKSTTLRVDQSILTGESVSVIKHTDPVPDPRAVNQDKKNMLFSGTNIAAGKAMGVVVATGVNTEIGKIRDEMVATEQERTPLQQKLDEFGEQLSKVISLICIAVWIINIGHFNDPVHGGSWIRGAIYYFKIAVALAVAAIPEGLPAVITTCLALGTRRMAKKNAIVRSLPSVETLGCTSVICSDKTGTLTTNQMSVCRMFILDRVEGDTCSLNEFTITGSTYAPIGEVHKDDKPVNCHQYDGLVELATICALCNDSALDYNEAKGVYEKVGEATETALTCLVEKMNVFDTELKGLSKIERANACNSVIKQLMKKEFTLEFSRDRKSMSVYCTPNKPSRTSMSKMFVKGAPEGVIDRCTHIRVGSTKVPMTSGVKQKIMSVIREWGSGSDTLRCLALATHDNPLRREEMHLEDSANFIKYETNLTFVGCVGMLDPPRIEVASSVKLCRQAGIRVIMITGDNKGTAVAICRRIGIFGQDEDVTSKAFTGREFDELNPSAQRDACLNARCFARVEPSHKSKIVEFLQSFDEITAMTGDGVNDAPALKKAEIGIAMGSGTAVAKTASEMVLADDNFSTIVAAVEEGRAIYNNMKQFIRYLISSNVGEVVCIFLTAALGFPEALIPVQLLWVNLVTDGLPATALGFNPPDLDIMNKPPRNPKEPLISGWLFFRYLAIGCYVGAATVGAAAWWFIAADGGPRVSFYQLSHFLQCKEDNPDFEGVDCAIFESPYPMTMALSVLVTIEMCNALNSLSENQSLLRMPPWENIWLVGSICLSMSLHFLILYVEPLPLIFQITPLNVTQWLMVLKISLPVILMDETLKFVARNYLEPAILE

SEQ ID NO: 827193 - protein, 1043 aa, Homo sapiens; identical to SEQ ID NO: 827163

SEQ ID NO: 827194 - protein, 918 aa, Homo sapiens
MGKVYRQDRKSVQRIKAKDIVPGDIVEIAVGDKVPADIRLTSIKSTTLRVDQSILTGESVSVIKHTDPVPDPRAVNQDKKNMLFSGTNIAAGKAMGVVVATGVNTEIGKIRDEMVATEQERTPLQQKLDEFGEQLSKVISLICIAVWIINIGHFNDPVHGGSWIRGAIYYFKIAVALAVAAIPEGLPAVITTCLALGTRRMAKKNAIVRSLPSVETLGCTSVICSDKTGTLTTNQMSVCRMFILDRVEGDTCSLNEFTITGSTYAPIGEVHKDDKPVNCHQYDGLVELATICALCNDSALDYNEAKGVYEKVGEATETALTCLVEKMNVFDTELKGLSKIERANACNSVIKQLMKKEFTLEFSRDRKSMSVYCTPNKPSRTSMSKMFVKGAPEGVIDRCTHIRVGSTKVPMTSGVKQKIMSVIREWGSGSDTLRCLALATHDNPLRREEMHLEDSANFIKYETNLTFVGCVGMLDPPRIEVASSVKLCRQAGIRVIMITGDNKGTAVAICRRIGIFGQDEDVTSKAFTGREFDELNPSAQRDACLNARCFARVEPSHKSKIVEFLQSFDEITAMTGDGVNDAPALKKAEIGIAMGSGTAVAKTASEMVLADDNFSTIVAAVEEGRAIYNNMKQFIRYLISSNVGEVVCIFLTAALGFPEALIPVQLLWVNLVTDGLPATALGFNPPDLDIMNKPPRNPKEPLISGWLFFRYLAIGCYVGAATVGAAAWWFIAADGGPRVSFYQLSHFLQCKEDNPDFEGVDCAIFESPYPMTMALSVLVTIEMCNALNSLSENQSLLRMPPWENIWLVGSICLSMSLHFLILYVEPLPLIFQITPLNVTQWLMVLKISLPVILMDETLKFVARNYLEPAGKECVQPATKSCSFSACTDGISWPFVLLIMPLVIWVYSTDTNFSDMFWS

SEQ ID NO: 827195 - protein, 2717 aa, Homo sapiens
MPRTKQIHPRNLRDKIEEAQKELNGAEVSKKEILQAGVKGTSESLKGVKRKKIVAENHLKKIPKSPLRNPLQAKHKQNTEESSFAVLHSASESHKKQNYIPVKNGKQFTKQNGETPGIIAEASKSEESVSPKKPLFLQQPSELRRWRSEGADPAKFSDLDEQCDSSSLSSKTRTDNSECISSHCGTTSPSYTNTAFDVLLKAMEPELSTLSQKGSPCAIKTEKLRPNKTARSPPKLKNSSMDAPNQTSQELVAESQSSCTSYTVHMSAAQKNEQGAMQSASHLYHQHEHFVPKSNQHNQQLPGCSGFTGSLTNLQNQENAKLEQVYNIAVTSSVGLTSPSSRSQVTPQNQQMDSASPLSISPANSTQSPPMPIYNSTHVASVVNQSVEQMCNLLLKDQKPKKQGKYICEYCNRACAKPSVLLKHIRSHTGERPYPCVTCGFSFKTKSNLYKHKKSHAHTIKLGLVLQPDAGGLFLSHESPKALSIHSDVEDSGESEEEGATDERQHDLGAMELQPVHIIKRMSNAETLLKSSFTPSSPENVIGDFLLQDRSAESQAVTELPKVVVHHVTVSPLRTDSPKAMDPKPELSSAQKQKDLQVTNVQPLSANMSQGGVSRLETNENSHQKGDMNPLEGKQDSHVGTVHAQLQRQQATDYSQEQQGKLLSPRSLGSTDSGYFSRSESADQTVSPPTPFARRFPAQNKTLEGVTDPLQLLSPRQHPLLCHREKALLLPGQMRPPLATKTLEERISKLISDNEALVDDKQLDSVKPRRTSLSRRGSIDSPKSYIFKDSFQFDLKPVGRRTSSSSDIPKSPFTPTEKSKQVFLLSVPSLDCLPITRSNSMPTTGYSAVPANIIPPPHPLRGSQSFDDKIGAFYDDVFVSGPNAPVPQSGHPRTLVRQAAIEDSSANESHVLGTGQSLDESHQGCHAAGEAMSVRSKALAQGPHIEKKKSHQGRGTMFECETCRNRYRKLENFENHKKFYCSELHGPKTKVAMREPEHSPVPGGLQPQILHYRVAGSSGIWEQTPQIRKRRKMKSVGDDEELQQNESGTSPKSSEGLQFQNALGCNPSLPKHNVTIRSDQQHKNIQLQNSHIHLVARGPEQTMDPKLSTIMEQQISSAAQDKIELQRHGTGISVIQHTNSLSRPNSFDKPEPFERASPVSFQELNRTGKSGSLKVIGISQEESHPSRDGSHPHQLALSDALRGELQESSRKSPSERHVLGQPSRLVRQHNIQVPEILVTEEPDRDLEAQCHDQEKSEKFSWPQRSETLSKLPTEKLPPKKKRLRLAEIEHSSTESSFDSTLSRSLSRESSLSHTSSFSASLDIEDVSKTEASPKIDFLNKAEFLMIPAGLNTLNVPGCHREMRRTASEQINCTQTSMEVSDLRSKSFDCGSITPPQTTPLTELQPPSSPSRVGVTGHVPLLERRRGPLVRQISLNIAPDSHLSPVHPTSFQNTALPSVNAVPYQGPQLTSTSLAEFSANTLHSQTQVKDLQAETSNSSSTNVFPVQQLCDINLLNQIHAPPSHQSTQLSLQVSTQGSKPDKNSVLSGSSKSEDCFAPKYQLHCQVFTSGPSCSSNPVHSLPNQVISDPVGTDHCVTSATLPTKLIDSMSNSHPLLPPELRPLGSQVQKVPSSFMLPIRLQSSVPAYCFATLTSLPQILVTQDLPNQPICQTNHSVVPISEEQNSVPTLQKGHQNALPNPEKEFLCENVFSEMSQNSSLSESLPITQKISVGRLSPQQESSASSKRMLSPANSLDIAMEKHQKRAKDENGAVCATDVRPLEALSSRVNEASKQKKPILVRQVCTTEPLDGVMLEKDVFSQPEISNEAVNLTNVLPADNSSTGCSKFVVIEPISELQEFENIKSSTSLTLTVRSSPAPSENTHISPLKCTDNNQERKSPGVKNQGDKVNIQEQSQQPVTSLSLFNIKDTQQLAFPSLKTTTNFTWCYLLRQKSLHLPQKDQKTSAYTDWTVSASNPNPLGLPTKVALALLNSKQNTGKSLYCQAITTHSKSDLLVYSSKWKSSLSKRALGNQKSTVVEFSNKDASEINSEQDKENSLIKSEPRRIKIFDGGYKSNEEYVYVRGRGRGKYICEECGIRCKKPSMLKKHIRTHTDVRPYHCTYCNFSFKTKGNLTKHMKSKAHSKKCVDLGVSVGLIDEQDTEESDEKQRFSYERSGYDLEESDGPDEDDNENEDDDEDSQAESVLSATPSVTASPQHLPSRSSLQDPVSTDEDVRITDCFSGVHTDPMDVLPRALLTRMTVLSTAQSDYNRKTLSPGKARQRAARDENDTIPSVDTSRSPCHQMSVDYPESEEILRSSMAGKAVAITQSPSSVRLPPAAAEHSPQTAAGMPSVASPHPDPQEQKQQITLQPTPGLPSPHTHLFSHLPLHSQQQSRTPYNMVPVGGIHVVPAGLTYSTFVPLQAGPVQLTIPAVSVVHRTLGTHRNTVTEVSGTTNPAGVAELSSVVPCIPIGQIRVPGLQNLSTPGLQSLPSLSMETVNIVGLANTNMAPQVHPPGLALNAVGLQVLTANPSSQSSPAPQAHIPGLQILNIALPTLIPSVSQVAVDAQGAPEMPASQSKACETQPKQTSVASANQVSRTESPQGLPTVQRENAKKVLNPPAPAGDHARLDGLSKMDTEKAASANHVKPKPELTSIQGQPASTSQPLLKAHSEVFTKPSGQQTLSPDRQVPRPTALPRRQPTVHFSDVSSDDDEDRLVIAT
